United States Patent Application Publication US 2011/0214205 A1 - sequence listing, part 17

SEQ ID NO: 70411 - protein, 438 aa, Setaria italica
  Transcript Sequence Number=SeqID_4437
  Gene Ontology: Mol. function=peptidase activity; Cellular component =chloroplast
  Homolog annotation: Hit_ID=Q8LGH3; Match level="QueryCoverage=88%, HitCoverage=88%, E-value=1e-138, Identity=57%"; Hit description=4 -methyl-5(B-hydroxyethyl)-thiazole monophosphate biosynthesis protein, putative
  Pfam annotation: Domain name=DJ-1_PfpI; Domain location=285-423; Score=128.8; E_value=1.8e-35; Accession=PF01965.16; Description=DJ -1PfpI family
  Pfam annotation: Domain name=DJ-1_PfpI; Domain location=79-219; Score= 121.1; E_value=3.6e-33; Accession=PF01965.16; Description=DJ-1PfpI family
  Pfam module annotation: Pfam domain module=DJ-1_PfpI::DJ-1_PfpI; Domain location=285-423::79-219
  Subcellular localization annotation: CTP_CleavageSite=42; ConfidenceScore=5.85e-01
LASALALSKTPRAPSSGSHLSPPPLARRLQTLTRALASSSPQAMASAPAPKKVLVPVANGTEPMEAVITIDVLRRAGADVTVASVEPGSATVAAAWGVKLAADALLTDIADAEFDLISLPGGMPGSSTFRDCKLLENMVKKQVEKGKLYAAICAAPAMALGTWGLLNGLKATCYPSFMDKLPSEVHAVESRVQIDGKCVTSRGPGTAMEYSVVLVEQLYGKEKAKEVAGPMVMRPQHGVEFSMKELNSISWNVGETPNILVPIANGTEEMEATMIIDILRRAKANVVVASLEDKLEVAASRKVKMIADVLLDDALKQQYYLILLPGGLGGAEAYAKSDKLMGLIKKQAEANKLYGAICASPAVALEPHGLLKGKKATSYPAMWNKLADQSECKNRVVVDGNLITSQGPGTSMEFSLAIVEKLFGRERALELAKTLVFI

SEQ ID NO: 70412 - protein, 423 aa, Setaria italica
  Transcript Sequence Number=SeqID_4438
  Gene Ontology: Mol. function=high molecular weight B cell growth factor receptor binding; Cellular component=extracellular region; Biological process=cell proliferation
  Homolog annotation: Hit_ID=B6TUD6; Match level="QueryCoverage=100%, HitCoverage=100%, E-value=1e-148, Identity=68%"; Hit description =Alpha-taxilin
  Pfam annotation: Domain name=Taxilin; Domain location=106-398; Score =406.3; E_value=5e-119; Accession=PF09728.1; Description=Myosin-like coiled-coil protein
MEGSPATRLPEADSLPDGFVESSGADTASPPSPAPVADDPPLAALDSDRPAATNPGGGETLGDPSLPAPAVEDASSAAAEALETLSLDATAEPERAPGEHGPTGAARDAEESLKQSCAAEQAGSPTAQKQKETAEPKRKVVKRKDRELFELAQQYHKVVAERDAANAVKEKLESLCREFQRQNKMLKEECRRVSTDGQNMRMELSDKFNNAIKDVSVKLEEQKNECIAQLEENNLLRSKLKDLADQYNITQQKYAHQLKEKMLELELADLKLQQQQEKAAQEHSQMQLYAEQVSQLMTTEKNLRLQLASDGERFQQFQDALSKSNEVFETYKQEMEKMISVIKSLKKENEFLKGKCENSDIALVKLIEERELTKKQIEKLKNQKEKLESLCRSLQAERKQGPSASIPETPSSEEGVAVTSQDS

SEQ ID NO: 70413 - protein, 112 aa, Setaria italica
  misc_feature (96)..(96): Xaa can be any naturally occurring amino acid
  Transcript Sequence Number=SeqID_4439
KNKKNLINQEGNKSSSMDALKTTNPAAKETISKIENLQYVNVKQKSSLMDDLKTTNHIDGTSNFEHQSADIEQVINDDTSPFTNGNIEKNDEAHKXDDSNENDGGNETDEHL

SEQ ID NO: 70414 - protein, 122 aa, Setaria italica
  Transcript Sequence Number=SeqID_4440
TRTTPELPDVRFSRGQQMNRSWNSEEDIVIFRPSIDSYEINNPSCSKNNKGKSISLAVQAKNNVQKREGVSSGRNSGLQKEHDDHRTNQPFRSQSNHQRNKQQKKPSSSGTSSLSFGQNNQK

SEQ ID NO: 70415 - protein, 123 aa, Setaria italica
  misc_feature (29)..(29): Xaa can be any naturally occurring amino acid
  misc_feature (64)..(64): Xaa can be any naturally occurring amino acid
  Transcript Sequence Number=SeqID_4441
LMELAAVSSKGICIDDIQGSTELSPTGKXQNTEADDEMSSLVTSPRSPLQSRKTSPEIFVMFEXVTIIATTISSPAARRRTFALINSFIAVFILVGQLTLTGHILTVAGVIVAICASPLVAAS

SEQ ID NO: 70416 - protein, 76 aa, Setaria italica
  Transcript Sequence Number=SeqID_4442
CKQPYQGHILTVAGVIVAICASPLVAASNMVALAVWPTWTAVAITETIRKVVIYVFTRPGRELLFTVVSLDEKYKA

SEQ ID NO: 70417 - protein, 206 aa, Setaria italica
  Transcript Sequence Number=SeqID_4443
APFSSLLMELAAVSSKGICIDDIQGSTELSPTGKIQNTEADDEMSSLVTSPRSPLQSRKTSPEIFVMFEGFWLILRSPYLIYISLFLWLSAVVSSFFYFQKVTIIATTISSPAARRRTFALINSFIAVFILVGQLTLTVFCPSPNYPHPQPSISMYSHIYLRQRRSCMPTIIRKKFIVFVVCFLTSHGLPFFQPWVHHPNYPQYIV

SEQ ID NO: 70418 - protein, 277 aa, Setaria italica
  misc_feature (35)..(35): Xaa can be any naturally occurring amino acid
  Transcript Sequence Number=SeqID_4444
  Homolog annotation: Hit_ID=A4XSH8; Match level="QueryCoverage=81%, HitCoverage=49%, E-value=8e-26, Identity=34%"; Hit description=Major facilitator superfamily MFS_1
LLFSSLLMELAAVSSKGICIDDIQGSTELSPTGKXQNTEADDEMSSLVTSPRSPLQSRKTSPEIFVMFEGFWLILRSPYLIYISLFLWLSAVVSSFFYFQKVTIIATTISSPAARRRTFALINSFIAVFILVGQLTLTGHILTVAGVIVAICASPLVAASNMVALAVWPTWTAVAITETIRKVVIYVFTRPGRELLFTVVSLDEKYKAKVCIDVIVQRLGDATAAGIYSLLFSRLEKKATMVTLYALPLCFLWLLIAFHLGRLQTNLARPKAAPVAS

SEQ ID NO: 70419 - protein, 63 aa, Setaria italica
  Transcript Sequence Number=SeqID_4445
VRLQGTDQVMFLAVSLSVVNYQLGKAPMLAVFIFQLCSNFSLAIHVPFLSSTIRAVHAWPVRI

SEQ ID NO: 70420 - protein, 930 aa, Setaria italica
  misc_feature (76)..(76): Xaa can be any naturally occurring amino acid
  misc_feature (472)..(472): Xaa can be any naturally occurring amino acid
  Transcript Sequence Number=SeqID_4446
  Gene Ontology: Mol. function=catalytic activity; Cellular component =nucleus; Biological process=multicellular organismal development
  Homolog annotation: Hit_ID=B9RN12; Match level="QueryCoverage=100%, HitCoverage=96%, E-value=1e-160, Identity=62%"; Hit description =Protein phosphatase 2c, putative
  Pfam annotation: Domain name=PP2C; Domain location=553-893; Score =32.9; E_value=8.5e-08; Accession=PF00481.13; Description=Protein phosphatase 2C
FCYVRPGAAADSPAITPSNSERYTLDSSVMDSETRSGSFRQEAAEDLAAAAAAAAAAGLQRPSRSFGETTFRTISXGASVSANASSARTGNLSVSLAGEVQEPAAAFESTASFAAVPLQPVPRGSGPLNTFLSGPLERGFASGPLDKGTAGFMSGPLDKGVFMSGPIDGGNRSNFSAPLSYGRRKAGLGHLVHRISRPMKTALSRTFSRNSQNPGWVHKFLLHSMAQLPWARDAKSRSEGSQNGLEAGLPEPEYNVTRNLQWAHGKAGEDRVHVVLSEEQGWLFIGIYDGFSGPDAPDFLMSNLYKAIDKELEGLLWVYEESSERSDHVSTHEEGEPVATSMDAPHGDGSQFQIDSGKQEQLGNVEKRNVSAEKDCDDSALQVQPNCTSSEQKDLATQVSSSQELGADEIVEETAEADLGNDLQSRESHNSNRGLSSTDLNISCSCMAENSAYCDQHGRFLKENRKSKRLFXLLEMELLEDHNRSVSKASPEGRKTQNLHNTLAGTTEGSSRNAAEISRCSLAATGECYEDSEDLGSSRHADSVLGIDPKECSGCSISTSSSGHKQTTRRFLFGSKLRKMYKKQKLLQKKFFPWNYDWHRDQPHVEESIIQPSEVIRRCKSGPVEHDAVLRAMSRALETTEEAYMEIVERELDRHPELALMGSCVLVMLMKDQDVYVMNLGDSRVILAQDNDQYNCSSFLKGDLRHRNRSRESLVRVELDRISEESPMHNPNSHLSSNTKAKELSICRLKMRAVQLSTDHSTSIEEEVLRIKAEHPDDPQAIFNDRVKGQLKVTRAFGAGFLKKPKYNEALLQMFRVDYVGTSPYISCNPAVLHHRLCTNDRFLVLSSDGLYQYFSNDEVVSHVSWFMENVPEGDPAQYLVAELLCRAAKKNGMDFHELLDIPQGDRRKYHDDVSVMVISLEGRIWRSSG

SEQ ID NO: 70421 - protein, 135 aa, Setaria italica
  Transcript Sequence Number=SeqID_4447
  Gene Ontology: Mol. function=protein dimerization activity; Cellular component=nucleus; Biological process=regulation of transcription, DNA-dependent
  Homolog annotation: Hit_ID=B6TIQ5; Match level="QueryCoverage=96%, HitCoverage=35%, E-value=9e-51, Identity=79%"; Hit description =Transcription factor RF2b
TELERKVQTLQTEATTLSAQLTLFQRDTTGLSAENAELKIRLQAMEQQAHLRDALNDALKQEVERLKIATGEMSKSNEPYNMGMQHITYSPSFFQLSEQHAVQHHGNIQLPPHFQQPPPSVPSHQMLSHPIPSRI

SEQ ID NO: 70422 - protein, 179 aa, Setaria italica
  Transcript Sequence Number=SeqID_4448
  Gene Ontology: Mol. function=protein dimerization activity; Cellular component=nucleus; Biological process=regulation of transcription, DNA-dependent
  Homolog annotation: Hit_ID=B6TIQ5; Match level="QueryCoverage=92%, HitCoverage=44%, E-value=2e-66, Identity=77%"; Hit description =Transcription factor RF2b
QLLCPCLSIKLLDVLHAIVTQWQRDTTGLSAENAELKIRLQAMEQQAHLRDALNDALKQEVERLKIATGEMSKSNEPYNMGMQHITYSPSFFQLSEQHAVQHHGNIQLPPHFQQPPPSVPSHQMLSHPNSLSDMMQQDSLGRLQGLDIGKGSVAVKSEAEVMVKSEGSSISAGESNSTF

SEQ ID NO: 70423 - protein, 246 aa, Setaria italica
  Transcript Sequence Number=SeqID_4449
  Gene Ontology: Mol. function=protein dimerization activity; Cellular component=nucleus; Biological process=regulation of transcription, DNA-dependent
  Homolog annotation: Hit_ID=B6UI16; Match level="QueryCoverage=83%, HitCoverage=59%, E-value=3e-86, Identity=81%"; Hit description =Transcription factor RF2b
  Pfam annotation: Domain name=ATG16; Domain location=1-130; Score= -45.1; E_value=0.061; Accession=PF08614.3; Description=Autophagy protein 16 (ATG16)
  Pfam annotation: Domain name=bZIP_1; Domain location=46-109; Score =30.8; E_value=5.4e-06; Accession=PF00170.13; Description=bZIP transcription factor
  Pfam annotation: Domain name=bZIP_2; Domain location=46-100; Score =26.1; E_value=0.00014; Accession=PF07716.7; Description=Basic region leucine zipper
  Pfam module annotation: Pfam domain module=ATG16::bZIP_1::bZIP_2; Domain location=1-130::46-109::46-100
RLLRRLRDGARRRRTGGQQDGAGGVFGEVMEAKKAMSSEQLAELAAIDPKRAKRILANRQSAARSKERKARYITELERKVQTLQTEATTLSAQLTLFQRDTTGLSAENAELKIRLQAMEQQAQLRDALNDALKQELERLKLATGETTNTSETYNMRFQHVPYNSSFFLLSQQNTASHPGSAQLAPPFHPPHPNVPNHQMLSHPHTLPDIMQQDSLGRLQGLDIGKGPLVVKSESSSISASESSSTF

SEQ ID NO: 70424 - protein, 205 aa, Setaria italica
  Transcript Sequence Number=SeqID_4450
SVFSCLSLNLVLLCQEAAGPTLDQLVSSLSQKTEQWSYKNRPIADGLVIPLIGEEAMDHSHAELNLPSQLELQEEEKEEESIEPQVPLYNFKRRSEARKVDANLIKEISGKAKRRKLVRPSLEETNASTNVGELEGTQDRKQHHLEVSENQFDIDLNIPAPSEATDPVEEDYRIAVCPSVINAPFKIDANKPNSDVIDNQRTRSA

SEQ ID NO: 70425 - protein, 199 aa, Setaria italica
  Transcript Sequence Number=SeqID_4451
  Gene Ontology: Cellular component=intracellular; Biological process =intracellular protein transport
TSPEDQVMSDLLALTISSNPSPPYTPITPEPALNQGGSTASHPQPYNVNQGHATANYVAPWAQPQSQAAGIQQQTPSQSQLPYNSLAYPPPPWASQDSMESNPFVVSSSQHQSSSNSPINVPPNLRPLQQSQSFAVPLRTASLDSPINGNLKQPLSAGARRPSYVSSNKFFDDLFERNSDGSLKVGGTVGSGTSSPYKA

SEQ ID NO: 70426 - protein, 315 aa, Setaria italica
  misc_feature (274)..(274): Xaa can be any naturally occurring amino acid
  Transcript Sequence Number=SeqID_4452
  Gene Ontology: Mol. function=two-component response regulator activity; Cellular component=nucleus; Biological process=two -component signal transduction system (phosphorelay)
  Homolog annotation: Hit_ID=B9RNX8; Match level="QueryCoverage=96%, HitCoverage=42%, E-value=2e-93, Identity=59%"; Hit description=Two -component system sensor histidine kinase/response regulator, putative
  Pfam annotation: Domain name=Myb_DNA-binding; Domain location=214 -264; Score=38.5; E_value=2.6e-08; Accession=PF00249.23; Description =Myb-like DNA-binding domain
  Pfam annotation: Domain name=Response_reg; Domain location=23-134; Score=102.3; E_value=1.6e-27; Accession=PF00072.16; Description =Response regulator receiver domain
  Pfam module annotation: Pfam domain module=Myb_DNA-binding::Response _reg; Domain location=214-264::23-134
MRPEERNGAMGRVRDQFPAGMRVLAVDDDPVCLKVLETLLRRCQYHVTTTNQAAIALRMLRENRDLFDLVISDVHMPDMDGFKLLELVGLEMDLPVIMLSGNGETKTVMKGITHGACDYLLKPVRLEELRNIWQHVVRRKFSNRERANVDGYEECNRPSNADFDNVHSQITCGSPDQSGRPSKKRKEYHSEEEDEGEESNGQENDDSSTPKKPRVVWSVELHRKFVAAVNQLGIDKAVPKRILELMNVDKLTRENVASHLQARHPPALFNLASXKYRLYLKRLSAVASQQASIVAALGGSDPFMHMGAFEGLQGY

SEQ ID NO: 70427 - protein, 79 aa, Setaria italica
  Transcript Sequence Number=SeqID_4453
  Homolog annotation: Hit_ID=B6SWN0; Match level="QueryCoverage=100%, HitCoverage=16%, E-value=8e-34, Identity=92%"; Hit description=mTERF family protein
VEALLSFGIRKEALPLVIAQYPSILGLPLKVKLAAQQYFFNLKLQIDPDGFARAVENLPQLVSLNQNVILKPVEFLRGR

SEQ ID NO: 70428 - protein, 356 aa, Setaria italica
  misc_feature (87)..(87): Xaa can be any naturally occurring amino acid
  misc_feature (207)..(207): Xaa can be any naturally occurring amino acid
  Transcript Sequence Number=SeqID_4454
  Homolog annotation: Hit_ID=Q96258; Match level="QueryCoverage=44%, HitCoverage=28%, E-value=1e-28, Identity=45%"; Hit description=AR791
SLQKTVDSLQHKETDEVNNHIEVENKLKRLEELEKEATELRATNSRLQQENAHLIRRLELTRLPPVPKPKNSMEVKALEEADRLKQXNEKLAKEIEQLQSDRFADVEELVYLKWINACLRYELRNKDAPSGKTVARDLNKTLSPKSELKAKQLIMEYANAGAEDSHLSHVEFGSECSSSRASSGEPDDVSIDVAAMTKHKNPKKKKXFFSKLRKLVLGKGKENHEVSTLERRVSISSCSFDDLTGRDSHDSYSSFMAEPNVPDSQRHGDHGFSTHSSLHSVKSCPVGTETGNERSDHSDVKSISSREERVNSLISSFCSNSGKAIPVDAEIHKFADALSTSRSGSMSSRRSSSFRH

SEQ ID NO: 70429 - protein, 73 aa, Setaria italica
  Transcript Sequence Number=SeqID_4455
  Gene Ontology: Mol. function=aminoacyl-tRNA ligase activity; Cellular component=cytoplasm; Biological process=tRNA aminoacylation for protein translation
  Homolog annotation: Hit_ID=B6SH65; Match level="QueryCoverage=100%, HitCoverage=10%, E-value=1e-17, Identity=61%"; Hit description =Cysteinyl-tRNA synthetase
MAEEAQVTPPTTVAEGDQAPAPTTTAEAKALPQLELFNSMTKKKEPFHPRVEGKVGMYVCGVTPYDFSHIGHA

SEQ ID NO: 70430 - protein, 391 aa, Setaria italica
  Transcript Sequence Number=SeqID_4456
  Gene Ontology: Mol. function=aminoacyl-tRNA ligase activity; Cellular component=cytoplasm; Biological process=tRNA aminoacylation for protein translation
  Homolog annotation: Hit_ID=B6SH65; Match level="QueryCoverage=87%, HitCoverage=61%, E-value=0.0, Identity=91%"; Hit description =Cysteinyl-tRNA synthetase
  Pfam annotation: Domain name=tRNA-synt_1e; Domain location=70-369; Score=547.1; E_value=2.1e-161; Accession=PF01406.11; Description =tRNA synthetases class I (C)
  Pfam annotation: Domain name=tRNA-synt_1g; Domain location=93-372; Score=-238.1; E_value=4.1e-05; Accession=PF09334.3; Description=tRNA synthetases class I (M)
  Pfam module annotation: Pfam domain module=tRNA-synt_1e::tRNA-synt _1g; Domain location=70-369::93-372
  Subcellular localization annotation: CTP_CleavageSite=49; ConfidenceScore=5.28e-01
PARPRALSHPARSRRRHKFPFSPSRLPRRRGFEFEASECSPLPCVPTTTAEAKALPQLELFNSMTKKKEPFHPRVEGKVGMYVCGVTPYDFSHIGHARAYVAFDVLYRYLKFLGYEVEYVRNFTDIDDKIIRRANERGETVTSLSSRFINEFLLDMTELQCLPPTHEPRVTEHIEHIIELITKIMEGGKAYVMEGDVYFSVDSFPEYLSLSGRKLDQNQAGARVAFDTRKRNPADFALWKAAKEGEPFWDSPWGRGRPGWHIECSAMSAHYLGHVFDIHGGGKDLIFPHHENELAQSRAAYPESEVKCWMHNGFVNKDDKKMAKSDNNFFTIRDIIALYHPIALRFFLMRTHYRSDVNHSDKALEIASDRVYYIFQTLYDCEEVLAQYREE

SEQ ID NO: 70431 - protein, 200 aa, Setaria italica
  Transcript Sequence Number=SeqID_4457
  Gene Ontology: Mol. function=oxidoreductase activity, acting on the CH-OH group of donors, NAD or NADP as acceptor; Cellular component =endoplasmic reticulum membrane; Biological process=isoprenoid biosynthetic process
  Homolog annotation: Hit_ID=O24594; Match level="QueryCoverage=97%, HitCoverage=33%, E-value=2e-93, Identity=84%"; Hit description=3 -hydroxy-3-methylglutaryl-coenzyme A reductase
  Pfam annotation: Domain name=HMG-CoA_red; Domain location=38-200; Score=31.8; E_value=5.7e-23; Accession=PF00368.10; Description =Hydroxymethylglutaryl-coenzyme A reductase
PPQQPAPTPCALLGNPAAAPEKMPEEDEEIVAAVVAGKIPSYVLETRLGDCRRAAGIRREALRRITGREMEGLPLDGFDYASILGQCCELPVGYVQLPVGVAGPLLLDGRRLYVPMATTEGCLVASTNRGFKAIAESGGAFSVVLKDGMTRAPAVRFPSARRAAELKGFLENPANFDTLATVFNRSSRFGRLQGVKCAMA

SEQ ID NO: 70432 - protein, 59 aa, Setaria italica
  Transcript Sequence Number=SeqID_4458
PGSNARLLASVVAGAVLAGELSLISAQAAGHLVQSHMKYNRSSRDMSKAAEEADKPKKC

SEQ ID NO: 70433 - protein, 309 aa, Setaria italica
  Transcript Sequence Number=SeqID_4459
  Gene Ontology: Mol. function=oxidoreductase activity, acting on the CH-OH group of donors, NAD or NADP as acceptor; Cellular component =endoplasmic reticulum membrane; Biological process=isoprenoid biosynthetic process
  Homolog annotation: Hit_ID=Q9XHL5; Match level="QueryCoverage=95%, HitCoverage=52%, E-value=1e-125, Identity=74%"; Hit description=3 -hydroxy-3-methylglutaryl-coenzyme A reductase 3
  Pfam annotation: Domain name=HMG-CoA_red; Domain location=1-291; Score=630.7; E_value=1.4e-186; Accession=PF00368.10; Description =Hydroxymethylglutaryl-coenzyme A reductase
  Subcellular localization annotation: CTP_CleavageSite=22; ConfidenceScore=5.33e-01
SFVVFKDGMTRAPAVRFPSARRAAELKGFLENPANFDTLATVFNRSSRFGRLQGVKCAMAGRNLYMRFTCSTGDAMGMNMVSKGVQNVLDYLQDDFPDMDVISISGNFCSDKKSAAVNWIEGRGKSVVCEAIIKEEVVKKVLKTNVQALVELNVIKNLAGSAVAGALGGFNAHASNIVTAIFIATGQDPAQNVESSQCMTMLEAINDGKDLHISVTMPSIEVGTVGGGTQLASQSACLDLLGVKGANRESPGSNARLLASVVAGAVLAGELSLISAQAAGHLVQSHMKYNRSSRDMSKAAEEADKPKKC

SEQ ID NO: 70434 - protein, 236 aa, Setaria italica
  Transcript Sequence Number=SeqID_4460
  Gene Ontology: Mol. function=metal ion binding; Cellular component =integral to membrane; Biological process=ubiquitin-dependent protein catabolic process
  Homolog annotation: Hit_ID=Q5GAQ1; Match level="QueryCoverage=94%, HitCoverage=82%, E-value=5e-58, Identity=64%"; Hit description=Ring -H2 zinc finger protein
  Pfam annotation: Domain name=zf-C3HC4; Domain location=64-105; Score =32.3; E_value=2e-06; Accession=PF00097.17; Description=Zinc finger, C3HC4 type (RING finger)
RGGRPPPAGRGVAAWLRFMFGGGGGAGVADGGADAWCYEGGLDDKSMAKLPRREVVKGEALDDCAVCITELKAGDTARVLPRCGHGFHVDCVDMWLRSHSTCPLCRCPAVDEPPLHPVLPAVPTPEADPESPNFPTNVLFFGSQDEVSTGRSQQQSTAMATPPPPQEHVAAAAVDEAARPCGLRRLIGCGGASPPPQQPHLHHHHQHEDADGDIEMGLAAGESSASRPVKPPQPGS

SEQ ID NO: 70435 - protein, 41 aa, Setaria italica
  Transcript Sequence Number=SeqID_4461
HSLYATQARDLPKVVVAAYHLIPYFIFNAQEGSRSTLFAAS

SEQ ID NO: 70436 - protein, 81 aa, Setaria italica
  Transcript Sequence Number=SeqID_4462
  Gene Ontology: Mol. function=oxidoreductase activity; Biological process=oxidation reduction
  Homolog annotation: Hit_ID=Q43562; Match level="QueryCoverage=91%, HitCoverage=22%, E-value=1e-29, Identity=79%"; Hit description =Protochlorophyllide reductase homologue
HSLYATQARDLPKVVVAAYHLIPYFIFNAQEGSRSTLFAASDPQVPEYCEMLKSENWPVCACISYDCNPMNASEEAHNLET

SEQ ID NO: 70437 - protein, 364 aa, Setaria italica
  Transcript Sequence Number=SeqID_4463
  Gene Ontology: Mol. function=oxidoreductase activity; Biological process=oxidation reduction
  Homolog annotation: Hit_ID=B9S0Q9; Match level="QueryCoverage=98%, HitCoverage=97%, E-value=1e-137, Identity=65%"; Hit description =Short-chain dehydrogenase, putative
  Pfam annotation: Domain name=KR; Domain location=47-179; Score=-87.9; E_value=0.055; Accession=PF08659.2; Description=KR domain
  Pfam annotation: Domain name=adh_short; Domain location=47-208; Score= 51.1; E_value=4.4e-12; Accession=PF00106.17; Description=short chain dehydrogenase
  Pfam module annotation: Pfam domain module=KR::adh_short; Domain location=47-179::47-208
ERNGKREALGWLEWGRGWMASPLDPPPPPLAASHLANPLELPPLDGVSIVVTGATSGIGLEIARQLAQAGAHVVMAVRRPKVAQELIQKWQNENSETGTPLNAEVMELDLLSLDSVVKFADAWNARMAPLHVLINNAGIFAIGEPQRFSKDGHEEHMQVNHLAPALLAMLLIPSLLRGSPSRIVNVNSIMHTVGFVDAEDMNLRKRKYRSWLGYSNSKLAQVKFSSMLHKRIPAEAGINVVCASPGIVDTNVARDLPKVVVAAYHLIPYFIFNAQEGSRSTLFAASDPQVPEYCEMLKSENWPVCACISYDCNPMNASEEAHNLETSELVWEKTLEMIGLPPDALEKLIAGESVQCCYGQQEAE

SEQ ID NO: 70438 - protein, 67 aa, Setaria italica
  Transcript Sequence Number=SeqID_4464
ESLLVSFFGCYESQLKMVYIYSCSSLQNQFDLVNFPNHLALSCSLYTILEDSLNDLLMLVYVTIMLV

SEQ ID NO: 70439 - protein, 276 aa, Setaria italica
  Transcript Sequence Number=SeqID_4465
  Gene Ontology: Mol. function=oxidoreductase activity
  Homolog annotation: Hit_ID=B6SZC0; Match level="QueryCoverage=100%, HitCoverage=100%, E-value=1e-149, Identity=93%"; Hit description=RNA- binding region RNP-1
  Pfam annotation: Domain name=RRM_1; Domain location=12-79; Score =31.3; E_value=3.8e-06; Accession=PF00076.14; Description=RNA recognition motif. (a.k.a. RRM, RBD, o
MEEMGKRVVRTVRVRNISDLATEREVREFFSFSGDIEHVDIRFDGVATGRTAYVTFKDPKALEIALLLSGATIVDQVVNITPAEDYIYIPVTEQQLLVSEVTSTSSAPNAELEYSPEANASPNSRVYVSKAHDVMTNVIARGSAIRQDAVNKAKAFDEKHQLRANASARINSFDKRVGLSEKINNGISVVNEKVKSVDQRLHVSDKTMAALLAAERKLNDTGSAVKTNRYVSAGTSWLNGAFSKVAKAGHVAGSRTREKFQLAVSNLTAKGPAVVA

SEQ ID NO: 70440 - protein, 102 aa, Setaria italica
  Transcript Sequence Number=SeqID_4466
  Subcellular localization annotation: CTP_CleavageSite=40; ConfidenceScore=5.48e-01
SSAQRSPGPPPRPPSPARRSPSRRRAPLIQIKTHPRAGICGSLKGSHQTGRAPTARPTPPACAAATADEFDSGDDLRLRRGRGGLRVSLFLLRGFLLKAGRG

SEQ ID NO: 70441 - protein, 445 aa, Setaria italica
  Transcript Sequence Number=SeqID_4467
  Gene Ontology: Mol. function=nucleic acid binding
  Homolog annotation: Hit_ID=B9RHU2; Match level="QueryCoverage=24%, HitCoverage=5%, E-value=1e-31, Identity=61%"; Hit description =Splicing endonuclease positive effector sen1, putative
VAEMEINTVDGFQGREVDILVLSTVRASNSSDERHRTGEARSIGFVADVRRMNVALTRARLSLWIVGNARTLRINSHWDSLVRNAEERNLFISIKRPYRLIFEEVQPHSRDIHGTTGNYHTSHLKKKDNGKAAMMSSKRVDARLQKEQSTHAARNVEKDGKRPKEKSKWASCWDQKVPRAQESSVRSFVDRSEKQNSNMRSTKSSWQENTDQDSVMRNQMEVKKSTVHNDNHLELSKGLAKGCSLEGSSVRRQMELNIPVEQNVCKETNKASSNQDLFQNPKGSLKHGLDLKSASKKDDVSPPAVPDLQKLIQTAKGARKFSEKPRCDNPNKVGRSVKHDGILDPANKNGACPPTNPDTKMADKAKRRRFSEEPRPGNPTQVDPSRPSHFNEASSHVPELKKSQSTKLTSKNDLIAERKRQREDVDSLLSSALISSSTHRTKKKK

SEQ ID NO: 70442 - protein, 72 aa, Setaria italica
  Transcript Sequence Number=SeqID_4468
  Homolog annotation: Hit_ID=B9S7L0; Match level="QueryCoverage=98%, HitCoverage=14%, E-value=9e-13, Identity=46%"; Hit description =Pentatricopeptide repeat-containing protein, putative
  Pfam annotation: Domain name=PPR; Domain location=34-68; Score=27.6; E_value=5.2e-05; Accession=PF01535.12; Description=PPR repeat
TNALINASCKAGCLKDAKMILTRLAAEGIEPNSATYCILLHSLCDKKLWSEVGDLLSHMKQANHEPDVTAYN

SEQ ID NO: 70443 - protein, 70 aa, Setaria italica
  Transcript Sequence Number=SeqID_4469
LFSGELIDNFLQTTANQLTVYGYISILCVIFFSCILIYHIVKFQCHSLFCLQEGLNERELCVFFRNNHFN

SEQ ID NO: 70444 - protein, 285 aa, Setaria italica
  Transcript Sequence Number=SeqID_4470
  Gene Ontology: Cellular component=plasma membrane
  Homolog annotation: Hit_ID=Q76LS9-2; Match level="QueryCoverage=52%, HitCoverage=32%, E-value=7e-30, Identity=43%"; Hit description =Isoform 2 of Protein FAM63A
  Pfam annotation: Domain name=DUF544; Domain location=68-195; Score =188.5; E_value=1.8e-53; Accession=PF04424.5; Description=Protein of unknown function (DUF544)
MSSDPSPHLPAPVAPPGAAEVDPQSQPAAPPAEPPEVMHRTRAVDFLGRRTPIVYQNDNGPCPLLAICNVLLLKNVISLNPDASEVSQQKLLSLVAERLIDSNSAVQDKDEEYVRNREQNIADAIDLLPLLATGIDVNVMFRKIDDFEFTRERAIFDLLDIPLYHGWIVDPQDTETASAIGSKSYNALASGLAEFKSGKPTEENKHMEEETVDFAAATTATLKIPSPSVSQGRSFDEHTLSDSEAQIRRGDREEEEELMRVLNLSKAETVSFDTSHSHSSSNMEV

SEQ ID NO: 70445 - protein, 181 aa, Setaria italica
  Transcript Sequence Number=SeqID_4471
  Gene Ontology: Cellular component=plasma membrane
  Homolog annotation: Hit_ID=UPI00004D4916; Match level="QueryCoverage =70%, HitCoverage=30%, E-value=2e-20, Identity=43%"; Hit description =family with sequence similarity 63, member B (FAM63B), transcript variant 1, mRNA
QWELIDNFLQTTANQLTVYGLFCLQEGLNERELCVFFRNNHFNTMFKYNGSLYLLATDQGFISQTDLVWQKLDEVNGDGVFLTSNFTPFKAETPRNDSWNEQQAMTSTADYISQFDNSTSGNSDLELAIALQQQEFERQPQRFQPPPPQQQQQQQQQQPPTQHQATQSGRPGLVVGPRQRP

SEQ ID NO: 70446 - protein, 500 aa, Setaria italica
  Transcript Sequence Number=SeqID_4472
  Homolog annotation: Hit_ID=UPI00004D4916; Match level="QueryCoverage =22%, HitCoverage=22%, E-value=2e-20, Identity=46%"; Hit description =family with sequence similarity 63, member B (FAM63B), transcript variant 1, mRNA
KLKGKIKSKETLTRNNYTETASAIGSKSYNALASGLAEFKSGKPTEENKHMEEETVDFAAATTATLKIPSPSVSQGRSFDEHTLSDSEAQIRRGDREEEEELMRVLNLSKAETVSFDTSHSHSSSNMEETTQSESFRSEAPEVVEATKKEEHGNHAVSDDGSVLPVTNGAVNGSEVPEESQEALISKEPEDSGIENMLPGDLDISVQSSESTPACPSHESFVPSDHQPAAPTLVEADKENFKEQFDVQIHGQSTDIEVTCDSSVVACEAAPGDVTTKLDENSGSLDSSEPLPSSIQECEPIYQGEEHILGSTNVAFENQEPVYEGEVVLAEQADKSGEASDCLEDKATEHQWELIDNFLQTTANQLTVYGLFCLQEGLNERELCVFFRNNHFNTMFKYNGSLYLLATDQGFISQTDLVWQKLDEVNGDGVFLTSNFTPFKAETPRNDSWNEQQAMTSTADYISQFDNSTSGKYVLPTYLFLLCLIVQVLYNFFSSAVSAM

SEQ ID NO: 70447 - protein, 97 aa, Setaria italica
  Transcript Sequence Number=SeqID_4473
  Gene Ontology: Mol. function=ATP binding; Cellular component =chloroplast
  Homolog annotation: Hit_ID=Q45YI8; Match level="QueryCoverage=100%, HitCoverage=21%, E-value=3e-41, Identity=75%"; Hit description =Rubisco activase 2
STWKAKDADGDDYLYRLGKEADNMDIAVGARAGIVDDLFVGNFLGKDSDIVFDYRQKATRTFEYLQGDYYIAPLFLDKVACHIVKNFIALFLNIKIP

SEQ ID NO: 70448 - protein, 161 aa, Setaria italica
  misc_feature (63)..(63): Xaa can be any naturally occurring amino acid
  Transcript Sequence Number=SeqID_4474
  Gene Ontology: Mol. function=metalloexopeptidase activity; Cellular component=ribonucleoprotein complex; Biological process=cellular process
  Homolog annotation: Hit_ID=B6TBW4; Match level="QueryCoverage=87%, HitCoverage=35%, E-value=2e-64, Identity=87%"; Hit description =Proliferation-associated protein 2G4
  Pfam annotation: Domain name=Peptidase_M24; Domain location=1-161; Score=13.0; E_value=3.8e-10; Accession=PF00557.16; Description =metallopeptidase family M24
  Subcellular localization annotation: CTP_CleavageSite=35; ConfidenceScore=5.01e-01
VRVRTSFLLSSSLNLGNCSYKNAKRKIERGIAFPTCVSVNNTVCHFSPLATDEAVLEENDMVXKIDMGCHIDGFIAVVAHTHVITNGPVTGRAADVLAAANTAAEVAMRLVRPGKKNKDVTEAIQKVAAAYDCKIVEGVLSHQLKQFVIDGNKVVLSVSND

SEQ ID NO: 70449 - protein, 95 aa, Setaria italica
  Transcript Sequence Number=SeqID_4475
  Subcellular localization annotation: CTP_CleavageSite=36; ConfidenceScore=5.36e-01
QFKNTSGNQSLKNPNTALLPQASGSNREQVNHKMIRLARRRGYLLLRISAAALYLVTTSLDERSSSFSSRTSSSDDICSAHQNEQHPKRSEMSRK

SEQ ID NO: 70450 - protein, 134 aa, Setaria italica
  Transcript Sequence Number=SeqID_4476
  Gene Ontology: Mol. function=metalloexopeptidase activity; Cellular component=ribonucleoprotein complex; Biological process=cellular process
  Homolog annotation: Hit_ID=B6TBW4; Match level="QueryCoverage=82%, HitCoverage=28%, E-value=5e-46, Identity=82%"; Hit description =Proliferation-associated protein 2G4
CCSILVLVSFPYSIVLFYRLRVYLEEKRARLGLVECMNHELLQPYPVLHEKPGDLVAHIKFTVLLMPNGSDKVTSHQLQELQPTKSIEDNAEIKAWLALGTKSKKKGGGKKKKGKKGDAAEPMEEATNGAPSQE

SEQ ID NO: 70451 - protein, 393 aa, Setaria italica
  Transcript Sequence Number=SeqID_4477
  Gene Ontology: Mol. function=metalloexopeptidase activity; Cellular component=ribonucleoprotein complex; Biological process=cellular process
  Homolog annotation: Hit_ID=B6TBW4; Match level="QueryCoverage=99%, HitCoverage=99%, E-value=0.0, Identity=89%"; Hit description =Proliferation-associated protein 2G4
  Pfam annotation: Domain name=Peptidase_M24; Domain location=22-277; Score=198.8; E_value=1.4e-56; Accession=PF00557.16; Description =metallopeptidase family M24
MSSDDEVREEKELDLSSNDVVTKYKAAAEILNNALKLVVSECKPKAKIVDLCEKGDSFIREQTGNVYKNAKRKIERGIAFPTCVSVNNTVCHFSPLATDEAVLEENDMVKIDMGCHIDGFIAVVAHTHVITNGPVTGRAADVLAAANTAAEVAMRLVRPGKKNKDVTEAIQKVAAAYDCKIVEGVLSHQLKQFVIDGNKVVLSVSNADTKVDDAEFEENEVYAIDIVTSTGEGKPKLLDEKQTTIYKRAVDKNYHLKMKASRFIFSEISQKFPIMPFTARALEEKRARLGLVECMNHELLQPYPVLHEKPGDLVAHIKFTVLLMPNGSDKVTSHQLQELQPTKSIEDNAEIKAWLALGTKSKKKGGGKKKKGKKGDAAEPMEEATNGSPSQFK

SEQ ID NO: 70452 - protein, 72 aa, Setaria italica
  Transcript Sequence Number=SeqID_4478
MAASLLPPAATLAKKYPTLLHPSGARPHAQRLIFRCGATSDAADDGWAPVDELKSSLQDPSDTVASDAAGAG

SEQ ID NO: 70453 - protein, 152 aa, Setaria italica
  misc_feature (83)..(83): Xaa can be any naturally occurring amino acid
  Transcript Sequence Number=SeqID_4479
  Gene Ontology: Mol. function=small conjugating protein ligase activity; Cellular component=cytoplasm; Biological process=ubiquitin- dependent protein catabolic process
  Homolog annotation: Hit_ID=Q8S1Y5; Match level="QueryCoverage=81%, HitCoverage=63%, E-value=4e-37, Identity=64%"; Hit description =Ubiquitin carrier protein
  Pfam annotation: Domain name=UQ_con; Domain location=27-152; Score =93.2; E_value=9.2e-25; Accession=PF00179.18; Description=Ubiquitin -conjugating enzyme
LGCDRISCTCSSLCVAALVWVKWPCLSVQEELTECNRDREVSGVFITLHDGANISHLTGTIAGPADSPYEGGTFTIDIRLPGXPIDDILVTQCSYIYVHPNISSQNGAICLDILKDQWSTALTLKTALLSLQALLSSPAPDDPQDAVVAQQV

SEQ ID NO: 70454 - protein, 84 aa, Setaria italica
  Transcript Sequence Number=SeqID_4480
  Gene Ontology: Mol. function=small conjugating protein ligase activity; Biological process=ubiquitin-dependent protein catabolic process
  Homolog annotation: Hit_ID=Q8S1Y5; Match level="QueryCoverage=83%, HitCoverage=35%, E-value=6e-28, Identity=82%"; Hit description =Ubiquitin carrier protein
  Pfam annotation: Domain name=UBA; Domain location=45-81; Score=35.9; E_value=1.6e-07; Accession=PF00627.23; Description=UBATS-N domain
KFTARTNGTVWTHKAVQELYLRDYPTFAATARYWTEAFAKSASTGMEEKVQKLVEMGFPEDLVRSTLKSVDGDENLALEKLCSG

SEQ ID NO: 70455 - protein, 195 aa, Setaria italica
  Transcript Sequence Number=SeqID_4481
  Gene Ontology: Mol. function=small conjugating protein ligase activity; Cellular component=cytoplasm; Biological process=ubiquitin- dependent protein catabolic process
  Homolog annotation: Hit_ID=Q8S1Y5; Match level="QueryCoverage=100%, HitCoverage=100%, E-value=2e-89, Identity=80%"; Hit description =Ubiquitin carrier protein
  Pfam annotation: Domain name=UBA; Domain location=156-192; Score =35.9; E_value=1.6e-07; Accession=PF00627.23; Description=UBATS-N domain
  Pfam annotation: Domain name=UQ_con; Domain location=6-146; Score =234.1; E_value=3.6e-67; Accession=PF00179.18; Description=Ubiquitin -conjugating enzyme
  Pfam module annotation: Pfam domain module=UBA::UQ_con; Domain location=156-192::6-146
MVDVSRVQKELTECNRDREVSGVSITLHDGANISHLTGTIAGPADSPYEGGTFTIDIRLPGGYPFEPPKMQFVTKVWHPNISSQNGAICLDILKDQWSPALTLKTALLSLQALLSSPAPDDPQDAVVAQQYLRDYPTFAATARYWTEAFAKSASTGMEEKVQKLVEMGFPEDLVRSTLKSVDGDENLALEKLCSG

SEQ ID NO: 70456 - protein, 201 aa, Setaria italica
  Transcript Sequence Number=SeqID_4482
  Gene Ontology: Mol. function=ubiquitin-protein ligase activity; Cellular component=ubiquitin ligase complex
  Homolog annotation: Hit_ID=Q337X8; Match level="QueryCoverage=85%, HitCoverage=18%, E-value=1e-74, Identity=82%"; Hit description =Transposon protein, putative, CACTA, En/Spm sub-class, expressed
  Pfam annotation: Domain name=DWNN; Domain location=3-76; Score=157.9; E_value=3e-44; Accession=PF08783.3; Description=DWNN domain
MAVYYKFKSARDYDSIPIEGQFISVANLKERIFESKHLGRGTDFDLMISNAQTDEEYADEATMIPKNTSVLIRRIPGRPRKPIVTEPEESKVTEDVLEVAPAASAFLGDSSMKYPEESEWDDEFGNELYVSDSVLSQPASQAVDASENKIDEDSKIKALIDTSGLDYSQIPDGYGSGRGYGRGMGGRMMALCGFGRGLERE

SEQ ID NO: 70457 - protein, 47 aa, Setaria italica
  Transcript Sequence Number=SeqID_4483
MHPVVKAKHIDLRNLQRMEADKCCCPGRSVFMVPFIHHTWNSQGYLT

SEQ ID NO: 70458 - protein, 58 aa, Setaria italica
  Transcript Sequence Number=SeqID_4484
ADKCCCPGRSVFMVPFIHHTWNSQGYLTSKTYHYQCASTSPGTLPSSNRTACKANSIS

SEQ ID NO: 70459 - protein, 55 aa, Setaria italica
  Transcript Sequence Number=SeqID_4485
SVINPPPGLLLSNFESLSSSISSLLLLVDVFEWLACQHVNTCLNSEQMCDVYMLV

SEQ ID NO: 70460 - protein, 125 aa, Setaria italica
  Transcript Sequence Number=SeqID_4486
  Gene Ontology: Mol. function=heat shock protein binding; Cellular component=cytoplasm; Biological process=protein folding
  Homolog annotation: Hit_ID=B6SZU1; Match level="QueryCoverage=96%, HitCoverage=35%, E-value=7e-33, Identity=67%"; Hit description=DnaJ protein
  Pfam annotation: Domain name=DnaJ; Domain location=10-75; Score=74.7; E_value=3.4e-19; Accession=PF00226.23; Description=DnaJ domain
MWNKNKPPELYYEILHVARDASPQGVRAAYRTLARQWHPDKHPPESRPEAEARFKAITEAYKALLDQQENRAVFAAREGGGRSRPAEKDLCGCGGENVATAVVRAARGEKPGAAPPCTLAREEPA

SEQ ID NO: 70461 - protein, 88 aa, Setaria italica
  Transcript Sequence Number=SeqID_4487
  Gene Ontology: Mol. function=drug transporter activity; Cellular component=membrane; Biological process=multidrug transport
  Homolog annotation: Hit_ID=Q5Z7G9; Match level="QueryCoverage=98%, HitCoverage=15%, E-value=2e-36, Identity=90%"; Hit description =Putative NIC2
REAVALCRLAFPIALTALLLYSRTALSMFFLGSIGDLPLAAGSLAIAFANITGYSVLSGLSLGMDPLCSQAFGANQPRLLGLTLYRSP

SEQ ID NO: 70462 - protein, 99 aa, Setaria italica
  Transcript Sequence Number=SeqID_4488
  Pfam annotation: Domain name=DnaJ; Domain location=30-93; Score=11.9; E_value=0.00031; Accession=PF00226.23; Description=DnaJ domain
  Subcellular localization annotation: CTP_CleavageSite=19; ConfidenceScore=5.39e-01
TAPTPSCAAPTASSPWSVRCSGSSASRPALFLGTLDRPPCSPCGAVLGQKWHPDKCACAGSSAGGADAAKVRFQKIQGAYAVLSDPNKRILYDVGAYDS

SEQ ID NO: 70463 - protein, 78 aa, Setaria italica
  Transcript Sequence Number=SeqID_4489
SQNGAENGKGESLEDMQRQFEELFLRPSPSSSFPPVRVAVGLQHPLTISFHLFSPGHSRGRRGHGLFWRRCSWPSWSR

SEQ ID NO: 70464 - protein, 42 aa, Setaria italica
  Transcript Sequence Number=SeqID_4490
AVLSDPNKRILYDVGAYDSDGDDDVRTSPLHLPVSAGRLPSQ

SEQ ID NO: 70465 - protein, 155 aa, Setaria italica
  Transcript Sequence Number=SeqID_4491
  Gene Ontology: Mol. function=heat shock protein binding
  Homolog annotation: Hit_ID=B4FBY1; Match level="QueryCoverage=85%, HitCoverage=85%, E-value=1e-35, Identity=62%"; Hit description =Chaperone protein dnaJ
  Pfam annotation: Domain name=DnaJ; Domain location=12-81; Score =103.0; E_value=1e-27; Accession=PF00226.23; Description=DnaJ domain
MAGGGGGKNGLSLYAVLGVASDCSDAELRSAYRKLAMKWHPDKCACAGSSAGGADAAKVRFQKIQGAYAVLSDPNKRILYDVGAYDSDGDDDGAGEILGDILDAMSQNGAENGKGESLEDMQRQFEELFLRPSPSSSFPPDDAGKSASKRRAARK

SEQ ID NO: 70466 - protein, 80 aa, Setaria italica
  Transcript Sequence Number=SeqID_4492
  Gene Ontology: Mol. function=cysteine-type endopeptidase activity; Cellular component=endoplasmic reticulum lumen; Biological process =proteolysis
  Homolog annotation: Hit_ID=B6TYT3; Match level="QueryCoverage=100%, HitCoverage=23%, E-value=1e-33, Identity=86%"; Hit description =Cysteine protease 1
  Pfam annotation: Domain name=Peptidase_C1; Domain location=1-80; Score=-111.2; E_value=0.0012; Accession=PF00112.15; Description =Papain family cysteine protease
NGADPAFRFYGGGVLSGACGTELNHAVTAVGYGTAGDGTRYWVMKNSWGASWGEGGYVRIRRGDRGPGVCGLAKLPSYPV

SEQ ID NO: 70467 - protein, 67 aa, Setaria italica
  Transcript Sequence Number=SeqID_4493
  Gene Ontology: Mol. function=sucrose synthase activity; Biological process=sucrose metabolic process
  Homolog annotation: Hit_ID=Q9FRX3; Match level="QueryCoverage=77%, HitCoverage=6%, E-value=3e-22, Identity=84%"; Hit description =Sucrose synthase 1
PIPCVPCLSPFACLSAKGTSCNQRLERISGTQHTYILRVPFRNENGILKKWISRFDVWPYLERFAED

SEQ ID NO: 70468 - protein, 809 aa, Setaria italica
  misc_feature (345)..(345): Xaa can be any naturally occurring amino acid
  Transcript Sequence Number=SeqID_4494
  Gene Ontology: Mol. function=sucrose synthase activity; Cellular component=plasma membrane; Biological process=sucrose metabolic process
  Homolog annotation: Hit_ID=Q9SLV8; Match level="QueryCoverage=99%, HitCoverage=99%, E-value=0.0, Identity=79%"; Hit description=Sucrose synthase
  Pfam annotation: Domain name=Glycos_transf_1; Domain location=557 -747; Score=93.0; E_value=1e-24; Accession=PF00534.12; Description =Glycosyl transferases group 1
  Pfam annotation: Domain name=Sucrose_synth; Domain location=7-554; Score=1297.1; E_value=0; Accession=PF00862.11; Description=Sucrose synthase
  Pfam module annotation: Pfam domain module=Glycos_transf_1::Sucrose _synth; Domain location=557-747::7-554
MSAPKLDRTPSIRDRVEDTLHAHRNELVALLSKYVNKGTCILQPHHILDALDEVQGSEGRALAEGSFLDVLRSAQEAIVVPPFVAIAVRPRPGVWEYVRVNVHELSVEQLTIPEYLCFKEALVDGQHNDPYLLELDFEPFNVSVPRPNRSSSIGNGVQFLNRHLSSIMFRNRDCLEPLLDFLRGHRHKGHVMMLNDRIQSLGRLQSVLTKAEEHLSKLPADTPYSQFAYQFQEWGLEKGWGDTAEHILEMIHLLLDILQAPDPSTLETFLGRIPMIFNVVVVSPHGYFGQANVLGLPDTGGQIVYILDQVRALENEMVLRLKKQGLDVTPKILIVTRLIPDAKGXSCNQRLERISGTQHTYILRVPFRNENGILKKWISRFDVWPYLERFAEDAAGEIAAELQGTPDFIIGNYSDGNLVASLLSYKMGITQCNIAHALEKTKYPDSDIYWKKFDEKYHFSCQFTADIISMNNADFIITSTYQEIAGSKNTVGQYESHTAFTLPGLYRVVHGIDVFDPKFNIVSPGADMSIYFPHTEKAKRLTSFHGSIESLIYDPEQNDEHIGYLDDRSKPILFSMARLDRVKNITGLVEAFAKCSKLRELVNLVVVAGYNDVKKSKDREEIAEIEKMHELIKTYNLFGQFRWISAQTNRARNGELYRYIADTHGAFVQPAFYEAFGLTVVEAMTCGLPTFATLHGGPAEIIEHGISGFHIDPYHPDQAANLMADFFERSKQEPNHWVKISEAGLQRIYEKYTWKIYSERLMTLAGVYGFWKYVSKLERRETRRYLEMFYILKFRELVKTVPLAIDQPQ

SEQ ID NO: 70469 - protein, 84 aa, Setaria italica
  Transcript Sequence Number=SeqID_4495
  Homolog annotation: Hit_ID=Q0JDM0; Match level="QueryCoverage=63%, HitCoverage=5%, E-value=2e-16, Identity=79%"; Hit description=Zinc finger CCCH domain-containing protein 27
DRTESLLGVEYDQDNEDTIDAKFAASLVTLKMIEESSSPALDADRIEVPSPKEENNSTNSEAATDTEDFEISDDDDDDRNHKHR

SEQ ID NO: 70470 - protein, 233 aa, Setaria italica
  misc_feature (94)..(94): Xaa can be any naturally occurring amino acid
  Transcript Sequence Number=SeqID_4496
  Gene Ontology: Mol. function=structural constituent of ribosome; Cellular component=ribonucleoprotein complex; Biological process =translation
  Homolog annotation: Hit_ID=B7T2T4; Match level="QueryCoverage=99%, HitCoverage=95%, E-value=6e-82, Identity=66%"; Hit description =Ribosomal protein L23
  Pfam annotation: Domain name=Ribosomal_L2; Domain location=140-216; Score=161.6; E_value=2.3e-45; Accession=PF00181.15; Description =Ribosomal Proteins L2, RNA binding domain
  Pfam annotation: Domain name=Ribosomal_L23; Domain location=1-92; Score=150.1; E_value=6.7e-42; Accession=PF00276.12; Description =Ribosomal protein L23
  Pfam module annotation: Pfam domain module=Ribosomal_L2::Ribosomal _L23; Domain location=140-216::1-92
MDGIKYAVFTEKSLRLLGKNQYTFNVESGFTKTEIKHWVELFFGVKVVAVNSHRLPGKGRRMGPILGHTMHYRRMIITLQPGYSIPLLDRETNXRRILNNMAKHLYKTPIPSTRKGTVDRQVKSNPRNKLIHGRHRCGKGRNARGIITVRHRGGGHKRLYRKIDFRRNQKDISGRIVTIEYDPNRNAYICLIHYGDGEKRYILHPRGAIIGDTIVSGTKVPISMGNALPLSAV

SEQ ID NO: 70471 - protein, 221 aa, Setaria italica
  misc_feature (66)..(66): Xaa can be any naturally occurring amino acid
  Transcript Sequence Number=SeqID_4497
  Gene Ontology: Mol. function=protein serine/threonine kinase activity; Biological process=protein amino acid phosphorylation
  Homolog annotation: Hit_ID=B6SYS4; Match level="QueryCoverage=91%, HitCoverage=28%, E-value=2e-31, Identity=43%"; Hit description=ATP binding protein
  Subcellular localization annotation: CTP_CleavageSite=30; ConfidenceScore=5.08e-01
DYLPTSDTFVSMSSTPSETLNSCGLWSPPRAPSEASSSEMEFGTAREYDTTDPFFGDNWLRDNHLXHSKPESDGSEGEDKFIVGPDVSLRRSEMRELDDGFGRRHVHRDHIADSDGCAEVNVCSSPPCGCCYREKKNGEELVRDSCYAVYGRYQIMDDHTEVLDECVAEAFRFRLNAFVGAGDPLVDFKKGEGDGLDLSALEKELQMLSPYLADADALENV

SEQ ID NO: 70472 - protein, 100 aa, Setaria italica
  Transcript Sequence Number=SeqID_4498
  Subcellular localization annotation: CTP_CleavageSite=56; ConfidenceScore=5.38e-01
LQQPAEAVGKVSLVPRAPRSFASLVTPNPNPRYFGRRLGLAGDRRSAAEGLGEPVSRDAPAQLHACRARITADLLKFGYATGAALPSPSPTPPQSLSWLN

SEQ ID NO: 70473 - protein, 80 aa, Setaria italica
  Transcript Sequence Number=SeqID_4499
  Subcellular localization annotation: CTP_CleavageSite=22; ConfidenceScore=5.12e-01
SFPADSRLGDSRLASSRVRPPTAAAASAGAALQQPAEAVGKVKLRLQKKNQAYTLSFFSWRKLVLFLLITSQSMTKSVVL

SEQ ID NO: 70474 - protein, 102 aa, Setaria italica
  Transcript Sequence Number=SeqID_4500
MSCGRVTYARRYKFSHDSPPSQLTPYGGLVFNKEAEFVGISTQDRGVTIALNVQDITRILALFHTDMMGKPLSEILQHIDDQAKSRKKRKRDDQAKSRKKRK

SEQ ID NO: 70475 - protein, 262 aa, Setaria italica
  Transcript Sequence Number=SeqID_4501
SVEIWLRHWRRPPVSISYTAPISFLVVGTIPVDNQPIYDKICRSVVKVVVYVRATSDLQKIMIPGIIAMSGDDYCYIIAFCSQEFGSLPSEVILPDGTKMKLQKQDLETRSNLVAFYVNTSARMKSVDFREDVSMNEEVFSIDFDHHLISTCNMSCGRVTYARRYKFSHDSPPSQLTPYGGLVFNKEAEFVGISTQDRGVTIALNVQDITRILALFHTDMMGKPLSEILQHIDDQAKSRKKERGMIRLSPVKKENKSHTEAK

SEQ ID NO: 70476 - protein, 364 aa, Setaria italica
  Transcript Sequence Number=SeqID_4502
  Gene Ontology: Mol. function=hydrolase activity; Biological process =oxidation reduction
  Homolog annotation: Hit_ID=B4FMK4; Match level="QueryCoverage=94%, HitCoverage=72%, E-value=1e-165, Identity=84%"; Hit description =Catalytic/ hydrolase
  Pfam annotation: Domain name=Abhydrolase_1; Domain location=55-346; Score=83.8; E_value=6e-22; Accession=PF00561.12; Description =alphabeta hydrolase fold
SHDDEDSSSDQSSDATVSEAGRSGIGLPILLLHGFGASVFSWSRVMRPLARIAAAKVLAFDRPAFGLTSRASWSGDDSKPLNPYSMAFSVMATLAFIDYLGAEKAVLVGHSAGCLVAVDAYFEAPERVAALVLVAPAIFAPRKGVKDSATGEQEAQKQNVPNDENSPPTLFARIWGAFLKLCKHIAGLVSKMMMVIRDVLRSLYVKALVAFLRSSLGAMLVRWVMDKFGILGVRNAWYDPSKVTDHVIQGYTKPLRSRGWETALLEHTISMIIDSASATRVPVSKRLSEISCPVLVVTGDTDRIVPAWNAERVAHAIPGARFEVIKGCGHLPQEERPEEFLSVVERFLRTVFGTPNERVFQAAV

SEQ ID NO: 70477 - protein, 323 aa, Setaria italica
  misc_feature (40)..(40): Xaa can be any naturally occurring amino acid
  misc_feature (57)..(57): Xaa can be any naturally occurring amino acid
  misc_feature (63)..(63): Xaa can be any naturally occurring amino acid
  misc_feature (76)..(76): Xaa can be any naturally occurring amino acid
  misc_feature (91)..(91): Xaa can be any naturally occurring amino acid
  Transcript Sequence Number=SeqID_4503
  Gene Ontology: Mol. function=ATP binding; Cellular component =chromosome; Biological process=response to DNA damage stimulus
  Homolog annotation: Hit_ID=Q9FV56; Match level="QueryCoverage=66%, HitCoverage=74%, E-value=6e-67, Identity=63%"; Hit description=SMC -related protein MSS2 (Fragment)
PKQLLGRASSVGAFVKRGEVAGHVKISLRGDTPNDKICIXTRKIDTKNKSEWLLNGXTVPKKXIIDVIKRFNIQVXNNLTQFLPQDRVSEXAKLSPIQLLEETEKAVGDPDLPVQHRQLVERSKELKALEVALKQKEQTLNNLKALNAEQEKDVERVRLRDNLLRKAELMRKKLPWLKYDMMKKEFITVIQEQEKISKKKMEEAARIWDDAKGPIEELKKHKATHTSNIKKISNQVNENMTKRQKVIDKELQLNTELKATFDDIDDLKKQEKSRQQRILKAKEDLAAAEKELEGLQPYEQPKAEMAQLRDQIAQVNVEIKNLK

SEQ ID NO: 70478 - protein, 110 aa, Setaria italica
  Transcript Sequence Number=SeqID_4504
STCMNKLVNYPPTPAHHQPMNTDVCLLWFTPEFRAKIPLSAFFFTNREGKGKGKKERMNTCPRSCSGDRRGGAKCDPELGDPDQFADGGVLGVLGGRAASAPATPCSMSP

SEQ ID NO: 70479 - protein, 203 aa, Setaria italica
  misc_feature (7)..(7): Xaa can be any naturally occurring amino acid
  misc_feature (19)..(19): Xaa can be any naturally occurring amino acid
  misc_feature (172)..(172): Xaa can be any naturally occurring amino acid
  Transcript Sequence Number=SeqID_4505
  Gene Ontology: Mol. function=alpha-N-arabinofuranosidase activity; Biological process=L-arabinose metabolic process
  Homolog annotation: Hit_ID=B6T9B9; Match level="QueryCoverage=91%, HitCoverage=26%, E-value=3e-61, Identity=66%"; Hit description=Alpha- N-arabinofuranosidase A
  Pfam annotation: Domain name=Alpha-L-AF_C; Domain location=2-175; Score=107.0; E_value=6.5e-29; Accession=PF06964.4; Description=Alpha- L-arabinofuranosidase C-terminus
LPSAEDXFLTGLEKNSDVXEMACHAPLFVNDDIEKKWNPDVIVFNTWQHYGTPSYWMQLLFRESSGSIVHPTTISSSSSSNVSLAASAITWNEPDNSSFLRVKIVNFESVAVQVTISTTGLQASIDVLRSTATVITSSNVMDENSFSNPNKVVPVKSQLFDAAAHMQVTVAXPHSFTSFDLSLAPSKLVTLAGRYNEYLMSEL

SEQ ID NO: 70480 - protein, 103 aa, Setaria italica
  Transcript Sequence Number=SeqID_4506
  Homolog annotation: Hit_ID=B6TMN6; Match level="QueryCoverage=100%, HitCoverage=50%, E-value=3e-19, Identity=54%"; Hit description=VQ motif family protein
  Pfam annotation: Domain name=VQ; Domain location=48-78; Score=47.6; E_ value=4.8e-11; Accession=PF05678.6; Description=VQ motif
MDHEQRRQRQQRSPRGNAPGSGGGSASSGKHKGAGGKGGGKKPIKVLYISNPMRVKTSAAGFRALVQELTGRDADPSKYSPDELAGVGGAGAENPTAAADIDC

SEQ ID NO: 70481 - protein, 111 aa, Setaria italica
  misc_feature (90)..(90): Xaa can be any naturally occurring amino acid
  Transcript Sequence Number=SeqID_4507
  Homolog annotation: Hit_ID=B4FT05; Match level="QueryCoverage=37%, HitCoverage=25%, E-value=3e-14, Identity=95%"; Hit description=Heavy metal-associated domain containing protein
FLTSKLSLNPAGVTSATMEGDKIIVVGDGVDPITLTTMLRRSLGYAELLSVSSGDDKKKGDGYGYGYGGVMMYGGGKEGKEGKEGKGERXKGGGGGYGQYQAMAPVSYPAY

SEQ ID NO: 70482 - protein, 158 aa, Setaria italica
  Transcript Sequence Number=SeqID_4508
  Homolog annotation: Hit_ID=B4FT05; Match level="QueryCoverage=42%, HitCoverage=40%, E-value=1e-29, Identity=95%"; Hit description=Heavy metal-associated domain containing protein
  Pfam annotation: Domain name=HMA; Domain location=6-66; Score=16.3; E_ value=0.035; Accession=PF00403.18; Description=Heavy-metal-associated domain
MGKQKIVLKLPLDDERKKRKAFKAAVGMNGVTSATMEGDKIIVVGDGVDPITLTTMLRRSLGYAELLSVSSGDDKKKGDGYGYGYGGVMMYGGGKEGKEGKEGKESGGKGGGGGYGQYQAMAPVSYPAYQQYNAMPSYPVYSYPAYPQQEQDPGCTIM

SEQ ID NO: 70483 - protein, 151 aa, Setaria italica
  misc_feature (113)..(113): Xaa can be any naturally occurring amino acid
  misc_feature (134)..(134): Xaa can be any naturally occurring amino acid
  Transcript Sequence Number=SeqID_4509
  Gene Ontology: Mol. function=DNA-directed RNA polymerase activity; Cellular component=chloroplast; Biological process=transcription
  Homolog annotation: Hit_ID=Q01923; Match level="QueryCoverage=100%, HitCoverage=9%, E-value=6e-79, Identity=92%"; Hit description=DNA -directed RNA polymerase subunit beta''
VIAEIRAGTSTLHFKEKIQKHIYSESDGEMHWSTDVYHAPEYQYGNLRRLPKTSHLWILSVSMCRSSIASFSLHKDQDQMNTYSFSVHGRYIFDLAMANDQVSHRLLDTFGKXDREILDYLTPDRIVSNGHCNXCYPSILQDNSDLCEKAK

SEQ ID NO: 70484 - protein, 176 aa, Setaria italica
  Transcript Sequence Number=SeqID_4510
  Gene Ontology: Cellular component=cell wall
  Homolog annotation: Hit_ID=B6T8I3; Match level="QueryCoverage=84%, HitCoverage=86%, E-value=4e-72, Identity=89%"; Hit description =Disease resistance response protein 206
  Pfam annotation: Domain name=Dirigent; Domain location=10-176; Score =174.8; E_value=2.4e-49; Accession=PF03018.6; Description=Dirigent -like protein
MAMATTVLLLCAAVALAPTPSSAADDAAGFTTFKLYFHDIVGGTSPTAIRIAQAPSSNSSSTFFGAVVAIDDPLTSGPTRAAGTEVGRAQGTYTFADQKTFGLLMVMNFVFTAGEYNGSSLSILGRNEVLDDVREMSIVGGSGKFRMARGYVQAHTIDSGATSGETVVQYTVNVKA

SEQ ID NO: 70485 - protein, 137 aa, Setaria italica
  Transcript Sequence Number=SeqID_4511
  Gene Ontology: Mol. function=tRNA (guanine-N2-)-methyltransferase activity; Biological process=tRNA processing
  Homolog annotation: Hit_ID=Q8W2U5; Match level="QueryCoverage=100%, HitCoverage=33%, E-value=3e-63, Identity=83%"; Hit description =Putative tRNA (Guanine-N2-)-Methyltransferase, 5-partial (Fragment)
EMALRILLACIESHAIRHKRHIVPIISIHMDFYIRVFVRIFTFSASTVKSSPLKLAHVYQCVGCSSFHLQNIGRINLEDKRHIALPNFAPTVPEECSECAHKFVMGGPIWSDPIHDKEWASSILSSIHVMMDSYPAY

SEQ ID NO: 70486 - protein, 444 aa, Setaria italica
  misc_feature (150)..(150): Xaa can be any naturally occurring amino acid
  misc_feature (215)..(215): Xaa can be any naturally occurring amino acid
  Transcript Sequence Number=SeqID_4512
  Gene Ontology: Mol. function=tRNA (guanine-N2-)-methyltransferase activity; Biological process=tRNA processing
  Homolog annotation: Hit_ID=Q8W2U5; Match level="QueryCoverage=92%, HitCoverage=99%, E-value=0.0, Identity=82%"; Hit description =Putative tRNA (Guanine-N2-)-Methyltransferase, 5-partial (Fragment)
  Pfam annotation: Domain name=TRM; Domain location=10-372; Score =341.6; E_value=1.5e-99; Accession=PF02005.8; Description=N2,N2 -dimethylguanosine tRNA methyltransferase
SKRREEFIVRSTRGEPEDTKLSELAKYEEPKVLEALAASGLRAIRYALEVDGIGEVTAVDNNEVAVEACKKNIQHNGSLASSKVVPCLADARFYMLTHPKEFDVVDLDPYGSPAAFLDSAVQCVADGGLLMCSATDMAVLAGGNAEVCFXKYGSYPLRGKHCHEMALRILLACIESHAIRHKRHIVPIISIHMDFYIRVFVRIFTFTVKSSPLKXMQDCQCVGCSSFHLQNIGRINLEDKRHIALPNFAPTVPEECSECAHKFVMGGPIWSDPIHDKEWASSILSSIHVMMDSYPAYAKISAILTSVSEELPEAPLFVSLHNLCAILKCTSPTMVMLHSAIRNAGYQTSGSHVDPLALKTNAPMSVIWDIMRCWVHLHPVKHRPGNHPGNVILSQEPKLQANFSRAPGASVPRKSPRFVPNPEKFWGPRPKACRHPKVFHVDKS

SEQ ID NO: 70487 - protein, 48 aa, Setaria italica
  Transcript Sequence Number=SeqID_4513
MSVLANFSRAPGASVPRKSPRFVPNPEKFWGPRPKACRHPKVFHVDKS

SEQ ID NO: 70488 - protein, 105 aa, Setaria italica
  Transcript Sequence Number=SeqID_4514
LDMLSDHLFSVFGSIEYAKCCSYSIIVAVHINTPTYCCFSMILLWKKLHNNIAFQRSSTTTKKKIQFVTASIYRRLGRMPLAYLIHSFVYSTLPFWSSPSLYLNI

SEQ ID NO: 70489 - protein, 178 aa, Setaria italica
  Transcript Sequence Number=SeqID_4515
  Gene Ontology: Mol. function=beta-amylase activity; Cellular component=chloroplast; Biological process=polysaccharide catabolic process
  Homolog annotation: Hit_ID=B6SVZ0; Match level="QueryCoverage=99%, HitCoverage=31%, E-value=3e-88, Identity=89%"; Hit description=Beta -amylase
  Pfam annotation: Domain name=Glyco_hydro_14; Domain location=1-164; Score=-226.4; E_value=0.00021; Accession=PF01373.9; Description =Glycosyl hydrolase family 14
VDHADRVLMLARLAFEGLNIAVKVSGVHWWYKTASHAAELTAGFYNPCNRDGYAPIAAVLKKYDAALNFTCVELRTMDQHEVYPEAFADPEGLVWQVLNAAWDAGLQVASENALPCYDREGFNKILENAKPLNDPDGRHLFGFTYLRLSKVLFERPNFFEFERFVKRMHGEAVLDLQA

SEQ ID NO: 70490 - protein, 400 aa, Setaria italica
  misc_feature (101)..(101): Xaa can be any naturally occurring amino acid
  Transcript Sequence Number=SeqID_4516
  Gene Ontology: Mol. function=beta-amylase activity; Cellular component=chloroplast; Biological process=polysaccharide catabolic process
  Homolog annotation: Hit_ID=B6SVZ0; Match level="QueryCoverage=93%, HitCoverage=66%, E-value=0.0, Identity=93%"; Hit description=Beta -amylase
  Pfam annotation: Domain name=Glyco_hydro_14; Domain location=69-398; Score=274.1; E_value=3.1e-79; Accession=PF01373.9; Description =Glycosyl hydrolase family 14
PQEPPPPPTVPRTDDVPDGGSSSHLLAVPVNVPMDPAVAEDAAVAKQVPEVAPRPPERDFAGTPYVPVYVMLPLGVVNVSGEVVDADELVGQLRVLKAAGXDGVMVDCWWGNVEAHRPQEYNWTGYKRLFQMIRELKLKLQVVMSFHECGGNVGDDVSIPLPHWVTEIGRSNPDIYFTDRAGRRNTECLSWGIDKERVLQGRTAVEVYFDFMRSFRVEFDEYFEDAIISEIEIGLGACGELRYPSYPAKHGWKYPGIGEFQCYDRYLQKNLRRAAEERGHTIWARGPDNAGHYNSEPNLTGFFCDGGDYDSYYGRFFLNWYSQMLVDHADRVLMLARLAFEGLNIAVKVSGVHWWYKTASHAAELTAGFYNPCNRDGYAPIAAVLKKYDAALNSKLNFHC

SEQ ID NO: 70491 - protein, 146 aa, Setaria italica
  misc_feature (25)..(25): Xaa can be any naturally occurring amino acid
  misc_feature (40)..(40): Xaa can be any naturally occurring amino acid
  Transcript Sequence Number=SeqID_4517
  Gene Ontology: Mol. function=metal ion binding
MLPVPGARPFSAAMWRCTGYVPKRXFGFRYCEFPSWADEXGGADALFAMAREKPREMADSVPIGIEPKKEKHYVRSLSCRGKKIDGDQQSVPPLTEAKKREPASWKDGCQQSEACAIRDATREDRYAEINMASSDLQTIKTKKKME

SEQ ID NO: 70492 - protein, 233 aa, Setaria italica
  Transcript Sequence Number=SeqID_4518
  Gene Ontology: Mol. function=transferase activity, transferring glycosyl groups; Cellular component=integral to membrane; Biological process=cell wall organization and biogenesis
  Homolog annotation: Hit_ID=B1P2T6; Match level="QueryCoverage=89%, HitCoverage=22%, E-value=5e-60, Identity=57%"; Hit description =Cellulose synthase-like CslF8
PANGGAGNGSVVVAGGTAASVLEVESNGAGGDHNGVSDNGGGGAAPSVAANGNGKQGAERRRRSKKKKPAVSPKDRYWTPIDGKEAAAALEDGGEDGRRPLLFRTYRVKGILLHPYRLLTLLRLIAIVLFFIWRIRHPHADGMWLWWISMVGDLWFGVTWLLNQVAKLNPIKRVPDLALLKQQFDDLPDGNSNLPRLDVFINTVDPINEPMIYTMNSILSILAVDYPVDRTAT

SEQ ID NO: 70493 - protein, 62 aa, Setaria italica
  Transcript Sequence Number=SeqID_4519
LDFVKLKSECIHSFQDLLIISCNFSDQMNCQSMAWVCFRNKICPPQLPYHFLLLQLQVNQNN

SEQ ID NO: 70494 - protein, 87 aa, Setaria italica
  Transcript Sequence Number=SeqID_4520
LAIHRLRDRVHRAVRGEHCQQGMQVSVGGRKELGANLTQMAHGAFCDGPDVCGNLLARLHQMIGSMGVNLAFPPTGGILKPAVGFGF

SEQ ID NO: 70495 - protein, 343 aa, Setaria italica
  Transcript Sequence Number=SeqID_4521
  Gene Ontology: Mol. function=microtubule binding; Cellular component =nuclear outer membrane; Biological process=mRNA export from nucleus
  Homolog annotation: Hit_ID=B9SMV1; Match level="QueryCoverage=100%, HitCoverage=100%, E-value=1e-172, Identity=81%"; Hit description =Plant poly(A)+ RNA export protein, putative
  Pfam annotation: Domain name=WD40; Domain location=14-52; Score=29.9; E_value=1e-05; Accession=PF00400.24; Description=WD domain, G-beta repeat
  Pfam annotation: Domain name=WD40; Domain location=232-269; Score =18.4; E_value=0.031; Accession=PF00400.24; Description=WD domain, G -beta repeat
  Pfam annotation: Domain name=WD40; Domain location=57-95; Score=24.0; E_value=0.00061; Accession=PF00400.24; Description=WD domain, G-beta repeat
  Pfam annotation: Domain name=WD40; Domain location=99-137; Score =36.8; E_value=8.4e-08; Accession=PF00400.24; Description=WD domain, G-beta repeat
  Pfam module annotation: Pfam domain module=WD40::WD40::WD40::WD40; Domain location=14-52::232-269::57-95::99-137
  Subcellular localization annotation: CTP_CleavageSite=49; ConfidenceScore=5.30e-01
MASLTGLAANPNPNKSFEILPNPGDSVSSLSFSPKSNLLVATSWDNQVRCWEIVGGNSQPKASISHDQPVLCSAWKDDGTTVFSGGCDKQVKMWPLLSGGQPQTVAMHDAPVKEIAWIPQMNLLVSGSWDKTLRYWDTRQANPVHIQQLPERCYALTVNYPLMIVGTADRNLVVFNLQNPQTEFKRIQSPLKYQTRCLAAFPDQQGFLVGSIEGRVGVHHIDDSQQSKNFTFKCHREGNDIFSVNSLNFHPVHHTFATAGSDGAFNFWDKDSKQRLKAFSRCPLPIPCSTFNSDGSIFAYAVCYDWSRGAENHNPAAAKTSIYLHSPQESEVKGKPRIATGRK

SEQ ID NO: 70496 - protein, 83 aa, Setaria italica
  misc_feature (41)..(41): Xaa can be any naturally occurring amino acid
  Transcript Sequence Number=SeqID_4522
  Gene Ontology: Mol. function=kinase activity
  Homolog annotation: Hit_ID=Q6EQG8; Match level="QueryCoverage=100%, HitCoverage=10%, E-value=3e-27, Identity=71%"; Hit description =Leucine-rich repeat family protein /protein kinase family protein -like
SFNNFTMGSSGPNQCLQGSVNLVESYSPEMDSLSFAFYAEXSVQPCLKRNFPCVASNGQYQYSLHINCGDKEAIINGTKYEAD

SEQ ID NO: 70497 - protein, 394 aa, Setaria italica
  Transcript Sequence Number=SeqID_4523
  Gene Ontology: Mol. function=kinase activity; Biological process =protein amino acid phosphorylation
  Homolog annotation: Hit_ID=Q6EQG8; Match level="QueryCoverage=98%, HitCoverage=55%, E-value=1e-147, Identity=68%"; Hit description =Leucine-rich repeat family protein /protein kinase family protein -like
  Pfam annotation: Domain name=LRR_1; Domain location=123-145; Score =12.9; E_value=1; Accession=PF00560.25; Description=Leucine Rich Repeat
  Pfam annotation: Domain name=LRR_1; Domain location=147-169; Score =5.7; E_value=25; Accession=PF00560.25; Description=Leucine Rich Repeat
  Pfam annotation: Domain name=LRR_1; Domain location=171-193; Score =9.2; E_value=5.3; Accession=PF00560.25; Description=Leucine Rich Repeat
  Pfam annotation: Domain name=LRR_1; Domain location=195-217; Score =10.9; E_value=2.4; Accession=PF00560.25; Description=Leucine Rich Repeat
  Pfam annotation: Domain name=LRR_1; Domain location=243-265; Score =7.2; E_value=13; Accession=PF00560.25; Description=Leucine Rich Repeat
  Pfam annotation: Domain name=LRR_1; Domain location=267-289; Score =21.5; E_value=0.0036; Accession=PF00560.25; Description=Leucine Rich Repeat
  Pfam annotation: Domain name=LRR_1; Domain location=291-314; Score =9.1; E_value=5.5; Accession=PF00560.25; Description=Leucine Rich Repeat
  Pfam annotation: Domain name=LRR_1; Domain location=51-73; Score=2.6; E_value=97; Accession=PF00560.25; Description=Leucine Rich Repeat
  Pfam annotation: Domain name=LRR_1; Domain location=75-97; Score=7.3; E_value=12; Accession=PF00560.25; Description=Leucine Rich Repeat
  Pfam annotation: Domain name=LRR_1; Domain location=99-121; Score =2.3; E_value=1.1e+02; Accession=PF00560.25; Description=Leucine Rich Repeat
  Pfam module annotation: Pfam domain module=LRR_1::LRR_1::LRR_1::LRR _1::LRR_1::LRR_1::LRR_1::LRR_1::LRR_1::LRR_1; Domain location=123 -145::147-169::171-193::195-217::243-265::267-289::291-314::51-73::75- 97::99-121
RGFAPAEVRVLGRIAATLGVSHWDFAAGPCDHGGGSRVHCDCSFSNGTVCHVTEIFLKEQNFSAKLPPDFADLPNLLQLDLSRNLFHGGVPDQWARMKKLQGLSLMANRLSGQFPMVLTKITSLTNLSIEGNEFHGPIPPEIGGLIRMEKLILSVNEFTGPLPTALSLFSNLTDLRISSTNFSGRLPDFWGKLKRLEKLQIGGSLLEGPIPSSLSELTNLSDLRISDLRGSGSAFPDLSVMKSMRTLVLRKCSISGSIPSYIGSWTTLKHLDLSFNKLSGEIPPSFANLRGVDYIYLTGNSLSGNIPGWLLRRNKITDISFNNFTMGSSGPNQCLQGSVNLVESYSPEMDSLNSVQPCLKRNFPCVASNGQYQYSLHINCGDKEAIINGTKYEA

SEQ ID NO: 70498 - protein, 111 aa, Setaria italica
  Transcript Sequence Number=SeqID_4524
EESLSEMRRISQLLRDEEEEDDAEAEYPEETDESPPPAAAAAEGLKVKIVLTRAELEWLMAQLKTGDQRLEDVLHHMHAAKGAAAADKQLQGGGWRPRLESILECPEALVS

SEQ ID NO: 70499 - protein, 95 aa, Setaria italica
  Transcript Sequence Number=SeqID_4525
  Subcellular localization annotation: CTP_CleavageSite=72; ConfidenceScore=5.24e-01
NRRAAGENAAKSPLCPPFSLCTRPPTQGQISKKTRQRRLPAGPNLNYALREHPPTDGKGRRGVPPMRRRLVVVDRRLVVGVVGGGGGGELDEEVA

SEQ ID NO: 70500 - protein, 66 aa, Setaria italica
  Transcript Sequence Number=SeqID_4526
MAVYIRLNDAVRARLRGDDAAGAGCTSSGSDHDASACLSGLVQAFLETEAGAAEEGAGPAPKEYDS

SEQ ID NO: 70501 - protein, 129 aa, Setaria italica
  Transcript Sequence Number=SeqID_4527
  Gene Ontology: Mol. function=acetylglucosaminyltransferase activity; Cellular component=membrane; Biological process=isopeptide cross -linking via N6-(L-isoglutamyl)-L-lysine
  Homolog annotation: Hit_ID=UPI000034F120; Match level="QueryCoverage =86%, HitCoverage=26%, E-value=6e-30, Identity=54%"; Hit description =glycosyltransferase family 14 protein / core-2/I-branching enzyme family protein
AVFIYVYFFLAGSSSVILSRKFIEYCIVGMDNLPRTLLMYYTNMPLPHRKYFQTVLCNSPEFNRTVVNHDLHYSTWDAPSKNEPRLLTMADVENMTESGAAFGTRFPKDDPVLDHICIVGKFLLPSCPW

SEQ ID NO: 70502 - protein, 259 aa, Setaria italica
  Transcript Sequence Number=SeqID_4528
  Gene Ontology: Mol. function=acetylglucosaminyltransferase activity; Cellular component=membrane; Biological process=isopeptide cross -linking via N6-(L-isoglutamyl)-L-lysine
  Homolog annotation: Hit_ID=B9RWP7; Match level="QueryCoverage=100%, HitCoverage=59%, E-value=3e-88, Identity=56%"; Hit description =Transferase, transferring glycosyl groups, putative
  Pfam annotation: Domain name=Branch; Domain location=1-138; Score =83.9; E_value=5.8e-22; Accession=PF02485.13; Description=Core-2I -Branching enzyme
LRIGQGWDWFVHLDAADYPLVTPDDLLHVLSYLPKDLNFIQHTSYIGWKESRQIRPIIVDPGLYLSSRNDIFYATQKRDLPNAYKLFTGSSSVILSRKFIEYCIVGMDNLPRTLLMYYTNMPLPHRKYFQTVLCNSPEFNRTVVNHDLHYSTWDAPSKNEPRLLTMADVENMTESGAAFGTRFPKDDPVLDHIDAEILHRLPGELVTGGWCIGVGHDSPCDVSGNLDVLRPGPAATKVAKFLAERLSYRSFYSQQCIWD

SEQ ID NO: 70503 - protein, 89 aa, Setaria italica
  misc_feature (72)..(72): Xaa can be any naturally occurring amino acid
  Transcript Sequence Number=SeqID_4529
  Gene Ontology: Mol. function=uroporphyrinogen-III synthase activity; Biological process=tetrapyrrole biosynthetic process
  Homolog annotation: Hit_ID=Q10QR9; Match level="QueryCoverage=96%, HitCoverage=30%, E-value=2e-31, Identity=75%"; Hit description =Uroporphyrinogen-III synthase, chloroplastic
FNARAAGSPKVRVAVVGAGTAKVFDEVSQSDDQSLEVAFSPSKAMGKVLASELPRGSESTCKVLYPASAKKXGLSDRGFHVTRLNTYTT

SEQ ID NO: 70504 - protein, 95 aa, Setaria italica
  Transcript Sequence Number=SeqID_4530
  Gene Ontology: Mol. function=uroporphyrinogen-III synthase activity; Biological process=tetrapyrrole biosynthetic process
  Homolog annotation: Hit_ID=B6TBF8; Match level="QueryCoverage=82%, HitCoverage=26%, E-value=9e-24, Identity=69%"; Hit description =Uroporphyrinogen-III synthase
EFAISISFVLRYGSSYELNFYDNVPVEDVEPLTLKLAISAPVVAVASPSALKAWLKLISKVDNWNNSIACIGETTGSAAKKLGLKSIYYPTTPGT

SEQ ID NO: 70505 - protein, 230 aa, Setaria italica
  misc_feature (111)..(111): Xaa can be any naturally occurring amino acid
  Transcript Sequence Number=SeqID_4531
  Gene Ontology: Mol. function=uroporphyrinogen-III synthase activity; Cellular component=nucleus; Biological process=tetrapyrrole biosynthetic process
  Homolog annotation: Hit_ID=B6TBF8; Match level="QueryCoverage=86%, HitCoverage=67%, E-value=2e-85, Identity=77%"; Hit description =Uroporphyrinogen-III synthase
  Pfam annotation: Domain name=HEM4; Domain location=50-230; Score= -29.1; E_value=0.0035; Accession=PF02602.7; Description =Uroporphyrinogen-III synthase HemD
  Subcellular localization annotation: CTP_CleavageSite=26; ConfidenceScore=5.56e-01
MAFSSSLAFPFPSPPSGQARPAGRLRAGATGRFLGCSSPPPDVVVTRERGKNAKLIAALEKHNIQALELPLIKHVDGPDTYRLPDVLRNDKFDWITISSPEAAAVFLQGWXAAGSPKVRVAVVGAGTAKVFDEVSQSDDQSLEVAFSPSKAMGKVLASELPRGSESTCKVLYPASAKASREIQDGLSDRGFHVTRLNTYTTVPVEDVEPLTLKLAISAPVVAVASPSALK

SEQ ID NO: 70506 - protein, 58 aa, Setaria italica
  Transcript Sequence Number=SeqID_4532
TLDLRYTCLAFFNLIVSFTSVLLHASLDYQSRDFYRKNQKIIGIGVISHSCAWILDIC

SEQ ID NO: 70507 - protein, 161 aa, Setaria italica
  Transcript Sequence Number=SeqID_4533
  Gene Ontology: Mol. function=uroporphyrinogen-III synthase activity; Cellular component=nucleus; Biological process=tetrapyrrole biosynthetic process
  Homolog annotation: Hit_ID=B6TBF8; Match level="QueryCoverage=97%, HitCoverage=53%, E-value=3e-63, Identity=76%"; Hit description =Uroporphyrinogen-III synthase
LCIDQSLEVAFSPSKAMGKVLASELPRGSESTCKVLYPASAKASHEIQDGLSDRGFHVTRLNTYTTVPVEDVEPLTLKLAISAPVVAVASPSALKAWLKLISKVDNWNNSIACIGETTGSAAKKLGLKSIYYPTTPGLEGWVESILEALRGHRQLKEAPKC

SEQ ID NO: 70508 - protein, 331 aa, Setaria italica
  Transcript Sequence Number=SeqID_4534
  Gene Ontology: Cellular component=cytoplasm; Biological process=cell division
  Homolog annotation: Hit_ID=Q01AZ1; Match level="QueryCoverage=78%, HitCoverage=57%, E-value=2e-24, Identity=35%"; Hit description =Temperature sensing protein-related (ISS)
  Pfam annotation: Domain name=D123; Domain location=11-331; Score =122.4; E_value=1.5e-33; Accession=PF07065.6; Description=D123
LLPAITSGRQPFAPIHAHHPDPVSLLNSELFFGSSNEDVHDPDADHPHRPEFPELEAVIDAAIAELGGAALPKLNWSAPKDATFMSADGTTRCTCFAEVAMLLRASDCVAHDLASARQSCEDFVRPEGARRNARKVSAGAEEGARSNANEADGSRGINDAPSDSREIGEEGGKTNGAVGDLVDSHEEESDGDTWVDDGFQYYLALRKWYPGLRPESEFRCFVRERKLVAVSQRDASAYYPSLPGWSSEVQPKIKAFFEEVIELQFGSNNYTFDVYVRADGRVKLIDFNPWGGYTLPLLFTWEELEEEGRGHELEFRVVMQQGAVRPGLMTA

SEQ ID NO: 70509 - protein, 96 aa, Setaria italica
  misc_feature (89)..(89): Xaa can be any naturally occurring amino acid
  Transcript Sequence Number=SeqID_4535
MRWRSCSLIGGGEETNHVRSDYHLLTIQHGVTSSLKSVGLQVWKAALLLADFVLHKSFTSSYFDGVTAIEVGAGTGLVGLALARVARRXFCTDRRR

SEQ ID NO: 70510 - protein, 86 aa, Setaria italica
  Transcript Sequence Number=SeqID_4536
  Gene Ontology: Mol. function=protein serine/threonine kinase activity; Biological process=protein amino acid phosphorylation
  Homolog annotation: Hit_ID=Q8SB68; Match level="QueryCoverage=100%, HitCoverage=7%, E-value=6e-34, Identity=74%"; Hit description =Leucine Rich Repeat family protein, expressed
LLELLCRKMPVDPSFEDGVDIATWIRTKLKQADRCSIIDLMDEEIMYWPEDDQEKALDLLDLAVSCTQVACQSRPSMREVVNMLLK

SEQ ID NO: 70511 - protein, 136 aa, Setaria italica
  Transcript Sequence Number=SeqID_4537
  Gene Ontology: Mol. function=DNA binding
  Homolog annotation: Hit_ID=B6UHC5; Match level="QueryCoverage=98%, HitCoverage=50%, E-value=5e-47, Identity=75%"; Hit description=DNA -binding protein
  Pfam annotation: Domain name=DUF296; Domain location=1-66; Score =22.1; E_value=8.9e-06; Accession=PF03479.7; Description=Domain of unknown function (DUF296)
VALRGRFEILSLSGAFLPAPAPPGATGLAVYLAGGQGQVVGGSVMGELIASGPVMVIAATFGNATYERLPLDQDAEEGAVLSGSSEGATAQQMEQQQSSGGNVVPPSMYAVPQTPPHDMFGQWGHAAVTRPPPTSF

SEQ ID NO: 70512 - protein, 153 aa, Setaria italica
  misc_feature (20)..(20): Xaa can be any naturally occurring amino acid
  Transcript Sequence Number=SeqID_4538
  Gene Ontology: Cellular component=outer membrane
  Homolog annotation: Hit_ID=B9SQQ8; Match level="QueryCoverage=98%, HitCoverage=28%, E-value=2e-43, Identity=62%"; Hit description =Sorting and assembly machinery (Sam50) protein, putative
RRLEVFDSVHITLDAGPPEXLPGTTNILIEVVEAANPIDGSVGCLSKPEAKSWSVEGSLRLKNIFGYGDIWDASGAYGWDQSSEIGIGVSLPRFRSIPTPLTARASLLSHDWLKFSSYKERLLGLSFGLLSTMHHDLSYNLICRTLTDPSQIR

SEQ ID NO: 70513 - protein, 135 aa, Setaria italica
  Transcript Sequence Number=SeqID_4539
  Subcellular localization annotation: CTP_CleavageSite=58; ConfidenceScore=5.13e-01
RHTRIAPALLSMIIHRVIPTPPDFTCQGSVGRRPAAQRSNRSIIILLFSSATAYHSFRVELGSCSNPREPDGGGGSCRCADGEVHPPPCELRCGEDGPQPAVRRGRGRERRRVPGSPLVRFYCRLPGGFRAGGRG

SEQ ID NO: 70514 - protein, 104 aa, Setaria italica
  Transcript Sequence Number=SeqID_4540
  Gene Ontology: Mol. function=metal ion transmembrane transporter activity; Cellular component=membrane; Biological process=metal ion transport
  Homolog annotation: Hit_ID=B9MTT9; Match level="QueryCoverage=95%, HitCoverage=16%, E-value=3e-26, Identity=56%"; Hit description=ZIP transporter
VANKNSWRGALAAAALTGLAGPSAAISAILARIDYDGLDYWMVIACGALIPSFGRVFRRSLRLDMRKSIAGLLIGIGFASVCLMSTRFICLHTPYCNSAPEAVT

SEQ ID NO: 70515 - protein, 578 aa, Setaria italica
  Transcript Sequence Number=SeqID_4541
  Gene Ontology: Mol. function=metal ion transmembrane transporter activity; Cellular component=membrane; Biological process=metal ion transport
  Homolog annotation: Hit_ID=B9MTT9; Match level="QueryCoverage=95%, HitCoverage=94%, E-value=0.0, Identity=61%"; Hit description=ZIP transporter
  Pfam annotation: Domain name=Zip; Domain location=59-294; Score=8.6; E_value=9.7e-07; Accession=PF02535.14; Description=ZIP Zinc transporter
MDRRAGAILVYLLFVLVVRDVSAVAETEAGNVRLVQEAPHRELEGTGRQDGAKVGRVSVSTVAWSTLIMAAATGLGAVPFFFMELEAQWAGLCNGLAAGVMLAASFDLVQEGQVYGSGSWVVFGILSGGIFIWLCKKFLEQYGEVSMLDIKGADASKVILVVGIMTLHSFGEGSGVGVSFAGSKGFSQGLLVTIAIAVHNIPEGLAVSMVLSSRGVSPQKAMIWSIITSLPQPIVAVPAFLCADAFQKVLPFCTGFAAGCMIWIVIAEVLPDAFKEATPSQVASAGTLAVAFMETLSTVLLGFTDGNNSEDASGFLVSLVFGLGPLIGGIILVTFSLAFSMPHPLLTGVASGIAFRLAAWRPVQLLMSSKMGLFTTLFLLIVGCLVYHAATSSILRVVNRKRSSVNVITSSSGFSLSVLTLQSLLACGSVFLHAYAEGLVLGVAARKAYGLGRYMVLPASLHGLPRGAAVASCVYGATDSWRGALAAAALTGLAGPSAAISAILARIDYDGLDYWMVIACGALIPSFGRVFRRSLRLDMRKSIVGLLIGIAFASVCLMSTRFICLHTPYCNSAPEAVT

SEQ ID NO: 70516 - protein, 587 aa, Setaria italica
  Transcript Sequence Number=SeqID_4542
  Gene Ontology: Mol. function=translation initiation factor activity; Cellular component=nucleus; Biological process=translational initiation
  Homolog annotation: Hit_ID=B6U1M3; Match level="QueryCoverage=100%, HitCoverage=98%, E-value=0.0, Identity=84%"; Hit description=Ligatin
  Pfam annotation: Domain name=PUA; Domain location=85-164; Score=19.2; E_value=0.00078; Accession=PF01472.12; Description=PUA domain
  Pfam annotation: Domain name=SUI1; Domain location=493-577; Score =92.4; E_value=1.6e-24; Accession=PF01253.14; Description=Translation initiation factor SUI1
  Pfam module annotation: Pfam domain module=PUA::SUI1; Domain location= 85-164::493-577
VQRLYWGQTQKKLRRTAKERFPQASDADLDAILPPKGEITLAKYPNHALVYGIEGEFPMIFNIDARGHDLFPTVYALWKVPHLLPAFTLKGGEVSRYVIGGADLMFPGISITPEGFPSFEAGQPWAVKVPGNPAPIAVGITAMSSTEALKAGLRGKALRIVHYYRDMLWDSADGRYVPNEGFFEDIVVEDPNFVSTSQSPDSTEETAEATHDREDAVVDTSDSADPAILSEATEEITDGVNELKLPEDKSTERTPDEKEHHNLTTEEIDSLLDKCLLQALYTSIKEKDLPMPGSTVWANHILPCRPPGVTLDIKKSSHKKLSKWLQSKSSSGLISGKEDKYKEEFILVGINRKHPDYMAFKPEKRVQEPVEREKAVAESSVTKQLEVAEIYKPTSHVKPIFVAVEADMEKYYSASEASDIVFRYVEKENLVKPTDKAKVILDVTLCDALYKGAIKKGSAYPTEIHKKDLGSTFLNRMQVHHIVTRGTQEVIRKGAIRTIQIMTERRQGNKKMTRLSGLECFLMDPDSLASELQKKFACSTTTAELPGKKGQYEVLVQGGVIDDLAKHLVDHYGVPKRYIEVYDKTKR

SEQ ID NO: 70517 - protein, 81 aa, Setaria italica
  Transcript Sequence Number=SeqID_4543
  Gene Ontology: Biological process=response to biotic stimulus
  Homolog annotation: Hit_ID=B6U3F5; Match level="QueryCoverage=86%, HitCoverage=27%, E-value=2e-30, Identity=91%"; Hit description =Pathogen-related protein
QRSISPCKRMQEWPAGSLEEVVQNAIKTWEMELSHKARLSDFKSVSPGRFTLSVNGGRARSGEETLAVGSYNALLEQDPTT

SEQ ID NO: 70518 - protein, 101 aa, Setaria italica
  Transcript Sequence Number=SeqID_4544
  Gene Ontology: Mol. function=structural molecule activity; Cellular component=cytoskeleton; Biological process=multicellular organismal development
  Homolog annotation: Hit_ID=Q6Z256; Match level="QueryCoverage=70%, HitCoverage=18%, E-value=4e-36, Identity=94%"; Hit description=Actin- related protein 2
LLISNFVLLFFIPCSSLIGICFKIWDDMGHIWDNAFYSELKVDPSECKILLTDPPLNPVKNREKMIETMFEKYNFAGVFIQIQAVLSLYAQGHLSPSTTTC

SEQ ID NO: 70519 - protein, 389 aa, Setaria italica
  Transcript Sequence Number=SeqID_4545
  Gene Ontology: Mol. function=structural molecule activity; Cellular component=cytoskeleton; Biological process=multicellular organismal development
  Homolog annotation: Hit_ID=Q6Z256; Match level="QueryCoverage=100%, HitCoverage=100%, E-value=0.0, Identity=97%"; Hit description=Actin -related protein 2
  Pfam annotation: Domain name=Actin; Domain location=1-387; Score =513.9; E_value=2.1e-151; Accession=PF00022.11; Description=Actin
MESRNVVVCDNGTGYVKCGFAGENFPTSVFPCVVGRPLLRYEESLQEQELTDIVVGAACADLRHQLDVSYPVSNGIVQNWDDMGHIWDNAFYSELKVDPSECKILLTDPPLNPVKNREKMIETMFEKYNFAGVFIQIQAVLSLYAQGLLTGLVIDSGDGVTHVVPVVDGYSYPHLTKRMNVAGRHITSYLVDLLSRRGYAMNKSADFETVREIKEKLCYLSYDYKREYQLGLETTILVKSYTLPDGRVIKVGTERFQAPEALFTPELIDVEGDGMADMAFRCIQEMDIDNRMTLYQHIVLSGGSTMYPGLPSRLEKEILDRYLDVVLKGNKDGLKKLRLRIEDPPRRKHMVYLGGAVLAGIMKDAPEFWITRQEYQEEGVACLRKCGQA

SEQ ID NO: 70520 - protein, 82 aa, Setaria italica
  Transcript Sequence Number=SeqID_4546
SSLFILRRGKQPSMKPFWPCLHSSSTKSHNALGKKSAIEKSPLVFHLLLWACCDPLFPYCFIGMTEQYFFPEKGHICINLAT

SEQ ID NO: 70521 - protein, 89 aa, Setaria italica
  Transcript Sequence Number=SeqID_4547
LSLYYCPSLLLDVIKQEAQVTNIGQRELSIIELRRAKYLQDATPVHQTRTDYIHTREKTNNHDQKSTKKTSGGSSLKLRQPPDSCQVPR

SEQ ID NO: 70522 - protein, 102 aa, Setaria italica
  misc_feature (85)..(85): Xaa can be any naturally occurring amino acid
  Transcript Sequence Number=SeqID_4548
  Gene Ontology: Mol. function=DNA binding; Cellular component=nucleus
  Homolog annotation: Hit_ID=Q8S4P5-2; Match level="QueryCoverage=75%, HitCoverage=22%, E-value=3e-28, Identity=79%"; Hit description =Isoform 2 of Histone-lysine N-methyltransferase EZ2
MASSSKASDSSSQRSKRSDQGTGRDAAAASVVAIHGKLTQLVRQIQSKRLAHIKDKLEANRKTLQRHTCALFDVAAATEVASRGXEGGNALSQRAAEFSPGQ

SEQ ID NO: 70523 - protein, 371 aa, Setaria italica
  misc_feature (111)..(111): Xaa can be any naturally occurring amino acid
  Transcript Sequence Number=SeqID_4549
  Gene Ontology: Mol. function=nucleic acid binding; Cellular component= chromatin; Biological process=chromatin assembly or disassembly
  Homolog annotation: Hit_ID=Q6UUR9; Match level="QueryCoverage=84%, HitCoverage=57%, E-value=1e-158, Identity=81%"; Hit description =Putative gag-pol protein
  Pfam annotation: Domain name=rve; Domain location=126-281; Score =114.3; E_value=4e-31; Accession=PF00665.18; Description=Integrase core domain
MLIQSPIVDQVREAQQHDRLLQEVRKRILGGRPREFTIDEHGAIRFRGRLCVPQNSDVKMDILREAHRTPYTIHPGETKMYRDLKKNFWWKRMKVDVAKYVASCGICQQVXAEHKKPAGLLRPLEIPEWKWEHITMDFVVGLPRSPRGRDAIWVIVDRLTKSAHFIPMKSTSSAPDLVPLYMREVLRLHGVPKSIVSDRDPKFVSNFWRSLHSALGTNLTLSTAFHPQTDGQSERTIQTLEDMLRACVLSWKGSWEDHLSLAEFAYNNSYQASIKMAPFEALYGRKCISPICWETLGERSLIGPDWVRVTSKKVREIRQNLLAAQSRQKSYADVRRRDLEFAVGDHVLLRVSPTKGVVRFGTTGKLSPRYI

SEQ ID NO: 70524 - protein, 104 aa, Setaria italica
  Transcript Sequence Number=SeqID_4550
REVCDVLLLPNPQAKHPSIKYLPKKEIAALSVIRSVTTLVVPQTLGQREDMGKGPIYMEDAPFLLLLLSSIRFASSPQGFAAVERGFREGKPWESREGGKKRCS

SEQ ID NO: 70525 - protein, 133 aa, Setaria italica
  Transcript Sequence Number=SeqID_4551
LIQYHPFNYKFMHILLLLLHMPCSLLYNLVMALVGIIMMRFMLSNEERLIWYMRCILSLCDLSWHCISLHHNAWHMELSRRLIAAIVPVQHRLLGITMQLHTLLSMKAGDMAFVLHLHLGCYRFSMVFIWQWW

SEQ ID NO: 70526 - protein, 101 aa, Setaria italica
  Transcript Sequence Number=SeqID_4552
REVCDVLPHSYPQAKHPSNKYLPKKEIAALSVIRSVTTLVVPQTLGQREDMGKGPIYMEDAPFLLLLLSSIRFASFPQGFAAVERGFREGKPWESREGGRN

SEQ ID NO: 70527 - protein, 98 aa, Setaria italica
  Transcript Sequence Number=SeqID_4553
  Subcellular localization annotation: CTP_CleavageSite=56; ConfidenceScore=5.01e-01
LLLRTYDNKHATSWLLWLEPNQRPTGRRCQQGGRDTGCNRMALLPHLFLRKPATLRSSSPGCTSTSNLQRPIESPLLPRVRLVPWMAVLRVQLDVLIV

SEQ ID NO: 70528 - protein, 196 aa, Setaria italica
  misc_feature (162)..(162): Xaa can be any naturally occurring amino acid
  Transcript Sequence Number=SeqID_4554
  Gene Ontology: Mol. function=nucleic acid binding; Cellular component= chromatin; Biological process=chromatin assembly or disassembly
  Homolog annotation: Hit_ID=Q6UUR9; Match level="QueryCoverage=96%, HitCoverage=34%, E-value=3e-85, Identity=79%"; Hit description =Putative gag-pol protein
  Pfam annotation: Domain name=Chromo; Domain location=137-192; Score =32.6; E_value=1.6e-06; Accession=PF00385.16; Description='chromo' (CHRromatin Organisation MOdifier)
TLGERSLIGPDWVRETSEKVREIRQNLLAAQSRQKSYVDVRRRDLEFAVGDHVLLRVSPTKGVVRFGTTGKLSPRYIGPFVITARVGSLAYRLQLPESLKQVHNVFHVSMLRKYLRDPEHKIDLEPLIVEPNLIVECHPERILDSSERVMRKRTIKYVKVLXSNQSEREATWELEDQMRKKYPQLFESGGNAPDHA

SEQ ID NO: 70529 - protein, 90 aa, Setaria italica
  Transcript Sequence Number=SeqID_4555
FALHLPCLLPSYSTKYEGRRHGICIAFAFMVLSVFYGICLAVVVRSEFSPRFGDELVYLCMRVLELLLLLFSEGIHSLIIVKPWSNELVV

SEQ ID NO: 70530 - protein, 72 aa, Setaria italica
  Transcript Sequence Number=SeqID_4556
  Subcellular localization annotation: CTP_CleavageSite=59; ConfidenceScore=5.37e-01
DITYTTYTFISSMNMNGMITKWPSSVTTNQLLLQYSTVQHVNQQNNDLYTSTLNRNRAVSMYVCAQPLQLTT

SEQ ID NO: 70531 - protein, 77 aa, Setaria italica
  Transcript Sequence Number=SeqID_4557
EKARLPTAMILHVGPHNQLPTHLMPMLMTAFNSTITSYPHISHTYFENCSIVKVQHVTIKEISQRTVSAPIKLGPKK

SEQ ID NO: 70532 - protein, 135 aa, Setaria italica
  misc_feature (121)..(121): Xaa can be any naturally occurring amino acid
  Transcript Sequence Number=SeqID_4558
IVDVGKSRFLFCFGKAHSRPIVAENERFGCSGDIMVDANIGARVGELPNCFMIINSMDNAASDDVQHLDVAILENQLQLVPSKFQMGCLERNDTTQETWQNFASFQVIILEDSRVVVRFQXTSCLTVNNWAKTPQ

SEQ ID NO: 70533 - protein, 103 aa, Setaria italica
  misc_feature (46)..(46): Xaa can be any naturally occurring amino acid
  misc_feature (79)..(79): Xaa can be any naturally occurring amino acid
  Transcript Sequence Number=SeqID_4559
  Gene Ontology: Mol. function=potassium ion transmembrane transporter activity; Cellular component=membrane; Biological process=potassium ion transport
  Homolog annotation: Hit_ID=Q84MS4; Match level="QueryCoverage=100%, HitCoverage=16%, E-value=9e-37, Identity=57%"; Hit description =Potassium transporter 27
LSNSLYRFVHGAYVPVAMSAVLMVVMIVWHYVHVKKKNFELEHSVXNDSVKELLGRRDVQRAPGIGLFYTELVQGIPPXRFLFRQVDREDYKVFQCVARYGYR

SEQ ID NO: 70534 - protein, 201 aa, Setaria italica
  misc_feature (163)..(163): Xaa can be any naturally occurring amino acid
  Transcript Sequence Number=SeqID_4560
MAGILAWAADLDARAASMRRAIQDLRLRVPPPHVAQRLPHLHAHSLASSAALALQLNAHSSTKEQAQQRRITLQEENAAYEKALSDCRQKIQERQMEISQLQSNLKEMEVAEHNLKAQLEDALKEQEATQHKVSTTASETTENALLEAESSLNLKSKDLEEKXRELELLNNKVQTIEKEWSVVEEESLKNPTPFFGTYIRD

SEQ ID NO: 70535 - protein, 248 aa, Setaria italica
  Transcript Sequence Number=SeqID_4561
AQQREITLQEENAAYEKALSDCRQKIQERQMEISQLQSNLKEMEVAEHNLKAQLEDALKEQEATQHKVSTTASETTENALLEAESSLNLKSKDLEEKKRELELLNNKVQTIEKEWSVVEEESLKNPTPEQREKVLERQLHSLIEQLTSKQAQAEILITDVRAKEKELERLNHLHRNLHSSANETSAPRNRFSRGLLSAPEDYYGAKAGRRLYQPDLRTEGQKRMMVLRSAIVLYVLLLHIVVFIKISV

SEQ ID NO: 70536 - protein, 250 aa, Setaria italica
  Transcript Sequence Number=SeqID_4562
  Gene Ontology: Mol. function=nucleic acid binding; Cellular component= nuclear speck; Biological process=nuclear mRNA splicing, via spliceosome
  Homolog annotation: Hit_ID=B9SZR9; Match level="QueryCoverage=44%, HitCoverage=43%, E-value=1e-50, Identity=89%"; Hit description =Serine/arginine rich splicing factor, putative
  Pfam annotation: Domain name=RRM_1; Domain location=18-88; Score =91.8; E_value=2.4e-24; Accession=PF00076.14; Description=RNA recognition motif. (a.k.a. RRM, RBD, o
MSRFGRSGPPPIRDTYSLLVLNITFRTTADDLFPLFDKYGEVVDIYIPRDRRTGDSRGFAFVRYKYEDEAQKAVDRLDGKLVDGREIMVQFAKYGPNAERINKGRIVEPVPRSRGRSRSRSPRRRYRDDYRDDYRDRDYRRRSRSRSRDRYTRDRYRERDYRRRSRSRSYSPDDYKKHGRDSLSPARRSPSRSRSRSYSPDDYKRRGRDSASPASRSPSRSPPRKASPSPEKSPVRRNDDRSPRSRSPST

SEQ ID NO: 70537 - protein, 89 aa, Setaria italica
  misc_feature (82)..(82): Xaa can be any naturally occurring amino acid
  misc_feature (84)..(84): Xaa can be any naturally occurring amino acid
  Transcript Sequence Number=SeqID_4563
  Subcellular localization annotation: CTP_CleavageSite=52; ConfidenceScore=5.29e-01
LLPFPFPGVDDWASGAASRCLARSSPGPSPATSIRQPEFVYTMEESRKRDVSTANAKNISSHLDEDFGNDFLSSWKLPKSGXNXIDFSV

SEQ ID NO: 70538 - protein, 339 aa, Setaria italica
  misc_feature (184)..(184): Xaa can be any naturally occurring amino acid
  Transcript Sequence Number=SeqID_4564
  Gene Ontology: Mol. function=acyltransferase activity; Cellular component=plastoglobule; Biological process=metabolic process
  Homolog annotation: Hit_ID=B9RH18; Match level="QueryCoverage=97%, HitCoverage=45%, E-value=4e-91, Identity=51%"; Hit description =Catalytic, putative
HNSQLQTLSAFLDLVPEPFHLTTPQLLNFLTGNFMNMPLTFIGRGLSLEEAGQTLSDITSSLFASLLFLVDILTKESIVWKLKMLKTASSFVNSRLHAVKAQTLVLASGNDELLPSSQEAERLRGALEKCRTRLFRDKGHKILLEDEFDLATTIKGAGYYRRSRKTDFVSDYLPPTPDELQQAXNRDRVLNFITDPVLLSTLPDGKIVRGLAGLPREGPAVLVGYHMLLGLELGPMVTGVLSSTGVHIRGLAHPVIFDKNSEQLMPHSAYFDLHRILGAVPVTGANFYKLLADKEFVLLYPGGAREALHRKGEEYKLFWPEQPEFVRMASVGFGRNDHT

SEQ ID NO: 70539 - protein, 509 aa, Setaria italica
  misc_feature (283)..(283): Xaa can be any naturally occurring amino acid
  misc_feature (440)..(440): Xaa can be any naturally occurring amino acid
  Transcript Sequence Number=SeqID_4565
  Homolog annotation: Hit_ID=Q9XHY7; Match level="QueryCoverage=99%, HitCoverage=40%, E-value=8e-76, Identity=38%"; Hit description =Probable histone acetyltransferase HAC-like 3
MAQTLQGKVMASYAPSSFSIRQQMSPSDFDMLQPDNMDQSTSPIRSIVIQKIASCLKKREQFAKTSPDYLLKFSRKIDECLYKRAPKVHYMDLSTLEVRVNALLNSVSHRNHRDSWISSAAPTTKNLQQLPGIQMIDSSVYHERVDPAFTNLPARARDMPTHTMFTSQRYLPYNHNVAAANFHLTERPESFRSTLVAPCVSALPKCSSGLGEIASAGFPNGHVKDNFPGGAHPVDSPISSMSGSSSPLSAVCDPTTSSNAMIRSSVDSISKASGQNFLQVLCXSTGEGQSFQQHREYERELDGAWSQPVELSIQSNRTTERHELYLKGECHLDRCMEVEGKYCRMSDCEDLCRETYSSLSSPSAQYQCCLMADCDPCDPEGERIERSEQTSNSTVSKPSSPVSDESYGKRPVKRLKADVAGLVDVNQVESPKEQKPVVNXGNHACGETLHSEITELPTKSHCSSLGVINADTDDMLRQGSEGVHNMEIVTEKELHCVKDDIEMKESKSV

SEQ ID NO: 70540 - protein, 159 aa, Setaria italica
  Transcript Sequence Number=SeqID_4566
  Gene Ontology: Mol. function=binding
  Homolog annotation: Hit_ID=Q5N8Y4; Match level="QueryCoverage=56%, HitCoverage=10%, E-value=9e-37, Identity=66%"; Hit description=SF21 -like protein
  Subcellular localization annotation: CTP_CleavageSite=45; ConfidenceScore=5.16e-01
FRILSSLNSQLFESSALMNIAAVKSLLSALHQLSSQHISGSSQLSGQQIGSISFSVERMTSILVNNLHRVEPIWDQIAAHHLELANCSNPQLRSMALDSLDQSICSVVGSEKFQGISSAPHQFQESQMVNESETVSFEYAVLSPLVILYSSNKNVDVQM

SEQ ID NO: 70541 - protein, 325 aa, Setaria italica
  Transcript Sequence Number=SeqID_4567
  Gene Ontology: Mol. function=binding
  Homolog annotation: Hit_ID=Q5N8Y4; Match level="QueryCoverage=79%, HitCoverage=23%, E-value=1e-122, Identity=83%"; Hit description=SF21- like protein
EETLAAVAGMFSSKAKGIEWSMDNDASNAAVLVASEAHTITLALEGLLGVVFTIATLTDEALDVGELESPKCESNSMECSGQLALLCMAMVNSTWLTILDSLSLILMRSQGEAIILEILKGYQAFTQACGVLRAIEPLNSFLASLCKFTINNPNEGEKKSILQSPGSKKSETTMDQRDGIILTPKNVQALRTLFNVAHRLHNILGPSWVLVLETLSALDRAIHSPHASTQEVSASVSRLSRDTSGQYSDFHILSSLNSQLFESSALMNIAAVKSLLSALHQLSSQHISGSSQLSGQQIGSISFSVERMTSILVNNLHRGCFLTCR

SEQ ID NO: 70542 - protein, 70 aa, Setaria italica
  Transcript Sequence Number=SeqID_4568
  Gene Ontology: Mol. function=sugar binding
  Homolog annotation: Hit_ID=B9R9D8; Match level="QueryCoverage=100%, HitCoverage=31%, E-value=1e-10, Identity=51%"; Hit description=3 -hexulose-6-phosphate isomerase, putative
VAHLPAQTMADDDEEAEATELERASSRAKLPMGSLYEGAMFVLFEMVVLELARVLGQSPPQMRARHTNLE

SEQ ID NO: 70543 - protein, 358 aa, Setaria italica
  Transcript Sequence Number=SeqID_4569
  Gene Ontology: Mol. function=hydrolase activity, acting on acid anhydrides, catalyzing transmembrane movement of substances; Cellular component=integral to membrane; Biological process=copper ion transport
  Homolog annotation: Hit_ID=Q6ZDR8; Match level="QueryCoverage=95%, HitCoverage=35%, E-value=1e-168, Identity=83%"; Hit description =Putative potential copper-transporting ATPase
  Pfam annotation: Domain name=E1-E2_ATPase; Domain location=99-335; Score=230.7; E_value=3.7e-66; Accession=PF00122.12; Description=E1 -E2 ATPase
  Subcellular localization annotation: CTP_CleavageSite=23; ConfidenceScore=5.13e-01
QIQQHQHQRTSPKHPHLFGVNVPLMHFIHSTGFHLSLSIFTFVGPGRRLILDGIKSLFKGSPNMNTLVGLGALSSFAVSSIAAFIPKLGWKTFFEEPVMLIAFVLLGKNLEQRAKLKATSDMTGLLNILPSKARLMVDNDAEKSSLVEVPCDTLAVGDYVVVLPGDRIPADGVVKAGRSTVDESSLTGEPMPVTKIAGTEVSAGSINLNGKLTVEVRRPGGETVMSDIIHLVEEAQTRAAPVQRLADKVAGNFTYGVMALSAATYMFWSIFGSQLVPAAIQHGSAMSLALQLSCSVLVIACPCALGLATPTAVLVGTSLGATRGLLLRGGDVLEKFSDVDAVVFDKTGTLTIGRPVVT

SEQ ID NO: 70544 - protein, 40 aa, Setaria italica
  Transcript Sequence Number=SeqID_4570
  Gene Ontology: Mol. function=oxidoreductase activity
  Homolog annotation: Hit_ID=Q6ZHK4; Match level="QueryCoverage=85%, HitCoverage=7%, E-value=4e-11, Identity=91%"; Hit description =Putative monooxygenase 2
NPAVCAARDGVVIPRLVRLGPFLEHTNFECDLIEPAPQSP

SEQ ID NO: 70545 - protein, 152 aa, Setaria italica
  misc_feature (27)..(27): Xaa can be any naturally occurring amino acid
  misc_feature (48)..(48): Xaa can be any naturally occurring amino acid
  misc_feature (64)..(64): Xaa can be any naturally occurring amino acid
  Transcript Sequence Number=SeqID_4571
  Homolog annotation: Hit_ID=B6SR73; Match level="QueryCoverage=61%, HitCoverage=46%, E-value=7e-42, Identity=92%"; Hit description =Tubulin alpha-6 chain
EREEEEEEAPESLFARELRRRGMAPGXAPAEAKEAEEGGAEAGRKRGXAAAEFERGAATDGQRXERSMALNSEGLQGLVPRAKLLLSLGGTFFLAFGPLILVTVSLFAGLYVYFGPSFVHDASKNPVSPPPYIDPYELLEDERLTRPSPDVF

SEQ ID NO: 70546 - protein, 413 aa, Setaria italica
  misc_feature (154)..(154): Xaa can be any naturally occurring amino acid
  misc_feature (366)..(366): Xaa can be any naturally occurring amino acid
  misc_feature (388)..(388): Xaa can be any naturally occurring amino acid
  Transcript Sequence Number=SeqID_4572
  Gene Ontology: Mol. function=damaged DNA binding; Cellular component =nucleus; Biological process=nucleotide-excision repair
  Homolog annotation: Hit_ID=B9T0Z6; Match level="QueryCoverage=66%, HitCoverage=39%, E-value=5e-34, Identity=40%"; Hit description=DNA repair protein xp-C / rad4, putative
IPDERVLCCSAGPGTEAATAGAGRRRASPAAKGKSPAKVETGSPLGNTRKKGRAKAEPKDNASMERCSGGSRGKNNLEEQMEAVRDNDAVDMDWEEGHVEQNEYSHDLGETVTVEFADDVPSSTSKKTVRRATAEEKELAELVHKVHLLCLIAXGRVVDKACNDPLIQASILSLVPNHVLWSFTDVTNLRAVNLRNLVSWFHRTFCVTAQSTDRGSFVSNLAFTIQDRVGTAEEVCALSVALFRALNLTARFVTNLDVAGLKPDTKVMGTLNQDASRLCTRSLPYSSPAADGNVVSSPALLKDNTQDSVNMNQQRGGPGKSKQTSSCKRSLSKTLSSIKADNESSCISASSQLPSTSGNAEVPKRXGDVEFELQLEMALSATAAETQXNNQATHMSQSISSLQDSTPPHTSLS

SEQ ID NO: 70547 - protein, 111 aa, Setaria italica
  misc_feature (57)..(57): Xaa can be any naturally occurring amino acid
  Transcript Sequence Number=SeqID_4573
  Gene Ontology: Mol. function=unfolded protein binding; Cellular component=cytoplasm; Biological process=response to stress
  Homolog annotation: Hit_ID=P55737; Match level="QueryCoverage=91%, HitCoverage=15%, E-value=2e-43, Identity=83%"; Hit description=Heat shock protein 81-2
GLLQNLKLGIHEDSQNRTKIAELLRYHSTKSGDELTSLKDYVTRMKEGQSDIYYILXHIVLEELKKKGYEVLYMVDAIDEYAIGQLKEFEGKKLVSATKEGLKLDETCRYV

SEQ ID NO: 70548 - protein, 64 aa, Setaria italica
  Transcript Sequence Number=SeqID_4574
  Homolog annotation: Hit_ID=Q6Z4N7; Match level="QueryCoverage=90%, HitCoverage=14%, E-value=6e-12, Identity=61%"; Hit description =Putative r40c1 protein
  Subcellular localization annotation: CTP_CleavageSite=28; ConfidenceScore=5.00e-01
MSWFGHHHHNQPAPPASGPNQVFKIFCRANENYSLTARNGTVCLAPSNPRDEYQHWIKDMRHST

SEQ ID NO: 70549 - protein, 118 aa, Setaria italica
  misc_feature (71)..(71): Xaa can be any naturally occurring amino acid
  misc_feature (86)..(86): Xaa can be any naturally occurring amino acid
  Transcript Sequence Number=SeqID_4575
  Gene Ontology: Mol. function=sugar binding
  Homolog annotation: Hit_ID=B6STP1; Match level="QueryCoverage=97%, HitCoverage=53%, E-value=1e-40, Identity=71%"; Hit description =Stress responsive protein
DEGYCLTVRDGNVVLAPANPRDEHQHWYKDMRFSSQVKDEEGNPAFALVNQATGLAIKHSLGQSHPVKLGXTVTNPEVTKERSTVXLWTESGDVGKGFRCIRMVNNIRLNFDALHGDK

SEQ ID NO: 70550 - protein, 162 aa, Setaria italica
  misc_feature (7)..(7): Xaa can be any naturally occurring amino acid
  misc_feature (44)..(44): Xaa can be any naturally occurring amino acid
  misc_feature (62)..(62): Xaa can be any naturally occurring amino acid
  misc_feature (81)..(81): Xaa can be any naturally occurring amino acid
  Transcript Sequence Number=SeqID_4576
  Gene Ontology: Mol. function=sugar binding
  Homolog annotation: Hit_ID=B6STP1; Match level="QueryCoverage=85%, HitCoverage=66%, E-value=3e-46, Identity=66%"; Hit description =Stress responsive protein
KADEGYXCLTVRDGNVGAGPANPRDEHQHWYKDMRFSSQVKDEXGNPAFALVNQATGLAIKXHSLGQSHPVKLVPFNPEYXQDESVLWTESGDVGKGFRCIRMVNNIRLNFDALHGDKDHGGVHDGTTVVLWEWAKGDNQSWKILPWGDEAGSAGNAPRGGR

SEQ ID NO: 70551 - protein, 63 aa, Setaria italica
  misc_feature (50)..(50): Xaa can be any naturally occurring amino acid
  misc_feature (55)..(55): Xaa can be any naturally occurring amino acid
  Transcript Sequence Number=SeqID_4577
  Gene Ontology: Mol. function=intramolecular transferase activity, phosphotransferases; Cellular component=cytoplasm; Biological process=carbohydrate metabolic process
  Homolog annotation: Hit_ID=P93804; Match level="QueryCoverage=95%, HitCoverage=10%, E-value=3e-25, Identity=90%"; Hit description =Phosphoglucomutase, cytoplasmic 1
FTEIGVSSFSGPEGPFDVEVFDSSVDYIKLMKSIFDFEAIKKLLTSPKFXFCYDXLHGVAGAY

SEQ ID NO: 70552 - protein, 86 aa, Setaria italica
  Transcript Sequence Number=SeqID_4578
FFLFNHHTYTYFTAEYTCKYYFMVSQLVITYSRYTCNAYMTISKRLILLLSSDEARQLFHISFQDLHAPAPAGVVACIGMRQMMNQ

SEQ ID NO: 70553 - protein, 109 aa, Setaria italica
  Transcript Sequence Number=SeqID_4579
  Gene Ontology: Mol. function=unfolded protein binding; Cellular component=cytoplasm; Biological process=response to stress
  Homolog annotation: Hit_ID=Q5YJN5; Match level="QueryCoverage=92%, HitCoverage=34%, E-value=2e-49, Identity=94%"; Hit description=Heat shock protein 82 (Fragment)
  Pfam annotation: Domain name=HATPase_c; Domain location=10-106; Score= 10.0; E_value=0.0074; Accession=PF02518.18; Description=Histidine kinase-, DNA gyrase B-, and HSP90-like ATPase
LDKIRFESLTDKSKLDAQPELFIHIVPDKASNTLTIIDSGIGMTKSDLVNNLGTIARSGTKEFMEALAAGADVSMIGQFGVGFYSAYLVAERVVVLGGHNNSLSNKVGR

SEQ ID NO: 70554 - protein, 67 aa, Setaria italica
  Transcript Sequence Number=SeqID_4580
SCIVVRSFWLSFDFRRHNTGHSSHGEALRPGSQKGQDTSHTVTDSLTQIQLRNPRLQHNTRFIQSLQ

SEQ ID NO: 70555 - protein, 197 aa, Setaria italica
  misc_feature (74)..(74): Xaa can be any naturally occurring amino acid
  misc_feature (113)..(113): Xaa can be any naturally occurring amino acid
  misc_feature (181)..(181): Xaa can be any naturally occurring amino acid
  Transcript Sequence Number=SeqID_4581
  Gene Ontology: Mol. function=sugar binding
  Homolog annotation: Hit_ID=B6STP1; Match level="QueryCoverage=96%, HitCoverage=67%, E-value=2e-50, Identity=54%"; Hit description =Stress responsive protein
GFSVTVRHGAVCLAPTNPRDEYQHWIKDMRHSNSIKDEEGYPAFALVNKVTGEAIKHSQGEGHQVNHCPICPSXSRRIFIGGIKKCRIFIGGIKKCRYFYRRDQEMIFWPRLXLQVKLVPYNPSYQDESVLWTESRDVGHGFRCIRMVNNIYLNFDAFHGDKDHGGVRDGTNIVLWKWCRXRTPPWSLSPWKASKLR

SEQ ID NO: 70556 - protein, 174 aa, Setaria italica
  misc_feature (14)..(14): Xaa can be any naturally occurring amino acid
  Transcript Sequence Number=SeqID_4582
  Gene Ontology: Mol. function=sugar binding
  Homolog annotation: Hit_ID=B6STP1; Match level="QueryCoverage=87%, HitCoverage=73%, E-value=1e-63, Identity=76%"; Hit description =Stress responsive protein
PANAPRGGYGHGGXPPCAIYCKAGRGVRASPVRHGAVCLAPTNPRDEYQHWIKDMRHSNSIKDEEGYPAFALVNKVTGEAIKHSQGEGHQVKLVPYNPSYQDESVLWTESRDVGHGFRCIRMVNNIYLNFDAFHGDKDHGGVRDGTNIVLWKWCEGDNQRWKIVPWCKESHQSY

SEQ ID NO: 70557 - protein, 212 aa, Setaria italica
  misc_feature (202)..(202): Xaa can be any naturally occurring amino acid
  Transcript Sequence Number=SeqID_4583
  Gene Ontology: Mol. function=sugar binding
  Homolog annotation: Hit_ID=Q4U0C9; Match level="QueryCoverage=73%, HitCoverage=80%, E-value=3e-54, Identity=62%"; Hit description =Stress responsive protein
MFGHHHHGHEHGGNQPPPQDQTLFKIFCRVDDGYCLTVRHDAVVLAPINPRDEFQHWYKDMRHSTKVKDEEGHPAFALVNKATGLAIKHSLGQSHPVKLAPYNPEYEDASVLWTESKDVGKGFRCIRMVNNIHLNFDAFHGDKDHGGVHDGTTVVLWEWCKGHNQSWKILPWGDEAYAPPPPPPAYGAGSGYAYPGGRPGPXPPGHQEPGYG

SEQ ID NO: 70558 - protein, 320 aa, Setaria italica
  misc_feature (51)..(51): Xaa can be any naturally occurring amino acid
  Transcript Sequence Number=SeqID_4584
  Gene Ontology: Mol. function=intramolecular transferase activity, phosphotransferases; Cellular component=cytoplasm; Biological process=carbohydrate metabolic process
  Homolog annotation: Hit_ID=P93804; Match level="QueryCoverage=87%, HitCoverage=48%, E-value=1e-154, Identity=95%"; Hit description =Phosphoglucomutase, cytoplasmic 1
  Pfam annotation: Domain name=PGM_PMM_III; Domain location=56-181; Score=131.6; E_value=2.5e-36; Accession=PF02880.8; Description =Phosphoglucomutasephosphomannomutase, alphabetaalpha domain III
  Pfam annotation: Domain name=PGM_PMM_IV; Domain location=219-313; Score=69.0; E_value=1.7e-17; Accession=PF00408.12; Description =Phosphoglucomutasephosphomannomutase
  Pfam module annotation: Pfam domain module=PGM_PMM_III::PGM_PMM_IV; Domain location=56-181::219-313
MLLPVVGQALVECCVLFLGDLLRLPHPDRLLLVDQLPLAAADGDADRNMIXGFFVTPSDSVAIIAANAVQSIPYFASGLKGVARSMPTSAALDVVAKNLNLKFFEVPTGWKFFGNLMDAGMCSICGEESFGTGSDHIREKDGIWAVLAWLSILAFKNKDNLGGGDKLVSVEDIVRQHWATYGRHYYTRYDYENVDAGAAKELMANLVSMQSSLSDVNKLIKEIRSDVSEVVAADEFEYQDPVDGSVSKHQGIRYLFGDGSRLVFRLSGTGSVGATIRVYIEQYEKDSSKTGRESSDALAPLVDVALKLSKMQEYTGHYSH

SEQ ID NO: 70559 - protein, 162 aa, Setaria italica
  Transcript Sequence Number=SeqID_4585
NTGSSKIYVITVGAERPVYSCILESLSATSTSGARASDDSLPVLDESVSTSSSTRRMVAPTEPVPERRNTSREPSTRVSDTSLEMVHDWCSVSLEPVLLVPPSVSTSSSTRRIRPRPAGNHRMPLLHWLMLHSSSPRCKSTLAALPPPLSHKFLKNLCFRMS

SEQ ID NO: 70560 - protein, 235 aa, Setaria italica
  misc_feature (31)..(31): Xaa can be any naturally occurring amino acid
  Transcript Sequence Number=SeqID_4586
  Gene Ontology: Mol. function=sugar binding
  Homolog annotation: Hit_ID=Q4U0C9; Match level="QueryCoverage=66%, HitCoverage=80%, E-value=7e-62, Identity=69%"; Hit description =Stress responsive protein
GAWATGYPPPARAAPRATGPRPAHQEPGYGXAPPPGGPEGYYAPPHHHQEPGYGGYRPPPPGNTAPGYGGEYGYSNLPRALASESTVRVYCKAGDGYSLTVRNGNVCLAPTNPRDDFQHWVKDMRHSTSIKDEEGYPAFALVNKVTGEAIKHSLGQSHPVRLVPYNPEYVDESVLWTESRDVGQGFRCVRMVNNIYLNFDAFHGDKDHGGVHDGTTVVLWEWSKGDNQRWKILPW

SEQ ID NO: 70561 - protein, 200 aa, Setaria italica
  misc_feature (15)..(15): Xaa can be any naturally occurring amino acid
  misc_feature (23)..(23): Xaa can be any naturally occurring amino acid
  Transcript Sequence Number=SeqID_4587
  Gene Ontology: Mol. function=sugar binding
  Homolog annotation: Hit_ID=B6STP1; Match level="QueryCoverage=92%, HitCoverage=89%, E-value=1e-100, Identity=94%"; Hit description =Stress responsive protein
MDFYGGRERYGGGYXGIATPGYXAPPVPYGMSQVNIEGKGCGRPLPPQPTVKVYCRADPNYAMTVRNGKVVLAPANPKDEYQHWIKDMRWSTSVKDEEGYPAFALVNKATGEAIKHSLGQSHPVRLVPYNPDFLDESVLWTESRDVGNGFRCVRMVNNIYLNFDALHGDKWHGGVRDGTEIVLWKWCEGDNQRWKIQPYY

SEQ ID NO: 70562 - protein, 367 aa, Setaria italica
  Transcript Sequence Number=SeqID_4588
  Gene Ontology: Mol. function=hydrolase activity, acting on ester bonds; Biological process=lipid metabolic process
  Homolog annotation: Hit_ID=B6TLP8; Match level="QueryCoverage=93%, HitCoverage=91%, E-value=1e-127, Identity=61%"; Hit description =Alpha-L-fucosidase 2
  Pfam annotation: Domain name=Lipase_GDSL; Domain location=34-355; Score=158.2; E_value=2.5e-44; Accession=PF00657.14; Description=GDSL- like LipaseAcylhydrolase
MATGGGRAALSLGLVLLLCALRHEVAAAQRYNAIWSFGDSISDTGNLCVGGCPSWLTTGQSPYGETFFGRPTGRCSDGRVIIDFLAEHFGLPLLPASKAGGDFKKGANMAIIGATTMNFDFFNSIGLSDKIWNNGPLDTQIQWFRQLLPSVCGKDCKNYLSKSLFVVGEFGGNDYNAALFSGRTMAEVRGYVPRVVSKLIRGLETIIRSGAVDVVVPGVLPIGCFPIYITLYGTSNAADYDGDGCLRSYNGLSSYHNSLLKRSLGSLQRTYPRTRIMYADFYSQVTHMIRAPQNFGLKYGLKVCCGAGGQGKYNYNNKARCGMAGASACADPGNYLIWDGIHLTEAAYRSIADGWLKGPYCNPPIQH

SEQ ID NO: 70563 - protein, 347 aa, Setaria italica
  misc_feature (17)..(17): Xaa can be any naturally occurring amino acid
  misc_feature (175)..(175): Xaa can be any naturally occurring amino acid
  misc_feature (222)..(222): Xaa can be any naturally occurring amino acid
  misc_feature (247)..(247): Xaa can be any naturally occurring amino acid
  misc_feature (271)..(271): Xaa can be any naturally occurring amino acid
  Transcript Sequence Number=SeqID_4589
  Gene Ontology: Mol. function=sugar binding
  Homolog annotation: Hit_ID=B6STP1; Match level="QueryCoverage=94%, HitCoverage=84%, E-value=1e-61, Identity=66%"; Hit description =Stress responsive protein
MSWFGHHHHNQPAPPAXSGPNQVFKIFCRANENYCLAVRDGAVVLAPANPKDDHQHWYKDMRFSTRVKDEEGMPAFALVNKATGLAIKHSLGQSHPVKLVPFNPAEEDASVLWTESKDIGKGFRCIRMVNNTRLNFDAFHGDKDHGGVHDGTTVVLWDWCKGENQSWKILPWGPXEAHSPAAGPGNASIGGVPVHTVRVFCKAGEDYSLTARNGTVCLAAPXNPRDEYQHWIKDMRHSTRIRDEEGXYPAFALVNKVTGEAIKHSTGQGRXVKLVPYNPDYQDESVLWTESRDVGDGFRCVRMVNNIYLNFDAFHGDKAHGGVHDGTEIVLWEWAKGDNQRWKILPW

SEQ ID NO: 70564 - protein, 348 aa, Setaria italica
  misc_feature (22)..(22): Xaa can be any naturally occurring amino acid
  Transcript Sequence Number=SeqID_4590
  Gene Ontology: Mol. function=sugar binding
  Homolog annotation: Hit_ID=B6STP1; Match level="QueryCoverage=92%, HitCoverage=74%, E-value=1e-67, Identity=72%"; Hit description =Stress responsive protein
MFGFGHHGHHGQNPPASRRPPXGGAHQPTFKIFCKADEGYCLTVRDGNVVLAPANPRDEHQHWYKDMRFSSQVKDEEGNPAFALVNQATGLAIKHSLGQSHPVKLVPFNPEYQDESVLWTESGDVGKGFRCIRMVNNIRLNFDALHGDKDHGGVHDGTTVVLWEWAKGDNQSWKILPWGDEAGSAGNAPRGGYGHGEPTVRIYCKADEGFSVTVRHGAVCLAPTNPRDEYQHWIKDMRHSNSIKDEEGYPAFALVNKVTGEAIKHSQGEGHQVKLVPYNPSYQDESVLWTESRDVGHGFRCIRMVNNIYLNFDAFHGDKDHGGVRDGTNIVLWKWCEGDNQRWKIVPW

SEQ ID NO: 70565 - protein, 479 aa, Setaria italica
  misc_feature (465)..(465): Xaa can be any naturally occurring amino acid
  Transcript Sequence Number=SeqID_4591
  Gene Ontology: Mol. function=unfolded protein binding; Cellular component=cytoplasm; Biological process=response to stress
  Homolog annotation: Hit_ID=P55737; Match level="QueryCoverage=92%, HitCoverage=63%, E-value=0.0, Identity=87%"; Hit description=Heat shock protein 81-2
  Pfam annotation: Domain name=HSP90; Domain location=1-479; Score =1124.9; E_value=0; Accession=PF00183.10; Description=Hsp90 protein
MKEGQSDIYYITGESKKAVENSPFLEKKKKKIKEVSHEWQLVNKQKPIWMRKPEEITKEEYAAFYKSLTNDWEEHLAVKHFSVEGQLEFKAVLFVPKRAPFDLFDTRKKQNNIKLYVRRVFIMDNCEELIPEWLSFVKGIVDSEDLPLNISRETLQQNKILKVIRKNLVKKCIELFFEIAENKEDYNKFYEAFCKNLKLGIHEDSQNRTKIAELLRYHSTKSGDELTSLKDYVTRMKEGQSDIYYITGESKKAVENSPFLEKLKKKGYEVLYMVDAIDEYAIGQLKEFEGKKLVSATKEGLKLDETEDEKKRQEELKEKFEGLCKVIKEVLGDKVEKVVVSDRVVDSPCCLVTGEYGWTANMERIMKAQALRDSSMSGYMSSKKTMEINPENAIMEELRKRAEADKNDKSVKDLVMLLFETALLTSGFSLDEPNTFGSRIHRMLKLGLSIDEDETTEAETDMPPXLEDDAGESKMEEVD

SEQ ID NO: 70566 - protein, 583 aa, Setaria italica
  misc_feature (310)..(310): Xaa can be any naturally occurring amino acid
  Transcript Sequence Number=SeqID_4592
  Gene Ontology: Mol. function=intramolecular transferase activity, phosphotransferases; Cellular component=cytoplasm; Biological process=carbohydrate metabolic process
  Homolog annotation: Hit_ID=P93804; Match level="QueryCoverage=100%, HitCoverage=99%, E-value=0.0, Identity=95%"; Hit description =Phosphoglucomutase, cytoplasmic 1
  Pfam annotation: Domain name=PGM_PMM_I; Domain location=14-163; Score= 179.5; E_value=9.3e-51; Accession=PF02878.8; Description =Phosphoglucomutasephosphomannomutase, alphabetaalpha domain I
  Pfam annotation: Domain name=PGM_PMM_II; Domain location=197-312; Score=106.9; E_value=6.7e-29; Accession=PF02879.8; Description =Phosphoglucomutasephosphomannomutase, alphabetaalpha domain II
  Pfam annotation: Domain name=PGM_PMM_III; Domain location=315-440; Score=131.6; E_value=2.5e-36; Accession=PF02880.8; Description =Phosphoglucomutasephosphomannomutase, alphabetaalpha domain III
  Pfam annotation: Domain name=PGM_PMM_IV; Domain location=478-572; Score=69.0; E_value=1.7e-17; Accession=PF00408.12; Description =Phosphoglucomutasephosphomannomutase
  Pfam module annotation: Pfam domain module=PGM_PMM_I::PGM_PMM_II::PGM_ PMM_III::PGM_PMM_IV; Domain location=14-163::197-312::315-440::478-572
  Subcellular localization annotation: CTP_CleavageSite=47; ConfidenceScore=5.16e-01
MFSVTKKATTPFEGQKPGTSGLRKKVTVFQQPHYLQNFVQSTFNALPAKEVKGATIVVSGDGRYFSKDAVQIITKMAAANGLRRVWVGQNSLMSTPAVSAVIRERIGEDGSKATGAFILTASHNPGGPTEDFGIKYNMGNGGPAPESVTDKIFSNTTTISEYLISEDLPDVDISEIGVSSFSGPEGPFDVEVFDSSVDYIKLMKSIFDFEAIKKLLTSPKFTFCYDALHGVAGAYAKHIFVEELGADESSLLNCVPKEDFGGGHPDPNLTYAKELVERMGLGKSSSNVEPPEFGAAADGDADRNMILGKXRFFVTPSDSVAIIAANAVQSIPYFASGLKGVARSMPTSAALDVVAKNLNLKFFEVPTGWKFFGNLMDAGMCSICGEESFGTGSDHIREKDGIWAVLAWLSILAFKNKDNLGGGDKLVSVEDIVRQHWATYGRHYYTRYDYENVDAGAAKELMANLVSMQSSLSDVNKLIKEIRSDVSEVVAADEFEYQDPVDGSVSKHQGIRYLFGDGSRLVFRLSGTGSVGATIRVYIEQYEKDSSKTGRESSDALAPLVDVALKLSKMQEYTGRSAPTVIT

SEQ ID NO: 70567 - protein, 943 aa, Setaria italica
  misc_feature (168)..(168): Xaa can be any naturally occurring amino acid
  Transcript Sequence Number=SeqID_4593
  Gene Ontology: Mol. function=unfolded protein binding; Cellular component=cytoplasm; Biological process=response to stress
  Homolog annotation: Hit_ID=P55737; Match level="QueryCoverage=55%, HitCoverage=74%, E-value=0.0, Identity=83%"; Hit description=Heat shock protein 81-2
  Pfam annotation: Domain name=HATPase_c; Domain location=28-182; Score= 55.9; E_value=1.6e-13; Accession=PF02518.18; Description=Histidine kinase-, DNA gyrase B-, and HSP90-like ATPase
  Pfam annotation: Domain name=HSP90; Domain location=185-712; Score =767.5; E_value=9.5e-228; Accession=PF00183.10; Description=Hsp90 protein
  Pfam module annotation: Pfam domain module=HATPase_c::HSP90; Domain location=28-182::185-712
MASETETFAFQAEINQLLSLIINTFYSNKEIFLRELISNSSDALDKIRFESLTDKSKLDAQPELFIHIVPDKASNTLTIIDSGIGMTKSDLVNNLGTIARSGTKEFMEALAAGADVSMIGQFGVGFYSAYLVAERVVVTTKHNDDEQYVWESQAGGSFTVTRDTSGEXLGRGTKMTLYLKDDQLEYLEERRLKDLIKKHSEFISYPISLWTEKTTEKEISDDEDEEDKKDEEGKVEDVDEEKEEKEKKKKKIKEVSHEWQLVNKQKPIWMRKPEEITKEEYAAFYKSLTNDWEEHLAVKHFSVEGQLEFKAVLFVPKRAPFDLFDTRKKQNNIKLYVRRVFIMDNCEELIPEWLSFVKGIVDSEDLPLNISRETLQQNKILKVIRKNLVKKCIELFFEIAENKEDYNKFYEAFCKNLKLGIHEDSQNRTKIAELLRYHSTKSGDELTSLKDYVTRMKEGQSDIYYITGESKKAVETTTFLEKLKKKGYEVLYMVDAIDEYAIGQLKEFEGKKLVSATKEGLKLDETEDEKKRQEELKFLQLANGILINCINHVQDFIAFLLQLLKEGGVLHSLLALTSDVVDVALALLHPRHIVLEASQLITTLGGVVPQELSDLGPVLGVLVDAKLEVLAEGLIELVVVLLVLSNLEEELNALLHQVLADDLEDLVLLEGLTGDVEGKVLRVNDALDKAQPLWDQLLTVVHDEDTPHIELDVVLLLPGVEEVEGGPLGYKEDSLELKLTLNREVLHGKMLLPVVGQALVESCVLFLGDLLRLPHPDRLLLVDQLPLVRNLLDLLLFLLFLFLLLINILNLALLILLIFLILIIRNLLLSGLLCPERDGVADELRVLLDQILEASLLKVLQLIILEVEGHLGTPAKGLPRGITCDREGATSLRLPHVLLIIVVLGGHNNSLSNKVGRVETNSKLTDHRHISTSSQSLHELLCA

SEQ ID NO: 70568 - protein, 57 aa, Setaria italica
  Transcript Sequence Number=SeqID_4594
  Subcellular localization annotation: CTP_CleavageSite=32; ConfidenceScore=5.13e-01
DNKCMHVLFIGKTSNRSGPKWQMQLQNQGGSSSMKVLQHEFPCKFSRGTICISSVFL

SEQ ID NO: 70569 - protein, 265 aa, Setaria italica
  Transcript Sequence Number=SeqID_4595
  Gene Ontology: Mol. function=nucleotide binding; Biological process =defense response
  Homolog annotation: Hit_ID=Q69U98; Match level="QueryCoverage=97%, HitCoverage=14%, E-value=1e-21, Identity=33%"; Hit description =Putative Pi-b protein
MKVLKRLSHLRKLTVTGVYDQNSKDFWSAIAPHNRLRSLSVQRLFESIGMPIIDGCLGENPYMDGATNDGPAAAEAPDTVNGVLPSSGGTSQSKHGQSLAGEVLFPPKDLESLKVEGRLVKIPQWIHQLQNLSKLQLCYTRLKLDAIQVIGRLPNLSILRLRSLSFLGKELHFLHSSFPSLVVLELSDLPQVQVVYFEERTMPRLEVLQVFSCLSNGVLSGLRLLTSLKEVSLTRVHYSSIMRVQNQLKDCPKPVNLRVNFGERS

SEQ ID NO: 70570 - protein, 127 aa, Setaria italica
  misc_feature (9)..(9): Xaa can be any naturally occurring amino acid
  misc_feature (16)..(16): Xaa can be any naturally occurring amino acid
  Transcript Sequence Number=SeqID_4596
  Gene Ontology: Mol. function=phospholipase A2 activity; Biological process=phospholipid metabolic process
  Homolog annotation: Hit_ID=B6TSQ6; Match level="QueryCoverage=55%, HitCoverage=42%, E-value=2e-25, Identity=80%"; Hit description =Phospholipase A2
MDGSRELIXGRGPLQXRRGRRRRLLPPLLLLLLLAVADRSPHAAASIFGGDAASECSRTCESDHCTAAPLMRYGKYCGVGYTGCPGEAPCDALDACCMIHDACVQATDSTRAFHAQTDFTTDQHFKD

SEQ ID NO: 70571 - protein, 92 aa, Setaria italica
  misc_feature (11)..(11): Xaa can be any naturally occurring amino acid
  Transcript Sequence Number=SeqID_4597
VPGDESAASDXEEERVEFNFAVAGDDVASGGGEVVAVDAVAAPGAAETGDNGKEGAEADTAEATPAPPPASLLRPATKFRVLLLKLRKPKVA

SEQ ID NO: 70572 - protein, 154 aa, Setaria italica
  Transcript Sequence Number=SeqID_4598
  Gene Ontology: Mol. function=aspartate kinase activity; Cellular component=chloroplast; Biological process=amino acid biosynthetic process
  Homolog annotation: Hit_ID=Q5JK18; Match level="QueryCoverage=66%, HitCoverage=17%, E-value=4e-33, Identity=82%"; Hit description =Aspartokinase
  Subcellular localization annotation: CTP_CleavageSite=48; ConfidenceScore=5.70e-01
MATSVRSAAAPRRLAPSAPPASAGHVRGLARFGNRTGPLGARGLSMVVADSTRRRAKFGSGDSVLGAPVLGGPGAELGDQLSVVMKFGGSSVSSAARMEEVADLILAFPEERPVVVLSAMGKTTNLLLLAGEKAVGCGVIHVSEIEEWNTIKDL

SEQ ID NO: 70573 - protein, 177 aa, Setaria italica
  Transcript Sequence Number=SeqID_4599
  Gene Ontology: Mol. function=electron carrier activity; Cellular component=extracellular region; Biological process=response to oxidative stress
  Homolog annotation: Hit_ID=B6U0T8; Match level="QueryCoverage=100%, HitCoverage=53%, E-value=7e-78, Identity=82%"; Hit description =Peroxidase 73
  Pfam annotation: Domain name=peroxidase; Domain location=46-177; Score=71.3; E_value=3.6e-18; Accession=PF00141.15; Description =Peroxidase
MERWRKRGSLLAVAAVALVAALLPSGEAKLSPDYYRSTCPDVEAIVRAPAAKKVNETFVTVPATLRLFFHDCFVEGCDASVIIASRDNDAEKDAPGNVSLAGDGFDTVVRAKAEVEKACPGVVSCADILAIAARDVVTMSSGPHWPVELGRLDGLVSKAGSVAGRLPGPDMRVDDLA

SEQ ID NO: 70574 - protein, 42 aa, Setaria italica
  Transcript Sequence Number=SeqID_4600
MILLLLMRRFTAFKGSLYLLARAPWVILAENDYDADVCMELP

SEQ ID NO: 70575 - protein, 72 aa, Setaria italica
  Transcript Sequence Number=SeqID_4601
CHFCFLWSVGYESESKATTCLAICSITANLTPAVVLLTFPFFNNGSWLLTGVTLLNSTSLKVLHLYYCKLSL

SEQ ID NO: 70576 - protein, 78 aa, Setaria italica
  Transcript Sequence Number=SeqID_4602
  Gene Ontology: Mol. function=nucleotide binding; Cellular component =mitochondrion; Biological process=cell division
  Homolog annotation: Hit_ID=Q7XS31; Match level="QueryCoverage=83%, HitCoverage=8%, E-value=5e-25, Identity=90%"; Hit description =OSJNBa0072D21.2 protein
MAKSEAAAEAAPETVGQAVIPLVNSLQDIIARLDGDAAAGLELPQVAAIGGQSSGKSSVLEALVGRDFLPRGPDICTR

SEQ ID NO: 70577 - protein, 283 aa, Setaria italica
  misc_feature (45)..(45): Xaa can be any naturally occurring amino acid
  Transcript Sequence Number=SeqID_4603
  Gene Ontology: Mol. function=heat shock protein binding; Cellular component=chloroplast envelope
  Homolog annotation: Hit_ID=B6TCK1; Match level="QueryCoverage=77%, HitCoverage=86%, E-value=2e-22, Identity=32%"; Hit description=DnaJ domain containing protein
  Subcellular localization annotation: CTP_CleavageSite=18; ConfidenceScore=5.23e-01
MLAHGLATDPSRTLRCPVASRVSTAPLGVVSSLSFNRGRKEKNKXIFINVDRYTKYSTPLCYAQRNARITPRATASFGDMADSSTPIFPRIHVKDPYQRLGISREASEEEIRAARNYLISKYAGHKPSVDAIESAHDRIIMQSFFDRKKPKMDLKKKFRELSQSRAVKAIQGRFQTPRSKVIWQTAITFILLGALTLAFPTEEGPTLQVAISCAANIYFIYQRVKSGWRAFFYGFGSFFASWFLGTFLMVSVIPPILPGPRNLEVSTACVTYALLFISSTFLK

SEQ ID NO: 70578 - protein, 50 aa, Setaria italica
  Transcript Sequence Number=SeqID_4604
TLRNIVSSSKVGLIQYSVVNTYNKCIILLKHEVQIITHKLTRYKLSFQQC

SEQ ID NO: 70579 - protein, 138 aa, Setaria italica
  Transcript Sequence Number=SeqID_4605
QDVRICSLRIHALLVLSLLHKLDLLDELTVLVLPPASSAAKPPLILAVAVAVPGLHHLRLHLAAPRIRAGRWRLGHPPPAHRQPSHDRHGLSAHGSHPAPCPAGASGCGRGEPVQAFQRLLGGARRRAQRVVQRDHPE

SEQ ID NO: 70580 - protein, 262 aa, Setaria italica
  Transcript Sequence Number=SeqID_4606
MLCQISNSERPQEGKGRQGRTGSADLDMDIAGLPSDILVEVTASIATRSATPLIDVVNLRRSCKVFRDATAARKVGRCMAVHREWRLHWWDKARFLSVLRRCAASGNPEASYILGLEEFCNRRRKASGLRHLRRAMEHGHAAAAYMLGMITLHDSLRSSAGAAEQALEGLDWFSASASAGPSRTRRRMASVRREAVSVMRRLTMRRWRMAEPPTPCLNCNCVGCRSEMVEAWDGDGDGEDERWFCSRTCRWKHEYCKFIEKI

SEQ ID NO: 70581 - protein, 76 aa, Setaria italica
  Transcript Sequence Number=SeqID_4607
ARRHWGGRERSSRLRPQPHSLRRRRLVERDLRSCHPLRRINSGFAGRGSIEVRRSAPRSGSPVGLLLGKGRIWLEA

SEQ ID NO: 70582 - protein, 126 aa, Setaria italica
  Transcript Sequence Number=SeqID_4608
  Gene Ontology: Mol. function=ATP-dependent helicase activity; Cellular component=nucleus; Biological process=ribosome biogenesis
  Homolog annotation: Hit_ID=Q0JL73; Match level="QueryCoverage=96%, HitCoverage=22%, E-value=2e-58, Identity=86%"; Hit description=DEAD -box ATP-dependent RNA helicase 26
YNGYLVTFDEADRLLDMGFRRDIEKIIAFIPKERQTLLFSATVPEEVRQISHVAMRKDYEFINTVQEGDEETHSQVNQTYMIAPLGLHFSILYDVLKKHVAEDAEYKVIVFCTTAMVTKLVAEVLS

SEQ ID NO: 70583 - protein, 239 aa, Setaria italica
  misc_feature (108)..(108): Xaa can be any naturally occurring amino acid
  misc_feature (136)..(136): Xaa can be any naturally occurring amino acid
  misc_feature (154)..(154): Xaa can be any naturally occurring amino acid
  Transcript Sequence Number=SeqID_4609
  Gene Ontology: Mol. function=ATP-dependent helicase activity; Cellular component=nucleus; Biological process=ribosome biogenesis
  Homolog annotation: Hit_ID=Q5ZBH5; Match level="QueryCoverage=77%, HitCoverage=31%, E-value=5e-74, Identity=77%"; Hit description=DEAD -box ATP-dependent RNA helicase 25
  Pfam annotation: Domain name=DEAD; Domain location=125-239; Score =34.7; E_value=1.4e-07; Accession=PF00270.21; Description=DEADDEAH box helicase
  Subcellular localization annotation: CTP_CleavageSite=45; ConfidenceScore=5.41e-01
MSTSANPNPKPKRRRRGPPKQGPGSPMPATVGLMVGREVGAEGARRDARQAPPFPRVVATAGRGRGSGVEGARGVEGSASNAGRSAHDAGGVDGSYLTETRFDQCAIXSPLSLKAIKDAGYERMTRVQEATLPIIXQGKDVLAKAKTGTGKTVXAFLLPAIEVLSALPRSTSINLLVMCPTRELANQVAAEARKLLKYHRSLGVQVVIGGTRLPQEQRSMQANPCQILVATPGRLKDHL

SEQ ID NO: 70584 - protein, 273 aa, Setaria italica
  Transcript Sequence Number=SeqID_4610
  Gene Ontology: Mol. function=ATP-dependent helicase activity; Cellular component=nucleus; Biological process=ribosome biogenesis
  Homolog annotation: Hit_ID=Q5ZBH5; Match level="QueryCoverage=93%, HitCoverage=42%, E-value=1e-129, Identity=87%"; Hit description=DEAD- box ATP-dependent RNA helicase 25
  Pfam annotation: Domain name=DEAD; Domain location=40-218; Score =229.4; E_value=9e-66; Accession=PF00270.21; Description=DEADDEAH box helicase
  Pfam annotation: Domain name=ResIII; Domain location=36-213; Score= -15.3; E_value=0.001; Accession=PF04851.7; Description=Type III restriction enzyme, res subunit
  Pfam module annotation: Pfam domain module=DEAD::ResIII; Domain location=40-218::36-213
VGADAGGVDGSYLSDTRFDQCAISPLSLKAVEDAGYERMTEVQEATLPIILQGKDVLAKAKTGTGKTVAFLLPAIEVLSTLPHQRNQLRPPINLLVMCPTRELANQVAAEARKLLKYHRSLGVQVVIGGTRLTQEQRSMQANPCQILVATPGRLKDHLENTPGFSTRIKGVKVLVLDEADRLLDMGFRRDIEKIIAFIPKERQTLLFSATVPEEVRQISHVAMRKDYEFINTVQEGDEETHSQVNQTYMIAPLGLDNLLLIISNRIVIRKKDN

SEQ ID NO: 70585 - protein, 519 aa, Setaria italica
  misc_feature (42)..(42): Xaa can be any naturally occurring amino acid
  Transcript Sequence Number=SeqID_4611
  Gene Ontology: Mol. function=ATP-dependent helicase activity
  Homolog annotation: Hit_ID=Q5ZBH5; Match level="QueryCoverage=98%, HitCoverage=86%, E-value=0.0, Identity=86%"; Hit description=DEAD -box ATP-dependent RNA helicase 25
  Pfam annotation: Domain name=ABC_tran; Domain location=101-262; Score= -51.7; E_value=0.034; Accession=PF00005.19; Description=ABC transporter
  Pfam annotation: Domain name=DEAD; Domain location=80-254; Score =222.9; E_value=8e-64; Accession=PF00270.21; Description=DEADDEAH box helicase
  Pfam annotation: Domain name=Helicase_C; Domain location=328-404; Score=95.6; E_value=1.8e-25; Accession=PF00271.23; Description =Helicase conserved C-terminal domain
  Pfam annotation: Domain name=ResIII; Domain location=76-249; Score= -11.4; E_value=0.00049; Accession=PF04851.7; Description=Type III restriction enzyme, res subunit
  Pfam module annotation: Pfam domain module=ABC_tran::DEAD::Helicase _C::ResIII; Domain location=101-262::80-254::328-404::76-249
RRRRDAEERLSFSRVVTRRDALDEDEEDVEGEALQLGAVTSXADAGGVDGSYLSDTRFDQCAISPLSLKAVEDAGYERMTEVQEATLPIILQGKDVLAKAKTGTGKTSLAFLLPAIEVLSALPRSTSINLLVMCPTRELANQVAAEARKLLKYHRSLGVQVVIGGTRLTQEQRSMQANPCQILVATPGRLKDHLENTPGFSTRLKGVKVLVLDEADRLLDMGFRRDIEKIIASIPRERQTLLFSATVPEEVRQISHVAMKKDYRFINTVKEGDEETHSQVSQMYMVAPLDQHFSILYDALKKHVAEDADYKVIIFCTTAMVTKLVAEVLSQLKLNIREIHSRKSQSARTKVSDEFRKSKGLILVSSDVSARGVDYPDVTLVIQVGIPADREQYIHRLGRTGRKGKEGQGLLLLAPWEKYFLGTVKDLSISEAAVPSVDSSVETEVKNAVRKVEMKSKECAYQAWLGYYNSNKTIGRDKSRLVGLAEEFSQSMGLTVPPAIPRNILRKMGLNNVPGLRSS

SEQ ID NO: 70586 - protein, 172 aa, Setaria italica
  Transcript Sequence Number=SeqID_4612
  Gene Ontology: Mol. function=DNA binding; Biological process=amino acid biosynthetic process
  Homolog annotation: Hit_ID=B9SKE7; Match level="QueryCoverage=43%, HitCoverage=14%, E-value=3e-19, Identity=60%"; Hit description =Transcription factor, putative
  Pfam annotation: Domain name=MADF_DNA_bdg; Domain location=52-134; Score=33.1; E_value=1.2e-06; Accession=PF10545.1; Description =Alcohol dehydrogenase transcription f
RQGARRPQHHRPAAPAARAAAASSGGGIGLGGGASGRRLPPPCWTEEETLALIEAYRDRWEALRKGNLRAADWDRVANAVTARCGRFPTATPKSGVQCRHKIEKLRKRYRAERSRSAGRSKGPKWPFFPLLHDLAGGGVPDPSPNAIVKIKTKGPAPLASTPSPVSSPSSEE

SEQ ID NO: 70587 - protein, 92 aa, Setaria italica
  Transcript Sequence Number=SeqID_4613
MEGQANAAQASLGPRVKANLVLGAESFAISSECGILSEQLATMKEKSMVILKEYIAKHNAPNDVPDESIEGESDDEGEALVKNPPKKSKKQK

SEQ ID NO: 70588 - protein, 81 aa, Setaria italica
  Transcript Sequence Number=SeqID_4614
CSQAKVSAPERREAAEANRLAVVFDQQTIRCCAAVCSLSQCVLTSSRRALLSSPACREPPCRPPSSRPRCPTATSSPSCYG

SEQ ID NO: 70589 - protein, 86 aa, Setaria italica
  misc_feature (7)..(7): Xaa can be any naturally occurring amino acid
  Transcript Sequence Number=SeqID_4615
MSLQVLXFEAGAMPNLRRLELETSVALLKWEGCRPVGMEHLLDLKEICVSLWHCQCTKSEGIGAECALRNIAQTHPSRPTVTITIT

SEQ ID NO: 70590 - protein, 107 aa, Setaria italica
  Transcript Sequence Number=SeqID_4616
  Homolog annotation: Hit_ID=B6U460; Match level="QueryCoverage=100%, HitCoverage=100%, E-value=1e-48, Identity=89%"; Hit description=FPF1
MSGVWVFKNGVVRLVENGAAGGGEAVRKRKALVHTPSGQVVRSYAELESELRALGWERYYEDPALYQFHKRGSLDLISLPADFARFSSVHMYDIVIKNRDSFRVVDV

SEQ ID NO: 70591 - protein, 191 aa, Setaria italica
  misc_feature (162)..(162): Xaa can be any naturally occurring amino acid
  misc_feature (172)..(172): Xaa can be any naturally occurring amino acid
  Transcript Sequence Number=SeqID_4617
  Gene Ontology: Mol. function=small conjugating protein ligase activity; Biological process=protein modification process
  Homolog annotation: Hit_ID=Q9LHG8; Match level="QueryCoverage=90%, HitCoverage=44%, E-value=1e-35, Identity=45%"; Hit description =Protein ELC
  Pfam annotation: Domain name=Vps23_core; Domain location=105-169; Score=115.7; E_value=1.6e-31; Accession=PF09454.2; Description=Vps23 core domain
PSCPPPPPTEDPAEVFKRNAVAKLVDMAYADAAALRPAREAEVDALFAVQAELRHRGDLVAQGVRRMGEEKEALERRLQDVMMATDVMEAWVVENNRRGNTQATEDAIEPADVLSRQMIECTAADLALEDTIYALDKAIQEGSVPFDGYLRSVRALSREQFXHRALSAKVHXEQQRAKVASMAARAPQYAS

SEQ ID NO: 70592 - protein, 168 aa, Setaria italica
  Transcript Sequence Number=SeqID_4618
  Gene Ontology: Mol. function=electron carrier activity; Biological process=oxidation reduction
  Homolog annotation: Hit_ID=B6SSZ4; Match level="QueryCoverage=100%, HitCoverage=32%, E-value=1e-85, Identity=91%"; Hit description =Cytochrome P450 CYP709C14
QDRLREEVRRECGDEVPTGDALNKLKEVNMFLLETLRLYGPVSSIQRKAGSDLDLGGVQVPEGAILTIPIATIHRDKDVWGEDAGEFRPERFENGVTRAAKHPNALLSFSSGPRSCIGQNFAMIEAKAVVAMILQKFVLELSPKYVHAPMDVLTLRPRHGLPMILKHL

SEQ ID NO: 70593 - protein, 181 aa, Setaria italica
  Transcript Sequence Number=SeqID_4619
  Gene Ontology: Mol. function=protein serine/threonine kinase activity; Biological process=protein amino acid phosphorylation
  Homolog annotation: Hit_ID=B6TS26; Match level="QueryCoverage=100%, HitCoverage=41%, E-value=2e-87, Identity=87%"; Hit description =Serine/threonine-protein kinase WNK4
GECPYGECQGFVQIYKKISEGIKPVALSKIKDVEVRSFIESCLASAADRLPASELLKSPFLLKDDIINDKTSNPAQEPIAFPQNLDLDLDVTPIFVSLLPNATVCDGKESFSLVLRRGGFVLEGDMSVKDPVNLLLRIPVPNGKCKNIEFAFDLEKDTSLSVATEMVEELELPSWSMPVVA

SEQ ID NO: 70594 - protein, 462 aa, Setaria italica
  misc_feature (33)..(33): Xaa can be any naturally occurring amino acid
  Transcript Sequence Number=SeqID_4620
  Gene Ontology: Mol. function=RNA binding; Cellular component =chloroplast
  Homolog annotation: Hit_ID=Q7F1X2; Match level="QueryCoverage=91%, HitCoverage=53%, E-value=0.0, Identity=84%"; Hit description =B1065G12.12 protein
  Subcellular localization annotation: CTP_CleavageSite=39; ConfidenceScore=5.40e-01
PKNKDEPTPTGRRYLPPPPPPLPSLRPRTLLRXRPRRLAASVNPSPPDETPAADPPVIPSISIKNTEPEEVARRRSWVEHGWAPWEEVMTPEVAFARHSLNEGEEVPLQSPESLEAFRMLTPAYRKKVEAEPGYIERLFATRDTPEPLETTWAGRLPLRLVPPRDWPPPGWEVDPDELEFIREAHRAASERLDMEAAAAAGVTNVEKLEDAPEDLALDRYKMFLKQYKEWVEANRDRLEQESYQYDQDYYPGRRKRGKDYREDMHELPFYYPGQICYGQVTTVHLHQGAFVDIGCVHEGWVPIKGNDWYWIRHHIKPGMKVYVEILAKRDPYRFRFPLEMRFVYPNIDHLIFNRFDFPPIFHRKEDTNPEQLWREGGRPPIPRKKPLKDMEKEPLVSDHPFVETLWEWHNAEQMILDYEEQNPDKFKDTTYESTVDASSIDEVNRVEYTEGYFKETLLKRQL

SEQ ID NO: 70595 - protein, 110 aa, Setaria italica
  misc_feature (29)..(29): Xaa can be any naturally occurring amino acid
  misc_feature (46)..(46): Xaa can be any naturally occurring amino acid
  misc_feature (81)..(81): Xaa can be any naturally occurring amino acid
  Transcript Sequence Number=SeqID_4621
RSTRQPTTPPSSRSPTDADVDVAALLPDXDSVDLLDMVGTDDLFYXPDHHHQAAKPAAYDLDVLRAVSLGSPRAVVGAGLXRASAAGRADKPAQHVGVRGAARRVIHQPR

SEQ ID NO: 70596 - protein, 161 aa, Setaria italica
  misc_feature (80)..(80): Xaa can be any naturally occurring amino acid
  Transcript Sequence Number=SeqID_4622
  Homolog annotation: Hit_ID=B4FGB3; Match level="QueryCoverage=97%, HitCoverage=96%, E-value=2e-39, Identity=61%"; Hit description=Early response to dehydration 15-like protein
  Pfam annotation: Domain name=PAM2; Domain location=6-23; Score=17.5; E_value=0.019; Accession=PF07145.7; Description=Ataxin-2 C-terminal region
MSTMAMASSSLNPNAPLFIPAAYRQVEDFSPEWWELVKTTAWFRDHWFRQHQLHEAAYDAALLSLPDDADVDVAALLPDXDSVDLLDMVGTDDLFYAPDHHHQAAKPAAYDLDVLRAVSLGSPRAVVGAPSPRAQQQRHADKPAQHVGVRGAARRVIHQPR

SEQ ID NO: 70597 - protein, 160 aa, Setaria italica
  misc_feature (96)..(96): Xaa can be any naturally occurring amino acid
  Transcript Sequence Number=SeqID_4623
  Homolog annotation: Hit_ID=B4FGB3; Match level="QueryCoverage=99%, HitCoverage=98%, E-value=4e-39, Identity=60%"; Hit description=Early response to dehydration 15-like protein
  Pfam annotation: Domain name=PAM2; Domain location=6-23; Score=17.5; E_value=0.019; Accession=PF07145.7; Description=Ataxin-2 C-terminal region
MSTMAMASSSLNPNAPLFIPAAYRQVEDFSPEWWELVKTTAWFRDHWFRQHQLHEAAYDAALLSLPDDADVDVAALLPDDSVDLLDMVGTDDLFYXPDHHHQAAKPAAYDLDVLRAVSLGSPRAVVGAPSPRAQQQRHADKPAQHVGVRGAARRVIHQPR

SEQ ID NO: 70598 - protein, 58 aa, Setaria italica
  Transcript Sequence Number=SeqID_4624
LGAVTEVKNQGQCGSCWAFSTVAAVQSISSCSDSDVRFPVTIWLIPSTAAATALVPRL

SEQ ID NO: 70599 - protein, 361 aa, Setaria italica
  Transcript Sequence Number=SeqID_4625
  Gene Ontology: Mol. function=cysteine-type endopeptidase activity; Cellular component=plasma membrane; Biological process=proteolysis
  Homolog annotation: Hit_ID=B4ESE6; Match level="QueryCoverage=98%, HitCoverage=97%, E-value=1e-149, Identity=74%"; Hit description =Papain-like cysteine proteinase
  Pfam annotation: Domain name=Inhibitor_I29; Domain location=54-110; Score=102.2; E_value=1.8e-27; Accession=PF08246.4; Description =Cathepsin propeptide inhibitor domain (
  Pfam annotation: Domain name=Peptidase_C1; Domain location=143-358; Score=445.5; E_value=8.2e-131; Accession=PF00112.15; Description =Papain family cysteine protease
  Pfam module annotation: Pfam domain module=Inhibitor_I29::Peptidase _C1; Domain location=54-110::143-358
MGKLSIAAVLLCAAGAWLLAEARPHGDDMENDFYSIVGYSPEDLGSHDRLIKLFEEWVAKYRKAYASFEEKLKRFEVFKENLKHIDEINREVSSYWLGLNEFADLTHDEFKAAYLGLSHQRPSRTSNSGGGSFRYGGVSRGDVPKEVDWRKKGAVTEVKNQGQCGSCWAFSTVAAVEGINQIVTGNLTSLSEQELIDCSTDGNNGCNGGMMDYAFSYIAGSGGLHTEEAYPYLMEEGDCDQKAGDEKVVTISGYEDVPANDEQALVTALAHQPISVAIEASGRHFQFYKGGVFDGPCGAELDHGVAAVGYGTSKGQDYIIVKNSWGPHWGEKGYIRMKRGTGKPEGLCGINKMASYPTKGQ

SEQ ID NO: 70600 - protein, 182 aa, Setaria italica
  Transcript Sequence Number=SeqID_4626
ERRRQLEEQGELDREAARLAMQLVHESETEKHGLQRQLEACRVRAQLYQLDDDAMDGEDAGGEGGRWESNGGGDGNNYQSLVDFLPGSVYSSSPDLANLLKLCTEAGNGGGRRQRDDYYGEPAVAVVEEEAEEEEVMAVAVTVTAATESSGSVVGATTTIVAEPLHERSTNSCHVETVAEAA

SEQ ID NO: 70601 - protein, 87 aa, Setaria italica
  Transcript Sequence Number=SeqID_4627
  Gene Ontology: Mol. function=nucleotide binding; Biological process =defense response
  Homolog annotation: Hit_ID=B9V0H2; Match level="QueryCoverage=91%, HitCoverage=5%, E-value=2e-13, Identity=46%"; Hit description=NBS -LRR disease resistance protein family-1
SQLTNFEELRVSGCPDLVLPDWFGDLTNLMMLEIINCTSIQSLPESMKQLTNFEELIVSGCPDLVQWCETENAKALLAHIKTKELTN

SEQ ID NO: 70602 - protein, 80 aa, Setaria italica
  Transcript Sequence Number=SeqID_4628
  Gene Ontology: Mol. function=electron carrier activity; Cellular component=integral to membrane; Biological process=oxidation reduction
  Homolog annotation: Hit_ID=A5LFV4; Match level="QueryCoverage=97%, HitCoverage=15%, E-value=1e-27, Identity=69%"; Hit description =Cytochrome P450
SIDYNGKDFRFIPFSAGRRGCPGIAFATRLAELALANLLYHFDWELPEGQNVESFEVMESSGISPVLKYPLTLVANPLQA

SEQ ID NO: 70603 - protein, 70 aa, Setaria italica
  Transcript Sequence Number=SeqID_4629
DNNKKGNATVPAALSAHHILQWHSCLLRTTGELVPRLEWNRFYCSSRVVVYTTTRASHEPRDDCRCMWRE

SEQ ID NO: 70604 - protein, 240 aa, Setaria italica
  misc_feature (207)..(207): Xaa can be any naturally occurring amino acid
  Transcript Sequence Number=SeqID_4630
  Homolog annotation: Hit_ID=B9RS75; Match level="QueryCoverage=91%, HitCoverage=9%, E-value=7e-51, Identity=51%"; Hit description=Zinc finger protein, putative
NLFLGLRQISTPRKIFMVSIILSLLHMDDCVKLSQAVPSECYVTHECHESNIESEGKNMVIYFVGLLLDILSHNLQVKGPDMDHLSSTSLSPAGRQALEWRLKHAKHSIEDLDWRLSVLKRLQPPSERQWSWKEALVLLHAAPSKLLNVCMQRENYDIGEEAVQRFSLPAEDKASLELAEWVAGAYKRALVEDAVNRATNNNAGTGXLDILSLRAQLGSLTTILLCVDVAATSARSGDMC

SEQ ID NO: 70605 - protein, 248 aa, Setaria italica
  misc_feature (10)..(10): Xaa can be any naturally occurring amino acid
  misc_feature (29)..(29): Xaa can be any naturally occurring amino acid
  misc_feature (68)..(68): Xaa can be any naturally occurring amino acid
  misc_feature (96)..(96): Xaa can be any naturally occurring amino acid
  misc_feature (124)..(124): Xaa can be any naturally occurring amino acid
  misc_feature (138)..(138): Xaa can be any naturally occurring amino acid
  Transcript Sequence Number=SeqID_4631
  Gene Ontology: Mol. function=aspartic-type endopeptidase activity; Biological process=RNA-dependent DNA replication
  Homolog annotation: Hit_ID=Q8L7J3; Match level="QueryCoverage=99%, HitCoverage=15%, E-value=5e-93, Identity=64%"; Hit description=Gag -pol polyprotein
DFETWQHYLXPKEFVIHSDHEALQHLKGXAKLNRRHAKWVEFIETFPYIVKYEIGKDNIVTDALSRKXNILLNQLEVKVMGIESIKKLYSVVYEFXEPYAKCTTGKGWEKYHMHDGFLFRANKXLCVPNCSVRLLLLXEAHAGGLMGHFGRDKTYEMLGDHFYWPKMRRDVARLVQCCVTCHKAKSKQNTHGLYTPLLIPSVHWEGISIDFVLGLPRTKRGRDSIFMVVDRFSKMAHFIPCNKSDDAS

SEQ ID NO: 70606 - protein, 346 aa, Setaria italica
  misc_feature (142)..(142): Xaa can be any naturally occurring amino acid
  Transcript Sequence Number=SeqID_4632
  Gene Ontology: Mol. function=catalytic activity; Biological process =metabolic process
  Homolog annotation: Hit_ID=B9RD44; Match level="QueryCoverage=100%, HitCoverage=81%, E-value=1e-140, Identity=67%"; Hit description =Catalytic, putative
  Pfam annotation: Domain name=ECH; Domain location=3-155; Score=-22.5; E_value=2.5e-05; Accession=PF00378.12; Description=Enoyl-CoA hydrataseisomerase family
MGGRLNKFYESWEDNPDIGFVMMKGSGRAFCAGGDVVRLRELVSEGKMEECQDFFKTLYKFIYFLGTYLKPHVAILDGVTMGGGGGVSIPGTFRIATDRTVFATPEVHIGFHPDAAASFYLSHLTGHVGEYVALTGENTWPXTGEKLKGADMIALGLATHYSMSEHLDLVDDRLANLVTDDPSVIDSSLAQYGDMVYPDKASIVHRLEVIDKCFSHETVEEIVGALESEEARLNEEWCTLALKRLKEASPLALKVSLRSIREGRYQTLDECLVREYRMSMNGISKQFSHEFSEGVRARLVDKDLAPKWDPPALEYVTQDMVDAYFAPLGESESELKLPTETREAFV

SEQ ID NO: 70607 - protein, 75 aa, Setaria italica
  Transcript Sequence Number=SeqID_4633
  Gene Ontology: Mol. function=protein serine/threonine kinase activity
  Homolog annotation: Hit_ID=Q6B7Q8; Match level="QueryCoverage=54%, HitCoverage=24%, E-value=2e-11, Identity=82%"; Hit description =Putative serine/threonine-specific protein kinase (Fragment)
  Pfam annotation: Domain name=KA1; Domain location=28-73; Score=71.5; E_value=3.1e-18; Accession=PF02149.11; Description=Kinase associated domain 1
PRAHFLSAGKCGLEPTGDSIENDSLSEKLNLIKFEIQLYKTRDEKYLLDLQRFSGPQLLFLDLCAAFLAQLKLFM

SEQ ID NO: 70608 - protein, 158 aa, Setaria italica
  misc_feature (57)..(57): Xaa can be any naturally occurring amino acid
  misc_feature (121)..(121): Xaa can be any naturally occurring amino acid
  misc_feature (125)..(125): Xaa can be any naturally occurring amino acid
  misc_feature (136)..(136): Xaa can be any naturally occurring amino acid
  Transcript Sequence Number=SeqID_4634
  Gene Ontology: Mol. function=protein serine/threonine kinase activity; Biological process=protein amino acid phosphorylation
  Homolog annotation: Hit_ID=B6T9U2; Match level="QueryCoverage=100%, HitCoverage=31%, E-value=2e-73, Identity=86%"; Hit description=SNF1 -related protein kinase catalytic alpha subunit KIN10
  Pfam annotation: Domain name=Pkinase; Domain location=1-99; Score= -95.8; E_value=0.0087; Accession=PF00069.17; Description=Protein kinase domain
LKTSCGSPNYAAPEVISGKLYAGPEVDVWSCGVILYALLCGTLPFDDENIPNLFKKXKGGIYTLPSHLSPSARDLIPRMLVVDPMKRITIREIREHVWFKIRLPRYLAVPPPDTAQQVKKXLDEXVNFFNLVVGLXKNLLIESVQNRLQNEATVAYYL

SEQ ID NO: 70609 - protein, 154 aa, Setaria italica
  misc_feature (128)..(128): Xaa can be any naturally occurring amino acid
  misc_feature (141)..(141): Xaa can be any naturally occurring amino acid
  Transcript Sequence Number=SeqID_4635
  Gene Ontology: Mol. function=protein serine/threonine kinase activity; Cellular component=nucleoplasm; Biological process=protein amino acid phosphorylation
  Homolog annotation: Hit_ID=B6T9U2; Match level="QueryCoverage=96%, HitCoverage=29%, E-value=1e-70, Identity=85%"; Hit description=SNF1 -related protein kinase catalytic alpha subunit KIN10
IKNNTTAPEVDVWSCGVILYALLCGTLPFDDENIPNLFKKIKGGIYTLPSHLSPAFWDLSPRLLVVDPMKRITIREIREHVWFKIRLPRYLAVPPPDTAQQVKKLDEETLNDVIKMGFDKNLLIESVXNRLQNEATVAYYXLLDNRLRTTSGYL

SEQ ID NO: 70610 - protein, 130 aa, Setaria italica
  misc_feature (122)..(122): Xaa can be any naturally occurring amino acid
  Transcript Sequence Number=SeqID_4636
  Gene Ontology: Mol. function=protein serine/threonine kinase activity; Biological process=protein amino acid phosphorylation
  Homolog annotation: Hit_ID=B6T9U2; Match level="QueryCoverage=94%, HitCoverage=24%, E-value=6e-65, Identity=92%"; Hit description=SNF1 -related protein kinase catalytic alpha subunit KIN10
LDYSLYVQATVAYYLLLDNRLRTTSGYLGAECQEAMDSSFSSIASYETPSSARGNRQQIFMESPVGSRPHFPAERKWALGLQSRAHPREIMTEVLKALQELNVYWKKIGHYNMKCRWSPGFXGQIHNNHT

SEQ ID NO: 70611 - protein, 61 aa, Setaria italica
  misc_feature (1)..(23): Xaa can be any naturally occurring amino acid
  Transcript Sequence Number=SeqID_4637
XXXXXXXXXXXXXXXXXXXXXXXGSCKQLSFQLTIVIAEIIHVDRHYASKSTGLVHCISIS

SEQ ID NO: 70612 - protein, 223 aa, Setaria italica
  misc_feature (188)..(188): Xaa can be any naturally occurring amino acid
  Transcript Sequence Number=SeqID_4638
  Gene Ontology: Mol. function=protein serine/threonine kinase activity; Cellular component=nuclear membrane; Biological process =protein amino acid phosphorylation
  Homolog annotation: Hit_ID=B6T9U2; Match level="QueryCoverage=100%, HitCoverage=44%, E-value=1e-119, Identity=92%"; Hit description=SNF1- related protein kinase catalytic alpha subunit KIN10
  Pfam annotation: Domain name=Pkinase; Domain location=1-168; Score =136.4; E_value=9.2e-38; Accession=PF00069.17; Description=Protein kinase domain
  Pfam annotation: Domain name=Pkinase_Tyr; Domain location=1-166; Score=-138.7; E_value=0.00017; Accession=PF07714.9; Description =Protein tyrosine kinase
  Pfam module annotation: Pfam domain module=Pkinase::Pkinase_Tyr; Domain location=1-168::1-166
LFDYIVEKGRLHEEEARRFFQQIISGVEYCHRNMVVHRDLKPENLLLDSKCNVKIADFGLSNVMRDGHFLKTSCGSPNYAAPEVISGKLYAGPEVDVWSCGVILYALLCGTLPFDDENIPNLFKKIKGGIYTLPSHLSPSARDLIPRMLVVDPMKRITIREIREHVWFKIRLPRYLAVPPPDTAQQVXKKLDEETLNDVIKMGFDKNLLIESVQNRLQNEATV

SEQ ID NO: 70613 - protein, 96 aa, Setaria italica
  Transcript Sequence Number=SeqID_4639
  Pfam annotation: Domain name=KA1; Domain location=58-95; Score=44.9; E_value=3.1e-10; Accession=PF02149.11; Description=Kinase associated domain 1
MFPCVYYFFCALYGNDLLIHLHLCSFTQSRALYDWGPILSLFVLCAFFFIFLMCRLLMQLYKTRDEKYLLDLQRFSGPQLLFLDLCAAFLAQLRVL

SEQ ID NO: 70614 - protein, 346 aa, Setaria italica
  Transcript Sequence Number=SeqID_4640
  Gene Ontology: Mol. function=protein serine/threonine kinase activity; Cellular component=nucleoplasm; Biological process=protein amino acid phosphorylation
  Homolog annotation: Hit_ID=B6T9U2; Match level="QueryCoverage=100%, HitCoverage=69%, E-value=0.0, Identity=92%"; Hit description=SNF1 -related protein kinase catalytic alpha subunit KIN10
  Pfam annotation: Domain name=Pkinase; Domain location=14-266; Score =379.8; E_value=4.9e-111; Accession=PF00069.17; Description=Protein kinase domain
  Pfam annotation: Domain name=Pkinase_Tyr; Domain location=14-264; Score=51.8; E_value=3.6e-17; Accession=PF07714.9; Description =Protein tyrosine kinase
  Pfam annotation: Domain name=UBA; Domain location=288-324; Score =18.9; E_value=0.021; Accession=PF00627.23; Description=UBATS-N domain
  Pfam module annotation: Pfam domain module=Pkinase::Pkinase_Tyr::UBA; Domain location=14-266::14-264::288-324
MEGAGRDANPLSGYRIGKTLGIGSFGKVKIAEHILTGHKVAIKILNRRKIRSMEMEEKVKREIKILRLFMHPHIIRLYEVIDTPADIYVVMEYVKSGELFDYIVEKGRLHEEEARRFFQQIISGVEYCHRNMVVHRDLKPENLLLDSKCNVKIADFGLSNVMRDGHFLKTSCGSPNYAAPEVISGKLYAGPEVDVWSCGVILYALLCGTLPFDDENIPNLFKKIKGGIYTLPSHLSPSARDLIPRMLVVDPMKRITIREIREHVWFKIRLPRYLAVPPPDTAQQVKKLDEETLNDVIKMGFDKNLLIESVQNRLQNEATVAYYLLLDNRLRTTSGYLGAEFQESMD

SEQ ID NO: 70615 - protein, 346 aa, Setaria italica
  misc_feature (6)..(6): Xaa can be any naturally occurring amino acid
  Transcript Sequence Number=SeqID_4641
  Gene Ontology: Mol. function=protein serine/threonine kinase activity; Biological process=protein amino acid phosphorylation
  Homolog annotation: Hit_ID=B6T9U2; Match level="QueryCoverage=100%, HitCoverage=77%, E-value=1e-155, Identity=72%"; Hit description=SNF1- related protein kinase catalytic alpha subunit KIN10
  Pfam annotation: Domain name=KA1; Domain location=300-345; Score =83.3; E_value=8.5e-22; Accession=PF02149.11; Description=Kinase associated domain 1
  Pfam annotation: Domain name=NifQ; Domain location=158-280; Score= -69.2; E_value=0.093; Accession=PF04891.4; Description=NifQ
  Pfam annotation: Domain name=Pkinase; Domain location=1-109; Score= -45.9; E_value=9.2e-06; Accession=PF00069.17; Description=Protein kinase domain
  Pfam annotation: Domain name=UBA; Domain location=131-167; Score =18.9; E_value=0.021; Accession=PF00627.23; Description=UBATS-N domain
  Pfam module annotation: Pfam domain module=KA1::NifQ::Pkinase::UBA; Domain location=300-345::158-280::1-109::131-167
TRRFFXQIISGVEYCHRNMVVHRDLKPENLFLGSKCNVKIADFGLSNVMRDGHFLKTSCGSPNYAAPEGGIYTLPSHLSPSARDLIPRMLVVDPMKRITIREIREHVWFKIRLPRYLAVPPPDTAQQVKKLDEETLNDVIKMGFDKNLLIESVQNRLQNEATVAYYLLLDNRLRTTSGYLGAEFQESMDSSFSQVLAETPTSATELRQHGFTESPGSGLRQHFAAERKWALGLQSRAHPREIITEVLKALQELNVYWKKIGHYNMKCRWSPGCLESMMHGNDGFGAESAIIETDDLIQKSTPTVKFEIQLYKTRDEKYLLDLQRVSGPQLLFLDLCSAFLTQLRVL

SEQ ID NO: 70616 - protein, 499 aa, Setaria italica
  Transcript Sequence Number=SeqID_4642
  Gene Ontology: Mol. function=protein serine/threonine kinase activity; Cellular component=nucleoplasm; Biological process=protein amino acid phosphorylation
  Homolog annotation: Hit_ID=B6T9U2; Match level="QueryCoverage=96%, HitCoverage=96%, E-value=0.0, Identity=95%"; Hit description=SNF1 -related protein kinase catalytic alpha subunit KIN10
  Pfam annotation: Domain name=KA1; Domain location=453-498; Score =70.7; E_value=5.4e-18; Accession=PF02149.11; Description=Kinase associated domain 1
  Pfam annotation: Domain name=Pkinase; Domain location=14-266; Score =377.1; E_value=3.2e-110; Accession=PF00069.17; Description=Protein kinase domain
  Pfam annotation: Domain name=Pkinase_Tyr; Domain location=14-264; Score=43.7; E_value=1.2e-16; Accession=PF07714.9; Description =Protein tyrosine kinase
  Pfam annotation: Domain name=UBA; Domain location=288-324; Score =20.0; E_value=0.0098; Accession=PF00627.23; Description=UBATS-N domain
  Pfam module annotation: Pfam domain module=KA1::Pkinase::Pkinase _Tyr::UBA; Domain location=453-498::14-266::14-264::288-324
MEGAGKDVNPLRNYRIGKTLGIGSFGKVKIAEHISTGHKVAIKILNRRKIKGMEMEEKVKREIKILRLFMHPHIIRLYEVIDTQADIYVVMEYVKSGELFDYIVEKGRLQEEEARRFFQQIISGVEYCHRNMVVHRDLKPENLLLDSKCNVKIADFGLSNVMRDGHFLKTSCGSPNYAAPEVISGKLYAGPEVDVWSCGVILYALLCGTLPFDDENIPNLFKKIKGGIYTLPSHLSGAARDLIPRMLVVDPMKRITIREIREHDWFKIHLPRYLTVPPPDSAQQVKKIDEETLREVIGMGYDKNLLVESIQNRLQNEATVAYYLLLDNRLRTTSGYLGAECQEAMDSSFSSIASYETPSSARGNRQQIFMESPVGSRPHFPAERKWALGLQSRAHPREIMTEVLKALQELNVYWKKIGHYNMKCRWSPGFPGQIHNNHTFSAESIENDSLSEKLNLIKFEIQLYKTRDEKYLLDLQRFSGPQLLFLDLCAAFLAQLRVL

SEQ ID NO: 70617 - protein, 79 aa, Setaria italica
  Transcript Sequence Number=SeqID_4643
  Homolog annotation: Hit_ID=B9T6B3; Match level="QueryCoverage=83%, HitCoverage=8%, E-value=2e-18, Identity=71%"; Hit description=Actin binding protein, putative
LIFVYFELTGLEKNAESDIVAKVQAEASLLRHTNANLSKQVEGLQMSRLTEVEELAYLRWINSCLRHELCNSDQAARAM

SEQ ID NO: 70618 - protein, 96 aa, Setaria italica
  Transcript Sequence Number=SeqID_4644
RRHLRGRLVWRRHRLMVIGVGLCVFMLLLLPHRLALFRRGRRWRTGFTVACLGRLLHLHSIHGRFDVAGGRHAADLDRATSTTTKKPPRWPGRSVT

SEQ ID NO: 70619 - protein, 140 aa, Setaria italica
  Transcript Sequence Number=SeqID_4645
  Subcellular localization annotation: CTP_CleavageSite=70; ConfidenceScore=5.16e-01
HRGAPEMQQRRKSVFASAPFAMKQAALGAGVAARKNGAPLSLAAVVFALFVFATFLYNEDIKSITDFQFSAGAIRAKAPDLHLLQEAEAAAHAAVNTLAKRGEEVIVRVLEAPAAAGALSSLQGGANATAGTTGAAAAAD

SEQ ID NO: 70620 - protein, 259 aa, Setaria italica
  Transcript Sequence Number=SeqID_4646
  Homolog annotation: Hit_ID=B6U4F6; Match level="QueryCoverage=94%, HitCoverage=34%, E-value=1e-120, Identity=90%"; Hit description =Mitotic checkpoint protein
MLEEQGRRERAEQELSKLQEVEAKAHKLELELASCTALLSNIPDVSSYADIPQKIADLQKQALTNLNKVGEVTSRLKELEVALEFADLSKQRAEGEANLAKERAESAAKEVKRLELMLAAISEERDKLRKEHAVELDQSGMEKTIRELESTIHEQKELVSHKDTELNIMNERLNLEAKKVKSLEREGDQLRSQVALLESKLGHGDYSASSTKVLRMVNTLAVDNEAKQTIEALQAELKKTKERLQAVEELKGQADAGTV

SEQ ID NO: 70621 - protein, 287 aa, Setaria italica
  misc_feature (76)..(76): Xaa can be any naturally occurring amino acid
  Transcript Sequence Number=SeqID_4647
  Gene Ontology: Mol. function=molecular_function; Cellular component =cytoskeleton; Biological process=mitotic cell cycle checkpoint
  Homolog annotation: Hit_ID=B6U4F6; Match level="QueryCoverage=98%, HitCoverage=39%, E-value=1e-152, Identity=92%"; Hit description =Mitotic checkpoint protein
TRPKEVKRLELMLAAISEERDKLRKEHAVELDQSGMEKTIRELESTIHEQKELVSHKDTELNIMNERLNLEAKSYXSLEREGDQLRSQVALLESKLGHGDYSASSTKVLRMVNTLAVDNEAKQTIEALQAELKKTKERLQAVEELKGQADAGTVVDANIAEKLAQLKNQIATLEKREERYKAVFAERISVFRKACCSLFGYKIVMNDQQQSNGIPVTRFILQSVYAQSDDEKLEFDYESGSTNIVVNDYTSQQEIAQQVDVFVRRMNSIPAFTANLTMESFNKRSIC

SEQ ID NO: 70622 - protein, 90 aa, Setaria italica
  Transcript Sequence Number=SeqID_4648
MAPPPRRNQPQNPTRRKGEEPWLAASLRPANFLPGLAIGFLLGLLLDLSSSWRPKSNPAPAPAPAAATARGSSSKRASGGSFASGGEELK

SEQ ID NO: 70623 - protein, 121 aa, Setaria italica
  Transcript Sequence Number=SeqID_4649
  Gene Ontology: Mol. function=protein binding; Cellular component =plasma membrane
  Homolog annotation: Hit_ID=Q75I37; Match level="QueryCoverage=97%, HitCoverage=26%, E-value=9e-53, Identity=82%"; Hit description =Lipase, putative, expressed
  Pfam annotation: Domain name=DUF620; Domain location=1-119; Score =165.1; E_value=2e-46; Accession=PF04788.4; Description=Protein of unknown function (DUF620)
QGLDPLTTAGLFAEARCVGEKKVNGEDCFILKLTADPQTLKLRSEGPAEIIRHVLFGYFSQRTGLIVQIEDSHLTRIQPHAGGDAVYWETTISSALEDYRPVEGVMIAHSGRSAVTLFPVS

SEQ ID NO: 70624 - protein, 41 aa, Setaria italica
  Transcript Sequence Number=SeqID_4650
MGKGGQDEGKRRDGSASSGADPAAPAFPAWARTPSECLAEL

SEQ ID NO: 70625 - protein, 130 aa, Setaria italica
  Transcript Sequence Number=SeqID_4651
  Gene Ontology: Mol. function=metal ion binding; Cellular component =nucleus; Biological process=multicellular organismal development
  Homolog annotation: Hit_ID=B6T7S3; Match level="QueryCoverage=96%, HitCoverage=62%, E-value=2e-50, Identity=80%"; Hit description=Axial regulator YABBY2
  Pfam annotation: Domain name=YABBY; Domain location=1-104; Score =104.5; E_value=3.6e-28; Accession=PF04690.5; Description=YABBY protein
LFQLVQENLKVHNFSFSTENYCEYAPSSSKYRMPTMFSTKGDQDHMLHVRAAPEKRQRVPSAYNRFIKEEIRRIKASNPAISHREAFSTAAKNWAHFPNIHFGLGPLESSKKLDEAIGAAGHPHKVQDLY

SEQ ID NO: 70626 - protein, 96 aa, Setaria italica
  Transcript Sequence Number=SeqID_4652
  Gene Ontology: Mol. function=metal ion binding; Cellular component =nucleus; Biological process=multicellular organismal development
  Homolog annotation: Hit_ID=B6T7S3; Match level="QueryCoverage=94%, HitCoverage=47%, E-value=3e-41, Identity=86%"; Hit description=Axial regulator YABBY2
  Pfam annotation: Domain name=YABBY; Domain location=1-70; Score=50.2; E_value=1.6e-15; Accession=PF04690.5; Description=YABBY protein
LKGRILGGDQDHMLHVRAPEKRQRVPSAYNRFIKEEIRRIKASNPAISHREAFSTAAKNWAHFPNIHFGLGPLESSKKLDEAIGAAGHPHKVQDLY

SEQ ID NO: 70627 - protein, 135 aa, Setaria italica
  misc_feature (41)..(41): Xaa can be any naturally occurring amino acid
  Transcript Sequence Number=SeqID_4653
  Homolog annotation: Hit_ID=B9SM93; Match level="QueryCoverage=92%, HitCoverage=34%, E-value=3e-27, Identity=49%"; Hit description =Pentatricopeptide repeat-containing protein, putative
  Pfam annotation: Domain name=PPR; Domain location=82-115; Score=20.6; E_value=0.0064; Accession=PF01535.12; Description=PPR repeat
SFREFLPREEPNEVTIVAALSACAQLGALQDGLGVHEFARXIGAEDNVRVCNALIDMYSKCGSLGRALEVFHSIKLEDRTLVSYNATIQALSTHGHGADALKLFDEMPAWIEPDEVTYLAVLGGCNHAGLVDDGR

SEQ ID NO: 70628 - protein, 85 aa, Setaria italica
  Transcript Sequence Number=SeqID_4654
  Subcellular localization annotation: CTP_CleavageSite=32; ConfidenceScore=5.18e-01
MESLVSQARPAAVLWLAGFLQAARLHRVVSFCASSRALSIRIAQCFLLNGLIFLGSLLTLKSVVIPTLLCILPEQCNEMGNDHLC

SEQ ID NO: 70629 - protein, 71 aa, Setaria italica
  Transcript Sequence Number=SeqID_4655
AMTMDDYSKIYIMPSRNTCKKKERKNKRTRCQKRWQKEAEAGGGQRPDGSATERGRQSQASKLELQLTTMP

SEQ ID NO: 70630 - protein, 428 aa, Setaria italica
  Transcript Sequence Number=SeqID_4656
  Gene Ontology: Mol. function=metal ion binding; Cellular component =cytoplasm
  Homolog annotation: Hit_ID=B8YPX6; Match level="QueryCoverage=100%, HitCoverage=100%, E-value=0.0, Identity=85%"; Hit description=RING -type E3 ubiquitin ligase
MGNRIGGRRKAGVEERFTRPQGLYEHRDIDQKKLRKLILEAKLAPCYPGADDAAAGGGDLEECPICFLYYPSLNRSKCCSKGICTECFLQMKPTHTARPTQCPFCKTPNYAVEYRGVKTKEERSIEQFEEQKVIEAQLRIRQKEIQDEEAKLKRKQSRCSSSRTVTPTKEVEYRDICSTSFSVPSYQCAEQGTECCSSEPSCSSQASMRPFHSRHNRDDNVDMNLEDMMVMEAIWRSIQEQGHLVNPVCGSYFPVIEPQTRERQAFLPAAPMEMPHPGGYSCAVAALAEHQPPSMDFSYMAGSSTFPVYDMIRRPCNISGGSMCAVENSSLDTWSGIAPSCSREVLREEGECSTDHWSEGAEAGTSYAGSDIMADAGSMQPLPFAENFAMAPSHFRPDSIEEQMMFSMAVSLTDAHHGRAHAQGMAWL

SEQ ID NO: 70631 - protein, 57 aa, Setaria italica
  Transcript Sequence Number=SeqID_4657
MELEVGAPSPARYLLGAAIMMAGVVLPLAYMIFRSKRSPSSSSSAAAAGPSSFSKQT

SEQ ID NO: 70632 - protein, 128 aa, Setaria italica
  Transcript Sequence Number=SeqID_4658
AKTEKYNHQGTLSIHPSLTNPHRPSHLHRGRSRSDEPLVRLLGEGGGPGGGGGGGGGRRALAAEDHVRQRQHHAGHHDRRPQQVPRRRRRPHLQLHPDLLVSCWGGLDLAVVRATRWVTKPDDQLACG

SEQ ID NO: 70633 - protein, 90 aa, Setaria italica
  Transcript Sequence Number=SeqID_4659
GHSKHYRLASELPLIEVTCTLVLYVFMLFMPCLFLYKLTTAYMNSITHCTCHCCPQHTTSNPIISCIILFSYILSCYDGSILHLAACVLP

SEQ ID NO: 70634 - protein, 67 aa, Setaria italica
  Transcript Sequence Number=SeqID_4660
  Subcellular localization annotation: CTP_CleavageSite=42; ConfidenceScore=5.24e-01
IRYGVLSLCMLGPTTYRKLCFPVTKKVKTSSSRFLAEIYPPTSSVFSSPGDGRRRPTGKHIASDRSI

SEQ ID NO: 70635 - protein, 53 aa, Setaria italica
  Transcript Sequence Number=SeqID_4661
AAGPASVPVNIPDWSKILGAEYAGSCAGARRWAAHDDLRRVRNAIWEKTGFQD

SEQ ID NO: 70636 - protein, 95 aa, Setaria italica
  Transcript Sequence Number=SeqID_4662
LRPLIKENASLSLPPQSENGINEAAAGIAVAVKAGGGGAGLPGLPATRSVLEASLLPDGVADAAEVAALERAPGALAHGEGRRGALPALQHLVGR

SEQ ID NO: 70637 - protein, 376 aa, Setaria italica
  misc_feature (265)..(265): Xaa can be any naturally occurring amino acid
  misc_feature (314)..(314): Xaa can be any naturally occurring amino acid
  Transcript Sequence Number=SeqID_4663
  Gene Ontology: Mol. function=nucleic acid binding
  Homolog annotation: Hit_ID=B9S1S8; Match level="QueryCoverage=80%, HitCoverage=58%, E-value=1e-112, Identity=68%"; Hit description=Cir, putative
  Pfam annotation: Domain name=Cir_N; Domain location=38-74; Score =50.0; E_value=8.9e-12; Accession=PF10197.1; Description=N-terminal domain of CBF1 interacting
  Pfam annotation: Domain name=zf-CCHC; Domain location=201-220; Score =13.1; E_value=0.0044; Accession=PF00098.15; Description=Zinc knuckle
  Pfam module annotation: Pfam domain module=Cir_N::zf-CCHC; Domain location=38-74::201-220
RGKTDGGELGTERMAAGEVELKEKAGTAWSHSYLNQKPWHPLSYPNQRRKWIAEQVHANRARRQEEVQREFAQEQEFFRQTALFSKKDKEKMEVMKAVSFMYVRPPGYNAESAKAAEIEDEKKKSDPGDMGQGAAAASTSSMPDKGPEKTQPGADKKNRPKDVFGRPLPTEQEFEVLKNAPRLETGAPVRIKPFGVEVRNVRCLRCGNYGHQSGDRECPLKDVIMPNEESRLKRDDPLTTIMAQTDSSEPLKWELKQKPGMSPPXRGGFDPDDPNQQIVAEDIFDEYGGFLGDCDIPALISNFSGSKSTKRSKXKSKHKQVASAIHEESSRRESSYHLSSDSEDEKRSKTSRSKRKKKHCSDSSHSDSVVDARKGE

SEQ ID NO: 70638 - protein, 319 aa, Setaria italica
  misc_feature (9)..(9): Xaa can be any naturally occurring amino acid
  misc_feature (102)..(102): Xaa can be any naturally occurring amino acid
  misc_feature (290)..(290): Xaa can be any naturally occurring amino acid
  Transcript Sequence Number=SeqID_4664
QKPGMSPPXRGGFDPDDPNQQIVAEDIFDEYGGFLGDCDIPALISNFSGSKSTKRSKKKSKHKQVASAIHEESSRRESSFSDSVALVDEKRSKTSRSKRKKXHCSDSSHSDSVVDARKGEHKSKHKHKKKHRSESSSDSEVEVCDDTRRYLKREHRKEKREELPSSFYKGKGDTESKRHSRRSREKRLYSYSSSSESHRHSLQHKEKQYYSDSSSGRRHRHSRRSREKRYDSESSSADANRRPRRVMEKQHDTDLSPHHTDRHSKRSNGKRDYTEWSRYESNRHSRRISXRRGAYSDSSVSDYSDSDRHNKHRHHHRRK

SEQ ID NO: 70639 - protein, 64 aa, Setaria italica
  Transcript Sequence Number=SeqID_4665
  Gene Ontology: Mol. function=triacylglycerol lipase activity; Biological process=lipid metabolic process
  Homolog annotation: Hit_ID=B6SZ60; Match level="QueryCoverage=73%, HitCoverage=6%, E-value=1e-19, Identity=85%"; Hit description =Triacylglycerol lipase
CIMCGGDLLLRRLGLPRSHVQSITMHRDIVPRVFSCHYPDHVANILKLANGNFRSHPCLTNQVL

SEQ ID NO: 70640 - protein, 83 aa, Setaria italica
  Transcript Sequence Number=SeqID_4666
  Homolog annotation: Hit_ID=B6SZ60; Match level="QueryCoverage=80%, HitCoverage=9%, E-value=2e-12, Identity=59%"; Hit description =Triacylglycerol lipase
VVDYDSSSENVLNPIHCLQKLLYAPMGEVLILQPEERLSPHHHLLPPDSGIYHLGGVGASLSSGADDDSLPQLRSALSAFFNS

SEQ ID NO: 70641 - protein, 608 aa, Setaria italica
  misc_feature (7)..(7): Xaa can be any naturally occurring amino acid
  misc_feature (14)..(14): Xaa can be any naturally occurring amino acid
  Transcript Sequence Number=SeqID_4667
  Gene Ontology: Mol. function=triacylglycerol lipase activity; Biological process=lipid metabolic process
  Homolog annotation: Hit_ID=B6SZ60; Match level="QueryCoverage=78%, HitCoverage=69%, E-value=1e-169, Identity=62%"; Hit description =Triacylglycerol lipase
  Pfam annotation: Domain name=Lipase_3; Domain location=272-411; Score= 121.2; E_value=3.3e-33; Accession=PF01764.17; Description=Lipase (class 3)
GNSNWVXLQMLRVXQPRWVEAADAEATGGGGGGREPEEEAGGGVDECASCGGGGEGEGCAVGYDEGEVFDRASFSRLLRKASLGEAKEYSMMSYLCNIAYMIPKIQPKCLRRYNLQFVTSSFEDKARSSPDQKQEHSNAKDESQDQVSEAVDNAALASKEERGGLGINPFGAYHVVSSAASYLHSRAMGIMPFGSRNDVKDDPASIMAFVNGENGEGLTMDEASFVATTNSVTSMVAAKEETRQAVADDLNSSRSCPCEWFVCDDDQNSTRYFVVQGSETISAWQANLLFEPVKFEELDVLVHRGIYEAAKGIYHQMLPYVKSHLKSCGKSARLRFTGHSLGGSLALLVNLMLLMRGEAPASALLPVITFGAPCIMCGGDLLLRRLGLPRSHVQSITMHRDIVPRVFSCHYPDHVANILKLANGNFRSHPCLTNQKLLYAPMGEVLILQPEERLSPHHHLLPPDSGIYHLGGVGASLSSGADDDSLPQLRSALSAFFNSPHPLEILKDGGAYGPRGTVYRDHDVNSYLRSVRGVVRKEARRAREAERWRWRLLLWWPFGVHGVSPGSGLGGFVDAVTDAARRAHLLAVVLLPAELLALGALLVVARLR

SEQ ID NO: 70642 - protein, 189 aa, Setaria italica
  Transcript Sequence Number=SeqID_4668
MEKLVNHCDMELMKMAMLRHEETFRQQVHELHRLYRVQKQLMMSGGVSRPSSELIGCRRRQTRRSCRQPRRALDLRLPADDYILVVAAGNATPPPRQEDGLELTLAVGGGGAGRRKRRDEGTGTGTPVGSDCSGGSLTSSSSITDTTSGSPPFLLQEGAAAVTQQPPWLVQCLSLKMAAAWVNGHVVGF

SEQ ID NO: 70643 - protein, 75 aa, Setaria italica
  Transcript Sequence Number=SeqID_4669
  Gene Ontology: Mol. function=sequence-specific DNA binding; Cellular component=cytoplasm; Biological process=regulation of transcription, DNA-dependent
  Homolog annotation: Hit_ID=B6SL44; Match level="QueryCoverage=100%, HitCoverage=21%, E-value=3e-26, Identity=80%"; Hit description=Heat shock factor protein HSF30
LENLAVNIQELGKGTTDSVKMDQANGQSELNDDFWAELLIEDFGDKAGQSELEARPEDVDDLAQQLGYLSSSSPK

SEQ ID NO: 70644 - protein, 159 aa, Setaria italica
  Transcript Sequence Number=SeqID_4670
  Gene Ontology: Mol. function=sequence-specific DNA binding; Cellular component=cytoplasm; Biological process=regulation of transcription, DNA-dependent
  Homolog annotation: Hit_ID=B6SL44; Match level="QueryCoverage=99%, HitCoverage=44%, E-value=9e-73, Identity=91%"; Hit description=Heat shock factor protein HSF30
  Pfam annotation: Domain name=HSF_DNA-bind; Domain location=12-159; Score=208.7; E_value=1.5e-59; Accession=PF00447.9; Description=HSF -type DNA-binding
RPMEGLHEVGPPPFLTKTFDLVEDQATDAVVSWSRAGNSFVVWDPHVFADTLLPRLFKHSNFSSFVRQLNTYGFRKVDPDRWESANEGFLRGQRHLLKTIKRRKPSSAVPQSHQQQAPASCLEVGEFGFEEEIDRLKRDKNILITEVVKLRQEQQTTKL

SEQ ID NO: 70645 - protein, 55 aa, Setaria italica
  Transcript Sequence Number=SeqID_4671
  Gene Ontology: Mol. function=sequence-specific DNA binding; Cellular component=cytoplasm
  Homolog annotation: Hit_ID=B6SL44; Match level="QueryCoverage=100%, HitCoverage=15%, E-value=6e-18, Identity=81%"; Hit description=Heat shock factor protein HSF30
MDQANGQSELNDDFWAELLIEDFGDKAGQSELEARPEDVDDLAQQLGYLSSSSPK

SEQ ID NO: 70646 - protein, 378 aa, Setaria italica
  Transcript Sequence Number=SeqID_4672
  Gene Ontology: Mol. function=sequence-specific DNA binding; Cellular component=cytoplasm; Biological process=regulation of transcription, DNA-dependent
  Homolog annotation: Hit_ID=B6SL44; Match level="QueryCoverage=94%, HitCoverage=91%, E-value=1e-149, Identity=79%"; Hit description=Heat shock factor protein HSF30
  Pfam annotation: Domain name=HSF_DNA-bind; Domain location=19-215; Score=235.7; E_value=1.1e-67; Accession=PF00447.9; Description=HSF -type DNA-binding
GGGRDAPRPMEGLHEVGPPPFLTKTFDLVEDQATDAVVSWSRAGNSFVVWDPHVFADTLLPRLFKHSNFSSFVRQLNTYLDGTRYWMKYKLCYTDTPIRIRIHDTGFRKVDPDRWEFANEGFLRGQRHLLKTIKRRKPSSAVPQSHQQQAPASCLEVGEFGFEEEIDRLKRDKNILITEVVKLRQEQQTTKDHVRAMEERLRVAEQKQVQMMGFLARAMRNPEFFQQLVQQQDKRKELEDAISKKRRRPIDNTPFYSPGETSQTEPLDSQFVFDSGVLDGLSEPGMPELENLAVNIQELGKGTTDSVKMDQANGQSELNDDFWAELLIEDFGDKAGQSELEARPEDVDDLAQQLGYLVEMYGPSQVFIYGRSRAYRYH

SEQ ID NO: 70647 - protein, 222 aa, Setaria italica
  Transcript Sequence Number=SeqID_4673
  Gene Ontology: Mol. function=methyltransferase activity; Cellular component=integral to membrane; Biological process=vesicle-mediated transport
  Homolog annotation: Hit_ID=B9T1J5; Match level="QueryCoverage=92%, HitCoverage=19%, E-value=5e-47, Identity=47%"; Hit description =Nucleotide binding protein, putative
ICSLCWASRGGSIVAVGYITGDILLWDMTTRFPRQDKQIDVSSNVVKLQLASGSRRLPVIVLHWSAGSAIHSNKGGHLFVYGGDDMGSEEVLTVLSLESSAGLESVTCMSRMDLKLDGSFADMILIPDTGVPDKSKTSALFILTNPGQLNFYDGGSLFSVQNTKEGNALPEAQKFPVAVPTIDPNITVTNLCSLTERELSNISLKKFCARQNAGPFISGNMK

SEQ ID NO: 70648 - protein, 45 aa, Setaria italica
  misc_feature (30)..(30): Xaa can be any naturally occurring amino acid
  misc_feature (38)..(38): Xaa can be any naturally occurring amino acid
  Transcript Sequence Number=SeqID_4674
FNCCWDVGGQEKLRPLWRHYFNNTDALVIXLISFSQLXQHKIYSK

SEQ ID NO: 70649 - protein, 842 aa, Setaria italica
  misc_feature (431)..(431): Xaa can be any naturally occurring amino acid
  Transcript Sequence Number=SeqID_4675
  Gene Ontology: Mol. function=binding; Cellular component=nucleus; Biological process=fat cell differentiation
  Homolog annotation: Hit_ID=B9RI11; Match level="QueryCoverage=91%, HitCoverage=92%, E-value=0.0, Identity=50%"; Hit description =Nucleolar complex-associated protein, putative
  Pfam annotation: Domain name=CBF; Domain location=555-710; Score =97.6; E_value=4.3e-26; Accession=PF03914.9; Description=CBFMak21 family
  Pfam annotation: Domain name=NOC3p; Domain location=193-286; Score =140.8; E_value=4.3e-39; Accession=PF07540.3; Description=Nucleolar complex-associated protein
  Pfam module annotation: Pfam domain module=CBF::NOC3p; Domain location=555-710::193-286
MGKRSGAKKKDKKNKVILPPELPPEVDDEEVYVSEEDIDFYGRHRFHTFDQKSIDRYVGRTAGHDEAEVERLYEERNKRKATDASRRPREEDDDLEVDPVDALPIKTLQGELVYNKAKKARYEENTGSMKSKAQENGADAKQSIKKEPTGKSKNKKGDDKVKNTQSQTEVPKGKLHSDVLEEVKKELSAEELFEKKKAQLAELGMAMLEDPELNIRSLNDMLSISNDKDQKVVKLGLMSLLAVFKDIIPSYRIRQLTEKELAVEVSKEVKKTRYYEYTLLRCYKTYLQKLISLEKQRHFYPVAVRCMCALLDTAPHFNFRESLLASVVKNLSSSDDVVRKMCCETIRSIFINEGKHRGEATIEAVRLIADHVKLNDCQLHPDSIEVFLSLRFDEDLGEHETEEQKVKPKKNKRWQNQEAPKQLPVSDKRKXRRELISKAREEVDADLRAVSFTLDPKERKGIQRETLSALFETYFRILKHTMSTSNLRSKASIVSPGASHPLLAPCLEGLGKFSHLIDLDFMGELISCLKKLSGYSDRQDETPHDNTLSVSERMQCCIVAFKVWRSNLEALNVDLQDFFVQLYNLILEYRPDRDRGEVLADALKTLLWEGRQQDMLRAAAFIKRLATFALSFGSAEAIAALITLKHLLQKNSKCRNMLENDSGGGSLSSLVAKYNPEAKDPYLSGALASVLWELSLLEKHYDISVSSMASNILSMANLNPTQNPVPILNVNPLEAYRDLSIERELSKPASKALSLNLKKKRRGKEFVVLSPDVLQKADCSVDKDKLEEKLQNHFAVLRGISENERLRAELNHTLSSINMYKEYKKQKKNTKSKIVRKKVARV

SEQ ID NO: 70650 - protein, 274 aa, Setaria italica
  Transcript Sequence Number=SeqID_4676
  Gene Ontology: Mol. function=transcription factor activity; Cellular component=nucleus; Biological process=regulation of transcription, DNA-dependent
  Homolog annotation: Hit_ID=Q6H5V2; Match level="QueryCoverage=89%, HitCoverage=52%, E-value=1e-91, Identity=71%"; Hit description=AP2 domain-containing transcription factor-like
  Pfam annotation: Domain name=AP2; Domain location=31-82; Score=81.1; E_value=4e-21; Accession=PF00847.12; Description=AP2 domain
EALNLSPRGFQAGAVPPALFQQLLRAPGPPKLYRGVRQRHWGKWVAEIRLPRNRTRLWLGTFDTAEDAAMAYDREAFKLRGENAKLNFPDLFLGKGRVGGSGRTSASAAASCSSSSSSAPPTPDDTNTKQAQHHHGEQPFNSEAKPLLPETEQAKNSEPEPNPQLQPADHQGGDGNAAMFKPSVTSSGGWGPADEAWFSAWGPGSSVWDYDMDNAHGLFLQSRFASEVTSMDYVPSAPDVPVTPAAGTAMASAASISLPSPPPPPRSPAYMWKD

SEQ ID NO: 70651 - protein, 522 aa, Setaria italica
  misc_feature (142)..(142): Xaa can be any naturally occurring amino acid
  Transcript Sequence Number=SeqID_4677
  Gene Ontology: Mol. function=transcription coactivator activity; Cellular component=nucleus; Biological process=interspecies interaction between organisms
  Homolog annotation: Hit_ID=Q3LXA7; Match level="QueryCoverage=99%, HitCoverage=51%, E-value=0.0, Identity=87%"; Hit description =Retinoblastoma-related protein 3
  Pfam annotation: Domain name=RB_A; Domain location=1-130; Score =165.4; E_value=1.7e-46; Accession=PF01858.9; Description =Retinoblastoma-associated protein A domain
  Pfam annotation: Domain name=RB_B; Domain location=243-373; Score =237.0; E_value=4.8e-68; Accession=PF01857.12; Description =Retinoblastoma-associated protein B domain
  Pfam module annotation: Pfam domain module=RB_A::RB_B; Domain location=1-130::243-373
LPHLTTEQSKMEALKLYYRVLESMCRAESQILSGNGNNLTSLLSNERFHRCMIACSAELVLATHKTVTMMFPAVLEKTGITAFDLSKVIEGFVRHEDTLPRELKRHLNSLEERLLESMAWEKGSSMYNSLIVARPALSAEIXRLGLLAEPMPSLDAIAAHHNISLGGLPPLPFQKQEHSPDKDEIRSPKRACTERRNVLVDSNSFRSPVKDIIRSKLPPPLQSAFASPTRPNPAAGGETCAETGIGVFFSKIAKLAAIRIRSLCERLQLSQQVLERVYSLVQQILTQQTALFFNRHIDQIILCSIYGVAKISQLELSFKEIIFGYRKQPQCKPQVFRSVYVHWPPRSRNGKMGEDHVDIITFYNEVFIPAVKPLLVEVGPGASPNKKEEEKGPVDVGPFPESPRLARFPNLPDMSPKKVSATHNVYVSPLRSSKMDTLLSPSSKSYYACVGESTYAFQSPSKDLKAINNRLNSGKKVSGRLNFDVVSDLVVASSLSSDQNAKPAAMEVAPVKTPVKCEPSDP

SEQ ID NO: 70652 - protein, 89 aa, Setaria italica
  Transcript Sequence Number=SeqID_4678
  Subcellular localization annotation: CTP_CleavageSite=43; ConfidenceScore=5.11e-01
NGSDRTTSSSSRRRRRRLPEPLRRPIATSPGLPTFQTLPVESRASIRSRHADPAPGRPKSGRDSPPPGVDWGFRILGAASRGSRPPMLG

SEQ ID NO: 70653 - protein, 78 aa, Setaria italica
  Transcript Sequence Number=SeqID_4679
LTHTNTRNTNVSEAFYFLYFYKLYYLACTRLGLHASLLATCNSILNTTKLHSLPDSVSSHTSFYTGSGNWPKKSNYVS

SEQ ID NO: 70654 - protein, 198 aa, Setaria italica
  Transcript Sequence Number=SeqID_4680
LFSNSDSIFGNEVVANDSDFLSASSDMMDNVVQSIPIPQVPLNKQPLSHHGPSLLLINEISGGITKQENKGDVQKRPVRSRRKQEERGKSKLSSDTSGFSQSKVQNPSASLQAPMQPVQTPQYALFQDSKNMGQVQHSNQFICPGYGYPAYPFPTIPLVSNIQAEDHQRKPAATSYQTSADSPKHSSSIEMSQDIPSR

SEQ ID NO: 70655 - protein, 173 aa, Setaria italica
  misc_feature (22)..(22): Xaa can be any naturally occurring amino acid
  misc_feature (31)..(31): Xaa can be any naturally occurring amino acid
  Transcript Sequence Number=SeqID_4681
NTNKDFLPEMIPTSHDEVHKVXAISEDPFIXEEKIYYQLQDALGKLDTKTRLCIRDSLLRLACSATERQIAGDRSSTNKTTKDEDEASEHDTSTRRTRSPTKEAETTTNPIDRIVAHLLFQRHCSKVATATKEEIISSTHLKIEPESKVPLETPRVPSEDRKDKQEMVLQPSQ

SEQ ID NO: 70656 - protein, 242 aa, Setaria italica
  misc_feature (104)..(104): Xaa can be any naturally occurring amino acid
  Transcript Sequence Number=SeqID_4682
AGQQMQALIAIQQQQQQFGQEGSGSDTIVLQPYSPRNKNADSLGSSIVIDENTNKDFLPEMIPTSHDEVHKSFAISEDPFIEEKIYYQLQDALGKAICSSLSIXLTLIQLLKMFARKEINFIFLTFLTQLDTKTRLCIRDSLLRLACSATERQIAGDRSSTNKTTKDEDEASEHDTSTRRTRSPTKEAETTTNPIDRIVAHLLFQRHCSKVATATKEEIISSTHLKIEPESKVPLETPRVPF

SEQ ID NO: 70657 - protein, 117 aa, Setaria italica
  misc_feature (8)..(8): Xaa can be any naturally occurring amino acid
  misc_feature (51)..(51): Xaa can be any naturally occurring amino acid
  Transcript Sequence Number=SeqID_4683
SSDMMDNXVQSIPIPQVPLNKQPLSHHGPSLLLINEISGGITKQENKVHKXMHIHMYTFSNYFLATLVMHFWQVADANAKSGEQVQSKNHLTCEYSGKPNQFSQEVEAIWCTLSNFL

SEQ ID NO: 70658 - protein, 181 aa, Setaria italica
  Transcript Sequence Number=SeqID_4684
HEEKSSSFLDCDWGNIGDFDDFDRLFSNSDSIFGNEVVANDSDFLSASSDMMDNVVQSIPIPQVPLNKQPLSHHGPSLLLINEISGGITKQENKVADANAKSGEQVQSKNHLTCEYSGKPNQFSQEGDVQKRPVRSRRKQEERGKSKLSSDTSGFSQSKVQNPSASLQAPMQPVQTPQYAL

SEQ ID NO: 70659 - protein, 63 aa, Setaria italica
  Transcript Sequence Number=SeqID_4685
KHGTVTLQREKRHCSKVATATKEEIISSTHLKIEPESKVPLETPRVPSEDRKDKQEMVLQPSQ

SEQ ID NO: 70660 - protein, 249 aa, Setaria italica
  misc_feature (31)..(31): Xaa can be any naturally occurring amino acid
  misc_feature (124)..(124): Xaa can be any naturally occurring amino acid
  Transcript Sequence Number=SeqID_4686
SHWSLLHISLVFLLQLDGESEVFGNDHEEKXSSFLDCDWGNIGDFDDFDRLFSNSDSIFGNEVVANDSDFLSASSDMMDNVVQSIPIPQVPLNKQPLSHHGPSLLLINEISGGITKQENKVHKXMHIHMYTFSNYFLATLVMHFWQVADANAKSGEQVQSKNHLTCEYSGKPNQFSQEGDVQKRPVRSRRKQEERGKSKLSSDTSGFSQSKVQNPSASLQAPMQPVQTPQYALFQDSKNLGQVQHSNQF

SEQ ID NO: 70661 - protein, 202 aa, Setaria italica
  misc_feature (16)..(16): Xaa can be any naturally occurring amino acid
  misc_feature (141)..(141): Xaa can be any naturally occurring amino acid
  Transcript Sequence Number=SeqID_4687
  Gene Ontology: Mol. function=catalytic activity; Cellular component =peroxisome; Biological process=metabolic process
  Homolog annotation: Hit_ID=Q0DV32; Match level="QueryCoverage=100%, HitCoverage=36%, E-value=3e-84, Identity=70%"; Hit description=4 -coumarate--CoA ligase-like 1
  Pfam annotation: Domain name=AMP-binding; Domain location=2-201; Score=-118.3; E_value=0.02; Accession=PF00501.20; Description=AMP -binding enzyme
PNNGVTLYSDLIAGVXEAEYRRPPTRQSDTAALFYSSGTTGVSKGVVLTHGNFIAALTTATSDQDELGEGRNVFLCFLPMFHIYGMSVVTLGQLRRGNAVVVMARFDLEAVLAAVKRHRVTYLYCVPPVMIALARHGRGGXYDISSLRCIGSAAAPLGKDVMEAVADKFPNAEIIQSYGMTETCGMISLEYPQKGRTRPFGS

SEQ ID NO: 70662 - protein, 69 aa, Setaria italica
  Transcript Sequence Number=SeqID_4688
NSKSLCTYIKVDWIYFFQLSIYQQWQPSCLSMSKDQLYMFHKTTSLLLLFQKSNLTFSSKHTSEEALYQ

SEQ ID NO: 70663 - protein, 222 aa, Setaria italica
  misc_feature (9)..(9): Xaa can be any naturally occurring amino acid
  misc_feature (31)..(31): Xaa can be any naturally occurring amino acid
  Transcript Sequence Number=SeqID_4689
  Gene Ontology: Mol. function=electron carrier activity; Cellular component=endoplasmic reticulum membrane; Biological process =oxidation reduction
  Homolog annotation: Hit_ID=B6TML3; Match level="QueryCoverage=96%, HitCoverage=41%, E-value=4e-91, Identity=77%"; Hit description =Flavonoid 3-monooxygenase
  Pfam annotation: Domain name=p450; Domain location=1-221; Score= -138.2; E_value=5.5e-05; Accession=PF00067.14; Description=Cytochrome P450
PQGVVAKMXKLHRRFDDMMNGIIADRRKAGXTEEGKDLLGLLLAMVKDAGGEEDRITETDAKALILNLFVAGTDTTSTIVEWSLAELIRHPAILKQAQAELDAVVGRGRLLSEADLPRLTFFNAVIKETFRLHPSTPLSLPRMAAAECEVAGYRIPKGAELLVNVWGIARDPALWGPDPLEFRPARFLPGGSHADVDVKGGDFGISQSNACTRVALASVTIR

SEQ ID NO: 70664 - protein, 34 aa, Setaria italica
  Transcript Sequence Number=SeqID_4690
YKVVTESMPIVRKDVLEQYIVQHQSELLMSMDFI

SEQ ID NO: 70665 - protein, 155 aa, Setaria italica
  misc_feature (17)..(17): Xaa can be any naturally occurring amino acid
  Transcript Sequence Number=SeqID_4691
  Gene Ontology: Mol. function=electron carrier activity; Cellular component=endoplasmic reticulum membrane; Biological process =oxidation reduction
  Homolog annotation: Hit_ID=B6TML3; Match level="QueryCoverage=90%, HitCoverage=27%, E-value=7e-55, Identity=77%"; Hit description =Flavonoid 3-monooxygenase
KEIVLEVMQVGGVLNVXDFVPALRWLDPQGVVAKMKKLHRRFDDMINGIIADRRKAGVTEEGKDLLGLLLAMVKDAGGEEDRITETDAKALILNLFVAGTDTTSTIVEWSLAELIRHPAILKQAQAELDAVVGRGRLLSEGPNLPDDLEPYLQTT

SEQ ID NO: 70666 - protein, 88 aa, Setaria italica
  Transcript Sequence Number=SeqID_4692
  Gene Ontology: Mol. function=electron carrier activity; Cellular component=endoplasmic reticulum membrane; Biological process =oxidation reduction
  Homolog annotation: Hit_ID=B6TML3; Match level="QueryCoverage=67%, HitCoverage=11%, E-value=2e-20, Identity=81%"; Hit description =Flavonoid 3-monooxygenase
MYVRRHALLIDKQTPPAGQNLFVAGTDTTSTIVEWSLAELIRHPAILKQAQAELDAVVGRGRLLSEADLPRLTFFNAMRGREGAALER

SEQ ID NO: 70667 - protein, 344 aa, Setaria italica
  Transcript Sequence Number=SeqID_4693
  Gene Ontology: Mol. function=electron carrier activity; Cellular component=endoplasmic reticulum membrane; Biological process =oxidation reduction
  Homolog annotation: Hit_ID=B6TML3; Match level="QueryCoverage=99%, HitCoverage=64%, E-value=1e-149, Identity=79%"; Hit description =Flavonoid 3-monooxygenase
  Pfam annotation: Domain name=p450; Domain location=2-332; Score=31.7; E_value=3.5e-13; Accession=PF00067.14; Description=Cytochrome P450
RFLSTCITNALSRAAVGRRVFAAGAGDDEGAREFKEIVLEVMQVGGVLNVGDFVPALRWLDPQGVVAKMKKLHRRFDDMMNGIIADRRKAGVTEEGKDLLGLLLAMVKDAGGEEDRITETDAKALIVMSNLFVAGTDTTSTIVEWSLAELIRHPAILKQAQAELDAVVGRGRLLSEADLPRLTFFNAVIKETFRLHPSTPLSLPRMAAAECEVAGYRIPKGAELLVNVWGIARDPALWGPDPLEFRPARFLPGGSHADVDVKGGDFGLIPFGAGRRICAGLSWGLRMVTLASATLVHAFDWEMPAGQTPDELDMEEAFTLLLQRAVPLMVHPVPRLLPLAYEIA

SEQ ID NO: 70668 - protein, 91 aa, Setaria italica
  Transcript Sequence Number=SeqID_4694
  Subcellular localization annotation: CTP_CleavageSite=65; ConfidenceScore=5.63e-01
PAEVPAPAPSKKKKKPSSTKSKKKKSKAPAPAPVAEAPTSTKHSKAKAPASSEADAPGPVGDGVAADTAAAGRTVAGGIMSAALGLVALLA

SEQ ID NO: 70669 - protein, 131 aa, Setaria italica
  Transcript Sequence Number=SeqID_4695
  Gene Ontology: Mol. function=protein serine/threonine kinase activity; Biological process=protein amino acid phosphorylation
  Pfam annotation: Domain name=LRRNT_2; Domain location=23-63; Score =34.0; E_value=5.9e-07; Accession=PF08263.4; Description=Leucine rich repeat N-terminal domain
  Pfam annotation: Domain name=LRR_1; Domain location=118-131; Score =0.1; E_value=3e+02; Accession=PF00560.25; Description=Leucine Rich Repeat
  Pfam annotation: Domain name=LRR_1; Domain location=68-91; Score =11.8; E_value=1.7; Accession=PF00560.25; Description=Leucine Rich Repeat
  Pfam annotation: Domain name=LRR_1; Domain location=93-116; Score =8.6; E_value=6.9; Accession=PF00560.25; Description=Leucine Rich Repeat
  Pfam module annotation: Pfam domain module=LRRNT_2::LRR_1::LRR_1::LRR_ 1; Domain location=23-63::118-131::68-91::93-116
FSSPVLLLIATANHCADAADSPSSPDAAALLNLSAALTDPSGYLATHWTPDTALCSWPRVSCDVADRRVISLDLSGLNLSGPIPAAALSSLPLLQTLNLSNNILNSTFPDDIIASLRSLRVLDLYNNNLTG

SEQ ID NO: 70670 - protein, 99 aa, Setaria italica
  Transcript Sequence Number=SeqID_4696
PKSYRKLGEHRGQWALQRKGLYQQLGWSVDCEFDKSILLWHIATDLCFYANQDDIIGGDPLPAMSREMSSYMLFLLVMRPFMMTASIGQIRFGDTCAEA

SEQ ID NO: 70671 - protein, 260 aa, Setaria italica
  Transcript Sequence Number=SeqID_4697
  Gene Ontology: Mol. function=NAD+ ADP-ribosyltransferase activity; Cellular component=nucleus
  Homolog annotation: Hit_ID=Q9LQC4; Match level="QueryCoverage=78%, HitCoverage=62%, E-value=2e-31, Identity=33%"; Hit description =F28C11.18
  Pfam annotation: Domain name=PARP; Domain location=1-176; Score= -61.5; E_value=0.018; Accession=PF00644.12; Description=Poly(ADP -ribose) polymerase catalytic domain
  Subcellular localization annotation: CTP_CleavageSite=42; ConfidenceScore=5.05e-01
YQVVSKLFLSYGMANLGAAITAVRKVAQGARARAFQRQGQLLAAARGDAAGTPKFAWYGASAEDVATVVGRGFARTNAPRLGARKHGDGLHLSPPQCPYSSAMLTKADGNGEAHIVLCRVLMGRPEVVPAKSSQSRPSSDDYDSAVDKLENPQWYVVWSKDMNTRVLPEYVVSFKCPKLQPVQESSEATSKPKTPSPARDMFPRLLAEIELLVPDKCGLLQEYYSSFKMGQIKKDQFIRFLRSYIGDKVLTTVAKKLRGC

SEQ ID NO: 70672 - protein, 73 aa, Setaria italica
  Transcript Sequence Number=SeqID_4698
SIRNYAPFICIDISSVTIYMVLLDLCLSFTCFSQKPPNMYVPHEEARQGEMLMMRWTHKPWPAKLRSFSSNAT

SEQ ID NO: 70673 - protein, 85 aa, Setaria italica
  Transcript Sequence Number=SeqID_4699
NATKMLLSTETSFSCCVRRKRTQFSRPWLMSPPHHQHFTLSGLFMGDVHIRWLLAPSRESLVKATAPAAQHCALRSIVTLHPLAL

SEQ ID NO: 70674 - protein, 127 aa, Setaria italica
  misc_feature (57)..(57): Xaa can be any naturally occurring amino acid
  Transcript Sequence Number=SeqID_4700
MEIINGSVLPRYAAPAAGALTSDARISGHLQLLRRVRLRGRACGLQADCDSMPRRFXGPPSPRRHGRSDWGDWPVRCSYGSSSDGDGAAAANFDASGEEFVDSTVIEAGNRLCVSDGLEIKMRDGKT

SEQ ID NO: 70675 - protein, 239 aa, Setaria italica
  Transcript Sequence Number=SeqID_4701
  Gene Ontology: Mol. function=DNA binding; Biological process =nucleotide-excision repair
  Homolog annotation: Hit_ID=Q09LL3; Match level="QueryCoverage=99%, HitCoverage=71%, E-value=1e-120, Identity=88%"; Hit description=DNA -binding protein DSP1
  Pfam annotation: Domain name=DUF151; Domain location=40-177; Score =11.1; E_value=1.8e-06; Accession=PF02577.6; Description =Uncharacterised ACR, COG1259
GEEFVDSTVIEAVELRSVSDGFETKMRDGKNLRCVQNNPRVLRLRDSAPHHAIVLKMEDGSDLLLPIIVMETPSIMLLAALRNIRIPRPTIYNVLLEMTKRMGYEVRLVRITEMVHDAYYSRLYLSKAGDEEDTISFDLKPSDAINIAFRCKVPIQVNRHIAYNNGLKVVQPKVAESYVGSDDIQITRLDRPDDQPCGEAQEFDLVRNMLIAAVEERYKDAAQYRDQLFMLRSKKKNAI

SEQ ID NO: 70676 - protein, 78 aa, Setaria italica
  Transcript Sequence Number=SeqID_4702
  Subcellular localization annotation: CTP_CleavageSite=38; ConfidenceScore=5.61e-01
MLAASSGQMAGLCFPRRAPSPLLNRRGLLHRRPAATPRCAAASSSPTPSSADSAPEHPLRRKCSPLLESVLLPGRSDL

SEQ ID NO: 70677 - protein, 89 aa, Setaria italica
  Transcript Sequence Number=SeqID_4703
  Gene Ontology: Mol. function=catalytic activity; Cellular component =chloroplast envelope; Biological process=metabolic process
  Homolog annotation: Hit_ID=Q84SP0; Match level="QueryCoverage=93%, HitCoverage=41%, E-value=1e-32, Identity=79%"; Hit description =Putative AMP-binding protein
SRPEHPLLRKCSPLLESVLLPGRSDLTVHEWKAVPDIWRTAAEKYPDLVAVIDPYHEPPTEWTYTQLEQEILDFSQGLRAIGVAPDVVL

SEQ ID NO: 70678 - protein, 75 aa, Setaria italica
  Transcript Sequence Number=SeqID_4704
NKNKRHALKLTEGITKMMALQTLSGVEICAGFSMELLRALQDLTNLKKFIIYKVGCTIGNYELLLSAIEHLSSCS

SEQ ID NO: 70679 - protein, 190 aa, Setaria italica
  misc_feature (18)..(18): Xaa can be any naturally occurring amino acid
  Transcript Sequence Number=SeqID_4705
  Homolog annotation: Hit_ID=B6TZ81; Match level="QueryCoverage=93%, HitCoverage=30%, E-value=2e-14, Identity=35%"; Hit description =Protein binding protein
GLLTVVAQDVELTLRPNXKADEEEVETIEVARGTDYTRIPEGPSSGTITIKFGTLFAGEGRKVLITLNLKDVTKKDEDGNDVEIDEYDATLAEAQHSFTAQGRPKDPQVPQDIQIRRTSTPSQGPGASSKARQVQAEMARRDHAEAIRQARELADDRKLEEAKYKLVDAQNALEDIVLDRLEDGQKLVNL

SEQ ID NO: 70680 - protein, 100 aa, Setaria italica
  Transcript Sequence Number=SeqID_4706
  Subcellular localization annotation: CTP_CleavageSite=32; ConfidenceScore=5.56e-01
YDVMLNYSAIQVLPQHACNFFAVFTSSCVIFASMMRLCFSFTSITFSIWPVSSFDFSHPCYICLEVHQSFSFMGLNCSCSALKEEKIAARSAILPMLQAE

SEQ ID NO: 70681 - protein, 143 aa, Setaria italica
  Transcript Sequence Number=SeqID_4707
  Gene Ontology: Mol. function=NADH dehydrogenase (ubiquinone) activity; Cellular component=mitochondrial respiratory chain complex I; Biological process=oxidation reduction
  Homolog annotation: Hit_ID=B4FQI3; Match level="QueryCoverage=100%, HitCoverage=100%, E-value=5e-75, Identity=96%"; Hit description=NADH- ubiquinone oxidoreductase B16.6 subunit
  Pfam annotation: Domain name=GRIM-19; Domain location=16-141; Score =111.8; E_value=2.3e-30; Accession=PF06212.4; Description=GRIM-19 protein
MTEAWVRNKPGMASVKEMPLVQDGPPPGGFAPVRYARRIPTSGPSATAIFLTAFGAFAYGMYQVGQGNKVRRALKEEKIAARSAILPMLQAEEDERFVKEWKKYLEEEARIMKDVPGWKVGESVYNSGKWMPPATGELRPEVW

SEQ ID NO: 70682 - protein, 104 aa, Setaria italica
  Transcript Sequence Number=SeqID_4708
SRSAAAPRGRLDRASMAATCRTWEAALTREAAAALLRQLPVLFFPKAEGPSFSCLSCGGALHDLALLPYGITGARLIGSRPSSWWFAATGFLNGHVLSNTATWS

SEQ ID NO: 70683 - protein, 85 aa, Setaria italica
  Transcript Sequence Number=SeqID_4709
  Subcellular localization annotation: CTP_CleavageSite=55; ConfidenceScore=5.61e-01
RKMFGKTASPSFLDWKEGVKCPKYPYIFLFSFPFFSSFSFSFSFSFLLPFFSFPLLSPYPSAPPSRPYPPRPPGPPPPLQRPTPS

SEQ ID NO: 70684 - protein, 374 aa, Setaria italica
  misc_feature (58)..(58): Xaa can be any naturally occurring amino acid
  misc_feature (159)..(159): Xaa can be any naturally occurring amino acid
  misc_feature (243)..(243): Xaa can be any naturally occurring amino acid
  misc_feature (320)..(320): Xaa can be any naturally occurring amino acid
  Transcript Sequence Number=SeqID_4710
  Gene Ontology: Mol. function=sequence-specific DNA binding; Cellular component=nucleus; Biological process=regulation of transcription, DNA-dependent
  Homolog annotation: Hit_ID=Q41813; Match level="QueryCoverage=100%, HitCoverage=24%, E-value=1e-149, Identity=72%"; Hit description =Hox2b protein
  Pfam annotation: Domain name=PHD; Domain location=161-216; Score =69.7; E_value=1.1e-17; Accession=PF00628.21; Description=PHD-finger
  Pfam annotation: Domain name=zf-C3HC4; Domain location=162-213; Score= 4.0; E_value=0.036; Accession=PF00097.17; Description=Zinc finger, C3HC4 type (RING finger)
  Pfam module annotation: Pfam domain module=PHD::zf-C3HC4; Domain location=161-216::162-213
  Subcellular localization annotation: CTP_CleavageSite=29; ConfidenceScore=5.27e-01
TAAQPASGKRKGRTPLKTDSPKIGVRVLRSASGKKNEACSEPVNDSTSAQTAVRKEKXRPSKDRSPKKDYVKICQRVRYILNRMNYQQSFIQAYASEGWKGQSLEKIRPEKELERAKAEILQCKLRIREAFRNMDLVLSEGKLEESLFDSAGEISSEDXIFCAICGSKDVTLQNDIILCDGACDRGFHQNCLKPPLLTEDIPPGDEGWLCPACVCKADSIDALNELQGSKLSIHDSWEKVFPXAASLANGSKQVVASDLPPDHIEDSDYNPALAEEDMMNEDRFSAEDDRKGDDLGLPSEDSEDDDFDPAGPDSSEDQKXELNSEESDFTSDSDDFCAEIAKSCGQDEVSASPLLDVLNSTGRMKIQAVGNQSN

SEQ ID NO: 70685 - protein, 47 aa, Setaria italica
  Transcript Sequence Number=SeqID_4711
LATREDVLAPAAALGRGAATTGFKRFLALTEAAKDRKDGPFRKLFNA

SEQ ID NO: 70686 - protein, 470 aa, Setaria italica
  misc_feature (16)..(16): Xaa can be any naturally occurring amino acid
  Transcript Sequence Number=SeqID_4712
  Gene Ontology: Mol. function=electron carrier activity; Cellular component=integral to membrane; Biological process=gibberellin metabolic process
  Homolog annotation: Hit_ID=Q43246; Match level="QueryCoverage=98%, HitCoverage=89%, E-value=0.0, Identity=83%"; Hit description =Cytochrome P450 88A1
  Pfam annotation: Domain name=p450; Domain location=18-460; Score =130.5; E_value=5.5e-36; Accession=PF00067.14; Description=Cytochrome P450
SGRLHGWYREAALGAXLPPGEMGWPVVGAMWAFLRAFKSGKPDAFVASFIRRFGRTGVYRAFMFSSPTILVTTPEACKQVLMDDDGFVTGWPKATVALIGPKSFVAMPYDEHRRLRKLTAAPINGFDALTAYLPFIDRTVTSSLRAWSGECADGGEVEFLTELRRMTFKIIVQIFLGGADDATMHALERSYTDLNYGMRAMAINLPGFAYRRALGARRRLVSVLQGVLDERRAATAKGFTRSSSVDMMDRLIEVEDEHGRRLDDDEIIDILIMYLNAGHESSGHITMWATVFLQENPDIFAKAKAEQEAIMRSIPPTQQGLTLRDFRKMGYLSQVIDETLRFVNISFVSFRQATKDVFVNGYLIPKGWKVQLWYRSVHMDPQVYPDPKKFNPSRWEGHSPRAGTFLPFGLGARLCPGNDLAKLEISVFLHHFLLGYRLTRTNPSCRVRYLPHPRPVDNCLAKITRVSDEY

SEQ ID NO: 70687 - protein, 652 aa, Setaria italica
  Transcript Sequence Number=SeqID_4713
  Gene Ontology: Mol. function=phosphotransferase activity, alcohol group as acceptor; Cellular component=peroxisome; Biological process= protein modification process
  Homolog annotation: Hit_ID=B9RLG3; Match level="QueryCoverage=100%, HitCoverage=100%, E-value=0.0, Identity=61%"; Hit description =Inositol or phosphatidylinositol kinase, putative
  Pfam annotation: Domain name=PI3_PI4_kinase; Domain location=169-432; Score=246.5; E_value=6.4e-71; Accession=PF00454.19; Description =Phosphatidylinositol 3- and 4-kinase
  Pfam annotation: Domain name=ubiquitin; Domain location=45-109; Score= 6.0; E_value=0.074; Accession=PF00240.15; Description=Ubiquitin family
  Pfam module annotation: Pfam domain module=PI3_PI4_kinase::ubiquitin; Domain location=169-432::45-109
MSRDLDCPVQTQMAVAVLDRSFSSEYPGGSRTEGRQLSWKRVFVQTDNGSVLGIELERGENVQAVKKKLQIALNVPTDESSLTFGDLVLNNDLTSIRNDSPLLLKRNQIHRSNSTPCLSPTGKDVWQRDRSGPIEILGCSSPSSRMKQLAKDVIKAIRNGVDPVAVNSGMGGAYYFKNIWGERVAIVKPTDEEPFAPNNPKGFVGKALGQPGLKRSVRVGETGFREVAAYLLDYDHFANVPPTMLVKITHTVFNVNDCVGCKSKIFCNKSEAVSKIASLQQFIPHDFDASDHGTSSFPVSAVHRIGILDIRIFNTDRHAGNLLVRKLGPGVDNFGEQTELIPIDHGLCLPECLEDPYFEWIHWPQASVPFSEEELDYIARLDPVKDAEMLRMELPMIREACIRVLVLSTIFLKEAAAFGLCLSEIGEMMSRQFTGKEEEPSELEILCMEARKWVEEREFFLPDEAGVEDDDDDFTQFPLDGEDDSDAFELPAFSNFGSMKASSRNPLSKLDECDEEDENEDEDNTYTTKEDADALTSALPQKISSVLKLSSSMKRLGFVAKSKAYHTGVPKGKVSKTNYSGKASEHQSGSRSANELLPPSASFVKVSDMGPREWSAFLDMFQELLPNAFRARKHTTGGGPRQMPRLGTSCQF

SEQ ID NO: 70688 - protein, 80 aa, Setaria italica
  Transcript Sequence Number=SeqID_4714
SPDSPIKRKAKQWIGRHQKDRWGDEKERSRERRKGEELRKGEEQFLPPERQLTAASKRGLPRCGACPTVDFDSLSFPGSR

SEQ ID NO: 70689 - protein, 97 aa, Setaria italica
  misc_feature (76)..(76): Xaa can be any naturally occurring amino acid
  Transcript Sequence Number=SeqID_4715
  Gene Ontology: Mol. function=protein dimerization activity; Cellular component=nucleus; Biological process=regulation of transcription, DNA-dependent
MDDGADLPCQLLFSHPEVPDSFDELLNSATTTCTHTHSCNPPGPSAPMHTHTCLHTHTQVLAGGADDDDAREYDPXPKPRKPLGQVAVRKYREKKKA

SEQ ID NO: 70690 - protein, 282 aa, Setaria italica
  misc_feature (210)..(210): Xaa can be any naturally occurring amino acid
  Transcript Sequence Number=SeqID_4716
  Gene Ontology: Mol. function=nucleic acid binding; Cellular component= nucleus; Biological process=regulation of transcription, DNA-dependent
  Homolog annotation: Hit_ID=Q67W65; Match level="QueryCoverage=98%, HitCoverage=15%, E-value=1e-136, Identity=82%"; Hit description =Transcription initiation factor TFIID subunit 1
  Pfam annotation: Domain name=ubiquitin; Domain location=106-175; Score=18.3; E_value=0.0042; Accession=PF00240.15; Description =Ubiquitin family
QTTVENFDSQVKALSGRFNISNDKFYSNRKAPQQAKSHTKKRALMGIKVVHSAPAHKLQTMKPVLSNKEIANFHRPKAKWYPHENKIAAQLQGAACSHGRMTAILMTLGGKGVRILVNSEDTPVSVKLKASKKLELKPSEKIKLFCSGKELQDDISLAMQNVRPNSILHVVRTEVTLWPKAQKLPGEDKPLRPPGAFRKKTDLSVKDGHXFLMEYCEERPLLLSNAGMGARLCTYYQKTSPADQTASSLRNNGDGLGTVLAIDPADKSPFLGDIRSGSQSNT

SEQ ID NO: 70691 - protein, 87 aa, Setaria italica
  Transcript Sequence Number=SeqID_4717
  Gene Ontology: Cellular component=nucleus; Biological process=cell division
  Homolog annotation: Hit_ID=Q5XLI2; Match level="QueryCoverage=100%, HitCoverage=22%, E-value=2e-10, Identity=54%"; Hit description=D -type cyclin
  Subcellular localization annotation: CTP_CleavageSite=61; ConfidenceScore=5.11e-01
KERVSQCLEAIQATVALRLPAKTDGPSGGGGRSSSSVSVPRSPTGVLDAGCLSYRSDDTTVASHASSWCDENDSSPVVCSKRRKISR

SEQ ID NO: 70692 - protein, 123 aa, Setaria italica
  Transcript Sequence Number=SeqID_4718
  Homolog annotation: Hit_ID=B9SHQ0; Match level="QueryCoverage=93%, HitCoverage=21%, E-value=1e-27, Identity=54%"; Hit description =Tubulin-specific chaperone E, putative
  Pfam annotation: Domain name=CAP_GLY; Domain location=10-79; Score =105.9; E_value=1.3e-28; Accession=PF01302.17; Description=CAP-Gly domain
MASGGGGFRLGQRVHASGDPRRVGTVRYLGPIEGHSGDWVGVDWDDGAGGRHDGSVAGRRYFVAAGERSASFARPTALSQGISLPEALRLRYRVEDFTKEEQDEMYVFSTSQKRVSVEFVGQN

SEQ ID NO: 70693 - protein, 406 aa, Setaria italica
  Transcript Sequence Number=SeqID_4719
  Gene Ontology: Mol. function=protein serine/threonine kinase activity; Cellular component=chloroplast; Biological process=protein amino acid phosphorylation
  Homolog annotation: Hit_ID=B6T4T3; Match level="QueryCoverage=100%, HitCoverage=97%, E-value=0.0, Identity=86%"; Hit description=Protein kinase APK1B
  Pfam annotation: Domain name=Pkinase; Domain location=66-348; Score =157.7; E_value=3.4e-44; Accession=PF00069.17; Description=Protein kinase domain
  Pfam annotation: Domain name=Pkinase_Tyr; Domain location=66-348; Score=114.1; E_value=4.5e-31; Accession=PF07714.9; Description =Protein tyrosine kinase
  Pfam module annotation: Pfam domain module=Pkinase::Pkinase_Tyr; Domain location=66-348::66-348
  Subcellular localization annotation: CTP_CleavageSite=32; ConfidenceScore=5.74e-01
DGSPHPGASGMFSKSGGKDGSRLSGCSSRASSASMPPNAKTECEILQSANVKVFSFSNLKSATRNFRPDSVLGEGGFGSVYKGWIDENTLAPCRPGTGIAVAVKRLNQEGLQGHREWLAEVNYLGQFCHPNLVKLIGYCLEDEHRLLVYEFMPRGSLENHLFRRGSYFQPLSWNLRMKVALGAAKGLAYLHSAEAKVIYRDFKTSNILLDTDYSAKLSDFGLAKDGPVGEKSHVSTRVMGTYGYAAPEYLSTGHLTAKSDIYSFGVVLLEMLSGRRAIDKNRPQGEHNLVEWARPYLTHKRKIFRVLDTRLEGQYSLSGAQTIATLALECLSYEAKMRPSMDAVVTILEELQDSCEAEKHQEPKAATKQMSAPVSGSKSSRKPRRRSLGGTKETVGTNPKSLAHSR

SEQ ID NO: 70694 - protein, 52 aa, Setaria italica
  Transcript Sequence Number=SeqID_4720
FRSFICRAHDSVKSCWSSFLGCRVKIQGSTHLLKVKSVYKTTNNLTSRLCYF

SEQ ID NO: 70695 - protein, 59 aa, Setaria italica
  Transcript Sequence Number=SeqID_4721
AFGGSDGATVSNQEDSIIHYYIHNTNPYLLKVNRLPQDRRQWQSPLKNLHRFSSMTAPV

SEQ ID NO: 70696 - protein, 66 aa, Setaria italica
  Transcript Sequence Number=SeqID_4722
HTRLTCSYDAEHNLYSSDNTRLTRSYDAAHLRCSTPKQSFIPQCTTQCRCRITGKFEDSGLNTFSK

SEQ ID NO: 70697 - protein, 624 aa, Setaria italica
  misc_feature (26)..(26): Xaa can be any naturally occurring amino acid
  Transcript Sequence Number=SeqID_4723
  Gene Ontology: Mol. function=nucleic acid binding
  Homolog annotation: Hit_ID=Q7F2F5; Match level="QueryCoverage=58%, HitCoverage=37%, E-value=4e-41, Identity=52%"; Hit description =P0402A09.11 protein
  Pfam annotation: Domain name=RRM_1; Domain location=126-189; Score =52.4; E_value=1.8e-12; Accession=PF00076.14; Description=RNA recognition motif. (a.k.a. RRM, RBD, o
SAFPSLLGAMPSSSTGSSGGVVLPGXGASLGEICRDYVNGRCTKSDTDCKFTHPPQQLLMTLLAATSSVSAFGNTPMAPSAAAMAAAQAIMAAQALQAHAAQAKASGDASGSMDKAAEADALKKIVQISNLSPILSVDYIKQLFGVCGKVVDCTMTDSKHFAYVEYSKPEEATAALQLNNTNVGGRPLNVEMAKSLPPKANNNLPMMMQQAVQLQQMQFQQALLMQQSIATQQAAARAATMKSATEAAAARAAEISRKLKAEGFGGDNVAEKDAKGKSRSPSPTTRRSKSRSRSPIKYRRSRRSRSYSPPIRRSRERRSRSPSRSRHSKYGSDRSHRDDRDRHTRSGRRESDRSRDHHSSSSRRNRSRSKSPRHKKPSRDDSRSPKQQREESISPSKSRSTRAGSRSPRHHKGSKSSPTRDRHSRRSRHSRSRSPERKHRHSDKKDSRRSEIQDDKRRSHRGNRGDKHERSVKDEVERSHRGNRGDKDERSVKDEVEKSHRGNRGDKDGSSVKDEVERSHRGNRGDKDERSVKGEAERSRRVDKDERSVQDPVEDRKVDTSIVAHKRSSTESDLNNSSNHKKSRHDGGLEEDEKNDVCAAVADINGKHEAGVDGSLGATEESAI

SEQ ID NO: 70698 - protein, 127 aa, Setaria italica
  misc_feature (34)..(34): Xaa can be any naturally occurring amino acid
  Transcript Sequence Number=SeqID_4724
  Gene Ontology: Mol. function=ATP-dependent DNA helicase activity
  Homolog annotation: Hit_ID=B9RA07; Match level="QueryCoverage=75%, HitCoverage=8%, E-value=3e-30, Identity=63%"; Hit description=ATP -dependent DNA helicase pcrA, putative
PEGDTSIGKPIMEQNETSPCPELAQSCLANDFLXKISFVIDERLRGKGYKRKDVLRKLKSFLSGDEAFGYAQYVIKWEQIPIEKRSQLTRERQEHFQKQRIENSMGSSEPTAKQISYLRNLGCTITP

SEQ ID NO: 70699 - protein, 71 aa, Setaria italica
  misc_feature (71)..(71): Xaa can be any naturally occurring amino acid
  Transcript Sequence Number=SeqID_4725
VATSVIFLVLQKPWKGRPLPNSQVVPTVVNGGILALYFVLWGKGLLACGPLSRSAGGVCRCCSWSPLCCIX

SEQ ID NO: 70700 - protein, 104 aa, Setaria italica
  Transcript Sequence Number=SeqID_4726
  Subcellular localization annotation: CTP_CleavageSite=8; ConfidenceScore=5.04e-01
QKRKGTPRSQLKSASPREKHNFATQTIGMKEMVVPITAGILSALRRVLARRVSLKNQLKRRLHAITIASATCFLFPFAMWDTILVSTYRLRLIFVVEKICISLL

SEQ ID NO: 70701 - protein, 81 aa, Setaria italica
  Transcript Sequence Number=SeqID_4727
  Subcellular localization annotation: CTP_CleavageSite=46; ConfidenceScore=5.26e-01
PANVPVPVTFHSCCPTASCNPFVDAYPYSSCRYCNCHSTLSPWVSVCSAKLCFSLGDADFSCDRGVPFFFGDTLTFSPSMK

SEQ ID NO: 70702 - protein, 77 aa, Setaria italica
  Transcript Sequence Number=SeqID_4728
  Subcellular localization annotation: CTP_CleavageSite=46; ConfidenceScore=5.09e-01
PANVPVLVTFHSCCPTASCNPLVDAYPYSSCRYCNCHSTLSPWVSVCSAKLCFSLGDADFSCDRGVSFSFLETTLTI

SEQ ID NO: 70703 - protein, 365 aa, Setaria italica
  Transcript Sequence Number=SeqID_4729
  Pfam annotation: Domain name=DUF606; Domain location=44-162; Score= -62.9; E_value=0.089; Accession=PF04657.5; Description=Protein of unknown function, DUF606
  Subcellular localization annotation: CTP_CleavageSite=28; ConfidenceScore=5.54e-01
MMSPKPSASASADGGGGASSSRSTPTARSTPLQVIHILGNFMRIWSVYSLYSYLSNSGDSIVGFIFSCLVPTSVIFLVLQKPWKGRPLPNSQVVPTVVNGGILALYFVLWGKGLLACGPLVALLAEYAGAVLGVLSAALYGRKVNIWKKIGGLAAMLVAYYLLSNGWSTRTHSPLYSFGSEPLEKATQTIGMKEMVVPITAGILSALRRVLARRVSLKNQLKRRLHAITIASATCFLFPFAMWDTILGSASDSIVKLQLPSWAYLSTVVFGMVLIFYVDNVAEEKLHLVFSSPRHLMVSTGCIIVLEILYKMDFSLFGFLVCSVILGFGIFEATSLERSKKSPLEAHELSNGVFHNQLPISALPS

SEQ ID NO: 70704 - protein, 105 aa, Setaria italica
  Transcript Sequence Number=SeqID_4730
  Homolog annotation: Hit_ID=Q5NKH6; Match level="QueryCoverage=100%, HitCoverage=28%, E-value=2e-11, Identity=44%"; Hit description=MYB23 protein (Fragment)
DALGLVKQINEQSAAALEEAHEVLASGSPWKRHSKENSDKENIENVAWKNELATSKSLSKLMAEGRVLDFNECSTPVRKKEDKKMDIGGSASSPVASSYLRMNVR

SEQ ID NO: 70705 - protein, 430 aa, Setaria italica
  misc_feature (397)..(397): Xaa can be any naturally occurring amino acid
  Transcript Sequence Number=SeqID_4731
  Gene Ontology: Mol. function=protein serine/threonine kinase activity; Cellular component=plasma membrane; Biological process =protein amino acid phosphorylation
  Homolog annotation: Hit_ID=B9RK53; Match level="QueryCoverage=90%, HitCoverage=78%, E-value=0.0, Identity=79%"; Hit description =Serine/threonine-protein kinase, putative
  Pfam annotation: Domain name=Pkinase; Domain location=1-308; Score =279.5; E_value=7.4e-81; Accession=PF00069.17; Description=Protein kinase domain
  Pfam annotation: Domain name=Pkinase_C; Domain location=326-375; Score=49.3; E_value=1.5e-11; Accession=PF00433.16; Description =Protein kinase C terminal domain
  Pfam annotation: Domain name=Pkinase_Tyr; Domain location=1-286; Score=-9.9; E_value=4.5e-13; Accession=PF07714.9; Description =Protein tyrosine kinase
  Pfam module annotation: Pfam domain module=Pkinase::Pkinase _C::Pkinase_Tyr; Domain location=1-308::326-375::1-286
FEMLTIIGRGAFGEVRLCREKSSGNIYAMKKVKKSEMLVRGQVEHVRAERNLLAEVGSHCIVKLYYSFQDAEYLYLIMEYLPGGDMMNLLIREDTLNEDVARFYIAETVLAIESIHKHNYIHRDIKPDNLLLDKNGHMKLSDFGLCKPIDCSKLSTLNEDEPMADENLRESMDIDHSFSDTANGRRWRSPNEQLQHWQKNRRKLAFSTVGTPDYIAPEVLLKKGYGVECDWWSLGAIMYEMLVGYPPFYSDDPITTCRKIVHWRSYLKFPDSPSLSLEAKDLICRLLCDVDHRIGSGGADQIKAHPWFQGIEWDNLYEMEAAFKPQVNDELDTQNFMKFEESDPAPARPGSGASRKMMLNSKDLSFVGYTYKNFEAVKGLHQSADLRRSSSFTRHSXGSPSDSADMDSSMEQDGTDTHRRSSSSGDPMVP

SEQ ID NO: 70706 - protein, 101 aa, Setaria italica
  Transcript Sequence Number=SeqID_4732
PARLRRSPWVEPPPGKHRTPHAQPPSDGPRVHRPPELVWTDRDAELRAVDLTTSKGAATASPAPKRGGDSSQAALLGRSEHGAAAPPLSFPPADATSPRRR

SEQ ID NO: 70707 - protein, 93 aa, Setaria italica
  Transcript Sequence Number=SeqID_4733
  Gene Ontology: Mol. function=methyltransferase activity; Cellular component=nematocyst; Biological process=pathogenesis
  Homolog annotation: Hit_ID=B6SU46; Match level="QueryCoverage=88%, HitCoverage=21%, E-value=4e-30, Identity=76%"; Hit description =Benzoate carboxyl methyltransferase
HVKLFETNWDPYDDSECDVVHDSFRSGVNVAKVIRAVMEPLVASHFGETILDTLFKEYAHRVAKHLEKEKTKLAVIVLSMKKLNQSRYPSIVP

SEQ ID NO: 70708 - protein, 112 aa, Setaria italica
  Transcript Sequence Number=SeqID_4734
  Gene Ontology: Mol. function=catalytic activity; Biological process =metabolic process
  Homolog annotation: Hit_ID=Q9C8A3; Match level="QueryCoverage=96%, HitCoverage=3%, E-value=4e-26, Identity=56%"; Hit description=Acetyl- CoA synthetase, putative; 45051-31547
SVLSVSIIDHYGGSIGMVQEKMSRGAGGSNMSKQARNFTQETSTRDYEMEMHSVLETVAAELHSLSWLTVSPVYTERRTALPFHCDMVLRLRRLLHYADRHLTQPAEKGETA

SEQ ID NO: 70709 - protein, 82 aa, Setaria italica
  Transcript Sequence Number=SeqID_4735
  Gene Ontology: Mol. function=serine-type endopeptidase activity; Biological process=proteolysis
  Homolog annotation: Hit_ID=B9RNE4; Match level="QueryCoverage=82%, HitCoverage=7%, E-value=3e-27, Identity=83%"; Hit description =Dipeptidyl-peptidase, putative
SILLPLGFSFCCCRGTSWCDESLALVYESWYKTRKTRTWVLSPDKKDVSPRILFDRSSEDVYSDPGSPMLRRTDMGTYVIAK

SEQ ID NO: 70710 - protein, 98 aa, Setaria italica
  Transcript Sequence Number=SeqID_4736
  Gene Ontology: Mol. function=serine-type endopeptidase activity; Biological process=proteolysis
  Homolog annotation: Hit_ID=B9RNE4; Match level="QueryCoverage=67%, HitCoverage=7%, E-value=8e-27, Identity=83%"; Hit description =Dipeptidyl-peptidase, putative
FSFRFVYYACLHEFLLCYSSFYFTLILIRVETQDGGDAKVEVSPRDIVYMENAEPINGEQPEILHKLDLRYAGTSWCDESLALVYESWYKTRKTRFIH

SEQ ID NO: 70711 - protein, 53 aa, Setaria italica
  Transcript Sequence Number=SeqID_4737
VLHVSSTIILCRNQSNIMPIKPCLVEGNVQQLWHFISVWACCPEMVSRQLKKV

SEQ ID NO: 70712 - protein, 174 aa, Setaria italica
  Transcript Sequence Number=SeqID_4738
  Gene Ontology: Mol. function=serine-type endopeptidase activity; Biological process=proteolysis
  Homolog annotation: Hit_ID=B9RNE4; Match level="QueryCoverage=100%, HitCoverage=18%, E-value=4e-80, Identity=78%"; Hit description =Dipeptidyl-peptidase, putative
QLVLASLDGTVKPIGPPAVYTSIDPSPDDKYLMVSSIYRPYSYIVACGRFPKKVELWTVDGKFIRELCDLPLAEDIPITMSSVRKGKRSINWRADKPSTLYWVETQDGGDAKVEVSPRDIVYMENAEPINGEQPEILHKLDLRYAGTSWCDESLALVYESWYKNSENKNMVLSP

SEQ ID NO: 70713 - protein, 245 aa, Setaria italica
  misc_feature (132)..(132): Xaa can be any naturally occurring amino acid
  Transcript Sequence Number=SeqID_4739
  Gene Ontology: Mol. function=serine-type endopeptidase activity; Biological process=proteolysis
  Homolog annotation: Hit_ID=B9RNE4; Match level="QueryCoverage=100%, HitCoverage=22%, E-value=2e-90, Identity=67%"; Hit description =Dipeptidyl-peptidase, putative
DIVDAPPLPVLSFSPNKDKILFLKRRALPPLSDLAKPEEKLAGLRIDGNSNTRSRMSFYTGIGIHKLLDDGTLGPEKEVYGYPVGARINFVTWSQDGRHISFTVRVDEEDNKSGKLRVWIADVESGEARPLXFKSPEIYLNAIFDSFVWVNNSTLLVCTIPVTRGAPPQKPSVPSGPKIQSNETKNVVQVRTFQDLLKDEHDADLFDYYATSQLVLASLDGTVKPIGPPAVYTSIDPSPDDKYLM

SEQ ID NO: 70714 - protein, 534 aa, Setaria italica
  Transcript Sequence Number=SeqID_4740
  Gene Ontology: Mol. function=serine-type endopeptidase activity; Biological process=proteolysis
  Homolog annotation: Hit_ID=B9RNE4; Match level="QueryCoverage=98%, HitCoverage=58%, E-value=0.0, Identity=78%"; Hit description =Dipeptidyl-peptidase, putative
  Pfam annotation: Domain name=Abhydrolase_3; Domain location=314-470; Score=-82.8; E_value=0.03; Accession=PF07859.5; Description =alphabeta hydrolase fold
  Pfam annotation: Domain name=Peptidase_S15; Domain location=239-462; Score=-86.9; E_value=0.0017; Accession=PF02129.10; Description=X-Pro dipeptidyl-peptidase (S15 family)
  Pfam annotation: Domain name=Peptidase_S9; Domain location=289-492; Score=29.0; E_value=8.1e-09; Accession=PF00326.13; Description =Prolyl oligopeptidase family
  Pfam module annotation: Pfam domain module=Abhydrolase_3::Peptidase _S15::Peptidase_S9; Domain location=314-470::239-462::289-492
TFQLILIRVETQDGGDAKVEVSPRDIVYMENAEPINGEQPEILHKLDLRYAGTSWCDESLALVYESWYKTRKTRTWVLSPDKKDVSPRILFDRSSEDVYSDPGSPMLRRTDMGTYVIAKIKKQDGSTYVLLNGMGATPEGNVPFLDLFDINTGSKERIWESDKEKYYETVVALMSDKTDGELSLDQLKVLTSKESKTENTQYYLQTWPEKKQVKITNFPHPYPQLASLYKEMIRYQRKDGVQLTANLYLPPGYDPSKDGPLPCLVWSYPGEFKSKDAAGQVRGSPNEFPGIGATSPLLWLARGFAILSGPTIPIIGEGDEEANDRYVEQLVASAEAAVEEVVKRGVAHPDKIAVGGHSYGAFMTANLLAHASHLFCCGIARSGAYNRTLTPFGFQNEDRTLWEATSTYVEMSPFMSANKIKKPILLIHGEQDNNSGTLTMQSDRFFNALKGHGALSRLVILPFESHGYSARESIMHVLWETDRWLQNYCVNGASKADSNSVTDSENKTLSASGGSAAREDLNPEGSSYLPRSLL

SEQ ID NO: 70715 - protein, 85 aa, Setaria italica
  Transcript Sequence Number=SeqID_4741
  Subcellular localization annotation: CTP_CleavageSite=44; ConfidenceScore=5.64e-01
PAKISSSHRSDRGGRSDRKSSKLVGASSSHKPQSSRHARSGYASGSMLKHSRARNMPTTLLGSRPTEHVSAIDAVKQAQLQGNTQ

SEQ ID NO: 70716 - protein, 695 aa, Setaria italica
  Transcript Sequence Number=SeqID_4742
  Gene Ontology: Mol. function=protein binding; Cellular component =vacuole
  Homolog annotation: Hit_ID=A6N1S6; Match level="QueryCoverage=35%, HitCoverage=97%, E-value=7e-81, Identity=66%"; Hit description =Protein binding protein (Fragment)
  Pfam annotation: Domain name=LRR_1; Domain location=482-501; Score =6.4; E_value=18; Accession=PF00560.25; Description=Leucine Rich Repeat
  Pfam annotation: Domain name=LRR_1; Domain location=504-524; Score =10.4; E_value=3.1; Accession=PF00560.25; Description=Leucine Rich Repeat
  Pfam annotation: Domain name=LRR_1; Domain location=526-547; Score =13.3; E_value=0.87; Accession=PF00560.25; Description=Leucine Rich Repeat
  Pfam annotation: Domain name=LRR_1; Domain location=549-569; Score =12.9; E_value=1; Accession=PF00560.25; Description=Leucine Rich Repeat
  Pfam annotation: Domain name=LRR_1; Domain location=571-591; Score =10.5; E_value=2.9; Accession=PF00560.25; Description=Leucine Rich Repeat
  Pfam module annotation: Pfam domain module=LRR_1::LRR_1::LRR_1::LRR _1::LRR_1; Domain location=482-501::504-524::526-547::549-569::571-591
MVRFFCFSSSTAQHRSKEGFSPADEAMRAASNNAQEQKVNCMTGSANPNQMADENNHSAVSGHYGTSPSSHQECCRSEDLNRYACSDEEGKEVGHLKKSQSLGNMLQKDHDHNCCEGTEYDFTDHEHKCHHSITVVGEPTKVCSPKNENAFDASSDLISHDFCEPSGDHAVDSDSHHRISYAQSKFPRSQSAIFQNESTSDREGSVDSEILGSRCRSYEGLCSLIDEKVDYLSGGEMHRCKSNLDVYCAPSSPDVYQKLNIEGNGSVGCSDAAEEGQRSAGSTEENFIRDGILVGHEYWDGKYICGEHSVDPVVPFCADSGDVFHHSGHDDGLSEAMDQEREEKLWNRDSAHHQSLVVEVPDSVNISDTKDISGEAEHNKTDIDEDPNELTPRTYNIKRIEDWINQINIDDVTLDELGESSISAPAIPSEPTVGVPVRPDAKSPLGMEIAYTYISKLTPASSSAQLANLGLVVIPRLSAFSGLRLLNLSGNSIVRVTAGALPKGLHMLSLSKNNISTIEGLRELTRLRLLDISYNRISRIGHGLASCSSLKELYLAGNKISEVDGLHRLLKLKVLDLRHNKISTSKGLGQLAANYISLEAINLDGNPAQKNVGDEHLKKYLLGLLPNLAVYNKHPIRATGSKEVSDRHTRKISSSHRSDRGGRSDRKSSKLVGASSSHKPQSSLQRRSGGTLSSY

SEQ ID NO: 70717 - protein, 496 aa, Setaria italica
  Transcript Sequence Number=SeqID_4743
  Gene Ontology: Mol. function=binding; Cellular component=nucleus; Biological process=regulation of transcription, DNA-dependent
  Homolog annotation: Hit_ID=O80784; Match level="QueryCoverage=100%, HitCoverage=21%, E-value=1e-112, Identity=42%"; Hit description =Nodulin-like protein
  Pfam annotation: Domain name=NUC173; Domain location=46-240; Score =297.8; E_value=2.3e-86; Accession=PF08161.4; Description=NUC173 domain
ARFSSVEAFKGLIDNCINETMVSKGIAQIKARHQGLKSDPTVIEKICAILEGLLDVRYSDVWDKSFHIISVAFDKLGEFSADLLPEALKNLADMQNMSDDDFSFRKQLNACIGSAVAAMGPKNVLEILQIRSICAENEWILPILEKHIVGASLQFFLKDILGIVKSIEKSINKLLKDDKLFSAKRAEGYVYSLWSLLPSCCNYPCDTSSNFRVLQSVLCDTLQNQPELRGIVCSSIQVLITQNKEALSVSREEDILTDDELSKSERRAKELYTKDRAEENLKSIRAFSSKLLDVLCSIFLTSSKDAIGLLQPAISEIASISDKDVVGKFFLHSIRKLLDATKAVNEEPVDDSSMQIETDANTNSMTRALLLDFAASLMPGLAAKSINVLFSYVKPAIKDSDSLIQKRAYKVLSMLLKDAEFVEKNLDVLLELMISSMPCQFPSKRYRLECLYHLIVYILKDSSMVRKRDIISSFITEILLALKEANKKTRNRAYNL

SEQ ID NO: 70718 - protein, 107 aa, Setaria italica
  Transcript Sequence Number=SeqID_4744
RRRRQLRPAAVRPFVARRQSPCCPNPSRIGCWLPGSRTRGAESAGGETGRDEAMRETDEGADGMDGADGDLSRLKRRKVPADGAPRPAARVWSWRGAGDSGWLRVGL

SEQ ID NO: 70719 - protein, 109 aa, Setaria italica
  Transcript Sequence Number=SeqID_4745
  Gene Ontology: Mol. function=nucleic acid binding; Cellular component= nucleus; Biological process=negative regulation of transcription
  Homolog annotation: Hit_ID=B9SD95; Match level="QueryCoverage=82%, HitCoverage=4%, E-value=6e-31, Identity=75%"; Hit description=TATA -binding protein-associated factor MOT1, putative
  Pfam annotation: Domain name=HEAT; Domain location=39-75; Score=19.9; E_value=0.011; Accession=PF02985.14; Description=HEAT repeat
  Pfam annotation: Domain name=HEAT; Domain location=6-38; Score=0.7; E_ value=41; Accession=PF02985.14; Description=HEAT repeat
  Pfam module annotation: Pfam domain module=HEAT::HEAT; Domain location=39-75::6-38
MAQNSSRLHRLLTLLDTGSTQATRFAAARQIGEIAKSHPQELNALLKKVSQYTRSKNWDTRVAAAHAIGAIAENVKHTSLKDLCASVEAEKHASGLSDGSDDAGSLPRT

SEQ ID NO: 70720 - protein, 673 aa, Setaria italica
  Transcript Sequence Number=SeqID_4746
  Gene Ontology: Mol. function=RNA binding; Cellular component =chloroplast; Biological process=regulation of translation
  Homolog annotation: Hit_ID=A7XN92; Match level="QueryCoverage=90%, HitCoverage=72%, E-value=0.0, Identity=84%"; Hit description=CRM family member 3
  Pfam annotation: Domain name=CRS1_YhbY; Domain location=207-291; Score=36.1; E_value=1.4e-07; Accession=PF01985.13; Description=CRS1 YhbY domain
  Pfam annotation: Domain name=CRS1_YhbY; Domain location=3-86; Score =94.1; E_value=5e-25; Accession=PF01985.13; Description=CRS1  YhbY domain
  Pfam annotation: Domain name=CRS1_YhbY; Domain location=419-506; Score=132.8; E_value=1.1e-36; Accession=PF01985.13; Description=CRS1 YhbY domain
  Pfam module annotation: Pfam domain module=CRS1_YhbY::CRS1_YhbY::CRS1_ YhbY; Domain location=207-291::3-86::419-506
LTLPAAELRRLRHAAMRVKSRTKVGGAGVTREVVEKIREKWRTEEVVRVKVSGTPALNMRLFHEILERKTGGLVIWRSGTSVSLYRGLDYDEAEPTKGSNKISQSLGMKSSIKGSPSPSLQPTEKVYNAHDSNGALVSNTGKEEIVEQVPEIKYEDEIDKLLEELGPRYSDWPGSDPLPVDADLLPATIPGYKPPFRVLPYGVRPSLSRRDTTNLRRLARGLPPHFALGRSRQLQGLANAMVKLWEKSLIAKIALKRGVQLTTSERMAEDIKKLTGGIMLSRNNDFIVFYRGKDFLSSELAEVLLERERLAKSLQDEEQARLKAASSFSSGSDAYVQPTVAGTLEETLEANYKYGNKLDEDHEDKMARTVAAARHADLVRKLEWKLALAQKKMEKAERVLGKVETALNPTEGTKPPETITDEERFMFRKLGLRMKAFLLLGRRGVFDGTIENMHLHWKYRELVKILVKSKSFSDVKRTALSLEAESGGILVSVDKVSKGYAIVVFRGKNYRRPSTLRPRNLLSKRKALARSIELQRHQALSRHFAKLNRKVEQLRAELVQMEGVKEQGDEELYAKLDSAYSSDEEDMEDEDDEAYLKRFDNEVAGVTAEDGDDPVYDEADYPDSEDEAEDDESFDSENDEDADEAAGTPGGDFRSEAGFGFPAREYRLGGDHN

SEQ ID NO: 70721 - protein, 230 aa, Setaria italica
  Transcript Sequence Number=SeqID_4747
  Gene Ontology: Mol. function=nucleic acid binding; Cellular component= intracellular
  Pfam annotation: Domain name=zf-U1; Domain location=189-224; Score =3.9; E_value=0.048; Accession=PF06220.4; Description=U1 zinc finger
LTDRTKDVRQQAAATTSTTQVAQAATGKEAGKHFGFDPQRYAQAAAARASNGMTEPAAAPSMHHAQWNAHFGHPVPKNVLRKQMKKKPKVVQPPPCEVCKIQCDTLEVLMIHKQGKKHKKNLEKLQDSITPKPLLKPTSNAMGPTMAPSAVANSVVPAVQSKKKKISAATPADLEVKKRRVLEAGAAQGEVKICTVCNVVVNSQKVYEFHIAGQKHQAMVQKQQSLHFVA

SEQ ID NO: 70722 - protein, 187 aa, Setaria italica
  Transcript Sequence Number=SeqID_4748
SPVVCNRCGTQIVHRQVQEHAQLCPGSQSQTHQADGSQAQPSAATTQAITQDPSLAPAGSAAAPAMTLPSAATATAVTASAAATGGATGASTATAPPSLAAASAASSQTPTAEQWYQQQLQCSQYYQQQYPGYNPYMQQYQQYGQYQQVHQQYTQPQMQVASQNMTQGSAQPTSYVQPQVQSSQLHP

SEQ ID NO: 70723 - protein, 139 aa, Setaria italica
  misc_feature (17)..(17): Xaa can be any naturally occurring amino acid
  Transcript Sequence Number=SeqID_4749
  Gene Ontology: Mol. function=protein kinase activity; Cellular component=integral to membrane; Biological process=protein amino acid phosphorylation
  Homolog annotation: Hit_ID=Q6L569; Match level="QueryCoverage=92%, HitCoverage=19%, E-value=3e-46, Identity=76%"; Hit description =Putative receptor protein kinase
EGRGPGADHHYSFDLEXDLLRASAEVLGKGSLGTSYKAVLEEGTTVVVKRLRDVAAARREFGACVEAAAGAAAEHRNLVPLRGYYYSKDEKLLVVDYLPGGSLSARLHGSRGTGRTPMDWEARMRAALCAARGVAHLHT

SEQ ID NO: 70724 - protein, 178 aa, Setaria italica
  Transcript Sequence Number=SeqID_4750
  Gene Ontology: Mol. function=protein kinase activity; Cellular component=integral to membrane; Biological process=protein amino acid phosphorylation
  Homolog annotation: Hit_ID=Q6L569; Match level="QueryCoverage=80%, HitCoverage=21%, E-value=2e-41, Identity=64%"; Hit description =Putative receptor protein kinase
MISLFCCIAVSCVLSQTLTHRGFTGSRGTGRTPMDWEARMRAALCAARGVAHLHTAHSLAHGNIKSSNLLLRPDPDAAALSDYCLHQLFAPSPARPGGSGGGYRAPELVDARRPTFRSDVYSLGVLLLELLTGKSPAHHASLEGGDGAVDLPRWVQSVVREEWTAEVFDAELVRTGRG

SEQ ID NO: 70725 - protein, 357 aa, Setaria italica
  misc_feature (87)..(87): Xaa can be any naturally occurring amino acid
  Transcript Sequence Number=SeqID_4751
  Gene Ontology: Mol. function=protein kinase activity; Cellular component=integral to membrane; Biological process=protein amino acid phosphorylation
  Homolog annotation: Hit_ID=Q6L569; Match level="QueryCoverage=93%, HitCoverage=50%, E-value=1e-128, Identity=72%"; Hit description =Putative receptor protein kinase
  Pfam annotation: Domain name=Pkinase; Domain location=97-355; Score =22.0; E_value=8.4e-10; Accession=PF00069.17; Description=Protein kinase domain
  Pfam annotation: Domain name=Pkinase_Tyr; Domain location=96-325; Score=-2.3; E_value=1.4e-13; Accession=PF07714.9; Description =Protein tyrosine kinase
  Pfam module annotation: Pfam domain module=Pkinase::Pkinase_Tyr; Domain location=97-355::96-325
RGAAALLALVLLALCAVHRHRRGASGEEDVKTTPPTRGLTPSTLSEEMTGGDFTSSSKDIGAAAAAAGGGAERSRLVFVGTGPGAPXYSFDLEDLLRASAEVLGKGSVGTSYKAVLEEGTTVVVKRLKDVAVARREFDAHMEALGRVEHRNVLPVRAYYFSKDEKLLVYDYLPNGSLSAMLHGSRGSGRTPLDWEARMRSALSAARGLAHLHTAHNLVHGNVKASNVLLRPDPDAAALSDFSLHQIFAPSSTRAGGYRAPEVVDSRRLTFKSDVYSLGVLLLELLTGKSPAHASLEGDGTLDLPRWVQSVVREEWTAEVFDVELVRLGASAEEEMVALLQVAMACVATVPDARPDAP

SEQ ID NO: 70726 - protein, 42 aa, Setaria italica
  Transcript Sequence Number=SeqID_4752
  Gene Ontology: Mol. function=catalytic activity; Biological process =metabolic process
  Homolog annotation: Hit_ID=B6U7M4; Match level="QueryCoverage=100%, HitCoverage=5%, E-value=1e-11, Identity=76%"; Hit description =Cycloartenol synthase
MWRLKVAEGGRPWLRSTNNFLGRAVWEFDPEAARPEEHAEVE

SEQ ID NO: 70727 - protein, 140 aa, Setaria italica
  Transcript Sequence Number=SeqID_4753
  Gene Ontology: Mol. function=metal ion binding
  Homolog annotation: Hit_ID=B6SLC6; Match level="QueryCoverage=78%, HitCoverage=59%, E-value=2e-34, Identity=70%"; Hit description=RING -H2 finger protein ATL1N
  Subcellular localization annotation: CTP_CleavageSite=11; ConfidenceScore=5.04e-01
MSAADASAGTPAATAPPGRGRCCTSGATLELVGAFTAVCLVLYGVILYMNYLYVRWSGSDGVHRTDSGAGPPARKRPAAGMDKAALAAMPVLMFKADAHGSGDGSASPMECAVCLSAMQDGDAVRALPGCRPTTLPTTDL

SEQ ID NO: 70728 - protein, 197 aa, Setaria italica
  Transcript Sequence Number=SeqID_4754
  Gene Ontology: Mol. function=sequence-specific DNA binding; Cellular component=nucleus; Biological process=regulation of transcription, DNA-dependent
  Homolog annotation: Hit_ID=B6STZ1; Match level="QueryCoverage=39%, HitCoverage=20%, E-value=6e-41, Identity=100%"; Hit description=GATA transcription factor 9
  Pfam annotation: Domain name=GATA; Domain location=106-141; Score =66.6; E_value=9.3e-17; Accession=PF00320.19; Description=GATA zinc finger
  Subcellular localization annotation: CTP_CleavageSite=39; ConfidenceScore=5.74e-01
AAAANAAGNGGGNSGGQDSCVTAAPGRGARSKRSRATAAAAAAWHSLVPRPPSQSSPSSSCSSSDFPSSNKPGRPNGANGSRGKKSPGPGGAAGAEVGMEGGVRRCTHCASEKTPQWRTGPLGPKTLCNACGVRFKSGRLMPEYRPAASPTFVLTQHSNSHRKVMELRRQKELILIRGSHRDAAAAAAAASAAAGSA

SEQ ID NO: 70729 - protein, 69 aa, Setaria italica
  Transcript Sequence Number=SeqID_4755
SRCFPLAPVKKSWHIVLFSTWWLGASAYCFLEEEAPPIRSFPRTWCSGSVELIYLKKTKKNHLNACCPK

SEQ ID NO: 70730 - protein, 147 aa, Setaria italica
  Transcript Sequence Number=SeqID_4756
  Gene Ontology: Biological process=cell redox homeostasis
  Homolog annotation: Hit_ID=B6TC88; Match level="QueryCoverage=99%, HitCoverage=44%, E-value=2e-72, Identity=89%"; Hit description =Thioredoxin family protein
  Pfam annotation: Domain name=Thioredoxin; Domain location=20-128; Score=-23.2; E_value=0.016; Accession=PF00085.12; Description =Thioredoxin
CTVGTGLVVFDWEGEVDKGWVKEINCLEWESFAFHPSPLVVLVFERYNRAADNWRFLQELEKAAKVYWNAKDRLPPRTVKVDINIERDLAYALQVRECPQLLFLRGNKILYREKEIRTSEEIVQMIAHFYYNAKRPPCVNPEAVASL

SEQ ID NO: 70731 - protein, 122 aa, Setaria italica
  Transcript Sequence Number=SeqID_4757
  Gene Ontology: Mol. function=methyltransferase activity
  Homolog annotation: Hit_ID=Q5VS72; Match level="QueryCoverage=95%, HitCoverage=16%, E-value=5e-35, Identity=67%"; Hit description =Protein arginine N-methyltransferase 7
MASSEPTRAFQLRLNPLTGDSEWLVVDEAEAEAEAPAPSHHKQLLAATSYLDMLNDAARNRAYRHAIEATVTDPTSRVLDIGAGTGLLSMMAARALSAVGGEGRGSVSACEAYLPMGKLTRR

SEQ ID NO: 70732 - protein, 70 aa, Setaria italica
  Transcript Sequence Number=SeqID_4758
  Homolog annotation: Hit_ID=Q0D3B6; Match level="QueryCoverage=45%, HitCoverage=4%, E-value=3e-10, Identity=93%"; Hit description=Two -component response regulator-like PRR37
VHFDVSRENGGSGAPQCGSSNVFDPPLEGQAANYGMHGSNSGSNNGTNGQNRSTAAANAERTNTEIAAAV

SEQ ID NO: 70733 - protein, 88 aa, Setaria italica
  Transcript Sequence Number=SeqID_4759
  Gene Ontology: Mol. function=two-component response regulator activity; Cellular component=nucleus; Biological process=two -component signal transduction system (phosphorelay)
  Homolog annotation: Hit_ID=Q0D3B6; Match level="QueryCoverage=86%, HitCoverage=10%, E-value=6e-14, Identity=58%"; Hit description=Two -component response regulator-like PRR37
  Pfam annotation: Domain name=CCT; Domain location=32-76; Score=86.3; E_value=1.1e-22; Accession=PF06203.6; Description=CCT motif
  Pfam annotation: Domain name=CCT_2; Domain location=29-56; Score =12.6; E_value=0.097; Accession=PF09425.2; Description=Divergent CCT motif
  Pfam module annotation: Pfam domain module=CCT::CCT_2; Domain location=32-76::29-56
GAINKGTPVGGNGSGSVSGNDTYVKRMAPTPREAQLMKYREKKKDRNFGKKVRYQSRKRLADQRPRVRGQFVKQAVQDQGGWEGAGDR

SEQ ID NO: 70734 - protein, 77 aa, Setaria italica
  Transcript Sequence Number=SeqID_4760
WQKTLIVRRVNEKYKVNQSGALTKEQSMIFLQVNLLITEGKRPYATRYILTETDAPHQQLLCSTVSQRLLGAVLLTN

SEQ ID NO: 70735 - protein, 93 aa, Setaria italica
  Transcript Sequence Number=SeqID_4761
  Pfam annotation: Domain name=CCT; Domain location=44-81; Score=11.3; E_value=0.018; Accession=PF06203.6; Description=CCT motif
ANAERTNTEIANGAINKSGPGGGNGSGSVSGNDTYVKRMAPTPREAQLMKYREKKKDRNFGKKVACFQLNASLGKLFRTFSFPTHMNQRNSVS

SEQ ID NO: 70736 - protein, 123 aa, Setaria italica
  Transcript Sequence Number=SeqID_4762
  Homolog annotation: Hit_ID=Q0D3B6; Match level="QueryCoverage=97%, HitCoverage=16%, E-value=7e-38, Identity=73%"; Hit description=Two -component response regulator-like PRR37
MAKNMDAQQAARGADAPNCSSKVPEGKDMNRGNVLPLLELSLKRSRSSADGANTIQDEQRNVLRRSDPSAFTRYHTSAVSNQGGTGFVGSCSPHDNSSEAMKTDSTYNMKSNSDAAMINKAPM

SEQ ID NO: 70737 - protein, 349 aa, Setaria italica
  Transcript Sequence Number=SeqID_4763
  Gene Ontology: Mol. function=two-component response regulator activity; Cellular component=nucleus; Biological process=two -component signal transduction system (phosphorelay)
  Homolog annotation: Hit_ID=Q0D3B6; Match level="QueryCoverage=92%, HitCoverage=42%, E-value=1e-127, Identity=71%"; Hit description=Two -component response regulator-like PRR37
  Pfam annotation: Domain name=Response_reg; Domain location=84-198; Score=82.0; E_value=2.1e-21; Accession=PF00072.16; Description =Response regulator receiver domain
MGGTHQQPGVDGQSVRRDARLLGNSAVDVAEGNGLQQGDSDLRSSDPDGLLSGPTTGLQQGDTENQQQQQVCWERFLQKKTIKVLLVESDDSTRQVVSALLRHCMYEVIPAENGQQAWSYLEDMQNSIDLVLAEVFMPGVSGISLLSRIMSHNICKNIPVIMMSSNDAMGTVFKCLSKGAVDFFVKPIRKNELKNLWQHVWRRCHSSSGSGSESGIQRQKCAKSKSGDESDNSGSNDNDEDDEASMGLNARDGSDNGSGTQARSSWTKRAVEIDSPQAMSPDQLADPPDSTCAQVVHPKSEICSNRWLPGTNNRNCKKQKDTNDDFKEKDLDIGAPRKLNTDSQCFPKL

SEQ ID NO: 70738 - protein, 525 aa, Setaria italica
  misc_feature (93)..(93): Xaa can be any naturally occurring amino acid
  Transcript Sequence Number=SeqID_4764
  Gene Ontology: Mol. function=two-component response regulator activity; Cellular component=nucleus; Biological process=two -component signal transduction system (phosphorelay)
  Homolog annotation: Hit_ID=Q0D3B6; Match level="QueryCoverage=96%, HitCoverage=66%, E-value=1e-159, Identity=60%"; Hit description=Two -component response regulator-like PRR37
  Pfam annotation: Domain name=CCT; Domain location=469-513; Score =86.3; E_value=1.1e-22; Accession=PF06203.6; Description=CCT motif
  Pfam annotation: Domain name=CCT_2; Domain location=466-493; Score =12.6; E_value=0.097; Accession=PF09425.2; Description=Divergent CCT motif
  Pfam module annotation: Pfam domain module=CCT::CCT_2; Domain location=469-513::466-493
IRQRGNGSDNGSGTQDLNDLMGLGVNQRKARSSWTKRAVEIDSPQAMSPDQLADPPDSTCAQVVHPKSEICSNRWLPGTNNRNCKKQKDTNGXDDFKEKDLDIGAPRKLNTDSQCSPNERPMKPADGRREYPPENNSNESMMENLEEATVRAADLIGSMAKNMDAQQAARGADAPNCSSKVPEGKDMNRGNVLPLLELSLKRSRSSADGANTIQDEQRNVLRRSDPSAFTRYHTSAVSNQGGTGFVGSCSPHDNSSEAMKTDSTYNMKSNSDAAMIKQGSNGSSNNNDMGSTTKNVVTKPTTNKERVMSPSAIKANAHTSAFHPVQHWTVPANAAGKAKADEMVNNATKNGHPGEVQSNLVQHPRPILYVHFDVSRENGGSGAPQCGSSNVFDPPLEGQAANYGMHGSNSGSNNGTNGQNRSTAAANAERTNTEIANGAINKSGPGGGNGSGSVSGNDTYVKRMAPTPREAQLMKYREKKKDRNFGKKVRYQSRKRLADQRPRVRGQFVKQAVQDQGGWEGAGDR

SEQ ID NO: 70739 - protein, 263 aa, Setaria italica
  Transcript Sequence Number=SeqID_4765
  Gene Ontology: Mol. function=protein binding; Cellular component =nucleus; Biological process=biological_process
  Homolog annotation: Hit_ID=B9RKJ7; Match level="QueryCoverage=100%, HitCoverage=84%, E-value=1e-107, Identity=72%"; Hit description =Protein phosphatases pp1 regulatory subunit, putative
  Pfam annotation: Domain name=LRR_1; Domain location=112-132; Score =6.0; E_value=22; Accession=PF00560.25; Description=Leucine Rich Repeat
  Pfam annotation: Domain name=LRR_1; Domain location=134-154; Score =6.9; E_value=15; Accession=PF00560.25; Description=Leucine Rich Repeat
  Pfam annotation: Domain name=LRR_1; Domain location=156-176; Score =4.8; E_value=37; Accession=PF00560.25; Description=Leucine Rich Repeat
  Pfam annotation: Domain name=LRR_1; Domain location=17-38; Score =10.1; E_value=3.6; Accession=PF00560.25; Description=Leucine Rich Repeat
  Pfam annotation: Domain name=LRR_1; Domain location=177-197; Score =4.0; E_value=53; Accession=PF00560.25; Description=Leucine Rich Repeat
  Pfam annotation: Domain name=LRR_1; Domain location=199-219; Score =12.0; E_value=1.5; Accession=PF00560.25; Description=Leucine Rich Repeat
  Pfam annotation: Domain name=LRR_1; Domain location=221-241; Score =15.6; E_value=0.21; Accession=PF00560.25; Description=Leucine Rich Repeat
  Pfam annotation: Domain name=LRR_1; Domain location=243-263; Score =4.9; E_value=36; Accession=PF00560.25; Description=Leucine Rich Repeat
  Pfam annotation: Domain name=LRR_1; Domain location=40-62; Score=0.8; E_value=2.2e+02; Accession=PF00560.25; Description=Leucine Rich Repeat
  Pfam annotation: Domain name=LRR_1; Domain location=67-90; Score =11.9; E_value=1.6; Accession=PF00560.25; Description=Leucine Rich Repeat
  Pfam module annotation: Pfam domain module=LRR_1::LRR_1::LRR_1::LRR _1::LRR_1::LRR_1::LRR_1::LRR_1::LRR_1::LRR_1; Domain location=112 -132::134-154::156-176::17-38::177-197::199-219::221-241::243-263::40- 62::67-90
LTSYQLHDLSEVEIPPTLEEVDLTANRLTSVDPRIGRLAGLRKISFRQNLLDDDAVAPLSSWDAIAGLQELVLRDNKLTRIPDASIFKGLLIFDVSFNEISSLTGLSKVSSTLKELYVSKNEVPKMEELEHFHALEILELGSNGLRVMENLGTLTNLQELWLGRNRIRTVNLCGLKLIKKISLQSNRLTSMDGFQECVALEELYLSHNGIQKMEGLSTLQNLRVLDVSSNKLTTIENIETLTRLEDLWLNDNQIPSLDGIEAA

SEQ ID NO: 70740 - protein, 183 aa, Setaria italica
  misc_feature (64)..(64): Xaa can be any naturally occurring amino acid
  Transcript Sequence Number=SeqID_4766
  Gene Ontology: Mol. function=protein binding; Cellular component =cytoplasm; Biological process=biological_process
  Homolog annotation: Hit_ID=B9RKJ7; Match level="QueryCoverage=86%, HitCoverage=42%, E-value=3e-50, Identity=65%"; Hit description =Protein phosphatases pp1 regulatory subunit, putative
  Pfam annotation: Domain name=LRR_1; Domain location=119-143; Score =4.9; E_value=35; Accession=PF00560.25; Description=Leucine Rich Repeat
  Pfam annotation: Domain name=LRR_1; Domain location=146-174; Score =2.9; E_value=86; Accession=PF00560.25; Description=Leucine Rich Repeat
  Pfam annotation: Domain name=LRR_1; Domain location=29-49; Score=5.2; E_value=30; Accession=PF00560.25; Description=Leucine Rich Repeat
  Pfam annotation: Domain name=LRR_1; Domain location=75-95; Score =12.0; E_value=1.5; Accession=PF00560.25; Description=Leucine Rich Repeat
  Pfam annotation: Domain name=LRR_1; Domain location=8-28; Score=4.8; E_value=37; Accession=PF00560.25; Description=Leucine Rich Repeat
  Pfam annotation: Domain name=LRR_1; Domain location=97-117; Score =15.6; E_value=0.21; Accession=PF00560.25; Description=Leucine Rich Repeat
  Pfam module annotation: Pfam domain module=LRR_1::LRR_1::LRR_1::LRR _1::LRR_1::LRR_1; Domain location=119-143::146-174::29-49::75-95::8 -28::97-117
ENLGTLTNLQELWLGRNRIRTVNLCGLKLIKKISLQSNRLTSMDGFQVLYYNISCLPVLIDACXYICFAIQECVALEELYLSHNGIQKMEGLSTLQNLRVLDVSSNKLTTIENIETLTRLEDLWLNDNQIPSLDGIEAALAGSREKLTTIYLERNPCAKTPNYSSTLKKIFPNLEQIDSDIIA

SEQ ID NO: 70741 - protein, 455 aa, Setaria italica
  misc_feature (7)..(7): Xaa can be any naturally occurring amino acid
  Transcript Sequence Number=SeqID_4767
  Gene Ontology: Cellular component=integral to membrane
  Homolog annotation: Hit_ID=Q5QMH5; Match level="QueryCoverage=97%, HitCoverage=79%, E-value=0.0, Identity=83%"; Hit description=Ankyrin- like protein
  Pfam annotation: Domain name=Ank; Domain location=129-159; Score =18.5; E_value=0.028; Accession=PF00023.22; Description=Ankyrin repeat
  Pfam annotation: Domain name=Ank; Domain location=163-196; Score =26.1; E_value=0.00015; Accession=PF00023.22; Description=Ankyrin repeat
  Pfam annotation: Domain name=Ank; Domain location=26-57; Score=7.5; E_ value=3; Accession=PF00023.22; Description=Ankyrin repeat
  Pfam annotation: Domain name=Ank; Domain location=60-85; Score=14.1; E_value=0.33; Accession=PF00023.22; Description=Ankyrin repeat
  Pfam annotation: Domain name=Ank; Domain location=95-127; Score=28.6; E_value=2.5e-05; Accession=PF00023.22; Description=Ankyrin repeat
  Pfam annotation: Domain name=Syntaxin-6_N; Domain location=208-290; Score=-8.0; E_value=0.045; Accession=PF09177.3; Description=Syntaxin 6, N-terminal
  Pfam module annotation: Pfam domain module=Ank::Ank::Ank::Ank::Ank::Sy ntaxin-6_N; Domain location=129-159::163-196::26-57::60-85::95 -127::208-290
RGHLEVXVVELLRHLDAEGLAAKNRSGYDALHVAAREGRRAVVQEMLLHDRMLAKTFGPGNTTPLISAAMRGHIEVVELLLEQDDFGLVEMARDNGKNALHFAARQGHVGIVKALLEKDPQLARRNDKKGQTALHMAVKGTSCDVLRALVDADPAIVMLPDKNGNTALHVATRKKRAEIVSVLLRLPDTHVNALTRDHKTAYDIAEGLPVCEESCEIKDILTQHGALRSRELNQPRDELRKTVTEIKKDVHTQLEQTRKTNKNVHGIAKELRKLHREGINNATNSVTVVAVLFATVAFAAIFTVPGGNADNGLAVVVQATSFKIFFIFNAVALFTSLAVVVVQITVVRGETTSERRVVEVINKLMWIASVCTTISFIASCYIVLGRHFQWAAILVSLIGGVTMAGVLGTMTYYVVKSKRIRKIRKKEKMSRRSGSSSWYDNTELSDTELNPVYAL

SEQ ID NO: 70742 - protein, 83 aa, Setaria italica
  misc_feature (3)..(3): Xaa can be any naturally occurring amino acid
  misc_feature (6)..(6): Xaa can be any naturally occurring amino acid
  Transcript Sequence Number=SeqID_4768
VDXGLXGGLQSSGRQAPGRDDSLHSPPPQLRHRHDDGFKSKELLHGHATLGVEPRPTWCSAEPVALSPGSDGIAQRRSSPVRL

SEQ ID NO: 70743 - protein, 393 aa, Setaria italica
  Transcript Sequence Number=SeqID_4769
  Gene Ontology: Mol. function=DNA binding; Cellular component=nucleus
  Homolog annotation: Hit_ID=B6THC0; Match level="QueryCoverage=93%, HitCoverage=100%, E-value=1e-122, Identity=67%"; Hit description=AT -hook protein 1
  Pfam annotation: Domain name=AT_hook; Domain location=121-133; Score =16.7; E_value=0.035; Accession=PF02178.11; Description=AT hook motif
  Pfam annotation: Domain name=AT_hook; Domain location=179-191; Score =12.6; E_value=0.18; Accession=PF02178.11; Description=AT hook motif
  Pfam annotation: Domain name=DUF296; Domain location=204-324; Score =212.8; E_value=8.9e-61; Accession=PF03479.7; Description=Domain of unknown function (DUF296)
  Pfam module annotation: Pfam domain module=AT_hook::AT_hook::DUF296; Domain location=121-133::179-191::204-324
  Subcellular localization annotation: CTP_CleavageSite=24; ConfidenceScore=5.09e-01
ALVSSRRRLKIAASSSSPRNGCCSAMEVGSEQGLMAGRDLFGMPKSPPAQVPGPPPSAAMQSVRMAHTADGTPVFAPVTSSAAPPSYQPQGAAHGPSMSATAATGGNGAMAPPGMGEPVAKKKRGRPRKYGPDGSMSLALVPASAATRSPATGQGSSGTFSPAGLNPANSVPGVSPDGVKKRGRPKGSTNKPRMDALGSSGVGFTPHVITVQAGEDVSSKIMSFSQHGTRAVCVLSANGAISNVTLRQTATSGGTVTYEGRFEILSLSGSFLLIENGGQRSRTGGLSVSLAGPDGRLLGGGVAGLLIAASPIQIVLGSFNSEGKKEPKQHAPSDPASAPLKITPTTTMGPNSPPSRGTLSESSGGAGSPPPLHQGMAASNSNQPPIISSMPWK

SEQ ID NO: 70744 - protein, 123 aa, Setaria italica
  misc_feature (10)..(10): Xaa can be any naturally occurring amino acid
  misc_feature (114)..(114): Xaa can be any naturally occurring amino acid
  Transcript Sequence Number=SeqID_4770
  Gene Ontology: Mol. function=ubiquitin-protein ligase activity
  Homolog annotation: Hit_ID=B9T256; Match level="QueryCoverage=96%, HitCoverage=5%, E-value=2e-41, Identity=68%"; Hit description =Ubiquitin ligase E3 alpha, putative
  Pfam annotation: Domain name=zf-B_box; Domain location=18-65; Score =10.3; E_value=0.012; Accession=PF00643.16; Description=B-box zinc finger
  Pfam annotation: Domain name=zf-UBR; Domain location=21-90; Score =89.1; E_value=1.6e-23; Accession=PF02207.12; Description=Putative zinc finger in N-recognin (UBR b
  Pfam module annotation: Pfam domain module=zf-B_box::zf-UBR; Domain location=18-65::21-90
FNHEPEAMLXDLDRSSAGDRAVCGSVWGQSDLAYRCRTCENDPTCAICVPCFQNGNHKDHDYSIMYTGGGCCDCGDATAWKREGFCSKHKGAEQIKPLPEELAHSVGPVLDVLXQFWKEWICL

SEQ ID NO: 70745 - protein, 642 aa, Setaria italica
  misc_feature (21)..(21): Xaa can be any naturally occurring amino acid
  misc_feature (178)..(178): Xaa can be any naturally occurring amino acid
  misc_feature (337)..(337): Xaa can be any naturally occurring amino acid
  Transcript Sequence Number=SeqID_4771
  Gene Ontology: Mol. function=ubiquitin-protein ligase activity
  Homolog annotation: Hit_ID=B9T256; Match level="QueryCoverage=99%, HitCoverage=30%, E-value=1e-119, Identity=39%"; Hit description =Ubiquitin ligase E3 alpha, putative
  Pfam annotation: Domain name=zf-UBR; Domain location=6-53; Score= -1.2; E_value=0.0044; Accession=PF02207.12; Description=Putative zinc finger in N-recognin (UBR b
NITTGAICVPFWKHGTQIAHXGHDYSIIYTGGGCCDCGDATAWKREGFCSKHKGAEQIKPLPEELAHSVGPVLDVLLQFWKEWICLVEPPPAKGDGSSSCKRVAEELTMSITNMMLQFCTCSESLLSFLSLRIRECQDLLDALIRSERLLDKKVAKKLHELLLKLISDPAFKYEFAKXFIRYYPVTFGEVIKGCNDSLLEEYPLMPTFSVQIFTVPTLTTRLVHEVNLLGVLLGCLTDLFLSCIGEDGRLQTNKWGNLFDASVRLLDDTRYVLSHEEVSKYVAYERPDLTRSWIKLLSLVQGMDPQKRVTSIHAEDENEHLSAPFVLGHYFGIVQNXLIKGAFSPPDQHESTDVTVCSSAINGMESAENQRHAKVGRVSQESSVSNLSIRDSSLSCGLPSPAAWLILQCLKAIESWLEPDIALRSKLSSLDPSSSDSRNFMASPEDRTSDKGTSSNTNIGVMGVKINEGSQPDGTADYRDVSSSPVHGNCDRMQIDQEEIPSASNRTGKGKMHDSSNTTDIELHPENAITYTLTDGSLLHAHPDSRIEELGILNTRGWPHVIFDVSSQETSFHIPLHRMLSLLLRKAMKKCFGEDARPDEHSVVQSCEFFSQVLRGCEPYGFASIVMEHPLRVRVFCAQVRA

SEQ ID NO: 70746 - protein, 48 aa, Setaria italica
  Transcript Sequence Number=SeqID_4772
KVCTQKFKRSPRTCRITQVLNFGNGSWALCSTSWMGEQQCTGWVWCNQ

SEQ ID NO: 70747 - protein, 292 aa, Setaria italica
  misc_feature (11)..(11): Xaa can be any naturally occurring amino acid
  misc_feature (20)..(20): Xaa can be any naturally occurring amino acid
  misc_feature (231)..(231): Xaa can be any naturally occurring amino acid
  Transcript Sequence Number=SeqID_4773
  Gene Ontology: Mol. function=serine-type endopeptidase activity; Cellular component=cell wall; Biological process=negative regulation of catalytic activity
  Homolog annotation: Hit_ID=Q8LGA0; Match level="QueryCoverage=99%, HitCoverage=36%, E-value=1e-95, Identity=61%"; Hit description =Subtilisin-like serine protease
SFSARGPNPQXPEILKPDLXIAPGLNILAAWPSGVGPAGIPSDTRRTEFNILSGTSMACPHVSGLAALLKAAHPTWSPAAIKSALMTTAYVRDNSNGTMVDESTGAVAGAFDFGAGHVDPMRAMDPGLVYDISPMDYVSFLCNLNYTEQNIRAITRRQADCRGARRAGHAGNLNYPSLSATFVAADAGTGRATTMRTHFIRRATNVGGGPAVYRASVSAPEGCNVTVQPRXQLAFRRDGQRLSFTVRVEAAVAPGERMEPGSSQVRSGALTWSDGRHVVRSPIVVTVQAPLQ

SEQ ID NO: 70748 - protein, 150 aa, Setaria italica
  Transcript Sequence Number=SeqID_4774
  Gene Ontology: Mol. function=nucleoside-triphosphatase activity; Biological process=defense response
  Homolog annotation: Hit_ID=Q2QZR6; Match level="QueryCoverage=95%, HitCoverage=14%, E-value=2e-29, Identity=46%"; Hit description=NB -ARC domain containing protein
KHLFKKYGKVPLAIKVIGGVLRMKDRPYEELKEVSTKCDGWSSADIPDGTKDIAGPIRMAYNDLPSHLKQCLQYCLHLPEDSTISKLNVTRLWISEGFIEEQEDCSPEDTAAEYYEELVLRNLLEPEIESPDMPRCRMHDCVRTILQSLT

SEQ ID NO: 70749 - protein, 170 aa, Setaria italica
  Transcript Sequence Number=SeqID_4775
  Gene Ontology: Cellular component=anchored to membrane
REAPALANGTAACDVEFCYCGVRLRRPVCPAPEGRMARRLERDCALPGIAGCSKCLRALNKLSGKTNATSSAKARQEQREDCQVMGLTWLLQRNATRHREAATAVIQALMAADEAGAGHQATCSLPAGDELPVAVGSSQINGTAAASPSAVGHLLLVLLGASLAFVSQCL

SEQ ID NO: 70750 - protein, 177 aa, Setaria italica
  Transcript Sequence Number=SeqID_4776
  Gene Ontology: Mol. function=zinc ion binding
  Homolog annotation: Hit_ID=B6TQI1; Match level="QueryCoverage=67%, HitCoverage=44%, E-value=5e-40, Identity=64%"; Hit description =Protein binding protein
  Pfam annotation: Domain name=zf-C3HC4; Domain location=64-109; Score =64.8; E_value=3.2e-16; Accession=PF00097.17; Description=Zinc finger, C3HC4 type (RING finger)
MAGHDHVVVDVEGLAKSKDDGVAEPSEGVSASAAAASPSAVVDLVDDEEGGGGEEEPLIQAAECRICQEEDSVKNLEKPCACSGSLKYAHRACVQRWCNEKGDTTCEICHQEYKPGYTAPPRVEPDETTIDIGEDLIMDLRDPRILAVAAAQRRLLEAEYDGYATTDAGGAAFCRSA

SEQ ID NO: 70751 - protein, 291 aa, Setaria italica
  misc_feature (128)..(128): Xaa can be any naturally occurring amino acid
  Transcript Sequence Number=SeqID_4777
  Gene Ontology: Mol. function=zinc ion binding
  Homolog annotation: Hit_ID=B9S8W6; Match level="QueryCoverage=73%, HitCoverage=75%, E-value=3e-60, Identity=55%"; Hit description =Membrane associated ring finger 1,8, putative
  Pfam annotation: Domain name=zf-C3HC4; Domain location=64-109; Score =64.8; E_value=3.2e-16; Accession=PF00097.17; Description=Zinc finger, C3HC4 type (RING finger)
MAGHDHVVVDVEGLAKSKDDGVAEPSEGVSASAAAASPSAVVDLVDDEEGGGGEEEPLIQAAECRICQEEDSVKNLEKPCACSGSLKYAHRACVQRWCNEKGDTTCEICHQEYKPGYTAPPRLHRTTXVEPDETTIDIGEDLIMDLRDPRILAVAAAQRRLLEAEYDGYATTDAGGAAFCRSAALILMALLLLRHTLSISDNEGNDDDASTIFSLFLLRAAGFLLPCYIMAWIFSVLHRRRQRQEEAALAAAEVAFILQSARGRGLQFAIAPDSPATPQQHEHEPAQPQQQ

SEQ ID NO: 70752 - protein, 86 aa, Setaria italica
  Transcript Sequence Number=SeqID_4778
HRSSIIGGQIQQPPFLHHIPAFTMNDTTMLCINLRTLARIMRLATVLLHHQLHHESVRCYGHTNYPLIPSQIKLHTKKTCICWGWK

SEQ ID NO: 70753 - protein, 121 aa, Setaria italica
  Transcript Sequence Number=SeqID_4779
CLSPIILPPVGILKLSSKNLRWHKHHEPWHRSGIIGGQIQQPPFLHHIPAFTMNDTTTLCINLCTLARIMRLATVLLHHQLHHENVRCYGHTNYPYMQNKCRIASHDTKLSLGIPLIPSTE

SEQ ID NO: 70754 - protein, 95 aa, Setaria italica
  Transcript Sequence Number=SeqID_4780
LPCHAPVLYKFSGYLKFHHKYLCCLSIQSSSIKPQTQCLLYNSAVRVVSRETDALFNYFHPQQMQVFFVCSLLADKVCIITPDIAWNIHMGDNAT

SEQ ID NO: 70755 - protein, 104 aa, Setaria italica
  Transcript Sequence Number=SeqID_4781
  Gene Ontology: Mol. function=RNA-directed DNA polymerase activity; Cellular component=chromosome; Biological process=RNA-dependent DNA replication
  Homolog annotation: Hit_ID=Q2QSK7; Match level="QueryCoverage=99%, HitCoverage=10%, E-value=1e-26, Identity=55%"; Hit description =Retrotransposon protein, putative, LINE subclass
MVKVVLTAAPIYLLIAMDLPKWFFKAIDKRRRGFLWKGHEQANGGNCLLAWEKVQRPLEYGGLGIHNLEFLGLALRICWLWATKNNPDRPWAGLLLPVPSRLRL

SEQ ID NO: 70756 - protein, 93 aa, Setaria italica
  Transcript Sequence Number=SeqID_4782
  Subcellular localization annotation: CTP_CleavageSite=54; ConfidenceScore=5.26e-01
DQHETHHSGPHHGAAAGLSGGGPHLPIPRYTPRARAQTLTPTRGPPCGQATALRAARRGGVSGDRAKPRRLGRGPAEEQAGEGKARGERARRG

SEQ ID NO: 70757 - protein, 173 aa, Setaria italica
  misc_feature (74)..(74): Xaa can be any naturally occurring amino acid
  Transcript Sequence Number=SeqID_4783
  Gene Ontology: Mol. function=DNA binding
  Homolog annotation: Hit_ID=B6TCQ8; Match level="QueryCoverage=100%, HitCoverage=58%, E-value=3e-86, Identity=83%"; Hit description=Wound responsive protein
  Pfam annotation: Domain name=DUF151; Domain location=1-106; Score= -42.0; E_value=0.016; Accession=PF02577.6; Description=Uncharacterised ACR, COG1259
QPAIVLRIEDGSETLLPIIVLEMPSVLLMAAIRNVHIVKLVRVNKRIQEAYCAELYLTKIEDPTDSITFDLRPXSDAINIAVRCKVPIQVHRSLAYSDGIRPIEPARKAVAAGLSEGLLFTELDRPDGQPCVEAQEFGLVRNMLIAAVEERYKDAASWKDKLMQLRSKRKNWA

SEQ ID NO: 70758 - protein, 163 aa, Setaria italica
  misc_feature (32)..(32): Xaa can be any naturally occurring amino acid
  Transcript Sequence Number=SeqID_4784
  Gene Ontology: Mol. function=DNA binding
  Homolog annotation: Hit_ID=B6TCQ8; Match level="QueryCoverage=95%, HitCoverage=47%, E-value=4e-78, Identity=87%"; Hit description=Wound responsive protein
MQSMTLFCVGTTTIYQVVKEMIDKMGYEVKTXSGNKRIQEAYCAELYLTKIEDPTDSITFDLRPSDAINIAVRCKVPIQVHRSLAYSDGIRPIEPARKAVAAGLSEGLLFTELDRPDGQPCVEAQEFGLVRNMLIAAVEERYKDAASWKDKLMQLRSKRKNWA

SEQ ID NO: 70759 - protein, 326 aa, Setaria italica
  Transcript Sequence Number=SeqID_4785
  Gene Ontology: Mol. function=DNA binding
  Homolog annotation: Hit_ID=B6TCQ8; Match level="QueryCoverage=100%, HitCoverage=100%, E-value=1e-168, Identity=88%"; Hit description =Wound responsive protein
  Pfam annotation: Domain name=DUF151; Domain location=126-259; Score =15.5; E_value=8.7e-07; Accession=PF02577.6; Description =Uncharacterised ACR, COG1259
  Subcellular localization annotation: CTP_CleavageSite=102; ConfidenceScore=5.38e-01
MAMEGPVLCRPAMQAKLPAAALISNSLVKSGQLGTAFFGAMSKYRNVTRFISPISQPPAKNSSHVCCSFSSSSDGNGYMAGNFSESDEDYVNSTVLEAVEVRSGSEGYVIKMRDGKNLRCVHNNSQGRNIPESAPQPAIVLRIEDGSETLLPIIVLEMPSVLLMAAIRNVHIARPTIYQVVKEMIDKMGYEVKLVRVNKRIQEAYCAELYLTKIEDPTDSITFDLRPSDAINIAVRCKVPIQVHRSLAYSDGIRPIEPARKAVAAGLSEGLLFTELDRPDGQPCVEAQEFGLVRNMLIAAVEERYKDAASWKDKLMQLRSKRKNWA

SEQ ID NO: 70760 - protein, 168 aa, Setaria italica
  misc_feature (150)..(150): Xaa can be any naturally occurring amino acid
  Transcript Sequence Number=SeqID_4786
  Gene Ontology: Mol. function=binding; Cellular component=ubiquitin ligase complex; Biological process=ubiquitin-dependent protein catabolic process
  Homolog annotation: Hit_ID=B9SBC6; Match level="QueryCoverage=93%, HitCoverage=15%, E-value=2e-19, Identity=34%"; Hit description =Spotted leaf protein, putative
  Pfam annotation: Domain name=Arm; Domain location=102-142; Score=6.5; E_value=1.8; Accession=PF00514.15; Description=Armadillobeta-catenin -like repeat
  Pfam annotation: Domain name=Arm; Domain location=30-70; Score=22.9; E_value=0.0013; Accession=PF00514.15; Description=Armadillobeta -catenin-like repeat
  Pfam module annotation: Pfam domain module=Arm::Arm; Domain location =102-142::30-70
ANITASRTPQRSWLLEGIAGVFMRFTVTWDKKLQSLAVGCGVVPCLIKLLSEGSVDAKSKAATSLAQLSESTMTLRKSKSPRWLCVPPSAESYCIVHSCQCTVKSTFCLVKAGAVNPLLRMLEGEEREADVAVLEALATLMQDEIWENGXQVIERASGIHALLRVAEA

SEQ ID NO: 70761 - protein, 229 aa, Setaria italica
  misc_feature (227)..(227): Xaa can be any naturally occurring amino acid
  Transcript Sequence Number=SeqID_4787
  Gene Ontology: Mol. function=protein binding; Cellular component =protein complex; Biological process=anaphase-promoting complex -dependent proteasomal ubiquitin-dependent protein catabolic process
  Homolog annotation: Hit_ID=Q8W3N3; Match level="QueryCoverage=78%, HitCoverage=58%, E-value=5e-72, Identity=75%"; Hit description=26S proteasome regulatory particle non-ATPase subunit5 (Fragment)
MAFYLITIVTVEIAFHFICSPNYVPISLFCLWFTIVFLIGANHYSSLSLPRYYSHNNDYLEICRCYKAIYDIPAIKEDPAKWIPILRKICWYLVLAPHEPMQSSLLNATLEDKNLSEIPNFRLLLKQLVTMEVVQWTSLWEFFKSEYENEGGALGAKAPEDLKLRVIEHVLLSLVNVYLVILLYICLLNLNSCSVQNILVVSKYYARITLKRLADLLCLSLQEAEKXLS

SEQ ID NO: 70762 - protein, 124 aa, Setaria italica
  Transcript Sequence Number=SeqID_4788
ARRGLLRLQLRLRRRGDAGAEPAVPRPHKAVIDRPCCSVRVHVTSRHPRRRRHPQAVSLIWSRVDIILRLMIIRDRRIILYFLLESHMYAEMPGWIRNSGSLLPDVDIEVLYNDGLDHCFCTIN

SEQ ID NO: 70763 - protein, 144 aa, Setaria italica
  Transcript Sequence Number=SeqID_4789
  Gene Ontology: Cellular component=plasma membrane
  Homolog annotation: Hit_ID=Q2RB97; Match level="QueryCoverage=99%, HitCoverage=60%, E-value=1e-64, Identity=80%"; Hit description =Harpin-induced protein 1 containing protein, expressed
  Pfam annotation: Domain name=Hin1; Domain location=1-122; Score=38.3; E_value=3.1e-08; Accession=PF07320.5; Description=Harpin-induced protein 1 (Hin1)
SSPRLTFPAISLQLNITLLLTVAVHNPNPASFAYDSGGHTDLTYRGAHVGDAEIDPGRIPSKGDGEVKLALTVQADRLAEDLAQLVADVESGSVAMEASTRIPGRVTILGLFKRHAVAYSDCSFVFGIAEMRVRSQQCHDRTKL

SEQ ID NO: 70764 - protein, 71 aa, Setaria italica
  Transcript Sequence Number=SeqID_4790
ALALGRCGSADVTRCGAVRVDRCRDASVSGCGAVAVRRGKVSVVEVHKPMAPPMYQQAEPVLAAPVEIMSK

SEQ ID NO: 70765 - protein, 90 aa, Setaria italica
  Transcript Sequence Number=SeqID_4791
  Subcellular localization annotation: CTP_CleavageSite=19; ConfidenceScore=5.09e-01
PLCALPISCCVSQQPPSVAAARAWRMMWTRGWCPCHRAAWTCCVPSGDVFATSVACNSDYSQMHGISVSVQSQIQKQSIVVNLLGSLEVT

SEQ ID NO: 70766 - protein, 473 aa, Setaria italica
  Transcript Sequence Number=SeqID_4792
  Gene Ontology: Mol. function=hydrolase activity, hydrolyzing O -glycosyl compounds; Cellular component=cytoplasm; Biological process= carbohydrate metabolic process
  Homolog annotation: Hit_ID=B6THD2; Match level="QueryCoverage=94%, HitCoverage=94%, E-value=0.0, Identity=79%"; Hit description=Glucan endo-1,3-beta-glucosidase
  Pfam annotation: Domain name=Glyco_hydro_17; Domain location=30-354; Score=272.1; E_value=1.3e-78; Accession=PF00332.10; Description =Glycosyl hydrolases family 17
  Pfam annotation: Domain name=X8; Domain location=388-471; Score =177.1; E_value=5.1e-50; Accession=PF07983.5; Description=X8 domain
  Pfam module annotation: Pfam domain module=Glyco_hydro_17::X8; Domain location=30-354::388-471
MLPLLLHLLLAAAASHGAAAQGGGLPSFPIGVNYGANADNLPSPAAVATFLATKTTINRVKLFDANPAFLDAFAANAPSISIAVSIPNSALPSFADKATGLDAARGWVRDNLAAHVANGANVTLLLAGNEILGPVVVPDLVVALLPAMRRLSQALQLEKLPQVRVTTPHYLGILAPSDGIPSNARFRPGFDNKVLAPMLKFHNDTGSPLMVNAYPYFSYNAQNLNYAIFRPNAGIYDPATKLNYTSMFDAQMDAIYTAMKKLGYGDVQIAVGEAGWPTQAEAGQVGVGPEEARDFNAGMIRVCSGGKGTPAMPGRTFETYIFSLFDENQKPGPIAERNFGIFNTDFTPKYDIGLLREGSSASPNPSPNPSPKPSPNPSPNPSPSGGGKWCVAKTGADVTTLQNNINYACGYVDCKPIQSGGGCFDPNNVQSHASFVMNAYYQANGRHDYDCDFKGTGMVTSSDPSYGSCKYVS

SEQ ID NO: 70767 - protein, 149 aa, Setaria italica
  Transcript Sequence Number=SeqID_4793
  Gene Ontology: Mol. function=metal ion binding; Biological process =response to stress
  Homolog annotation: Hit_ID=A8QZ67; Match level="QueryCoverage=100%, HitCoverage=100%, E-value=2e-48, Identity=67%"; Hit description=Zinc finger A20 and AN1 domains-containing protein
  Pfam annotation: Domain name=zf-A20; Domain location=13-37; Score =36.7; E_value=9.4e-08; Accession=PF01754.8; Description=A20-like zinc finger
  Pfam annotation: Domain name=zf-AN1; Domain location=89-129; Score =68.5; E_value=2.5e-17; Accession=PF01428.8; Description=AN1-like Zinc finger
  Pfam module annotation: Pfam domain module=zf-A20::zf-AN1; Domain location=13-37::89-129
MAEEQQQRWQEGHRLCANNCGFFGSPATMDLCSKCYRDLNQQQPAAAPAPPAFLPSSSTAAASVAGVAAVAEPKAPAAVPAGGRQAGRCASCRKRVGLTGFACRCGATFCGVHRYPERHACAFDFRAAGRDAIARANPVVKGDKLKDKV

SEQ ID NO: 70768 - protein, 116 aa, Setaria italica
  Transcript Sequence Number=SeqID_4794
  Gene Ontology: Mol. function=metal ion binding
  Homolog annotation: Hit_ID=B9RY52; Match level="QueryCoverage=65%, HitCoverage=11%, E-value=1e-18, Identity=57%"; Hit description=DNA binding protein, putative
SPAAAAAPPHLLIWRVSLSVGEEGEEETGGRVELNVVEEDVLRSRSVYCDQCRVVGWSGHPVCGKRYHFIIENDCNQLSGHRRTCCLRCGTPMVAGESRWEAHFRKYTSLHNRKWK

SEQ ID NO: 70769 - protein, 140 aa, Setaria italica
  misc_feature (47)..(47): Xaa can be any naturally occurring amino acid
  Transcript Sequence Number=SeqID_4795
  Gene Ontology: Mol. function=metal ion binding
  Homolog annotation: Hit_ID=B9RY52; Match level="QueryCoverage=99%, HitCoverage=23%, E-value=1e-48, Identity=61%"; Hit description=DNA binding protein, putative
MRCLVAGWSGHPVCGKRYHFIIENDCNQLSGHRRTCCLRCGTPMVAXHLDDSSHLLHAVVHANGYGHLLRVNGREGGSRFLTGRDIMSLWDRLCKVLHVRKVTVMDISKKHGMDYRLLHAVTSGHPWYGEWGYKFGAGSF

SEQ ID NO: 70770 - protein, 711 aa, Setaria italica
  misc_feature (423)..(423): Xaa can be any naturally occurring amino acid
  misc_feature (674)..(674): Xaa can be any naturally occurring amino acid
  Transcript Sequence Number=SeqID_4796
  Gene Ontology: Mol. function=metal ion binding
  Homolog annotation: Hit_ID=B9RY52; Match level="QueryCoverage=93%, HitCoverage=98%, E-value=1e-172, Identity=47%"; Hit description=DNA binding protein, putative
  Pfam annotation: Domain name=PHD; Domain location=618-666; Score =43.0; E_value=1.1e-09; Accession=PF00628.21; Description=PHD-finger
MVVNGRPLKRARTRVEARDFAGFPAAGDGGAAGTFREAVRGFLAKHARLLPLPSIFSPAAAAAPPHLLIWRVSLSVGEEGEEETGGRVELNVVEEDVLRSRSVYCDQCRVVGWSGHPVCGKRYHFIIENDCNQLSGHRRTCCLRCGTPMVAGESRCALCNFDMDGEEIEECAYLHLDDSSHLLHAVVHANGYGHLLRVNGREGGSRFLTGRDIMSLWDRLCKVLHVRKVTVMDISKKHGMDYRLLHAVTSGHPWYGEWGYKFGAGSFALTSETYQNAVDMLSSIQLALYFSNRSPIRTPLQNTIALYWALCDRQLVTLRDLFRFIMHLLHQAQKMSKPSTYKRKELASDVLCAWTKDDFDRAEAAMLKVLRVVQTGQWVAWRALRGAASKAVDSQELLDYSLRELGGKQLDDGHFVAVRCNAXYSMTSRLESSSIRSPVNAATFEPSVEHLLHDLRFLYDALLNPESMLSSQPEVVGSSAHSAAAKILDCKQFIKHYDKHALRTPSNPFLLSVRCSIELLDHPKDYTAPPEELVLLPASATLAELKVQASRAFQETYLMFQSFQAEQLPDFPNFSDTTPVKHVLGSGQLVRLRGRCTGDYRRIVQFRMERGLENWTVDCSCGAKDDDGERMLACDVCGVWQHTRCSGISDFEEVPENFICRKCASPRKGKAMGXGSNGGGRVEVSAAGRCKDEIGSSVGGAGKFGRMATVG

SEQ ID NO: 70771 - protein, 108 aa, Setaria italica
  Transcript Sequence Number=SeqID_4797
SIQATTVHPMLFLRPSAREAQSVDCCLREEAVRQRPLLLDGGRGSRCSRRGDHCLANRLGLLATGAQGQKPAASGGTRGRRQGRAVAHRRQLGTGVVRSCRRGKSGLR

SEQ ID NO: 70772 - protein, 132 aa, Setaria italica
  Transcript Sequence Number=SeqID_4798
  Gene Ontology: Mol. function=metal ion binding
  Homolog annotation: Hit_ID=Q53PX0; Match level="QueryCoverage=71%, HitCoverage=5%, E-value=2e-10, Identity=51%"; Hit description=PHD -finger family protein, expressed
EVDEGGTAGQGHSAVPATKEVDLGCIQGEVQDVAPVVSEAKMDVDEGGAASKENSGSSTLSEVNVGSIPEAVQDLAPVASEMKMEVDEGCVQEQECTAAAAEGEVKMEEGDGRVVNQGPATPADGLQVKEEV

SEQ ID NO: 70773 - protein, 106 aa, Setaria italica
  Transcript Sequence Number=SeqID_4799
  Homolog annotation: Hit_ID=B6SWQ7; Match level="QueryCoverage=72%, HitCoverage=14%, E-value=1e-25, Identity=76%"; Hit description=Smr domain containing protein
EKAREAIYRQRNPVSQRGNMDVLGIFNGRGSSTVSGGPGDFVSAVRKLASQNSSHWKFKKGPEYGNGVSSHSVPKQYSSSTKQSSGNGVSSHSVPKQYSSSTKQSS

SEQ ID NO: 70774 - protein, 64 aa, Setaria italica
  Transcript Sequence Number=SeqID_4800
  Subcellular localization annotation: CTP_CleavageSite=35; ConfidenceScore=5.13e-01
FFNCRLTHRPHASMSIVTCHIFTFAFSFAHAISTCCLSVSRVGWLKTIILFVTWIFHVFVKVFT

SEQ ID NO: 70775 - protein, 38 aa, Setaria italica
  Transcript Sequence Number=SeqID_4801
  Homolog annotation: Hit_ID=B6SWQ7; Match level="QueryCoverage=97%, HitCoverage=7%, E-value=3e-10, Identity=86%"; Hit description=Smr domain containing protein
  Pfam annotation: Domain name=PAM2; Domain location=20-37; Score=25.2; E_value=0.00027; Accession=PF07145.7; Description=Ataxin-2 C-terminal region
MSSLNKVVSNSGDTCSLLPSKATSLNPNAAEFVPSFIN

SEQ ID NO: 70776 - protein, 542 aa, Setaria italica
  misc_feature (394)..(394): Xaa can be any naturally occurring amino acid
  misc_feature (443)..(443): Xaa can be any naturally occurring amino acid
  misc_feature (490)..(490): Xaa can be any naturally occurring amino acid
  Transcript Sequence Number=SeqID_4802
  Homolog annotation: Hit_ID=B6SWQ7; Match level="QueryCoverage=99%, HitCoverage=89%, E-value=1e-175, Identity=78%"; Hit description=Smr domain containing protein
  Pfam annotation: Domain name=DUF1771; Domain location=319-384; Score =58.5; E_value=2.5e-14; Accession=PF08590.2; Description=Domain of unknown function (DUF1771)
  Pfam annotation: Domain name=Smr; Domain location=461-542; Score =57.7; E_value=4.4e-14; Accession=PF01713.13; Description=Smr domain
  Pfam module annotation: Pfam domain module=DUF1771::Smr; Domain location=319-384::461-542
WKTILDRSESSKSNNSDDEAHQFWRKQLPDDIIPDFSSFEKVEQGPEELSLAGLSLNAPPFYGTTSSRFSREHQELSSPATKGLELEHTNLLYEDNYLGSSNWEQNYIGDLRIANENQDLHYGSESAAGFSDSFASEYAAASDGVVDPLEYLASQFPGFSAESLAELYYANGCDFNHTIDILTQLEMQVDPTPNHAMNLTPRAPNFSTGDFPALPTAEDQNGFSKGNMDVLGIFNGRGSSTVSGGPGVFLFQLFANLHQQNSSHWKFKKGPEYGNGVSSHSVPKQYSSSTKQSSGNKFQSVSGARVAPWLETGDAVANMYSESRGEARDYARVRNACFEQARQAYLVGNKALAKELSMKGQAYNAQMKAAHEKAREAIYRQRSPILGLSLDLDXIPSYAVMLSHLIEFQSLIVWNHDIFFLFESVFHSVRNHDMLRPNSVVSXLVKLCRNPVSQRGGDGLIDLHGLHVSEAIHTLKVELAAMKSAARAAXGERMQVMVCVGTGHHTKGSRTARLPIAVEQFLLDEGFHYSQPQPGLLRVMVY

SEQ ID NO: 70777 - protein, 57 aa, Setaria italica
  Transcript Sequence Number=SeqID_4803
LGWLMPPVERTDIRAQTRGSQSVGTGYLPKKLVSVSFLASQGLVLHLTIKNAQLGVS

SEQ ID NO: 70778 - protein, 143 aa, Setaria italica
  misc_feature (87)..(87): Xaa can be any naturally occurring amino acid
  Transcript Sequence Number=SeqID_4804
  Gene Ontology: Mol. function=calcium ion binding; Cellular component =integral to membrane; Biological process=defense response
  Homolog annotation: Hit_ID=B6SL16; Match level="QueryCoverage=95%, HitCoverage=28%, E-value=1e-64, Identity=90%"; Hit description =Calcium binding atopy-related autoantigen 1
  Pfam annotation: Domain name=efhand; Domain location=96-124; Score =28.9; E_value=2.1e-05; Accession=PF00036.24; Description=EF hand
AVSEPRGEREEDRRFLFGDSYRRRVFFNYEKRIRTRSPPEKIFEYFASVHSPEGEMYMLPTDLMRAVVPVFPPSESKIVREGRLRGXRHPGELHCALSEFFMLFDTNGDGVISFSEYIFFVTLLSIPESSFNVAFKMFDLDHH

SEQ ID NO: 70779 - protein, 306 aa, Setaria italica
  misc_feature (19)..(19): Xaa can be any naturally occurring amino acid
  misc_feature (31)..(31): Xaa can be any naturally occurring amino acid
  Transcript Sequence Number=SeqID_4805
  Gene Ontology: Mol. function=molecular_function; Cellular component =cellular_component; Biological process=biological_process
  Homolog annotation: Hit_ID=Q01GI1; Match level="QueryCoverage=82%, HitCoverage=78%, E-value=2e-63, Identity=46%"; Hit description =Cytoplasmic protein of eukaryotic ori (ISS)
  Pfam annotation: Domain name=DUF2419; Domain location=44-306; Score =516.5; E_value=3.4e-152; Accession=PF10343.1; Description=Protein of unknown function (DUF2419)
MEAVRASAAWVASCSSHVXDLQEIEKVVDKXIQGNVPKVEWDFEGIHYFDNGPLTVQYLFVLDALNFCFWPDKDLSYDHLASGLKLALEKDKTALDADRLKNYNGPQLRQLLNWPRPLPIEEERVRLLHEVGLELERNFGGQAANLVKSAGNSAATLIELITRHFPGFRDHSLYKGHQVFLYKRAQIFVADLWGAFKGQNYGEFHDINSITIFADYIVPAVLRELGILKYGSNLSCSIDSNHEIVPGSEEEVEIRACSIYAVEKMRDLIGKKFGKQLLSIDIDLWLWSCGVQNMALSHHRTLSIYY

SEQ ID NO: 70780 - protein, 83 aa, Setaria italica
  Transcript Sequence Number=SeqID_4806
  Subcellular localization annotation: CTP_CleavageSite=61; ConfidenceScore=5.10e-01
FRKVLMPCQQRGDQWAPRMNEWMGGSPPPTTESDGGGSALRSGGRRSGGSSRRFRARRRCRCVGKSLWRLASKPSRYGTGKSP

SEQ ID NO: 70781 - protein, 483 aa, Setaria italica
  Transcript Sequence Number=SeqID_4807
  Gene Ontology: Mol. function=kinase activity; Cellular component =integral to membrane
  Homolog annotation: Hit_ID=O80656; Match level="QueryCoverage=94%, HitCoverage=95%, E-value=1e-162, Identity=59%"; Hit description =T14N5.8 protein
  Pfam annotation: Domain name=DUF300; Domain location=39-335; Score =432.1; E_value=8.4e-127; Accession=PF03619.8; Description=Domain of unknown function
  Subcellular localization annotation: CTP_CleavageSite=45; ConfidenceScore=5.58e-01
MALKNSDPFILVLTHVSSCLARSGNMFSPGFVSASKSLPGWPILSAGTSVTVALVLSLFLTFEHLCAYHQPEEQKFMIGLILMVPVYAVQSFFSLLNSNVAFICELMRDCYEAFAMYCFERYLIACLGGEESTIRFMEGRLQISESSPLLDDDYDYDYGIVKHPFPLNCFMRNWYLGPDFYHAVKIGIVQYMILKPICAVLAIFMELLGIYGEGKFAWKYGYPYLAVVLNFSQTWALYCLIQFYTATKEKLEPIKPLSKFLTFKSIVFLTWWQGVAVAFLFSTGLFKGHLAQRLQTRIQDYIICLEMGVAAVVHLKVFPAKPYRRGERSVCNVAVMSDYASLGAPDPEEVGGGIDSLTVLQTPPGTKDRRLSFPQSVRDVVLGSGEIMVDDVKYTVSHVVEPMERRFTKINKTIHQISENVKQLEKQKRKAKDDSHIPLEPWSEEFSEAHDHVVGGSVSDSGLAKTRYNRPRRSFESRLRRWF

SEQ ID NO: 70782 - protein, 224 aa, Setaria italica
  Transcript Sequence Number=SeqID_4808
  Gene Ontology: Mol. function=nucleotide binding; Biological process =defense response
  Homolog annotation: Hit_ID=Q69U98; Match level="QueryCoverage=96%, HitCoverage=15%, E-value=2e-26, Identity=33%"; Hit description =Putative Pi-b protein
VTNEENVANHCATDRNLVRNVKGLEVRYAVELFNRVVTKNKEYDWSHDREEIKHRNEQTRDILVQKCGGLPKVICAVAESWRMVRDIEVKDNLVSKLEANAPVTTQSLEGTFSWLLSYFRSCPDYLKPCIFYLTIFPVNHTIRRTRLVRRWIAEGYSRDNKENTAEENGESSFSKIVNLSMIQAPRTSVDYMRMSRCQVNGFLREYIVSRLMEENLVFELEGHC

SEQ ID NO: 70783 - protein, 148 aa, Setaria italica
  misc_feature (20)..(20): Xaa can be any naturally occurring amino acid
  misc_feature (95)..(95): Xaa can be any naturally occurring amino acid
  Transcript Sequence Number=SeqID_4809
  Gene Ontology: Mol. function=methyltransferase activity; Cellular component=nucleus; Biological process=progression of morphogenetic furrow during compound eye morphogenesis
  Homolog annotation: Hit_ID=B9S1P2; Match level="QueryCoverage=93%, HitCoverage=10%, E-value=1e-45, Identity=66%"; Hit description=Mixed- lineage leukemia protein, mll, putative
  Pfam annotation: Domain name=SET; Domain location=1-136; Score=69.7; E_value=1e-17; Accession=PF00856.20; Description=SET domain
TSVFIPRGSMVVEYVGEIVXQRVAAKREIEYQSGKRLQYKSACYFFKIDREHIIDATRKGGIARFVNHSCQGPNQLIFSNEPFYIHSILSICVGXPNCVAKIISVRNEKKVMFFAERHINPGEEITYDYHFNREDEGQRIPCSFLSVF

SEQ ID NO: 70784 - protein, 976 aa, Setaria italica
  misc_feature (379)..(379): Xaa can be any naturally occurring amino acid
  Transcript Sequence Number=SeqID_4810
  Gene Ontology: Mol. function=methyltransferase activity; Cellular component=nucleus; Biological process=intracellular signaling cascade
  Homolog annotation: Hit_ID=B9S1P2; Match level="QueryCoverage=47%, HitCoverage=45%, E-value=1e-147, Identity=53%"; Hit description =Mixed-lineage leukemia protein, mll, putative
  Pfam annotation: Domain name=PHD; Domain location=510-558; Score =11.5; E_value=0.0015; Accession=PF00628.21; Description=PHD-finger
  Pfam annotation: Domain name=SET; Domain location=825-958; Score =163.2; E_value=7.8e-46; Accession=PF00856.20; Description=SET domain
  Pfam module annotation: Pfam domain module=PHD::SET; Domain location =510-558::825-958
EKLTCQCLSNRIAGRSLSQASRCKDVSDKVMNQPSIAITERLKNISEASVADDSSSKAVTERKGPSKDSVVSKGQPKFGFSSGSSSIVVTKFQMSPEVHKVSSTAKHRKHKNVCDEGSRIEKCSASSYVPASSTGCEEALNSFTRSQLAPSRVKRKGNQISVGSRLEEKDNEELCFGLPKRMRTLRCSSKNSESEDCTRTSSQSSQKGGCQPQNEVNSFSCRVLRTKRKHPTMQLNKPVKQLHSQNKVFKGDGKLPDTKGNFFGGLDSFDRKKQVEDTTPGRTKHHQEGSRAFVRKLPKYVSLNCIVNEPNSEDACSGSAGIDSSLIATGMANDNRKSPKIVPLSLVLKKAKRCHSVKLCKTESTHLYEKKGLRLFCEXSSDCSVDKCPIDDEGCSPQAEYEMQGSKRSRYSSNGLRSHFMAHCKRPSGVLGEDDPLGLKDMETNRLSITSSRSNGTKNRRASVSLTRIKRHKKFANKSACYSSSGKENAVLTHEENVRRDSGRLSLDAPCCVCGISDPEPCNQFIECCKCYIKVHQACYGVLKVPRGQWFCRPCKTNTLNTACVLCGYGGGAMTRALKTKNILKSLLKSLMTTARSEKNVDSLRNGRSECTSLRNPVDSARGDSIANGENITSNSWTSINHNSSLLGPRTMQWVHMVCGLWTPGTKCPNATTMSAFDVSGASPAKRNTACSICGRTGGSFIKCRDVNCLVLFHPWCAHQRGLLQSEPEGERNENVGFYGRCIDHANDFSSRINPKECLRSSSWTCARTEGFKGRKGEGFHGSSHKKSEEYSGEFSVSQEQINAWLRINGSKPSGRGQKEYIHYKQLKGWKHLVVYKSGIHGLGLYTSVFIPRGSMVVEYVGEIVGQRVADKREIEYQSGKRLQYKSACYFFKIDREHIIDATRKGGIARFVNHSCQPNCVAKIISVRNEKKVMFFAERHINPGEEITYDYHFNREDEGQRIPCFCRSRYCRRYLN

SEQ ID NO: 70785 - protein, 114 aa, Setaria italica
  misc_feature (48)..(48): Xaa can be any naturally occurring amino acid
  Transcript Sequence Number=SeqID_4811
  Gene Ontology: Mol. function=DNA-directed RNA polymerase activity; Cellular component=mitochondrion; Biological process=transcription
  Homolog annotation: Hit_ID=O82725; Match level="QueryCoverage=100%, HitCoverage=11%, E-value=5e-57, Identity=89%"; Hit description=DNA -directed RNA polymerase
EGDAIAVQRQKAAFPTEFCALLDSSHMMMTAIACKEAGLDFAGVHDSXFWLHACDVDQMNQILREQFVELYSMPILENLLEEFQTSFPTLEFPPCPPQGNFDVREVLNSTYFFN

SEQ ID NO: 70786 - protein, 170 aa, Setaria italica
  Transcript Sequence Number=SeqID_4812
  Gene Ontology: Cellular component=exocyst; Biological process =exocytosis
  Homolog annotation: Hit_ID=B6SVR8; Match level="QueryCoverage=100%, HitCoverage=25%, E-value=3e-86, Identity=91%"; Hit description =Protein binding protein
DELRAIADRMARAGYSRELADAYCGVRRDVLDEYLSVLGVERLSIDEVQRIEWKLLNDKMKKWVHGVKTVVRVLLAGERRLCDQVLTASDDLMEECFLESTKGCIMQILSFGDAVAVCPRSPEKVPRILDMYEALSEVIPEMRDLCIGSSGDGVISDVQAILDRLGDAVR

SEQ ID NO: 70787 - protein, 272 aa, Setaria italica
  Transcript Sequence Number=SeqID_4813
  Homolog annotation: Hit_ID=Q6ZCP9; Match level="QueryCoverage=93%, HitCoverage=38%, E-value=3e-43, Identity=46%"; Hit description =Pentatricopeptide (PPR) repeat-containing protein-like
SGATAAEQHVTTARAMMCTVLDRFIKHVSPIKMRADVTIAEEVHLLELSYFPSFPPGAVFDENTGGGGGKNPTAHQDDQAQDRSLYDVEEQLLDAAPELAGVQPPQGDENTVKKACSQVSSHLNMGSLLVSWPMRSVSKLYGKMTRRLPALPGVVSVVRKLVASVDVEGILSGMNTEGVAGSAPLAKEIKIPSVEQLAKCGVRFLPTTEGIHGIAFNAAAATLWLPVITLDATTEVVLRNLVAYEAVAVRGPLVLARYTEMMNGIIDTTRDV

SEQ ID NO: 70788 - protein, 93 aa, Setaria italica
  Transcript Sequence Number=SeqID_4814
  Homolog annotation: Hit_ID=B6SW35; Match level="QueryCoverage=67%, HitCoverage=10%, E-value=6e-25, Identity=88%"; Hit description =Ternary complex factor MIP1
CGFLLPPRCLAHAQHQQDAGELKDQNSTSKMPSCPNELPCSLKREVQVLEKRLNDQFVMRRALEKALGYKPCAILSSNESCIPKPTEELIKEI

SEQ ID NO: 70789 - protein, 77 aa, Setaria italica
  Transcript Sequence Number=SeqID_4815
MGVLEEMDAMSAKGQPQCPVTGDGSTCLAAQIKASPCQQGDDSDYAEIRGSQVQLPEDILRHIHTFMQMQDVAQAAC

SEQ ID NO: 70790 - protein, 77 aa, Setaria italica
  Transcript Sequence Number=SeqID_4816
  Gene Ontology: Cellular component=cell wall
  Homolog annotation: Hit_ID=Q43557; Match level="QueryCoverage=96%, HitCoverage=19%, E-value=6e-25, Identity=67%"; Hit description =Unidentified
DPACGPLIDGVAIRALYPPTLVRGNMLKNGGFEEGPYFLPNASWGVLVPPNIEDDHSPLPAWMIVSSTYLTALDDTI

SEQ ID NO: 70791 - protein, 70 aa, Setaria italica
  Transcript Sequence Number=SeqID_4817
  Subcellular localization annotation: CTP_CleavageSite=63; ConfidenceScore=5.06e-01
QNEIYNDTYYSMISSELLPSVTTAAARAAAQTSSNSATRRIMPLLLPPAAGVLLFCSQGLPLPCFAAASR

SEQ ID NO: 70792 - protein, 372 aa, Setaria italica
  Transcript Sequence Number=SeqID_4818
  Gene Ontology: Cellular component=cell wall
  Homolog annotation: Hit_ID=Q43557; Match level="QueryCoverage=91%, HitCoverage=91%, E-value=1e-136, Identity=64%"; Hit description =Unidentified
  Pfam annotation: Domain name=DUF642; Domain location=41-361; Score =832.7; E_value=2.3e-247; Accession=PF04862.4; Description=Protein of unknown function, DUF642
MMRRVALLLLVCAAARAAAVVTDGLLPNGNFEEGPPKSALVNGTVVRGANAIPLWETSGFVEYIESGHKQGDMLLVVPQGAHAVRLGNEASIRQRLAVTRGAYYAITFSAARTCAQAERLNVSVSPEWGVLPMQTIYGSNGWDSYAWAFKAKFDTVTLVIHNPGVEEDPACGPLIDGVAIRALYPPTLVRGNMLKNGGFEEGPYFLPNASWGVLVPPNIEDDHSPLPAWMIVSSKAVKYVDAAHFKVPQGARAVELVGGRESALVQEVRTVPGWSYRLSFAVGDAGDGCTGSMVAEAFAARATVKVPYESKGTGGYKRAVLDFTAIANRTRVVFQSTFYHMKADGTLCGPLVDDASLVGLRKKPAAGRRLLL

SEQ ID NO: 70793 - protein, 293 aa, Setaria italica
  misc_feature (29)..(29): Xaa can be any naturally occurring amino acid
  misc_feature (171)..(171): Xaa can be any naturally occurring amino acid
  misc_feature (191)..(191): Xaa can be any naturally occurring amino acid
  Transcript Sequence Number=SeqID_4819
  Gene Ontology: Cellular component=exocyst; Biological process =exocytosis
  Homolog annotation: Hit_ID=B9T3B0; Match level="QueryCoverage=100%, HitCoverage=46%, E-value=5e-96, Identity=65%"; Hit description =Protein binding protein, putative
  Pfam annotation: Domain name=Exo70; Domain location=1-293; Score =254.5; E_value=2.5e-73; Accession=PF03081.7; Description=Exo70 exocyst complex subunit
IGRRSPEKLFKIIDLHDALSDLLPDISDXFAASKAAESIYVQAAEIRSRLADAVRGILSEFENAVLRDPSKTPVPGGTIHPLTRYVMNYSSLISDYKTTLSELIISRPSASSRIATEGNEAAPAFPDLDLPDPDSQLPLAAHLIWIIVVLEHNLESKASLYKDAALSHLQXMHNVHYIVHKVKDSAELRGXLIGDEYLRRLTGKFRQAATSYQRTAWLKILNCLRDEGLHVSGGFSSGISKSALRERFKAFNAAFEEAHRIQSTWYVPDTQLREELRISISEKLLPAYRSFLG

SEQ ID NO: 70794 - protein, 96 aa, Setaria italica
  Transcript Sequence Number=SeqID_4820
  Gene Ontology: Mol. function=triacylglycerol lipase activity; Biological process=lipid metabolic process
  Homolog annotation: Hit_ID=B6TJX9; Match level="QueryCoverage=100%, HitCoverage=21%, E-value=5e-47, Identity=91%"; Hit description =Calmodulin-binding heat-shock protein
  Pfam annotation: Domain name=Lipase3_N; Domain location=1-65; Score =42.2; E_value=2e-09; Accession=PF03893.8; Description=Lipase 3 N -terminal region
CLACARWAWKRCLHTGESDSATWGLASTADFEPVPRMCRLVMANYEPDLSATAPLLFAPPGGYGIDPACVLRRRNYADTQGRVTPYLLYLDHAHAD

SEQ ID NO: 70795 - protein, 51 aa, Setaria italica
  Transcript Sequence Number=SeqID_4821
  Gene Ontology: Cellular component=integral to membrane
  Homolog annotation: Hit_ID=B4FYT6; Match level="QueryCoverage=66%, HitCoverage=12%, E-value=8e-13, Identity=94%"; Hit description=Mpv17 / PMP22 family protein
  Pfam annotation: Domain name=Mpv17_PMP22; Domain location=1-39; Score= 5.1; E_value=0.0013; Accession=PF04117.4; Description=Mpv17  PMP22 family
ARLKRDLVPTIKSGILYWPACDFITFKFVPVHLQLKESRCGGGHEYLVVVE

SEQ ID NO: 70796 - protein, 212 aa, Setaria italica
  Transcript Sequence Number=SeqID_4822
  Gene Ontology: Cellular component=integral to membrane
  Homolog annotation: Hit_ID=B4FYT6; Match level="QueryCoverage=84%, HitCoverage=68%, E-value=8e-94, Identity=92%"; Hit description=Mpv17 / PMP22 family protein
  Pfam annotation: Domain name=Mpv17_PMP22; Domain location=134-201; Score=89.0; E_value=1.7e-23; Accession=PF04117.4; Description=Mpv17 PMP22 family
  Subcellular localization annotation: CTP_CleavageSite=49; ConfidenceScore=5.23e-01
LPPARPGPVGSSFGPPSRKTGAVGAAGAGVVGWYLGLLDARPVLTKSVTAATIFTAADLTSQMFTLGPEESLDFLRTMRMASYGLLISGPTLHLWFNFISKVFPKKDVVNTLKKMFLGQAVYGPIINSVFFSYNAGLQGETVPEIIARLKRDLVPTIKSGILYWPACDFITFKFVPVHLQPLVSNSFSFLWTIYITYMASLKKADVEVATST

SEQ ID NO: 70797 - protein, 81 aa, Setaria italica
  Transcript Sequence Number=SeqID_4823
LVAACRPYRRPFVTFNKVADVALWKYVHSRHVFGVGLLGSRVMPGGGINSFSRVYHVQQNCVPIEEGALPVNFVSGNPACK

SEQ ID NO: 70798 - protein, 446 aa, Setaria italica
  Transcript Sequence Number=SeqID_4824
  Gene Ontology: Mol. function=drug transporter activity; Cellular component=membrane; Biological process=multidrug transport
  Homolog annotation: Hit_ID=B9SL10; Match level="QueryCoverage=97%, HitCoverage=77%, E-value=1e-138, Identity=58%"; Hit description=DNA -damage-inducible protein f, putative
  Pfam annotation: Domain name=MatE; Domain location=2-186; Score=36.5; E_value=1.1e-07; Accession=PF01554.10; Description=MatE
  Pfam annotation: Domain name=MatE; Domain location=243-402; Score =63.6; E_value=7.3e-16; Accession=PF01554.10; Description=MatE
  Pfam module annotation: Pfam domain module=MatE::MatE; Domain location=2-186::243-402
  Subcellular localization annotation: CTP_CleavageSite=60; ConfidenceScore=5.12e-01
VPAVLALAADPITALVDTAFVGHIGSAELAAVGASASVFNLVSKLFNVPLLNVTTSFVAEQQAVDANSSSITGQRDEFLTPQKKASQQKKVLPAVSTSLALAAGIGLLEMVALIVGSGTLMNIIGIPVDSPMRAPAEQFLTLRAYGAPPIIVALAAQGAFRGFLDTKTPLYAVGAGNLLNAILDAVLIFPLGLGVSGAALATVSSEYLTAFILLWKLNNEVDLFSWNIIGDGVIRYLKSGGLLIGRTIAVLLTLTLSTSLAAREGPVPMAGYEICLQVWLTISLLNDALALAGQALLASEYARGNYKQARMVVYRILQVGGVTGVVLAATLFVGFGSLSLLFTDDPAVLDVAQSGVWFVTISQPVNAIAFVADGLYYGVSDFAYAAYSTFFAGAVSSVFVLIAAPNFGLGGIWAGLTLFMSLRAIAGFWRLGSKGGPWEIIWSESE

SEQ ID NO: 70799 - protein, 82 aa, Setaria italica
  Transcript Sequence Number=SeqID_4825
ITANCGSGLQITIDVHNRCMHCMFRSNHILVASKSSAKIWQHRTIDFNCCMDCIFRFNCVFHSIPKPSCLDLTSTPIIWLGF

SEQ ID NO: 70800 - protein, 94 aa, Setaria italica
  misc_feature (40)..(40): Xaa can be any naturally occurring amino acid
  misc_feature (46)..(46): Xaa can be any naturally occurring amino acid
  Transcript Sequence Number=SeqID_4826
  Gene Ontology: Mol. function=transcription factor activity; Cellular component=nucleus; Biological process=regulation of transcription, DNA-dependent
  Homolog annotation: Hit_ID=A0MAV4; Match level="QueryCoverage=95%, HitCoverage=18%, E-value=3e-28, Identity=72%"; Hit description =Aintegumenta-like protein
RKKIEIMNTMSQDEFVAYIRRQSSCFSRGTSSYRGVTRDXNGLLRXATFSNHFLTNRRKDGKWQARIGRIGESRDTKDIYLGTFDTEEEAACKS

SEQ ID NO: 70801 - protein, 116 aa, Setaria italica
  Transcript Sequence Number=SeqID_4827
  Gene Ontology: Mol. function=transcription factor activity; Cellular component=nucleus; Biological process=regulation of transcription, DNA-dependent
  Homolog annotation: Hit_ID=Q6YYK9; Match level="QueryCoverage=70%, HitCoverage=25%, E-value=9e-37, Identity=87%"; Hit description=Ovule development protein aintegumenta (ANT)-like
VSGATRGRGSFGTQNCSSFNFFSGITGSYVTEEQAAKAHDLAALKYWGTGPNTKLNFSISDYEKEIEIMKTMSQDEFVAYIRRQSSCFSRGTSSYRGVTRRKDGKCLWCLYSHQSY

SEQ ID NO: 70802 - protein, 142 aa, Setaria italica
  misc_feature (73)..(73): Xaa can be any naturally occurring amino acid
  misc_feature (85)..(85): Xaa can be any naturally occurring amino acid
  misc_feature (101)..(101): Xaa can be any naturally occurring amino acid
  Transcript Sequence Number=SeqID_4828
  Gene Ontology: Mol. function=transcription factor activity; Cellular component=nucleus; Biological process=regulation of transcription, DNA-dependent
  Homolog annotation: Hit_ID=A0MAV4; Match level="QueryCoverage=91%, HitCoverage=32%, E-value=3e-29, Identity=48%"; Hit description =Aintegumenta-like protein
  Subcellular localization annotation: CTP_CleavageSite=47; ConfidenceScore=5.29e-01
GGGASAGAGGGRKLVAEAMHKYAAPRSSRFHGVTRCGPATLGNRGAVAAAVPSGCLSFWFGLIRLFAAALAAXLKWSGKYEAHLXDKTSQVEGRKRKGKHXSDYEKEIEIIKTMSQDEFVAYIRRQSSCFSRGISSYRGVTR

SEQ ID NO: 70803 - protein, 51 aa, Setaria italica
  Transcript Sequence Number=SeqID_4829
  Gene Ontology: Mol. function=transcription factor activity; Cellular component=nucleus; Biological process=regulation of transcription, DNA-dependent
  Homolog annotation: Hit_ID=Q6YYK9; Match level="QueryCoverage=96%, HitCoverage=15%, E-value=1e-15, Identity=77%"; Hit description=Ovule development protein aintegumenta (ANT)-like
PTPRSSRFHGVTRLKWSGKYEAHLWDNTSQVEGRKRKGKHGMRATNLNSEL

SEQ ID NO: 70804 - protein, 54 aa, Setaria italica
  Transcript Sequence Number=SeqID_4830
FSSLFKLILHLIVHGTWFLLLAAVWSSVYLGSYVTEEQAAKAHDLAALKYWGTG

SEQ ID NO: 70805 - protein, 83 aa, Setaria italica
  Transcript Sequence Number=SeqID_4831
  Gene Ontology: Mol. function=transcription factor activity; Cellular component=nucleus; Biological process=regulation of transcription, DNA-dependent
  Homolog annotation: Hit_ID=Q6YYK9; Match level="QueryCoverage=71%, HitCoverage=18%, E-value=2e-22, Identity=83%"; Hit description=Ovule development protein aintegumenta (ANT)-like
GGGGEEEEGVGWEELAPAQAGRKLVAEAMRKYAAPRSSRFHGVTRLKWSGKYEAHLWDNTSQVEGRKRKGKHGMHSTNLNSEL

SEQ ID NO: 70806 - protein, 232 aa, Setaria italica
  misc_feature (149)..(149): Xaa can be any naturally occurring amino acid
  Transcript Sequence Number=SeqID_4832
  Gene Ontology: Mol. function=transcription factor activity; Cellular component=nucleus; Biological process=regulation of transcription, DNA-dependent
  Homolog annotation: Hit_ID=A0MAV4; Match level="QueryCoverage=90%, HitCoverage=54%, E-value=1e-95, Identity=81%"; Hit description =Aintegumenta-like protein
  Pfam annotation: Domain name=AP2; Domain location=140-192; Score =54.3; E_value=4.7e-13; Accession=PF00847.12; Description=AP2 domain
  Pfam annotation: Domain name=AP2; Domain location=36-96; Score=61.6; E_value=3e-15; Accession=PF00847.12; Description=AP2 domain
  Pfam module annotation: Pfam domain module=AP2::AP2; Domain location =140-192::36-96
GGGEERKMGGGASAGAGGGRKLVAEAMRKYAAPRSSRFHGVTRLKWSGKYEAHLWDNTSQVEGRKRKGKHVYLGSYVTEEQAAKAHDLAALKYWGTGPNTKLNFSISDYEKEIEIMKTMSQDEFVAYIRRQSSCFSRGTSSYRGVTRRXKWQARIGRIGESRDTKDIYLGTFDTEEEAAEAYDIAAIELRGVHAVTNFDISNYCEDGLRKLEGPSEVAKLEGPSEVMKLAGQ

SEQ ID NO: 70807 - protein, 158 aa, Setaria italica
  Transcript Sequence Number=SeqID_4833
  Gene Ontology: Mol. function=serine-type endopeptidase activity; Cellular component=plasma membrane
  Homolog annotation: Hit_ID=Q9XI10; Match level="QueryCoverage=91%, HitCoverage=18%, E-value=4e-13, Identity=32%"; Hit description =F8K7.10 protein
AVSPFGKKVAVANFQFHRWNGEIEHLKTDIVIMNVDRQAQGGLERKVTIRNAGWPTWGSDNVIFFHRANTPDDTKKLDVYWGVFRYDIKAKKEERVTPEGIRAMTPAAISETSVAVATLIEKSPANVSAAPRKNVEQYRHIEIFDTTSPNSPLKITRG

SEQ ID NO: 70808 - protein, 125 aa, Setaria italica
  Transcript Sequence Number=SeqID_4834
  Pfam annotation: Domain name=Cons_hypoth95; Domain location=2-115; Score=-40.6; E_value=0.00041; Accession=PF03602.7; Description =Conserved hypothetical protein 95
  Subcellular localization annotation: CTP_CleavageSite=13; ConfidenceScore=5.33e-01
ASLGSSRGTIFLRQNQGDVSPPGRVFFKVFISSSPTLFLCLSGKYPSFDYISVTPPYLEVNYSTLLDQLARSPLVGKDCFILVEYPLKTDMAESCGNLIKIADRRFGRTNLLIYGPTWSEKKRRT

SEQ ID NO: 70809 - protein, 313 aa, Setaria italica
  Transcript Sequence Number=SeqID_4835
  Gene Ontology: Mol. function=methyltransferase activity; Biological process=methylation
  Homolog annotation: Hit_ID=B9L2B4; Match level="QueryCoverage=60%, HitCoverage=91%, E-value=7e-21, Identity=32%"; Hit description=N6 -adenine-specific methylase
  Pfam annotation: Domain name=Cons_hypoth95; Domain location=113-303; Score=190.8; E_value=3.8e-54; Accession=PF03602.7; Description =Conserved hypothetical protein 95
  Subcellular localization annotation: CTP_CleavageSite=36; ConfidenceScore=5.76e-01
MASSTLAAHPFLPSLPVPNPSKPVSVRASVRRLPVAASAAPSGAAAAARERRRFLERYGLNPDDFEDDAEKGPREERRRDRRGRRRSGRGQEAEEAAVAPAKAAEPRETHKLLQVLGGKVRRRKLLSPKDRNVRPMMEVVRGAAFDILQSAGGSPASLRPGRWLDLYSGTGSVGIEAMSRGCSEAHFVEMDPWVISEVLKPNLECTGFLDVSHIHMLRVEKFLANAEKSQGKYPSFDYISVTPPYLEVNYSTLLDQLARSPLVGKDCFILVEYPLKTDMAESCGNLIKIADRRFGRTNLLIYGPTWSEKKRRT

SEQ ID NO: 70810 - protein, 101 aa, Setaria italica
  Transcript Sequence Number=SeqID_4836
  Gene Ontology: Mol. function=voltage-gated chloride channel activity; Cellular component=integral to membrane; Biological process=chloride transport
PRAQAEVKEFLVCHVYQAGKCKSCSVTPQMPLTAAEKIMDSHGVDHLPVVSEHANLQDSGLLIGFVDRECIAIARRAMAVKEFFISTYEIRKEERPSTEGR

SEQ ID NO: 70811 - protein, 117 aa, Setaria italica
  Transcript Sequence Number=SeqID_4837
  Gene Ontology: Cellular component=extracellular region; Biological process=sexual reproduction
  Homolog annotation: Hit_ID=B6TKK5; Match level="QueryCoverage=100%, HitCoverage=42%, E-value=6e-62, Identity=95%"; Hit description=Beta -expansin 3
  Pfam annotation: Domain name=Pollen_allerg_1; Domain location=17-98; Score=112.0; E_value=2.1e-30; Accession=PF01357.13; Description =Pollen allergen
LNVVYRRTACKYGGKNIAFRVNEGSTNFWLSLLVEFEDGEGDIGSMQIKQANSVEWLDMKHVWGATWCLVRGPLVGPFSVRLATLSAKKTLTARDVIPRNWTPKATYTSRLNFEPSL

SEQ ID NO: 70812 - protein, 108 aa, Setaria italica
  misc_feature (16)..(16): Xaa can be any naturally occurring amino acid
  misc_feature (65)..(65): Xaa can be any naturally occurring amino acid
  Transcript Sequence Number=SeqID_4838
  Homolog annotation: Hit_ID=B6TR82; Match level="QueryCoverage=91%, HitCoverage=32%, E-value=2e-19, Identity=55%"; Hit description =Thioredoxin F-type
FSGTLGCRSGPCKVMXPKFQQMSEQNLDVLFLKLDCSQDNKVSWITLLSCVFTALCSVGYLDMAXEKHQYLLLAASCKRALGIKVVPKFKILKDGKVVKEVTGAKIDE

SEQ ID NO: 70813 - protein, 82 aa, Setaria italica
  Transcript Sequence Number=SeqID_4839
  Homolog annotation: Hit_ID=B4F8G6; Match level="QueryCoverage=79%, HitCoverage=17%, E-value=2e-20, Identity=72%"; Hit description=CF9
CQCHLRQQWWGFAVGEGWVETLSSALVVPSNRKFVLDLTGRATFEAVRSFLEFVLWKLHAGTRAGGDARVGAGLRALRHMSD

SEQ ID NO: 70814 - protein, 363 aa, Setaria italica
  Transcript Sequence Number=SeqID_4840
  Gene Ontology: Mol. function=zinc ion binding
  Homolog annotation: Hit_ID=Q9LPT2; Match level="QueryCoverage=33%, HitCoverage=19%, E-value=6e-28, Identity=46%"; Hit description =F11F12.6 protein
  Pfam annotation: Domain name=C1_3; Domain location=72-102; Score =16.2; E_value=0.0072; Accession=PF07649.4; Description=C1-like domain
  Pfam annotation: Domain name=PHD; Domain location=73-123; Score=30.5; E_value=6.9e-06; Accession=PF00628.21; Description=PHD-finger
  Pfam annotation: Domain name=zf-C3HC4; Domain location=74-120; Score =4.9; E_value=0.028; Accession=PF00097.17; Description=Zinc finger, C3HC4 type (RING finger)
  Pfam module annotation: Pfam domain module=C1_3::PHD::zf-C3HC4; Domain location=72-102::73-123::74-120
  Subcellular localization annotation: CTP_CleavageSite=79; ConfidenceScore=5.17e-01
RKTRTTKPVAVQAATGNTVVGHRATPGVAFVPPKPTFVNHNDIAKTVQQFLHQPANHPSWTPPSTEYMHSRLGCQICKVAITDTDSLLVCDACERGVHLKCLQQYGNKGVPKAEWHCSACLTQSKGKPLPPKYGKVTRTVVASKAAPPGGGAQVSLPGSAENMAAKENHQKLAANGNLMKPISIQGGSTVHNINVLALSAITAGSQSQLASTLRPPIGNTVKAETSSNGKEGTGQQCSSMLQPDVKPPPDKKLRSGSSLNSAGSANDIMNSEQTAEISGAEAKIKSEANSDPPLSRNEELVDSSGTSVEQTKIVGSEEKPSAQATSETDKMKDSETTANTGSSLDQRRNFATEEKLLSEATSE

SEQ ID NO: 70815 - protein, 171 aa, Setaria italica
  misc_feature (68)..(68): Xaa can be any naturally occurring amino acid
  misc_feature (78)..(78): Xaa can be any naturally occurring amino acid
  Transcript Sequence Number=SeqID_4841
  Gene Ontology: Mol. function=metal ion transmembrane transporter activity; Cellular component=membrane; Biological process=metal ion transport
  Homolog annotation: Hit_ID=Q9M647; Match level="QueryCoverage=95%, HitCoverage=33%, E-value=6e-21, Identity=40%"; Hit description=IAA -alanine resistance protein 1
IVEKIVRYVEDNSQNGAHSMGHGHHHHHKRHDSSDKAKLNHQKSDGDGSLHESEATIRKKFIGVLGFXMPLQHKYRGXSSGSTKATDGEPANSENHPAPDKALSSDVSSTSNSNLVFGYLNLFSDGVHNFTDGMALGSAFLLQGSVGGWSRTLFLLAHELPQEVIFIIKLI

SEQ ID NO: 70816 - protein, 424 aa, Setaria italica
  Transcript Sequence Number=SeqID_4842
  Gene Ontology: Mol. function=metal ion transmembrane transporter activity; Cellular component=membrane; Biological process=metal ion transport
  Homolog annotation: Hit_ID=B9HJK9; Match level="QueryCoverage=83%, HitCoverage=95%, E-value=2e-97, Identity=52%"; Hit description=ZIP transporter
  Pfam annotation: Domain name=Zip; Domain location=75-421; Score =196.3; E_value=8.3e-56; Accession=PF02535.14; Description=ZIP Zinc transporter
HGGHGHSCGGGADHEHHHHHHHSHDEIRRLLPEEMAEEADLELESFGFDEHDHAHHHHHHHGHHHHHDGMETSPMGVWLSAMGCSLLVSMASLICLVLLPVIFFQGKPSKAMVDALAVFGAGAMLGDSFLHQLPHAFGGGHSHSHDHEGHDHAQEHAHAHSLKDLSVGLSILFGIVLFFIVEKIVRYVEDNSQNGAHSMGHGHHHHHKRHDSSDKAKLNHQKSDGDGSLHESEATIRKRSSSGSTKATDGEPANSENHPAPDKALSSDVSSTSNSNLVFGYLNLFSDGVHNFTDGMALGSAFLLQGSVGGWSRTLFLLAHELPQEVGDFGILVRSGFSVSKALFFNFLSALVALAGTALALSLGKDPGHSSLIEGFTAGGFIYIAVAGVLPQMNDQKTTLKSSVVQLISLAMGMLVALGISLVE

SEQ ID NO: 70817 - protein, 57 aa, Setaria italica
  Transcript Sequence Number=SeqID_4843
  Gene Ontology: Mol. function=actin binding; Cellular component =cytoskeleton
  Homolog annotation: Hit_ID=Q84TX2; Match level="QueryCoverage=82%, HitCoverage=2%, E-value=3e-17, Identity=95%"; Hit description=SCAR -like protein 1
MIRYQIRNEYGLSDPELYAAPGEEDDPEALLEGVAMAGLVGVLRQLGISPSECCYLL

SEQ ID NO: 70818 - protein, 118 aa, Setaria italica
  Transcript Sequence Number=SeqID_4844
  Gene Ontology: Mol. function=transferase activity, transferring glycosyl groups; Biological process=metabolic process
  Homolog annotation: Hit_ID=Q8LKT3; Match level="QueryCoverage=100%, HitCoverage=26%, E-value=5e-39, Identity=65%"; Hit description =Putative glucosyl transferase
LGRLEEVIRARNTRWVVVDVSMNWALDLAATVGVRVALFLTYSAAVFVLRAHIPKLIEDGIIDESGNVKRNERIQLSPKMPAIAELPWTSLAKSPESRRAMLQSVIKSHPACTLADAI

SEQ ID NO: 70819 - protein, 88 aa, Setaria italica
  Transcript Sequence Number=SeqID_4845
  Homolog annotation: Hit_ID=B6TFK0; Match level="QueryCoverage=89%, HitCoverage=22%, E-value=2e-34, Identity=88%"; Hit description =Pollen-specific protein SF21
MLMSPFCGQIVQVQACGSLVTEEQPHAMLIPMEYFLMGYGLYRPPQQETSPRSTLNPFCISPELLSPESMGVKLKPIKTRISLNCFSL

SEQ ID NO: 70820 - protein, 347 aa, Setaria italica
  Transcript Sequence Number=SeqID_4846
  Homolog annotation: Hit_ID=B6TFK0; Match level="QueryCoverage=100%, HitCoverage=100%, E-value=1e-180, Identity=87%"; Hit description =Pollen-specific protein SF21
  Pfam annotation: Domain name=Ndr; Domain location=21-305; Score =488.2; E_value=1.1e-143; Accession=PF03096.6; Description=Ndr family
MGDSSGSVSIDVERIFFGGKEHRVRTRHGPLSVSVYGDEDKPALVTYPDVALNHMSCFQGLFFCPEAASLLLHNFCVYHITPQGHELGAAPISSDVPVPSVDDLADQVADVLDFFSLGAVMCLGVTAGAYVLTLFATKYRERVLGLMLVSPLCKGPSWSEWLYNKVLLNLLYYYGTRGLVKESLLQRYFSMEVRGNGQDPESEIVQACRSLLDERQGSNVWRFLQAINRRHDLTESLMKLQCRTLIFVGENSQFHADAVHMTTKLDRRYCALVEVQACGSLVTEEQPHAMLIPMEYFLMGYGLYRPPQQETSPRSTLNPFCISPELLSPESMGVKLKPIKTRISLNV

SEQ ID NO: 70821 - protein, 291 aa, Setaria italica
  Transcript Sequence Number=SeqID_4847
  Gene Ontology: Mol. function=protein binding; Cellular component =extracellular region
  Homolog annotation: Hit_ID=Q18852; Match level="QueryCoverage=86%, HitCoverage=69%, E-value=1e-24, Identity=30%"; Hit description =Protein C54G4.7, confirmed by transcript evidence
  Pfam annotation: Domain name=Abhydrolase_1; Domain location=72-286; Score=-6.4; E_value=0.019; Accession=PF00561.12; Description =alphabeta hydrolase fold
  Pfam annotation: Domain name=DUF2048; Domain location=1-290; Score =456.4; E_value=4.3e-134; Accession=PF09752.1; Description =Uncharacterized conserved protein (DUF2
  Pfam module annotation: Pfam domain module=Abhydrolase_1::DUF2048; Domain location=72-286::1-290
RTKVREGDNRTTCDERLIDALPPESHNARVAFLTPKNVTPEKMSCVVHLAGTGDHTFERRLRLGGPLLKNNIATMVLESPYYGQRRPSMQRGAKLQCVSDLLLLGKATIDEARSLLYWLQTEAGYGKMGICGLSMGGVHAAMVGSLHPTPIATLPFLAPHSAVVPFCEGVYKYATAWDVLREDAAALTQDVTSLTEDAAQKTGVTIEQVRDRLRSVLSLTDVTRFPVPKNPQAVIFVGATDDGYIPRHSVMELQKAWPGSEVRWVTGGHVSSFFLHNDAFRKAIVDALNRL

SEQ ID NO: 70822 - protein, 52 aa, Setaria italica
  Transcript Sequence Number=SeqID_4848
  Homolog annotation: Hit_ID=Q942Z1; Match level="QueryCoverage=92%, HitCoverage=4%, E-value=7e-12, Identity=72%"; Hit description =Putative flowering-time protein
IEPQSYNVESSRSWNSRQQGQNPEASRQWNLGKQDAYNPSDGRRSYDQHWRR

SEQ ID NO: 70823 - protein, 349 aa, Setaria italica
  Transcript Sequence Number=SeqID_4849
  Gene Ontology: Mol. function=catalytic activity; Biological process =trehalose biosynthetic process
  Homolog annotation: Hit_ID=B6SH67; Match level="QueryCoverage=98%, HitCoverage=39%, E-value=1e-176, Identity=86%"; Hit description =Trehalose 6-phosphate synthase
  Pfam annotation: Domain name=Hydrolase_3; Domain location=79-318; Score=-82.8; E_value=0.097; Accession=PF08282.4; Description =haloacid dehalogenase-like hydrolase
  Pfam annotation: Domain name=Trehalose_PPase; Domain location=80-315; Score=330.5; E_value=3.4e-96; Accession=PF02358.8; Description =Trehalose-phosphatase
  Pfam module annotation: Pfam domain module=Hydrolase_3::Trehalose _PPase; Domain location=79-318::80-315
RRFSATEKHYRYVKSHDVTYWARSFDQDLERTCKEQDSRRCWTTGFGLNFRVIALSPGFRRLSLEHFASSYKKANRRVIFLDYDGTLVPQSSLNKAPSAEVISILNSLCNDTKNTVFIVSGRGRNSLSEWFDSCENLGIAAEHGYFIRWNKAAEWETSSSGQCSEWKLIADPVMHVYTETTDGSSIECKESALVWHYQNTDHDFGSCQAKELVSHLERVLANEPVVVKRGHQIVEVKPQGVSKGIAVDKIIRTLVSKGEVADLLMCIGNDRSDEDMFESINKATSLAELPAIPEVFACSVGPKASKANYYVDGCSEVIRLLKGVIDVSSQKDTTSHSHVNSNDILEVVS

SEQ ID NO: 70824 - protein, 51 aa, Setaria italica
  Transcript Sequence Number=SeqID_4850
ISCSHFEGSFGIAMNFEDYCLLVLLLLRHIVLLRSHVMNRYLWHKVVVGVS

SEQ ID NO: 70825 - protein, 1076 aa, Setaria italica
  misc_feature (44)..(44): Xaa can be any naturally occurring amino acid
  Transcript Sequence Number=SeqID_4851
  Gene Ontology: Mol. function=transferase activity, transferring glycosyl groups; Cellular component=plasma membrane; Biological process=sucrose metabolic process
  Homolog annotation: Hit_ID=P31927; Match level="QueryCoverage=99%, HitCoverage=99%, E-value=0.0, Identity=86%"; Hit description=Sucrose- phosphate synthase
  Pfam annotation: Domain name=Glycos_transf_1; Domain location=482 -665; Score=84.0; E_value=5.5e-22; Accession=PF00534.12; Description =Glycosyl transferases group 1
  Pfam annotation: Domain name=S6PP; Domain location=787-1026; Score= -63.7; E_value=5.1e-06; Accession=PF05116.5; Description=Sucrose-6F -phosphate phosphohydrolase
  Pfam module annotation: Pfam domain module=Glycos_transf_1::S6PP; Domain location=482-665::787-1026
GYLEAILDSRTAAGGSGGGGGVGVGGGGGDPKSLAAGASPTGAXAPRGPHMNFNPTHYFVEEVVKGVDESDLHRTWIKVVATRNARERSTRLENMCWRIWHLARKKKQLELEGFQRMIARRKEQEQGRREATEDLAEDLSEGEKGDTLGELAPVETAKKKFQRNFSDLTVWSDDNREKKLYIVLISVHGLVRGENMELGRDSDTGGQVKYVVELARALSMMPGVYRVDLFTRQVSSPDVDWSYAEPTEMLTTGSVDGEGLGESGGAYIVRIPCGPKDKYLKKEALWPYLQEFVDGALQHILNMSKALGDQVGNGGRPVLPYVIHGHYADAGDVAALLSGALNVPMVLTGHSLGRNKLEQLLKQGRMSKEEIDSTYKIMRRIEGEELALDASELVITSTRQEIDEQWGLYDGFDVKLEKVLRARARRGVSCHGRFMPRMVVIPPGMDFSNVVVPEDIDGDGDSKDDIVSLEGASPKSMPPIWAEVMRFLTNPHKPMILALSRPDPKKNITTLVKAFGECRPLRELANLTLIMGNRDDIDNMSAGNASVLTTVLKLIDKYDLYGSVAFPKHHNQADVPEIYRLAAKMKGVFINPALVEPFGLTLIEAAAHGLPIVATKNGGPVDITTALNNGLLVDPHDQNAIADALLKLVADKNLWQECRRNGLRNIHLYSWPEHCRTYLTRIAGCRLRNPRWLKDTPADAGADEEELLEDSMDAQDLSLRLSIDGEKSSLCINEPPSSDPQDQVQRIMSKINKSSALPPSMSSVDSAKNAAEATGSIVNKYPLLRRRRRLFVIAVDCYQDDGRASKKMLQVIQEVFRAVRSDSQMSKISGFALSTAMPLSEALQLLQLGKIPATDFDALICGSGSEVYYPGTAHCIDAEGKLRPDQDYLMHISHRWSHDGAKQTIAKLMVAQDGSSDVIERDVASSNPHCVSFLIKDPKKVKTIDEMRERLRMRGLRCHIMYCRNSTRLQVVPLLASRSQALRYLFVRWGLFMGNMYLITGEHGDTDAEEMLSGLHKTVILRGVTEKGSEALLRSSGSYQRTDVVPSESPLVCYTDLKADEIILALKQVSKTTSST

SEQ ID NO: 70826 - protein, 62 aa, Setaria italica
  Transcript Sequence Number=SeqID_4852
MPPPLLVCLLLLLLAAARPWPVAAGAPKTAAKPRVFPLRARQVPAWALPRPPSKLRFHHNVS

SEQ ID NO: 70827 - protein, 130 aa, Setaria italica
  Transcript Sequence Number=SeqID_4853
TTRDVPEPKTGAAAADDGPVGPAPAAMAVEETKVRKSVTIKEDRLPEQEGGTPAAPLERKRSLFKKRQASSVGGGGDDEQRVPRRSGLRPRIPPVLRVPSNINERSSTFIEERKKSFVGRGGGAKPAPDK

SEQ ID NO: 70828 - protein, 87 aa, Setaria italica
  Transcript Sequence Number=SeqID_4854
  Gene Ontology: Mol. function=metal ion binding
  Pfam annotation: Domain name=DUF1117; Domain location=1-86; Score =55.5; E_value=2.1e-13; Accession=PF06547.4; Description=Protein of unknown function (DUF1117)
GLTIWRLPRGGFAVGRFAGGPREQLPVVYTELDGGFSNGVGPRRVTWPEGERQVDGGEGRIRRVFRNLFGCFGHGSRQASSSQSLSG

SEQ ID NO: 70829 - protein, 108 aa, Setaria italica
  Transcript Sequence Number=SeqID_4855
  Subcellular localization annotation: CTP_CleavageSite=60; ConfidenceScore=5.41e-01
KKQTLLDNGGGGGGGRLGRSCSRSSAAATRRVDPVVAVGSGGIRMAGFRSLAPKTRNLVVAGGLSAFVLGVYYYTMRAVGGTDELQVAIDKFEEMKKKDAGNSSNAGS

SEQ ID NO: 70830 - protein, 243 aa, Setaria italica
  Transcript Sequence Number=SeqID_4856
  Gene Ontology: Mol. function=nucleotide binding; Biological process =defense response
  Homolog annotation: Hit_ID=Q8LJX9; Match level="QueryCoverage=100%, HitCoverage=25%, E-value=1e-59, Identity=53%"; Hit description =Putative stripe rust resistance protein Yr10
  Pfam annotation: Domain name=LRR_1; Domain location=109-135; Score =2.7; E_value=93; Accession=PF00560.25; Description=Leucine Rich Repeat
  Pfam annotation: Domain name=LRR_1; Domain location=137-158; Score =7.8; E_value=9.7; Accession=PF00560.25; Description=Leucine Rich Repeat
  Pfam annotation: Domain name=LRR_1; Domain location=160-182; Score =6.9; E_value=15; Accession=PF00560.25; Description=Leucine Rich Repeat
  Pfam module annotation: Pfam domain module=LRR_1::LRR_1::LRR_1; Domain location=109-135::137-158::160-182
LYEVGESYFNELINRSMVEPVGIDFEGRAQSCRVHDIVLDLIRSLSTKENFVTIWDDTETTSSKFKVRRLSLQNSSAPGSATTTLLQVRSFTAFSPAVDSMPSLSQFQVLRVLDLEGCALKKCGDHFNLKHVGNLSQLRYLGLRRTYIHELPVEIGKLQFLQTLDIRGAHGIQKLPQTISRLRKLMCLHLDWDTKLPKGLSNLTSLEELTGLRIGQDSAHIVREELSHLTGLRVLKMSWEKDT

SEQ ID NO: 70831 - protein, 331 aa, Setaria italica
  misc_feature (314)..(314): Xaa can be any naturally occurring amino acid
  Transcript Sequence Number=SeqID_4857
  Homolog annotation: Hit_ID=B9SQJ2; Match level="QueryCoverage=83%, HitCoverage=66%, E-value=1e-13, Identity=29%"; Hit description =Translation initiation factor, putative
  Pfam annotation: Domain name=eIF-4B; Domain location=3-328; Score= -244.9; E_value=0.00095; Accession=PF06273.3; Description=Plant specific eukaryotic initiation factor
MAVASAWSKPGSWALAAEEQDELPPPPPPVVPAADFPDLATAATTKVPKKKKAQSMPLSDFNSGKFVTRASRGPGPEVTTFDLPTGPRERTEEELANTRGFGAGRWGGAGGGPRGSDEPRRGGSDREDFGPSRADEADDWGAGKKPLERRAMGGFGWDSSASRADDVNDWVSTKRTAPAPFPERRERGGGGFGGDSISRADDSASWVSNKSYSAPPPLPADGRRGGPVWGFNRDGGPDADSWGRRREEMSNGGDSSVGRPRLNLQKRTLPLANGTDGEKPEDNNKEDDKEEQRPRSRSSNPFGTARPREEVLAXKGEDWRKEEPIVEKLEI

SEQ ID NO: 70832 - protein, 106 aa, Setaria italica
  Transcript Sequence Number=SeqID_4858
  Homolog annotation: Hit_ID=A4GSN8; Match level="QueryCoverage=97%, HitCoverage=4%, E-value=2e-27, Identity=59%"; Hit description =Nuclear-pore anchor
RVSASSQAEIHQLRIQAIAKDGEVERLKVEISELHKSKCQSLELIEQRDAEIKEKDGIIQSYYDKIVNLADSSAGKGARVQEVEAKFTHCQAMCNRITQEKELLEK

SEQ ID NO: 70833 - protein, 197 aa, Setaria italica
  misc_feature (51)..(51): Xaa can be any naturally occurring amino acid
  Transcript Sequence Number=SeqID_4859
  Gene Ontology: Mol. function=ATP binding; Biological process=apoptosis
  Homolog annotation: Hit_ID=Q8H5J9; Match level="QueryCoverage=92%, HitCoverage=32%, E-value=1e-35, Identity=44%"; Hit description =Fusarium resistance protein I2C-5-like
MTNMCISLCEKLLGELASRSINFFISKSSKPRVLDVEDSLQRALLQAQVIXDEATGRHITNQAMLQQLDMLRDAMYQGCYKLDAFRYQYHDEEDAKDQVVSHSSSLLNLNSLKGIFSCKTKTQILEQLQDALDNLSSMILDVKELVVFLTGYPRLYHQPYNMHLLLSNCMFGRQMEAELVLNFLLHTQPNGVEELEV

SEQ ID NO: 70834 - protein, 152 aa, Setaria italica
  Transcript Sequence Number=SeqID_4860
  Gene Ontology: Mol. function=ATP binding; Biological process=apoptosis
  Homolog annotation: Hit_ID=Q8H5J3; Match level="QueryCoverage=69%, HitCoverage=21%, E-value=1e-20, Identity=49%"; Hit description =Fusarium resistance protein I2C-5-like
PSNLWEGEKNPKDESSPDYYGPFNSYGDGSGSGSVSKVLGELASRSINFFISKSSKPRVLDVEGSLQRALLRAQVIIDEATGRHIANQAMLQQLDMLRNAMYQGCYKLDAFRYQYHDEKDAKDQVVSHSSSLLKLLPGKAITWQVTWTTGVD

SEQ ID NO: 70835 - protein, 326 aa, Setaria italica
  misc_feature (307)..(307): Xaa can be any naturally occurring amino acid
  Transcript Sequence Number=SeqID_4861
  Gene Ontology: Mol. function=metal ion binding; Cellular component =plasma membrane
  Homolog annotation: Hit_ID=B9RGB2; Match level="QueryCoverage=98%, HitCoverage=29%, E-value=5e-97, Identity=58%"; Hit description=Ran GTPase binding protein, putative
  Pfam annotation: Domain name=RCC1; Domain location=232-290; Score =9.2; E_value=0.083; Accession=PF00415.10; Description=Regulator of chromosome condensation (RCC1)
NGRRGKPKFCPFRLSNDESVLIWFSGKEEKHLRLSHVSRIIPGQRTAIFQRYPRPEKECQSFSLISHDRSLDIICKDKDEAEVWFAGLKTLISRSHQRKWRTESRSDILSSGATSPRTYTRRSSPLSSPFSSNDSIHKDGSDNYRLRTPYGSPPKNGLEKAFSDVMLYAVPPKGFLPSDSNAGSVHSMSSGHSDNTNGHPRSIPMDAFRVSYSSAVSSSSHGSGHDDGDALGDVFIWGEGTGEGTLGGGSSRVGSSSGAKMDCLVPKPLEFAVRLDVQNISCGGRHSALVTKQGEIYSWGEESGGRXGHGVDCDVSQPKLIDASFY

SEQ ID NO: 70836 - protein, 84 aa, Setaria italica
  Transcript Sequence Number=SeqID_4862
MAPFQMRFGLQISPARSDYEEDDEEEEDEEEEYDEMESEGTASPPMTMLRAGRGGGGAGGGLVGAVVGALRRSLVMCSAGAGGG

SEQ ID NO: 70837 - protein, 65 aa, Setaria italica
  Transcript Sequence Number=SeqID_4863
EAAASSSSPFDWYWILDLLEWRSILLFLRWACISNMSSSNQMGSDGKFGRGPRELSGAVDLISRY

SEQ ID NO: 70838 - protein, 82 aa, Setaria italica
  Transcript Sequence Number=SeqID_4864
KKHKEKDRDKEEEQKKHKHRHKDRSKDKDKDKDKDKEKKKDKSGNHESGGDHSKKHEKKRKQEVTGSSASVQNHKKSTIPYN

SEQ ID NO: 70839 - protein, 217 aa, Setaria italica
  Transcript Sequence Number=SeqID_4865
  Homolog annotation: Hit_ID=B9T2I7; Match level="QueryCoverage=52%, HitCoverage=51%, E-value=6e-41, Identity=68%"; Hit description=RNA binding protein, putative
  Pfam annotation: Domain name=Med19; Domain location=16-185; Score= -58.4; E_value=0.027; Accession=PF10278.1; Description=Mediator of RNA pol II transcription
MSSSNQMGSDGKFGRGPRELSGAVDLISRYKLLNHHSFFCKKPLPLAISDTNYLNNVVGDTEIRKGEGMELDQLFQNSYPSEKTAYIQPFDMETLGQAFQLRETAPVDLPSAEKGTPTISGRPKIKSKDKVRKHKKHKEKDRDKEEEQKKHKHRHKDRSKDKDKDKDKDKEKKKDKSGNHESGGDHSKKHEKKRKQEVTGSSASVQNHKKTQKHKNQ

SEQ ID NO: 70840 - protein, 79 aa, Setaria italica
  Transcript Sequence Number=SeqID_4866
LLCVCVCVVATQAETEYMRSPSNGRPPSSGGGAPATGAAPAPAGDDDFAFYYSFLQEAAAPSPLGLDDPSGNANAAGAK

SEQ ID NO: 70841 - protein, 164 aa, Setaria italica
  Transcript Sequence Number=SeqID_4867
  Homolog annotation: Hit_ID=B0FSK5; Match level="QueryCoverage=89%, HitCoverage=65%, E-value=3e-61, Identity=72%"; Hit description=Mucin- like protein (Fragment)
EGGTAANKKARADEYRTRKQRVHAALWVKEIEKMEEARLGGGGVGADDIDRLLDSCSDIFDSGNADFGDSKIPSTTEIKTKPDGWETTTRGQDGNIWEISQREEDILLQEFERRMAFSKQQIASFIKTHIFSRRRPIDGWKYMIEEIGPNARKGKGSVQKATKV

SEQ ID NO: 70842 - protein, 65 aa, Setaria italica
  Transcript Sequence Number=SeqID_4868
RREAPLNFGAQSDGILCGAQFLIVQNCNLILSPHVNNSATEILSEAWVKFPSRKLLWPCRSRRLA

SEQ ID NO: 70843 - protein, 352 aa, Setaria italica
  misc_feature (144)..(144): Xaa can be any naturally occurring amino acid
  Transcript Sequence Number=SeqID_4869
  Gene Ontology: Mol. function=phosphoprotein phosphatase activity; Cellular component=nucleus; Biological process=protein modification process
  Homolog annotation: Hit_ID=B6TA38; Match level="QueryCoverage=90%, HitCoverage=91%, E-value=1e-166, Identity=88%"; Hit description =Ubiquitin-like domain containing CTD phosphatase 1
  Pfam annotation: Domain name=ubiquitin; Domain location=38-108; Score= 5.9; E_value=0.076; Accession=PF00240.15; Description=Ubiquitin family
MADTPSSSSAAAPPTADAPSLAAVAEAAPPEEITLVVKWCGQEQTVRMVGDDTLGELKLRICEATGVLPKRQTLLYPKIMLKGIDDSTLLSSIPFKPNGKISMIGTVEEEIFVGQEDDPELLDDFDFEQNEDTPIKDKDVYKQXLKRRASQYKIKLLNPCRKGKKLLVLDIDYTLFDHKSPAENPKELMRPYLHQFLAAAYSKYDIMIWSATSMKWVELKMEQLGVLGNPDYKITALMDHLAMITVQSENQSRKKTFDCKPLGVIWAQFPEYYNEKNTIMFDDLRRNFVMNPQNGLVIRPFRKAHSNRDNDHELVKLTHYLLSIGDLEDLSKLDHGKWESFIDDSAKRRKRS

SEQ ID NO: 70844 - protein, 84 aa, Setaria italica
  Transcript Sequence Number=SeqID_4870
  Subcellular localization annotation: CTP_CleavageSite=35; ConfidenceScore=5.01e-01
PAASHANDLIHALLLATSSHASLFAKLRGHHCRTAAPHRGPQLPYRSHALQSPRQCLFLAAIHHREHPHLNSSTWSPPSSTQLL

SEQ ID NO: 70845 - protein, 151 aa, Setaria italica
  misc_feature (89)..(89): Xaa can be any naturally occurring amino acid
  Transcript Sequence Number=SeqID_4871
  Gene Ontology: Mol. function=kinase activity; Cellular component =integral to membrane; Biological process=transport
  Homolog annotation: Hit_ID=Q6EPM0; Match level="QueryCoverage=96%, HitCoverage=25%, E-value=6e-30, Identity=46%"; Hit description =Ankyrin-like protein
RWNKSLPTQGDKHGSTPLHFASSLHQDSFGFFWCPPWIRNYWRTRISNIVAKVFEANPAALYQADNSGLFPIHVPPSVGTTSTVEFFLXKSPSSAGLRNAKGRTFLHVAVEKRRWEIVSFVCQTPSAEWILNMQDKDGNTALHLAIKSGCL

SEQ ID NO: 70846 - protein, 315 aa, Setaria italica
  Transcript Sequence Number=SeqID_4872
  Gene Ontology: Mol. function=pyridoxal phosphate binding; Biological process=metabolic process
  Homolog annotation: Hit_ID=B6UAN7; Match level="QueryCoverage=100%, HitCoverage=65%, E-value=1e-177, Identity=94%"; Hit description =Isopenicillin N epimerase
  Pfam annotation: Domain name=Aminotran_5; Domain location=4-290; Score=-160.4; E_value=0.0011; Accession=PF00266.11; Description =Aminotransferase class-V
VKKSIHAYVARAGATVVEVPLPFPVASADAIIAEFRTALAVAKEGGRRVRLAVIDHITSMPSVVIPVKELVAICREEGVDKVFIDAAHSIGQVPVDVRDIGADFYTSNLHKWFFCPPAVAFLHTRKDDPIASQLHHPVVSHEYGNGLPMESGWIGTRDYSAQLVVSEAIDFVNRFEGGIEGIRTRNHEKVIEMGRMLAEAWGTFLGSPPELCGSMVMVGMPGCLGVESDDDAMRVRTMLRKDFQVEVPIYYNSRRVEGQEMAKDKSGDPVTGYVRISHQVYNVREDYERLRDAINKLVSEGFTSSKLRPSEKQES

SEQ ID NO: 70847 - protein, 81 aa, Setaria italica
  Transcript Sequence Number=SeqID_4873
  Subcellular localization annotation: CTP_CleavageSite=66; ConfidenceScore=5.48e-01
RRTISWRSHRNLWHLGLLGSSGFSASGALTSSVASREALQSTQSSPIMVVPALWPTAALFPPRDATAAAVFAPESLSSAFL

SEQ ID NO: 70848 - protein, 323 aa, Setaria italica
  Transcript Sequence Number=SeqID_4874
  Gene Ontology: Mol. function=binding
  Homolog annotation: Hit_ID=B9SFB9; Match level="QueryCoverage=99%, HitCoverage=54%, E-value=1e-86, Identity=50%"; Hit description =Ubiquitin-protein ligase, putative
  Pfam annotation: Domain name=Arm; Domain location=10-53; Score=15.5; E_value=0.13; Accession=PF00514.15; Description=Armadillobeta -catenin-like repeat
  Pfam annotation: Domain name=Arm; Domain location=145-185; Score =10.7; E_value=0.54; Accession=PF00514.15; Description=Armadillobeta -catenin-like repeat
  Pfam annotation: Domain name=Arm; Domain location=187-228; Score =15.8; E_value=0.12; Accession=PF00514.15; Description=Armadillobeta -catenin-like repeat
  Pfam annotation: Domain name=Arm; Domain location=54-97; Score=8.6; E_ value=0.99; Accession=PF00514.15; Description=Armadillobeta-catenin -like repeat
  Pfam annotation: Domain name=Arm; Domain location=99-143; Score=18.0; E_value=0.038; Accession=PF00514.15; Description=Armadillobeta -catenin-like repeat
  Pfam module annotation: Pfam domain module=Arm::Arm::Arm::Arm::Arm; Domain location=10-53::145-185::187-228::54-97::99-143
RRVLCRLTENSDNAWAVAAHGGVTALLNVCTDHGARGGELVCAACRVLRSLAGVDEIRKYMVADAGAVPALVSLSQGAATDDAARIQAMELLAAIASGDSSAREAVIQEGAVESLVRALDPSSPTRSSKAREVALRAIDAICLSPPTSTDRLLAAGFLDRVLSLLRNGDTTLQHCALKAAHRLCQVSEEIRKAMGDAGFMPEMVSVLRAAKSPEAREMAADTLCAMVSVHRNRKRFVQDDRNVAQVLQLLGPEEEKPTPAKRLLLSTLMHLTDSSSGRRKIMSSEHVRNLEKLAETNVPDAKRIVKKLGGSKLRSIFHGIWSL

SEQ ID NO: 70849 - protein, 75 aa, Setaria italica
  misc_feature (51)..(51): Xaa can be any naturally occurring amino acid
  misc_feature (70)..(70): Xaa can be any naturally occurring amino acid
  Transcript Sequence Number=SeqID_4875
  Gene Ontology: Mol. function=carboxypeptidase activity; Cellular component=integral to membrane; Biological process=proteolysis
  Homolog annotation: Hit_ID=B1PDK9; Match level="QueryCoverage=85%, HitCoverage=8%, E-value=1e-24, Identity=84%"; Hit description =Putative membrane localized peptidase
RRRSLNDHLLLAERSFLQAEGLQGRAWFKHLLYSPPEDYESKLSFFPGIAXAISRSGNLSAEEREVSIQXEVWKV

SEQ ID NO: 70850 - protein, 64 aa, Setaria italica
  Transcript Sequence Number=SeqID_4876
  Gene Ontology: Cellular component=anchored to membrane
  Homolog annotation: Hit_ID=Q6Z4G7; Match level="QueryCoverage=67%, HitCoverage=9%, E-value=1e-16, Identity=90%"; Hit description=COBRA -like protein 6
MEPRCSVLVLALAAALSVAVAYDPLDPNGNITIKWDIMSWTPDGYVAVVTINNFQMYRQIMAPG

SEQ ID NO: 70851 - protein, 88 aa, Setaria italica
  Transcript Sequence Number=SeqID_4877
  Gene Ontology: Cellular component=anchored to membrane
  Homolog annotation: Hit_ID=B6RM83; Match level="QueryCoverage=98%, HitCoverage=18%, E-value=1e-36, Identity=86%"; Hit description=GPI -anchored protein
MVIFFVRCSPLFRVAVAYDPLDPNGNITLKWDVLSWTPDGYVAMVTMSNYQQYRQIMAPGWTVGWSWAKKEVIWSIVGAQATEQGDCS

SEQ ID NO: 70852 - protein, 227 aa, Setaria italica
  Transcript Sequence Number=SeqID_4878
  Gene Ontology: Cellular component=anchored to membrane
  Homolog annotation: Hit_ID=Q6Z4G7; Match level="QueryCoverage=83%, HitCoverage=43%, E-value=1e-82, Identity=78%"; Hit description=COBRA- like protein 6
VSFSSFYNDTIVPCAKCACGCEHKTCVQGDTKRPLAVTGKHEHGHAAAARGHRDREAPLLQCTTHMCPVRVHWHVKLNYKEYWRAKIAITNFNYRMNYTQWTLVAQHPNLDNITEVFSELYKPVVAYGSINDTAMFYGLKYFNDHLMQAGPYGNVQSEVLMRKDASTFTFRQGWAFPRKVYFNGDECQMPPPDAYPYLPNAALPATAASLGTAVAAVVAAFVVLAVV

SEQ ID NO: 70853 - protein, 462 aa, Setaria italica
  misc_feature (438)..(438): Xaa can be any naturally occurring amino acid
  Transcript Sequence Number=SeqID_4879
  Gene Ontology: Cellular component=anchored to membrane
  Homolog annotation: Hit_ID=B6RM83; Match level="QueryCoverage=91%, HitCoverage=91%, E-value=0.0, Identity=81%"; Hit description=GPI -anchored protein
  Pfam annotation: Domain name=COBRA; Domain location=47-211; Score =335.5; E_value=1e-97; Accession=PF04833.7; Description=COBRA-like protein
MGLRDSAALVALVLAVTCSVAVAYDPLDPNGNITLKWDVLSWTPDGYVAMVTMSNYQQYRQIMAPGWTVGWSWAKKEVIWSIVGAQATEQGDCSKFKGGIPHCCKKTPSVVDLLPGVPYNQQIANCCKAGVVSAYGQDPAGSVSAFQVSVGLAGTTNKTVKLPKNFTLMGPGPGYTCGPAKIVPSTVYFTPDRRRKTQALMTWTVTCTYSQQLASRYPSCCVSFSSFYNDTIVPCDRCACGCGHSGGGAHGGRGGRSHGSHGGGGGGAECIAGDSKRALSAGVNTPRKDGAALLQCTPHMCPIRVHWHVKLNYKDYWRAKIAITNFNYRMNYTQWTLVAQHPNLDNVTEVFSFQYKPLLPYGAINDTGMFYGLKFYNDLLMEAGPFGNVQSEVLMRKDARTFTFSQGWAFPRKVYFNGDECQMPPPDAYPYLPNAALXPPRRRSGMVAAAAAAFLLAMLLVA

SEQ ID NO: 70854 - protein, 445 aa, Setaria italica
  misc_feature (238)..(238): Xaa can be any naturally occurring amino acid
  Transcript Sequence Number=SeqID_4880
  Gene Ontology: Mol. function=catalytic activity; Cellular component =integral to membrane; Biological process=sphingolipid metabolic process
  Homolog annotation: Hit_ID=Q9LQ24; Match level="QueryCoverage=99%, HitCoverage=56%, E-value=1e-131, Identity=53%"; Hit description =F14M2.16 protein
  Pfam annotation: Domain name=DUF608; Domain location=19-382; Score =679.4; E_value=3e-201; Accession=PF04685.5; Description=Protein of unknown function, DUF608
AASAAFGPALLPGGEENVGQFMYLEGMEYNMYNTYDVHFYSSFALLALFPQLELSLQRDFAMAVLIHDPRLRHTLDGKTVRRKVLGAVPHDVGLNDPWVELNAYMLHDAARWKDLNPKFVLQVYRDAAATGDAAFAAAAWPAVYVAMAYMDQFDRDGDGMVENDGVPDQTYDIWSVSGVSAYTGGLWVAALQAAAAMARIVGDRAAEAYFMVRYKKARRVYDGELWNGTYFNYDNSGXGATSSSIMADQLAGQWYARACGLEPVVEEAKARSALATVLDYNVMRVKGGAVGAVNGMRPDGAVDASSTQSKEVWPGVTYAVAAAMVHEGMTESAFRTAKGAHDAAWGKDGFGYAFQTPEAWTEDGGYRSLHYMRPLGIWAMQWALSPPELHKDLRAAASEESPADAALGQAQFEKVASMLKLPEEQQPKGYLWAIYNLIRQMVFPA

SEQ ID NO: 70855 - protein, 49 aa, Setaria italica
  Transcript Sequence Number=SeqID_4881
INILVCLKIGLRQNKPCFSSITSLEVKQAHISCMLAHPMSLKFLTCHSV

SEQ ID NO: 70856 - protein, 64 aa, Setaria italica
  Transcript Sequence Number=SeqID_4882
  Gene Ontology: Mol. function=diacylglycerol kinase activity
  Homolog annotation: Hit_ID=A8QM12; Match level="QueryCoverage=100%, HitCoverage=8%, E-value=7e-22, Identity=81%"; Hit description =Diacylglycerol kinase 1
MLDTSWSAVSAYVSEYWSVIIATAVFACVGAATIYYTVNQLNKNISLSLIKALKVRAKRYKKWK

SEQ ID NO: 70857 - protein, 177 aa, Setaria italica
  Transcript Sequence Number=SeqID_4883
  Gene Ontology: Mol. function=protein serine/threonine kinase activity; Biological process=protein amino acid phosphorylation
  Homolog annotation: Hit_ID=B6SP13; Match level="QueryCoverage=100%, HitCoverage=25%, E-value=7e-70, Identity=80%"; Hit description =Receptor-like serine-threonine protein kinase
  Pfam annotation: Domain name=DUF26; Domain location=50-102; Score =90.0; E_value=8.3e-24; Accession=PF01657.9; Description=Domain of unknown function DUF26
GQRCGDSGNYTLNGTYQGNIRRLAATLPKNTSSSPTLFAKDSTGDVPDIVYALALCRGDTNASACGDCVATAFTDAQQVCPYNKDATVFYDPCLLRYSNQNFLASTAGDGRGYALILMNTQNVTAPFSVFDNAVAVLLNAITNYAADNSTKRFGTGVQGFRTFDSNNPRIYGLAQCT

SEQ ID NO: 70858 - protein, 104 aa, Setaria italica
  Transcript Sequence Number=SeqID_4884
  Homolog annotation: Hit_ID=B6SP13; Match level="QueryCoverage=68%, HitCoverage=10%, E-value=7e-11, Identity=49%"; Hit description =Receptor-like serine-threonine protein kinase
  Pfam annotation: Domain name=SKG6; Domain location=28-65; Score=8.8; E_value=0.073; Accession=PF08693.2; Description=Transmembrane alpha -helix domain
IIFKYNSFKILVCVEAQADGLVREINQHLQFPGNMTGRVLAIVLPIVVMMLATVVVCYCLWRRKRKPAGKLLLIDSTNPEDIRSIDSLIIDLAILRATTENFDE

SEQ ID NO: 70859 - protein, 722 aa, Setaria italica
  Transcript Sequence Number=SeqID_4885
  Gene Ontology: Mol. function=protein serine/threonine kinase activity; Biological process=protein amino acid phosphorylation
  Homolog annotation: Hit_ID=B6SP13; Match level="QueryCoverage=96%, HitCoverage=95%, E-value=0.0, Identity=64%"; Hit description =Receptor-like serine-threonine protein kinase
  Pfam annotation: Domain name=DUF26; Domain location=233-285; Score =93.6; E_value=7e-25; Accession=PF01657.9; Description=Domain of unknown function DUF26
  Pfam annotation: Domain name=DUF26; Domain location=80-132; Score =90.0; E_value=8.3e-24; Accession=PF01657.9; Description=Domain of unknown function DUF26
  Pfam annotation: Domain name=Pkinase; Domain location=391-661; Score =185.3; E_value=1.7e-52; Accession=PF00069.17; Description=Protein kinase domain
  Pfam annotation: Domain name=Pkinase_Tyr; Domain location=391-662; Score=112.9; E_value=1.1e-30; Accession=PF07714.9; Description =Protein tyrosine kinase
  Pfam annotation: Domain name=SKG6; Domain location=315-354; Score =10.9; E_value=0.041; Accession=PF08693.2; Description=Transmembrane alpha-helix domain
  Pfam module annotation: Pfam domain module=DUF26::DUF26::Pkinase::Pkin ase_Tyr::SKG6; Domain location=233-285::80-132::391-661::391-662::315- 354
MDAHHHHLPSYLAAALFLAFALAPLAAGDPLGQLCGSVNYTANSTYQNNIQRLALALPKNISSSQALFATASLGVVPDVVYALALCRGDTNASACGDCVATAFTDAQQVCPYNKDATVFYDPCLLRYSNQNFLASTNGGENQLFILMPMPSRNVTTSGKQYEAITSVLDYGDGRGTALILMNTQNVTAPFSVFDNAVAVLLNAITNYAADNSTKRFGTGVEGFRTFDSNNPRIYGLAQCRPDTTPADCRTCLSGIIQQGPKYFSGKQGGRILGLRCNYRYEQYPFFASTPLLQLPEPAVEAPPPAPAPVNGTPPTTGGGGRGNMTGRVLAIVLPIVVMMLATVVVCYCLWRRKRKPAGKLLLIDSTNPEDIRSIDSLIIDLAILRATTENFDEGKKLGEGGFGAVFKGVLPNGREIAVKRLSQSSRQGIKELKTELVLVAKLQHKNLVRLIGVCLEEHEKLLVYEYMPNNSLDTFLFDPDKSIELDWEKRFMIINGIVQGLQYLHEESQLKIVHRDLKASNVLLDSHFNPKISDFGLARLFGSDQSKYVTNRVVGTYGYMAPEYALRGHYSTKSDVFGFGVLMLEIVAGRRNCGSNDSEQYDHLLSLVWGHWTMGTVVEIIDSSLRSHPSVDQMLKCIHIGLLCVQHNPADRPVMSAVNLMLSSSTVPRQAPSRPAFCFQKSGVNSNMYSAAHREQGISQSTSRSDVSVSENELTITELEAR

SEQ ID NO: 70860 - protein, 136 aa, Setaria italica
  Transcript Sequence Number=SeqID_4886
  Gene Ontology: Mol. function=sequence-specific DNA binding; Cellular component=nucleus; Biological process=regulation of transcription, DNA-dependent
  Homolog annotation: Hit_ID=Q94D89; Match level="QueryCoverage=48%, HitCoverage=62%, E-value=2e-31, Identity=78%"; Hit description=WRKY8
  Pfam annotation: Domain name=WRKY; Domain location=67-125; Score =149.3; E_value=1.2e-41; Accession=PF03106.7; Description=WRKY DNA -binding domain
PLGEDAYRSQQQQPWGYQQQQGMDAGSNQAAYGGPFQAGSSDAGAIVAHVPASGGGYSQAQSQRRSSDDGYNWRKYGQKQVKGSENPRSYYKCTFPSCPTKKKVERSLDGQITEIVYKGTHNHAKPQNTRRNSSAA

SEQ ID NO: 70861 - protein, 424 aa, Setaria italica
  Transcript Sequence Number=SeqID_4887
  Gene Ontology: Mol. function=sequence-specific DNA binding; Cellular component=nucleus; Biological process=regulation of transcription, DNA-dependent
  Homolog annotation: Hit_ID=B6SSR9; Match level="QueryCoverage=95%, HitCoverage=85%, E-value=1e-156, Identity=69%"; Hit description =WRKY53-superfamily of TFs having WRKY and zinc finger domains
  Pfam annotation: Domain name=WRKY; Domain location=200-259; Score =144.3; E_value=3.7e-40; Accession=PF03106.7; Description=WRKY DNA -binding domain
  Pfam annotation: Domain name=WRKY; Domain location=346-405; Score =154.4; E_value=3.4e-43; Accession=PF03106.7; Description=WRKY DNA -binding domain
  Pfam module annotation: Pfam domain module=WRKY::WRKY; Domain location=200-259::346-405
MASSTGSLEHGGFTFTPPPFITSFTELLSGSGDMLGAESQDRSPRGLFHRGARGGVPKFKSAQPPSLPISPPPMSPSSYFAIPAGLSPAELLDSPVLLNSCSNLLASPTTGAIPAQRFDWKQAAELIASQSQQDETRAPGGFNDFSFHTAGSNAMPTQTASFPSFKDQQVEAMNKQIVVAASNKASSGGNNCGGNSNTKLEDGYNWRKYGQKQVKGSENPRSYYKCTYNSCSMKKKVERSLADGRITQIVYKGAHNHPKPLSTRRNSSGAAAAEDQALSGATPENSSVTFGDDEADNGSHRSDADEPDAKRWKAEDGENEGSSGSGGKPVREPRLVVQTLSDIDILDDGFRWRKYGQKVVKGNPNPRSYYKCTTPGCPVRKHVERASHDNRAVITTYEGKHNHDVPVGRGAAGRGRRWRRRRRR

SEQ ID NO: 70862 - protein, 111 aa, Setaria italica
  Transcript Sequence Number=SeqID_4888
  Gene Ontology: Mol. function=electron carrier activity; Biological process=response to oxidative stress
  Homolog annotation: Hit_ID=Q5U1G9; Match level="QueryCoverage=34%, HitCoverage=11%, E-value=2e-13, Identity=89%"; Hit description=Class III peroxidase 124
  Subcellular localization annotation: CTP_CleavageSite=33; ConfidenceScore=5.37e-01
QSRSQQPTGQRQRSSSKHERIASSLSGVTGLALARMASSSPCFSLLVLLLAAHCGLLLASAHGYPGGSALSSTFYDASCPSAHDVVRRVIQDARVSDPRIPASLIRLHFHD

SEQ ID NO: 70863 - protein, 125 aa, Setaria italica
  Transcript Sequence Number=SeqID_4889
  Gene Ontology: Mol. function=electron carrier activity; Cellular component=extracellular region; Biological process=response to oxidative stress
  Homolog annotation: Hit_ID=Q9FWI0; Match level="QueryCoverage=68%, HitCoverage=49%, E-value=1e-28, Identity=72%"; Hit description =Peroxidase 53, putative
  Pfam annotation: Domain name=peroxidase; Domain location=52-125; Score=-90.1; E_value=0.006; Accession=PF00141.15; Description =Peroxidase
MAASCFPFPGWLLAAHCTLLLALLLAGGARGHPPALSSTFYDASCPNAQSIVRRVIQDARVSDPRIPASLIRLHFHDCFVQGCDASLLLDDDLPAIQTEKTVPANNNSARGFPVVDDIKRALERA

SEQ ID NO: 70864 - protein, 157 aa, Setaria italica
  Transcript Sequence Number=SeqID_4890
  Pfam annotation: Domain name=DUF569; Domain location=17-145; Score =4.2; E_value=8.1e-07; Accession=PF04601.5; Description=Protein of unknown function (DUF569)
MAPAAAAAAAALAPDAMQQFPEGAHVRLRSRVHGGYLHAGEDGVGVSLSWGRRSSMNAAWQVHRMTIDGTTYVLLHSAAYGRYLAASPHPAPPGHRGHSVVQGDYGEQGVNPILWKPVGSGHAGYVLLRHVSYRFLPANGRYRLWLSGAPVDDFDNQ

SEQ ID NO: 70865 - protein, 42 aa, Setaria italica
  Transcript Sequence Number=SeqID_4891
FTIYYCLGVEVNLQIMATFTTNVTWQQCSLRRILVHEATDFT

SEQ ID NO: 70866 - protein, 93 aa, Setaria italica
  Transcript Sequence Number=SeqID_4892
PASPPPRRRAAARGRSPPWRLEREEEEEEWEAGLTGSHETGFRAPRARDLAVDLGGDFPAPDLVGGWRWATRSGAGRREVSGPAGSGRGKQSW

SEQ ID NO: 70867 - protein, 168 aa, Setaria italica
  Transcript Sequence Number=SeqID_4893
  Gene Ontology: Biological process=protein localization
  Homolog annotation: Hit_ID=A2Q3U6; Match level="QueryCoverage=67%, HitCoverage=62%, E-value=1e-32, Identity=61%"; Hit description =Vacuolar protein sorting-associated protein vps13 (Exp=-1; wgp=0; cg= 1, related)
LPFALKNGRIGKLSIRIPWKKLGWDPIIIVIEDVFVCACPREDSEWSSDSLDKRELAGKLAKLNAIELAKFSRRVTDNQTGQSFLSYISAKILDNIQVSMRNFHIVYMDTHNDQGNFVFGLEFSSLSIQTDTQKQSFTMSLMARSRQDEVNKIIEISDVGIYCHQLEQ

SEQ ID NO: 70868 - protein, 88 aa, Setaria italica
  Transcript Sequence Number=SeqID_4894
  Homolog annotation: Hit_ID=Q7XUL4; Match level="QueryCoverage=97%, HitCoverage=37%, E-value=3e-19, Identity=51%"; Hit description =OSJNBa0010H02.14 protein
  Pfam annotation: Domain name=4HBT; Domain location=2-73; Score=7.6; E_ value=0.067; Accession=PF03061.14; Description=Thioesterase superfamily
PSAREELASRLGISRCSIASTGRAMALSELNLKYFAPLKRGARFVVLVRVVQIKGARMFVDHFVETLPERKLVLEATATVVCLNKDYR

SEQ ID NO: 70869 - protein, 34 aa, Setaria italica
  Transcript Sequence Number=SeqID_4895
FKHEFSCRYLYRGLSTGDRPTCDQCLKIHEKLTE

SEQ ID NO: 70870 - protein, 136 aa, Setaria italica
  Transcript Sequence Number=SeqID_4896
  Gene Ontology: Mol. function=protein binding; Cellular component =cytoskeleton; Biological process=regulation of actin filament polymerization
  Homolog annotation: Hit_ID=A3CCC4; Match level="QueryCoverage=99%, HitCoverage=98%, E-value=9e-70, Identity=93%"; Hit description=Actin- related protein 2/3 complex subunit 5
  Pfam annotation: Domain name=P16-Arc; Domain location=3-135; Score =178.4; E_value=2.1e-50; Accession=PF04699.6; Description=ARP23 complex 16 kDa subunit (p16-Arc)
MASSSAYPDADENLEAIITRIEQKSRKIETLLKQSKPVEALKTALEGSPLKTRDERCKSANWIVVHRAMMAIKDVDGMFNSLDPEYYDILMKYLYRGLSTGDRPTCDQCLKIHEKLTEKAGLGCILRSLADTANTV

SEQ ID NO: 70871 - protein, 136 aa, Setaria italica
  Transcript Sequence Number=SeqID_4897
  Gene Ontology: Mol. function=protein binding; Cellular component =cytoskeleton; Biological process=regulation of actin filament polymerization
  Homolog annotation: Hit_ID=A3CCC4; Match level="QueryCoverage=99%, HitCoverage=98%, E-value=4e-70, Identity=94%"; Hit description=Actin- related protein 2/3 complex subunit 5
  Pfam annotation: Domain name=P16-Arc; Domain location=3-135; Score =178.2; E_value=2.4e-50; Accession=PF04699.6; Description=ARP23 complex 16 kDa subunit (p16-Arc)
MASSAAYPDADENLEAIITRIEQKSRKIETLLKQSKPVEALKTALEGSPLKTRDERCKSANWIVVHRAMMAIRDVDGMFNSLDPEYYDILMKYLYRGLSTGDRPTCDQCLKIHEKLTEKAGLGCILRSLADTGNTV

SEQ ID NO: 70872 - protein, 286 aa, Setaria italica
  misc_feature (83)..(83): Xaa can be any naturally occurring amino acid
  Transcript Sequence Number=SeqID_4898
  Gene Ontology: Mol. function=triacylglycerol lipase activity; Biological process=lipid metabolic process
  Homolog annotation: Hit_ID=Q9MA47; Match level="QueryCoverage=89%, HitCoverage=32%, E-value=8e-37, Identity=51%"; Hit description =T20M3.5 protein
  Pfam annotation: Domain name=Lipase_3; Domain location=50-195; Score =26.8; E_value=4.6e-06; Accession=PF01764.17; Description=Lipase (class 3)
GDNVAWRGHAAAFLKYANVAPEVLRKGRVSQTKREAAYFVIVLHDLSTVVIAIRGTETPEDVITDGLCKECSLTMDDLDGLIXIVESARELYTVLEGQPMHQDKSDTVTAGFLSSLLGDGCECHGYNIDIVGHSLGGSVAALLGIKLYGQFPKLHVYAYGAAPCVDYVIADACSQFVTSIVHNDEFSARLSMNSVIRLRGLAVKALSKASPNSAKVGKLVGGMMNARTDEKNAIEHCAPIGALQIVSEAKLSNDKMHGRNPMHTIRGGLFLFGKAISCLVNTPKYR

SEQ ID NO: 70873 - protein, 69 aa, Setaria italica
  Transcript Sequence Number=SeqID_4899
MQEALLSPANAGSLRSAFELKPFAFGDQRLASPRYLNLACGGTGGDDALFRCSSPFSPSFGFSSPSPLA

SEQ ID NO: 70874 - protein, 236 aa, Setaria italica
  Transcript Sequence Number=SeqID_4900
  Gene Ontology: Mol. function=serine-type endopeptidase activity; Cellular component=cytoplasm; Biological process=proteolysis
  Homolog annotation: Hit_ID=B6U4F7; Match level="QueryCoverage=100%, HitCoverage=30%, E-value=1e-133, Identity=96%"; Hit description =Acylamino-acid-releasing enzyme
  Pfam annotation: Domain name=Abhydrolase_3; Domain location=4-215; Score=-57.5; E_value=0.00076; Accession=PF07859.5; Description =alphabeta hydrolase fold
  Pfam annotation: Domain name=Peptidase_S9; Domain location=17-236; Score=116.7; E_value=7.6e-32; Accession=PF00326.13; Description =Prolyl oligopeptidase family
  Pfam module annotation: Pfam domain module=Abhydrolase_3::Peptidase _S9; Domain location=4-215::17-236
  Subcellular localization annotation: CTP_CleavageSite=35; ConfidenceScore=5.03e-01
NPTIVVLHGGPHSVYPSSYSKSLAFLFSQGYNLLVVNYRGSLGFGEEALQSLPGNIGSQDVNDVLTALDLVIRRGLIDPSKVAVVGGSHGGFLTTHLIGQAPDTFVAAAARNPVCNLQLMVGTTDIPDWCFVEIYGKEGKKYFSESPSVDDLCQFHQKSPISHISKVKTPTLFLLGAQDLRVPVSNGLQYARALKERGIESKTIVFPEDIHGIDKPQSDFESFLNIGVWFKKHLSK

SEQ ID NO: 70875 - protein, 360 aa, Setaria italica
  Transcript Sequence Number=SeqID_4901
  Gene Ontology: Mol. function=nucleotide binding; Biological process =defense response
  Homolog annotation: Hit_ID=Q53MV4; Match level="QueryCoverage=98%, HitCoverage=23%, E-value=9e-59, Identity=38%"; Hit description=NB -ARC domain containing protein
  Pfam annotation: Domain name=LRR_1; Domain location=236-257; Score =9.1; E_value=5.4; Accession=PF00560.25; Description=Leucine Rich Repeat
  Pfam annotation: Domain name=LRR_1; Domain location=309-332; Score =4.9; E_value=35; Accession=PF00560.25; Description=Leucine Rich Repeat
  Pfam annotation: Domain name=LRR_1; Domain location=54-77; Score=2.8; E_value=88; Accession=PF00560.25; Description=Leucine Rich Repeat
  Pfam annotation: Domain name=LRR_1; Domain location=79-101; Score =4.7; E_value=38; Accession=PF00560.25; Description=Leucine Rich Repeat
  Pfam module annotation: Pfam domain module=LRR_1::LRR_1::LRR_1::LRR _1; Domain location=236-257::309-332::54-77::79-101
TSLESLMLVGVYDENFSTKFVKILDQLRYIRVLKISAMPFNAELLLSSVKKFIHLRYLELRFDSDLHKPLPDAICKLYHLQVLDVRHWRGLDDLPKGMSNLVNLRCLFVPGSGSLHSNIYRVGQLKFLQELKEFRVRQENGFEISQLENLNEIRGSLSIFDLENATKKEEAYRARIKDKKHLRKLSLSWGTASISPAVQKEIMEVLKPHDYLDQLCVLNYAAATPSWLRENFSLSNLESLHLQNCAAMQILPPFEEMPFLKTLSLVGMSSLKDVRIDFGCGSANKDTASQSSEEDELELSEIEISKCSALKSIRLHSCKALTKLSINNCEALAFLEGLPSPDQLKHYVVHGCPQLPPGSI

SEQ ID NO: 70876 - protein, 811 aa, Setaria italica
  misc_feature (71)..(71): Xaa can be any naturally occurring amino acid
  misc_feature (105)..(105): Xaa can be any naturally occurring amino acid
  Transcript Sequence Number=SeqID_4902
  Gene Ontology: Mol. function=molecular_function; Cellular component =vacuole; Biological process=sphingolipid metabolic process
  Homolog annotation: Hit_ID=A5D6U2; Match level="QueryCoverage=33%, HitCoverage=26%, E-value=2e-21, Identity=26%"; Hit description =Zgc:162874 protein
  Pfam annotation: Domain name=DUF2404; Domain location=344-434; Score =134.7; E_value=3e-37; Accession=PF10296.1; Description=Putative integral membrane protein con
MALAFLLGFLLGALALAALEAAAALTLVRRLRRRQAAAEEPAADELELPGERPFPYYEKKGSLWILEPRKXPKVSNERLSVGGPKETKDKKNIAEVFPAKKMAKXKGDSLCLSGPDGSQATIELLNCTVLAVSASSMPSRKWAKRYPIKLESKDSEIYNGSKVCYLYTDTSWEKESWCKALRVAATADKEKLNWHAYLSDKFLKYISLLNSEYPCFLKPPVLSGEDHEVTDRTSKTDGSSKVRLFLKKLAKKASAKAPLEGKTSSGSSVQGEKKILDKLRSYQGAPFIEALIGPQEDKLGSSSVQDTVKATAPAAALNHNGQLPASPDVNADDRVADEGTLCWNLLSSRLFFDAKMSDEINKAIKARIQRTLSNMRTPSYVGEITLTDFSLGELPPYVHAMRVLPLDLNELWAFEVDFEYSSGILLHIETRLEVQEPELQKDIMKSNFGADADGEVDSDLLESIEQYGNQLKGSHTSSSLAGEKDEADVSTQSKSTGWTSAYISRWKNILHSIADHVSQVPLSLAIRISSVRGTLRIHVKPPPSDQIWYGFKSMPDLEWDLESSVGDRKITNSHIATLIGSRFKASLRDNLVLPNCESISMPWMLAEKDDWVPRKDAPFIWLNHETTEMRSHATATASTQPEEGGLKDDGSSKRPMPSLPISSAGSEESLKAVASIDEAKQEPVAEASLHSQSSPGPAGESVHSNENDELRRPLLVTEKLQEDASESRVGSPTYTSLRAVIPVGEQPQASASIIGEDAKRKGGRRARMMDFGKRMGDKLEEKRRTIEERGRHIVEKMRENARTNSLERTSS

SEQ ID NO: 70877 - protein, 282 aa, Setaria italica
  misc_feature (192)..(192): Xaa can be any naturally occurring amino acid
  Transcript Sequence Number=SeqID_4903
  Gene Ontology: Mol. function=heme oxygenase (decyclizing) activity; Cellular component=chloroplast; Biological process=inflorescence development
  Homolog annotation: Hit_ID=B6TDC9; Match level="QueryCoverage=75%, HitCoverage=75%, E-value=1e-110, Identity=88%"; Hit description=Heme oxygenase 1
  Pfam annotation: Domain name=Heme_oxygenase; Domain location=75-279; Score=-24.7; E_value=3.3e-05; Accession=PF01126.12; Description=Heme oxygenase
  Subcellular localization annotation: CTP_CleavageSite=57; ConfidenceScore=5.95e-01
MAPAPASLTASRALSPLLAPARVSSGRWSSLSVSVGARPATVTVSVAALTAQRRLVAAAAATEMAPAASGEEGSKPFIEEMRAVAMKLHTKDQAREGEKEPQAPPVAKWEPSVEGYLRFLVDSRLVFQTLEDIVDRATVPWYAEFRNTGLERSEALKKDLEWFKEQGHTIPEPSDPGTTYSSLLEELSEKDXQAFICHFYNVYFAHTAGGRMIGKKVSEKILNKKELEFYKWEGNLTQLLQNVRDKLNQVASSWSREEKDHCLEETEKSFTYSGQLLRHIFT

SEQ ID NO: 70878 - protein, 49 aa, Setaria italica
  Transcript Sequence Number=SeqID_4904
  Gene Ontology: Mol. function=oxidoreductase activity; Cellular component=cytoplasm; Biological process=oxidation reduction
  Homolog annotation: Hit_ID=B6SUG7; Match level="QueryCoverage=100%, HitCoverage=11%, E-value=3e-17, Identity=87%"; Hit description =Mannitol dehydrogenase
IDVAAKHGVTADIEVVGADYVNTAMERLAKADVRYRFVIDIGNTLKSSD

SEQ ID NO: 70879 - protein, 70 aa, Setaria italica
  Transcript Sequence Number=SeqID_4905
  Subcellular localization annotation: CTP_CleavageSite=42; ConfidenceScore=5.58e-01
RFHLLPSSLSSCPALDPLVATAPGSVPRYQSRTTSRPCTLTLAFGGREAGRQSGCGGDASLQWGGVRRQA

SEQ ID NO: 70880 - protein, 75 aa, Setaria italica
  Transcript Sequence Number=SeqID_4906
  Subcellular localization annotation: CTP_CleavageSite=9; ConfidenceScore=5.11e-01
SRSHFLCPRFTSLASGFPLHSDKQEESRVSGTSFLSFFFQQRRHFLDFLMFKCFAKKKRKKKNTDNLGNEWTTQI

SEQ ID NO: 70881 - protein, 328 aa, Setaria italica
  Transcript Sequence Number=SeqID_4907
  Gene Ontology: Mol. function=protein serine/threonine kinase activity; Cellular component=cytoplasm; Biological process=protein amino acid phosphorylation
  Homolog annotation: Hit_ID=B6T606; Match level="QueryCoverage=99%, HitCoverage=98%, E-value=1e-166, Identity=87%"; Hit description=Cell division control protein 2
  Pfam annotation: Domain name=Pkinase; Domain location=30-320; Score =288.7; E_value=1.2e-83; Accession=PF00069.17; Description=Protein kinase domain
  Pfam annotation: Domain name=Pkinase_Tyr; Domain location=30-327; Score=-3.7; E_value=1.8e-13; Accession=PF07714.9; Description =Protein tyrosine kinase
  Pfam module annotation: Pfam domain module=Pkinase::Pkinase_Tyr; Domain location=30-320::30-327
MATLQHQPKPAAAAAPSTTTGGGLRAMDLYEKLEKVGEGTYGKVYKAREKATGRIVALKKTRLPEDDEGVPPTALREVSLLRMLSQDPHVVRLLDLKQGVNKEGQTILYLVFEYMDTDLKKFIRSHRANHEKIPALTVKILMYQLCKGVTFVHGRGVLHRDLKPHNLLMDRKTMALKIADLGLSRAVIAPLKKYTHEILTLWYRAPEVLLGATHYSTPVDMWSVGCIFAELVTNNPLFPGDSELQQLLHIFKLLGTPNEQVWPGVGKLPNWHEYPQWKPTKLSTLVPGLDADGYDLLGKMLEYEPTKRVCAKAALEHPYFNDVNKDLY

SEQ ID NO: 70882 - protein, 54 aa, Setaria italica
  Transcript Sequence Number=SeqID_4908
MGNFASCTLATTPGTGRGARVVLPDGRVRQVPLPATAAELMLEVPGHFLADARA

SEQ ID NO: 70883 - protein, 193 aa, Setaria italica
  Transcript Sequence Number=SeqID_4909
  Homolog annotation: Hit_ID=B6T7T3; Match level="QueryCoverage=100%, HitCoverage=100%, E-value=3e-56, Identity=63%"; Hit description=OHP2
  Subcellular localization annotation: CTP_CleavageSite=34; ConfidenceScore=5.54e-01
MSLAPSIPSIKVKVGGVSVAPPHRACRSSFAVIRSSKAEGPIRRPAAPPLSPPPPMPPKTPALSTPPTLSQPPTPVKPAAPPASSEQPQTPLEQKPVQAAAPSAAVQKPVAGAVTLEYQRKVAKDLQDYFKQKKLEEADQGPPFGFLPKNEISNGRWAMFGFAVGMLTEYATGSDFVQQMKILLSNFGIVDLD

SEQ ID NO: 70884 - protein, 177 aa, Setaria italica
  misc_feature (17)..(17): Xaa can be any naturally occurring amino acid
  Transcript Sequence Number=SeqID_4910
  Gene Ontology: Mol. function=transketolase activity; Cellular component=chloroplast; Biological process=metabolic process
  Homolog annotation: Hit_ID=Q7SIC9; Match level="QueryCoverage=100%, HitCoverage=26%, E-value=3e-80, Identity=81%"; Hit description =Transketolase, chloroplastic
  Pfam annotation: Domain name=Transketolase_C; Domain location=53-170; Score=35.1; E_value=2.8e-07; Accession=PF02780.12; Description =Transketolase, C-terminal domain
PNILVLRPADGNETAGXYKVAVLNRKRPSVLALSMQKLPHLPGTSVEGVEKGGYIISDNSTGNKPDLIMLSTGSELQIAVKAADELRKEGKAVRVVSLVCWELFEEQSDEYKESVLPESVTARISVEAGCTLGWQKYVGTKGKIIGIDRFGASAPGEKIFEEYGITVGSVITAARSL

SEQ ID NO: 70885 - protein, 99 aa, Setaria italica
  Transcript Sequence Number=SeqID_4911
CHLEAMGLSRLMTSLVIVLFTVGLLGLVFWRMHGLPFLSFLLFPILYEEKLQLFADISGRFSPWCVCGKQVHCCCIFITDIICVEKGKKKKKNKLKKKN

SEQ ID NO: 70886 - protein, 657 aa, Setaria italica
  Transcript Sequence Number=SeqID_4912
  Gene Ontology: Mol. function=microtubule motor activity; Cellular component=microtubule associated complex; Biological process =microtubule-based movement
  Homolog annotation: Hit_ID=B6SXM5; Match level="QueryCoverage=100%, HitCoverage=81%, E-value=0.0, Identity=85%"; Hit description=ATP binding protein
  Pfam annotation: Domain name=Kinesin; Domain location=49-380; Score =429.0; E_value=7.5e-126; Accession=PF00225.15; Description=Kinesin motor domain
FMPKEIDDDDDDVISGSQQVPVNNYDVVTSEKESTARENNVAKIKVVVRKRPLNRKELSRKEEDIISVHDSSFLTVYEPKLKVDLTAYVEKHEFCFDAVLDEHVSNDEVYRETVEPIIPIIFQRTKATCFAYGQTGSGKTYTMQPLPLRAAQDMVRLLRQPVYRNQNFKLWLSYFEIYGGKLFDLLSDRRQLLMREDGKKQVCIVGLQEFEVSDVQIVKEYIERGNAARSTGSTGANEESSRSHAILQLAVKKHIVVKDTRRQRDRDANEAKSTKAVGKISFIDLAGSERGADTTDNDRQTRIEGAEINKSLLALKECIRALDNDQIHIPFRGSKLTEVLRDSFVGNSRTVMISCISPNAGSCEHTLNTLRYADRVKSLSKGGNTRKEQSTGPTTASSRDSSSAPSYPLPAEPEEIPNQIQEKRPVDTNRKGTENFISNPSGEPDRNSFSMIPSYSNRGREENGAASSFNDRERYDLKSGQTAYTGKAQLVQNSANTQEEEKATKVSPPRRKAYREDKSDRQSNYAKKDNGPETGRAGYKKQPQQQQRPPSASASSRQSEKESSCDDVEIDAILEEEEALIAAHRKEIENTMEIVREEMNLLAEVDQPGSLIDNYVTQLSFLLSRKAAGLVSLQARLARFQHRLKEQEILSRKKPSR

SEQ ID NO: 70887 - protein, 95 aa, Setaria italica
  Transcript Sequence Number=SeqID_4913
GFVDDLGYSRHDPIFAMRGAMHAVRNDMILLENQIPLFVLDLLLGIQLGNPEQNGAVASLAVRFFDPLMPTDAPLLRKDRSKLESSVGAAAPRRR

SEQ ID NO: 70888 - protein, 362 aa, Setaria italica
  misc_feature (202)..(202): Xaa can be any naturally occurring amino acid
  Transcript Sequence Number=SeqID_4914
  Gene Ontology: Cellular component=plasma membrane
  Homolog annotation: Hit_ID=Q5GAP5; Match level="QueryCoverage=58%, HitCoverage=27%, E-value=5e-14, Identity=30%"; Hit description =Putative paramyosin
  Pfam annotation: Domain name=DUF827; Domain location=1-214; Score= -4.1; E_value=3.9e-10; Accession=PF05701.3; Description=Plant protein of unknown function (DUF827)
VGSWAAVELLRNSIAKEKILLERGQEKLSSNTSLVSHLEDELDQTAQKLETLKDLQKRRKDPSDIFIEIKKMTTEVQQLRSMANDSKSEAMLLAAEIEQAKASISTAEIRCIAAKKMEEAARAAESLALAEIKALLSSQSSFEGDNSSDGVTLSIEEYFTLCSKTLEADENSKKKVGDAMLQVDIANSSESESVKRLEDAKXGEECKKALQEALKRVEAANHGKLAVEEILRRWKSESGHRKRSICGSPKFKNAAHPRKDSHSMDITDDVSDRSFKQTLSIGQILSMKLMGPDGYDKSVWDDKASEMPNISLGQILNRSGVLCREDMAPRKRISGKRKKFALTGLSVLLAKQSKSKKKRESF

SEQ ID NO: 70889 - protein, 318 aa, Setaria italica
  Transcript Sequence Number=SeqID_4915
  Gene Ontology: Mol. function=protein serine/threonine kinase activity; Biological process=protein amino acid phosphorylation
  Homolog annotation: Hit_ID=B6THU2; Match level="QueryCoverage=98%, HitCoverage=48%, E-value=1e-151, Identity=82%"; Hit description =Receptor-like protein kinase RK20-1
  Pfam annotation: Domain name=Pkinase; Domain location=16-283; Score =177.1; E_value=5.1e-50; Accession=PF00069.17; Description=Protein kinase domain
  Pfam annotation: Domain name=Pkinase_Tyr; Domain location=16-285; Score=106.0; E_value=1.2e-28; Accession=PF07714.9; Description =Protein tyrosine kinase
  Pfam module annotation: Pfam domain module=Pkinase::Pkinase_Tyr; Domain location=16-283::16-285
SMMIELSTLRAATGDFDDSNKLGEGGFGAVYKGVLPDGEEVAVKRLSSSSTQGLEQLKNELALVAKLKHKNLVRLVGVCLEQQERLLVYEYVPNRSLDIVLFGAENQLDWEQRYRIINGIARGLQYLHEDSQLKVVHRDLKASNILLDANMNPKISDFGLARIFDRDQTQANTSQIVGTYGYMAPEYVMRGNYSVKSDAFSFGVMVLEIVTGRNNNDSYNSKQSGDLLNTVWEHWEARTVMELVDPSMNGGFPEGDMLRCIHIGLLCVQGDPAVRPVMSSVVMMLGSDTVALQAPSKPAFVTRKGVANTTDSTVSLQG

SEQ ID NO: 70890 - protein, 225 aa, Setaria italica
  misc_feature (10)..(10): Xaa can be any naturally occurring amino acid
  Transcript Sequence Number=SeqID_4916
  Homolog annotation: Hit_ID=B9RAZ9; Match level="QueryCoverage=97%, HitCoverage=64%, E-value=2e-71, Identity=56%"; Hit description =Nucleotide binding protein, putative
  Pfam annotation: Domain name=WD40; Domain location=171-218; Score =6.6; E_value=6.5; Accession=PF00400.24; Description=WD domain, G -beta repeat
  Pfam annotation: Domain name=WD40; Domain location=35-74; Score=18.8; E_value=0.023; Accession=PF00400.24; Description=WD domain, G-beta repeat
  Pfam annotation: Domain name=WD40; Domain location=81-120; Score =25.0; E_value=0.00031; Accession=PF00400.24; Description=WD domain, G-beta repeat
  Pfam module annotation: Pfam domain module=WD40::WD40::WD40; Domain location=171-218::35-74::81-120
LSMCLYVDWXQTAESLSVGLSDGSLSVVSVREDRLEISEQWAAHQFEVWTCYFDRTRPHLLYSGSDDCCFSSWDLRESPSNIVFQNKKSHNMGVCCFAQNPFDGNMLLTGSYDEFLRVWDMRLMAKPVNEKSINLGGGVWRMKYHPSIADVVLAACMHNGFAIVKVGSGDATVMETYCKHESLAYGADWQKNEEAEQNGNSSVVATCSFYDRLIRVWQPENLSEL

SEQ ID NO: 70891 - protein, 45 aa, Setaria italica
  Transcript Sequence Number=SeqID_4917
  Gene Ontology: Mol. function=electron carrier activity; Biological process=cellular aromatic compound metabolic process
  Homolog annotation: Hit_ID=B4FQS1; Match level="QueryCoverage=100%, HitCoverage=16%, E-value=9e-17, Identity=86%"; Hit description=4,5 -DOPA dioxygenase extradiol
PWPDHFYPLHVALGAAGDGAKAEQIHESWTNASISYASYRFTTNN

SEQ ID NO: 70892 - protein, 58 aa, Setaria italica
  Transcript Sequence Number=SeqID_4918
INDICHLSIHLFISNSSDTTSYYLNYRENIIKAAVMQIHYQIIKKCANISISLEVFVL

SEQ ID NO: 70893 - protein, 80 aa, Setaria italica
  Transcript Sequence Number=SeqID_4919
  Gene Ontology: Mol. function=electron carrier activity; Cellular component=cytoplasm; Biological process=cellular aromatic compound metabolic process
  Homolog annotation: Hit_ID=B4FQS1; Match level="QueryCoverage=85%, HitCoverage=25%, E-value=8e-28, Identity=85%"; Hit description=4,5 -DOPA dioxygenase extradiol
SLNFSSLILNQLFATVLVQLKYPAPGAPDLALRTKDLLEQAGFGPVKEEHSRGLDHGAWVPLILMYPDADIPVCQLSVQT

SEQ ID NO: 70894 - protein, 292 aa, Setaria italica
  Transcript Sequence Number=SeqID_4920
  Homolog annotation: Hit_ID=Q10SR6; Match level="QueryCoverage=79%, HitCoverage=49%, E-value=4e-28, Identity=36%"; Hit description=F-box domain containing protein, expressed
PQMERYGDMTEYSKLSRLRGGASGVGAAVTVGPAAAGAITVVLALESKHLVAHATTGDQRWTLSASRLPRVLGRTVSFHGNLYAVTPKFRQTNSVHIWQIDPPELDAAEGRTLLPPRIIAHCPLAAIPDAVHLVECGSELMVVGFNDSKRTDLAVYRVADLISGRVVPITNIGEHALFLGTRPLYASQNKGLPSVVANSITCRYRVTKNDALRGGRPFRITEQYHIGTGTWSPATDEGISCWNEPPASPYMLIHHIFTCCQHSYWNKGLIFHDKIKLDWSVKPNLWMYGLMD

SEQ ID NO: 70895 - protein, 320 aa, Setaria italica
  Transcript Sequence Number=SeqID_4921
  Gene Ontology: Mol. function=electron carrier activity; Cellular component=cytoplasm; Biological process=cellular aromatic compound metabolic process
  Homolog annotation: Hit_ID=B4FQS1; Match level="QueryCoverage=83%, HitCoverage=100%, E-value=1e-125, Identity=80%"; Hit description=4,5- DOPA dioxygenase extradiol
  Pfam annotation: Domain name=LigB; Domain location=55-317; Score =294.7; E_value=2e-85; Accession=PF02900.10; Description=Catalytic LigB subunit of aromatic ring-opening dioxygenase
MGQNQARAAAARPKPGARHATREDEGQKRGSIGRPGDATTTAAGAEEGAPGPAMDTFFLSHGAPTLVIDDVPVRHLFESWLPERVAGDRPPRAILVVSGHWETATPAVNVIRGTNDTIYDFNGIPFPEPMYQLKYPAPGAPDLALRTKDLLEQAGFGPVEEDHSRGLDHGAWVPLLLMYPDADIPVWQLSVQTDRDGTYHYNLGKALAPLREEGVLIFGSGNAAHNLHKLGPMIGSPVPQWAAEFDTWLKDSLLNGRYEDVNRYEEKAPHGKLAHPLPDHLYPLHVALGAAGDGAKAEQIHESWTHGTISYASYRFTANS

SEQ ID NO: 70896 - protein, 52 aa, Setaria italica
  Transcript Sequence Number=SeqID_4922
MASPPSPPHAEGGASAGAVCCMCGDQGLPDELVRCRRCRVRLQHRYCSRPLP

SEQ ID NO: 70897 - protein, 155 aa, Setaria italica
  Transcript Sequence Number=SeqID_4923
MLVEAIPALWSAVHGWFTPAVLFVVLNIVIGTIAVTSKAAAPADGAAAEGEGAASGAGAGAGGGEEPYRKLSRVPSMAFERLRSFNLNRFAAPGPEPAVAGEVDLGYEEQPPAPAVEKEEPVGEREREVEPEPEPEQEPVNEHAAAHINREDEDR

SEQ ID NO: 70898 - protein, 198 aa, Setaria italica
  Transcript Sequence Number=SeqID_4924
ILGGRWAAAAASAASVVLLLLPLFMLTALVRRMGQYLPLLHRALLLAQAYLAIYFATLALAAAATGLEPLRFFHAASPAAYAWTQAAQSLGFMGYLVLQMVDLVAVFSGAASPEEDGNGDATKALGLAQMVVGLAVGLHYYAAVFHRAAAGEAPRANWRVYAVYAACFVVVCACARAERRKKAYLAGTDGAAEEWKKS

SEQ ID NO: 70899 - protein, 398 aa, Setaria italica
  Transcript Sequence Number=SeqID_4925
  Gene Ontology: Mol. function=binding; Biological process=DNA integration
  Homolog annotation: Hit_ID=Q84YE2; Match level="QueryCoverage=100%, HitCoverage=92%, E-value=1e-126, Identity=60%"; Hit description =Ankyrin-like protein-like protein
  Pfam annotation: Domain name=Ank; Domain location=123-152; Score =11.4; E_value=0.82; Accession=PF00023.22; Description=Ankyrin repeat
  Pfam annotation: Domain name=Ank; Domain location=153-185; Score =14.1; E_value=0.34; Accession=PF00023.22; Description=Ankyrin repeat
  Pfam annotation: Domain name=Ank; Domain location=186-216; Score =17.2; E_value=0.068; Accession=PF00023.22; Description=Ankyrin repeat
  Pfam annotation: Domain name=Ank; Domain location=21-54; Score=16.6; E_value=0.1; Accession=PF00023.22; Description=Ankyrin repeat
  Pfam annotation: Domain name=Ank; Domain location=55-87; Score=35.2; E_value=2.7e-07; Accession=PF00023.22; Description=Ankyrin repeat
  Pfam annotation: Domain name=Ank; Domain location=88-120; Score=37.4; E_value=5.9e-08; Accession=PF00023.22; Description=Ankyrin repeat
  Pfam annotation: Domain name=TPR_1; Domain location=275-308; Score =13.0; E_value=0.16; Accession=PF00515.20; Description=Tetratricopepti de repeat
  Pfam annotation: Domain name=TPR_1; Domain location=344-377; Score =24.9; E_value=0.00034; Accession=PF00515.20; Description =Tetratricopeptide repeat
  Pfam annotation: Domain name=TPR_2; Domain location=275-308; Score =17.0; E_value=0.082; Accession=PF07719.9; Description=Tetratricopepti de repeat
  Pfam annotation: Domain name=TPR_2; Domain location=344-377; Score =30.6; E_value=6.3e-06; Accession=PF07719.9; Description =Tetratricopeptide repeat
  Pfam module annotation: Pfam domain module=Ank::Ank::Ank::Ank::Ank::An k::TPR_1::TPR_1::TPR_2::TPR_2; Domain location=123-152::153-185::186 -216::21-54::55-87::88-120::275-308::344-377::275-308::344-377
ATALDAGKGRIREAVEAVTSRGAGVLHAAAGSGRMSMCAYLVEELLVDVNATDDSGDTPLAYAVRSGTLDIVQYLLDHDANPDKPNGKGSTALHLAAAGGNCDIVKALLSNGANVDSFCDTGTPLHMAAFFKQDGAMKILLDRGADCNKVFNTVCTPLFVSLTAGSLKCVKLLIKAGADVKGVGSVTPLITAVSNGLTDFYNCLLEAGADPDVRDDFGHLPIEIAAYENRRKDVEILLPVTSRVPYVRDWSVEGIISYVKSMPSVKDDPMYKMKPDDLKLEGNKAYKRKDYATAAKLYSMAADQCPDDDSTLYSNRCLCWLKMGLGDQALSDSGICRMQRPGWAKACYLQGAARMLLKDYEKACDAFLDGLKLDPANVEIDKALCEAINCLKTSGTTK

SEQ ID NO: 70900 - protein, 180 aa, Setaria italica
  misc_feature (156)..(156): Xaa can be any naturally occurring amino acid
  Transcript Sequence Number=SeqID_4926
  Gene Ontology: Cellular component=plasma membrane
  Homolog annotation: Hit_ID=B6U178; Match level="QueryCoverage=100%, HitCoverage=32%, E-value=2e-90, Identity=92%"; Hit description =Protein binding protein
  Pfam annotation: Domain name=Ank; Domain location=123-155; Score =20.7; E_value=0.0061; Accession=PF00023.22; Description=Ankyrin repeat
  Pfam annotation: Domain name=Ank; Domain location=21-53; Score=15.4; E_value=0.22; Accession=PF00023.22; Description=Ankyrin repeat
  Pfam annotation: Domain name=Ank; Domain location=55-87; Score=13.7; E_value=0.39; Accession=PF00023.22; Description=Ankyrin repeat
  Pfam annotation: Domain name=Ank; Domain location=89-121; Score=34.2; E_value=5.3e-07; Accession=PF00023.22; Description=Ankyrin repeat
  Pfam module annotation: Pfam domain module=Ank::Ank::Ank::Ank; Domain location=123-155::21-53::55-87::89-121
EVVREILKVSDVQTAGIKASNSFDAFHIAAKQGHLEVLKEMLQAFPALAMTTNSVNATALDTAAIQGHVDIVNLLLETDASLARIARNNGKTVLHSAARMGHVEVVRSLLNKDPSIGLRTDKKGQTALHMASKGQNAEIVVELLKPDTSVVHIEDXQGNRPLHVASRRDIIIVQTLLSVE

SEQ ID NO: 70901 - protein, 220 aa, Setaria italica
  Transcript Sequence Number=SeqID_4927
  Gene Ontology: Mol. function=pyrroline-5-carboxylate reductase activity; Cellular component=cytoplasm; Biological process=amino acid biosynthetic process
  Homolog annotation: Hit_ID=Q4TZJ2; Match level="QueryCoverage=97%, HitCoverage=74%, E-value=1e-104, Identity=88%"; Hit description =Pyrroline-5-carboxylate reductase
  Pfam annotation: Domain name=F420_oxidored; Domain location=2-204; Score=208.6; E_value=1.7e-59; Accession=PF03807.9; Description=NADP oxidoreductase coenzyme F420-dependent
PIRTRSLLDTNTQVVDESDVIVISVKPQIVKQVLLELKPLLSDEKLLVSIAAGIKMKDLQDWSGQRRIIRVMPNTPSAVGQAASVMCLGEMATQKDENRVKSLFSAIGKVWTAEEKYFDAVTGLSGSGPAYIFLAIEAMADGGVAAGLPRDLALGLASQTVLGAATMVSQTGKHPGQLKDQVTSPAGTTIAGVQELEKGAFRGTLISAVVAAAKRCRELS

SEQ ID NO: 70902 - protein, 250 aa, Setaria italica
  Transcript Sequence Number=SeqID_4928
  Gene Ontology: Mol. function=sequence-specific DNA binding; Cellular component=intracellular; Biological process=regulation of transcription, DNA-dependent
  Homolog annotation: Hit_ID=A6BLW4; Match level="QueryCoverage=89%, HitCoverage=91%, E-value=2e-65, Identity=60%"; Hit description=HAP5 subunit of HAP complex
  Pfam annotation: Domain name=CBFD_NFYB_HMF; Domain location=73-137; Score=88.1; E_value=3.1e-23; Accession=PF00808.15; Description =Histone-like transcription factor (CBFNF-Y) and archaeal histone
  Pfam annotation: Domain name=Histone; Domain location=67-140; Score =51.2; E_value=4e-12; Accession=PF00125.16; Description=Core histone H2AH2BH3H4
  Pfam module annotation: Pfam domain module=CBFD_NFYB_HMF::Histone; Domain location=73-137::67-140
QPIESMDNQPLPYSTGQPPATGGAPVPGVPGAAGPPPVPHHHLLQQQQAQLQAFWGYQRQEAERASASDFKNHQLPLARIKKIMKADEDVRMISAEAPVLFAKACELFILELTIRSWLHAEENKRRTLQRNDVAAAIARTDVFDFLVDIVPREEAKEEPGSALGFAAAGPGAVGGGAAPAAGMPYYYPPMGQPAPMMPAWQVPAWDPAWQQGAAPDVDQSASYGEEGQGFAAAGHGGAASFHPPAPPSSE

SEQ ID NO: 70903 - protein, 374 aa, Setaria italica
  misc_feature (233)..(233): Xaa can be any naturally occurring amino acid
  Transcript Sequence Number=SeqID_4929
  Gene Ontology: Cellular component=membrane
  Homolog annotation: Hit_ID=B9STH7; Match level="QueryCoverage=95%, HitCoverage=96%, E-value=1e-109, Identity=52%"; Hit description =Auxin-induced protein 5NG4, putative
  Pfam annotation: Domain name=DUF6; Domain location=200-329; Score =68.6; E_value=2.3e-17; Accession=PF00892.12; Description=Integral membrane protein DUF6
  Pfam annotation: Domain name=DUF6; Domain location=26-159; Score =23.6; E_value=0.00083; Accession=PF00892.12; Description=Integral membrane protein DUF6
  Pfam annotation: Domain name=TPT; Domain location=191-329; Score= -18.5; E_value=0.0077; Accession=PF03151.8; Description=Triose -phosphate Transporter family
  Pfam module annotation: Pfam domain module=DUF6::DUF6::TPT; Domain location=200-329::26-159::191-329
MALEVAEKGGVWRRYAPHVQMVLAQLCYTLMYFITEAAFNRGLNPYVYVTYRHLLVAVLIWPFAYYHERGLRPKMTFMLFMEIFVLSLLGVSLTLNMYFASLKYTSPTFVTSMVNTIASMTFVIAIILRMEIVDAKSLRGLAKIAGTVVSFAGVTTMTLYKGAAIKCLWNSPVHIHGGGGGAVAHDSWVKGSVLAVASCICWSIWYIMQASSLKRYPAQLSLTAWMCTVGGVXSTVFTVFMQHKPEDWLIGFGLKFWCIVYSGLACNGFTVFVQLWCTEKKGPVFVTMFNPLSTIMVAILAYFIFGENLYVGSIIGGVVVILGLYMLLWGKEKDQVHGASKDQELELDCEKQARKARDVYAVQQNGTEAPMTVK

SEQ ID NO: 70904 - protein, 68 aa, Setaria italica
  Transcript Sequence Number=SeqID_4930
GRSRARASDRARARARRMVQDRRREEAKLTRLTSVPAANRTVSTEPAERLGFSAQPKKAQPTVSAHGL

SEQ ID NO: 70905 - protein, 146 aa, Setaria italica
  misc_feature (15)..(15): Xaa can be any naturally occurring amino acid
  Transcript Sequence Number=SeqID_4931
PVHFPVVLRLGFPPXANLTRSFVTGRLESVDTITPIDPLSLVAYAEEGYAYAESASCPPPPAGRLDALQVFENRTFSCAYLNSMLKSPFRLHYQSGSESTASSLGLHQRYMYVNRMQCKDDGAVRAYVVFTNQTEASRYYFMLGEK

SEQ ID NO: 70906 - protein, 228 aa, Setaria italica
  Transcript Sequence Number=SeqID_4932
MADNEKEVGEGTTPRGADWEVVTLTASAYEAAPGPAGTEAKPVNEEHSSSNELLMSGHFVFPPSEHENLPIQTRLYEIQPEKDVQEVSTGVEDYSIKNDAGSERVQFYDEGRNLSADDVEMRETSHDEDDGHGFVAQDDDNEAGDGSDEQSGQPFKPADSKSHDAGASCKCWLKKHMTCLYHQAKETNAIWSVVVAAALVGIVILGRWHKDKLHLGHLKWRSGSAVRG

SEQ ID NO: 70907 - protein, 114 aa, Setaria italica
  Transcript Sequence Number=SeqID_4933
  Homolog annotation: Hit_ID=B4G1F2; Match level="QueryCoverage=86%, HitCoverage=51%, E-value=2e-16, Identity=51%"; Hit description=39S ribosomal protein L12
MASTMLRSGHRLFLRRQRLSAAFSTASAEELIDVRKLPTDYDPSTFDPSSPSRPPPSDRVWRLVEDVSFLTLAESAALSSLLLRRLNIPSAPPIAILNSAAGLGGGAAATAGAA

SEQ ID NO: 70908 - protein, 202 aa, Setaria italica
  misc_feature (12)..(12): Xaa can be any naturally occurring amino acid
  misc_feature (181)..(181): Xaa can be any naturally occurring amino acid
  Transcript Sequence Number=SeqID_4934
  Gene Ontology: Mol. function=glycerophosphodiester phosphodiesterase activity; Cellular component=anchored to membrane; Biological process=glycerol metabolic process
  Homolog annotation: Hit_ID=Q9FZI0; Match level="QueryCoverage=96%, HitCoverage=18%, E-value=9e-42, Identity=44%"; Hit description =F1O19.6 protein
MASSFQDHKLNXGEYILSKVKEFGFNVVPSPEVGFLKTLGGKLGKSNVKLVLQFLDEQVTEPSTKQTYGAILKDLKSIKTFASGILVPKTYIWPVNKDHYLQPATNLVKDAHALGLEVYAFKFANDDISSYNYSYDPSAEYLQFIDNSDFSVDGVLTDFPSTASAAVACLAHTKHNPLPPXPGNDTRPLIITHNGASGIFLV

SEQ ID NO: 70909 - protein, 344 aa, Setaria italica
  Transcript Sequence Number=SeqID_4935
  Gene Ontology: Mol. function=zinc ion binding
  Homolog annotation: Hit_ID=B6SYA5; Match level="QueryCoverage=94%, HitCoverage=68%, E-value=1e-118, Identity=63%"; Hit description =Protein binding protein
  Pfam annotation: Domain name=zf-C3HC4; Domain location=89-136; Score =59.9; E_value=9.4e-15; Accession=PF00097.17; Description=Zinc finger, C3HC4 type (RING finger)
  Subcellular localization annotation: CTP_CleavageSite=56; ConfidenceScore=5.43e-01
MPLTTKSSASCTAAEPALHICRSQSLPMNMKKFNAKSFKRMDSLGGMYRVVPSTPRAPAASNVIPDIVPSESGVGEDDGEDIPEEEAVCRICMVELSEGNDTLKLECSCKGELALAHKDCAMKWFSIKGTRTCEVCKQDVQNLPVTLLRVQSVQREANRVGNGGSRSRYDRYRVWHGTPILVIISILAYFCFLEQLLVGHDGIAALAISLPFSCILGLFSSLTTTSMVARRYVWIYAAVQFLFVVFFTHLFYRYLHLQAVISIILATFAGFGVGMTGNSIIVEILRWRMRRRAPPTQARRDRRARAAQQHAPASDQPSGQSSVAAGGQNDTVTSDVENPAVPQA

SEQ ID NO: 70910 - protein, 153 aa, Setaria italica
  misc_feature (33)..(33): Xaa can be any naturally occurring amino acid
  Transcript Sequence Number=SeqID_4936
  Gene Ontology: Mol. function=electron carrier activity; Cellular component=integral to membrane; Biological process=oxidation reduction
  Homolog annotation: Hit_ID=C0J4N7; Match level="QueryCoverage=72%, HitCoverage=13%, E-value=8e-58, Identity=98%"; Hit description =Respiratory burst oxidase protein B variant beta
LLVDLVHLHLPAAAERVEQLHCKLSRLKEQAEXYAALIMEELDPEGLGYIELWQLETLLLQKDTYVNYSQALSYTSQALSQNLAGLRKKSPIRKISTTLSYYLEDNWKRLWVLALWIGIMAGLFTWKFMQYRNSMPKHHYMVEKYKGCMGITI

SEQ ID NO: 70911 - protein, 42 aa, Setaria italica
  Transcript Sequence Number=SeqID_4937
  Gene Ontology: Mol. function=electron carrier activity; Cellular component=integral to membrane
  Homolog annotation: Hit_ID=A1YBM1; Match level="QueryCoverage=85%, HitCoverage=3%, E-value=1e-13, Identity=91%"; Hit description =Respiratory burst oxidase protein B
LLLLCTGVFYCGAPVLAQELSKLCYEFNGKSTTKFEFRKEHF

SEQ ID NO: 70912 - protein, 117 aa, Setaria italica
  misc_feature (37)..(37): Xaa can be any naturally occurring amino acid
  misc_feature (78)..(78): Xaa can be any naturally occurring amino acid
  Transcript Sequence Number=SeqID_4938
  Gene Ontology: Mol. function=electron carrier activity; Cellular component=integral to membrane; Biological process=oxidation reduction
  Homolog annotation: Hit_ID=A2VB85; Match level="QueryCoverage=85%, HitCoverage=10%, E-value=3e-49, Identity=91%"; Hit description =Respiratory burst oxidase homologue A
TGFNAFWYSHHLFIIVYIALVIHGECLYLIHDWYKKXTWMYLSVPVGLYVGERTLRFFRSGSYSVRLLKVAIYPGNVXLTLQMSKPPTFRYKSGQYMFVQVDPRLVYNPLEIGQYLY

SEQ ID NO: 70913 - protein, 82 aa, Setaria italica
  Transcript Sequence Number=SeqID_4939
  Subcellular localization annotation: CTP_CleavageSite=55; ConfidenceScore=5.73e-01
QCRRSAPSPAAPPVSLASSASAAVQPRHHHPLRSPPRRTSRMCCSLFNYDGSHVYCTTPSSLSICALTVLSFSSNRSRCCNW

SEQ ID NO: 70914 - protein, 551 aa, Setaria italica
  misc_feature (24)..(24): Xaa can be any naturally occurring amino acid
  Transcript Sequence Number=SeqID_4940
  Gene Ontology: Mol. function=electron carrier activity; Cellular component=integral to membrane; Biological process=oxidation reduction
  Homolog annotation: Hit_ID=C0J4N7; Match level="QueryCoverage=99%, HitCoverage=64%, E-value=0.0, Identity=91%"; Hit description =Respiratory burst oxidase protein B variant beta
  Pfam annotation: Domain name=FAD_binding_8; Domain location=458-551; Score=132.1; E_value=1.8e-36; Accession=PF08022.4; Description=FAD -binding domain
  Pfam annotation: Domain name=Ferric_reduct; Domain location=261-417; Score=161.3; E_value=3e-45; Accession=PF01794.11; Description=Ferric reductase like transmembrane component
  Pfam annotation: Domain name=NADPH_Ox; Domain location=4-102; Score =219.5; E_value=8.7e-63; Accession=PF08414.2; Description=Respiratory burst NADPH oxidase
  Pfam annotation: Domain name=efhand; Domain location=103-131; Score =23.3; E_value=0.001; Accession=PF00036.24; Description=EF hand
  Pfam module annotation: Pfam domain module=FAD_binding_8::Ferric _reduct::NADPH_Ox::efhand; Domain location=458-551::261-417::4 -102::103-131
RRAQLDRTKSGAQRAIRGLRFISXNKASNAWMEVQANFDRLACDGYLSRDDFPECIGMMESQEFAMELFDTLSRRRQMQVDKINKEELREIWQQITDNSFDSRLQIFFDMVDKNADGHITEAEVKEIIMLSASANKLSRLKEQAEEYAALIMEELDPEGLGYIELWQLETLLLQKDTYVNYSQALSYTSQALSQNLAGLRKRSPIRKISTTLSYYLEDNWKRLWVLALWIGIMAGLFTWKFMQYRNRYVFNVMGYCVTTAKGAAETLKLNMAIILLPVCRNTITWLRNTRAAWALPFDDNINFHKTIAAAIVVGIILHAGNHLVCDFPRLISSPEAKYAPLHEYFGEIKPTYFTLVKGVEGITGLIMVICMVIAFTLATRWFRRSLVKLPRPFDKLTGFNAFWYSHHLFIIVYIALVIHGECLYLIHDWYKKTTWMYLSVPVGLYVGERTLRFFRSGSYSVRLLKVAIYPGNVLTLQMSKPPTFRYKSGQYMFVQCPAVSPFEWHPFSITSAPGDDYLSIHVRQLGDWTRELKRIFSAACEPPVGGKSGLL

SEQ ID NO: 70915 - protein, 118 aa, Setaria italica
  Transcript Sequence Number=SeqID_4941
  Gene Ontology: Mol. function=electron carrier activity; Cellular component=integral to membrane; Biological process=oxidation reduction
  Homolog annotation: Hit_ID=A1YBM1; Match level="QueryCoverage=100%, HitCoverage=12%, E-value=4e-65, Identity=98%"; Hit description =Respiratory burst oxidase protein B
  Pfam annotation: Domain name=NAD_binding_6; Domain location=1-101; Score=80.0; E_value=8.5e-21; Accession=PF08030.4; Description=Ferric reductase NAD binding domain
KGVMNEIAELDQRNIIEMHNYLTSVYEEGDARSALITMLQTLNHAKNGVDIVSGTKVRTHFARPNWKKVLSKIASKHPYAKIGVFYCGAPVLAQELNKLCHEFNGKSTTKFEFHKEHF

SEQ ID NO: 70916 - protein, 353 aa, Setaria italica
  Transcript Sequence Number=SeqID_4942
  Gene Ontology: Mol. function=electron carrier activity; Cellular component=integral to membrane; Biological process=oxidation reduction
  Homolog annotation: Hit_ID=A1YBM1; Match level="QueryCoverage=96%, HitCoverage=35%, E-value=0.0, Identity=92%"; Hit description =Respiratory burst oxidase protein B
  Pfam annotation: Domain name=FAD_binding_8; Domain location=27-143; Score=203.9; E_value=4.2e-58; Accession=PF08022.4; Description=FAD -binding domain
  Pfam annotation: Domain name=NAD_binding_6; Domain location=149-336; Score=260.6; E_value=3.8e-75; Accession=PF08030.4; Description =Ferric reductase NAD binding domain
  Pfam module annotation: Pfam domain module=FAD_binding_8::NAD_binding_ 6; Domain location=27-143::149-336
  Subcellular localization annotation: CTP_CleavageSite=45; ConfidenceScore=5.06e-01
CYSWSVVLVLSLSNIGERTLRFFRSGSYSVRLLKVAIYPGNVLTLQMSKPPTFRYKSGQYMFVQCPAVSPFEWHPFSITSAPGDDYLSIHVRQLGDWTRELKRIFSAACEPPVGGKSGLLRADETTKKALPKLLIDGPYGSPAQDYSKYDVLLLVGLGIGATPFISILKDLLNNIIKVEEEEEASSDLYPPIGRSKAHVDLDTLMRITSKPKRVLKTTNAYFYWVTREQGSFDWFKGVMNEIAELDQRNIIEMHNYLTSVFEEGDARSALITMLQALNHAKNGVDIVSGTKVRTHFARPNFKKVLSKIATKHPYAKIGVFYCGAPVLAQELSKLCYEFNGKSTTKFEFRKEHF

SEQ ID NO: 70917 - protein, 451 aa, Setaria italica
  Transcript Sequence Number=SeqID_4943
  Gene Ontology: Mol. function=galactosylgalactosylxylosylprotein 3 -beta-glucuronosyltransferase activity; Cellular component=membrane
  Homolog annotation: Hit_ID=B6U841; Match level="QueryCoverage=100%, HitCoverage=100%, E-value=0.0, Identity=78%"; Hit description =Galactosylgalactosylxylosylprotein 3-beta-glucuronosyltransferase 1
  Pfam annotation: Domain name=Glyco_transf_43; Domain location=216 -429; Score=196.4; E_value=8.1e-56; Accession=PF03360.8; Description =Glycosyltransferase family 43
  Pfam annotation: Domain name=UPF0154; Domain location=91-150; Score= -7.2; E_value=0.042; Accession=PF03672.5; Description=Uncharacterised protein family (UPF0154)
  Pfam module annotation: Pfam domain module=Glyco_transf_43::UPF0154; Domain location=216-429::91-150
MVSTRRNSGIILREGPVRDWSEFNDPSPSPKLLYSQSYVAMRGLLASVVSLDFFLLSSKLKSAWAGMTSHRHIRSQERSKTRGLSCKRAAIHLLLCFMVGIFIGFMPFFSVDVYKKIVSENERLPFHENVIEAEMMDTKVKELETVVVEKEVELIDEPEVGESPPVPAMLDDEADFAESTRALPAIKESDIAVKKLLIIVTITSVRPQQPYYLNRLAHVLKDVHAPLLWLVVEWPEQSYETAEILRSSGVMYRHLICRKNTTSVRKIAVCQRNNAIYHVKKHHLDGIMHFADEERSYSADVFEEMQKIRRFGSWPVAIHVGTKYRAVLEGPICKGSRVTGWHTIQTALKKSMIRRFPIGFSAFAFNSTMLWDPQRWNRPAMDSVIVHSGGRGGLQESRFIEKLVKNERQIEGLPDNCNRVMVWNFNLEPPQLNYPTGWALYKYLEANMPVI

SEQ ID NO: 70918 - protein, 148 aa, Setaria italica
  Transcript Sequence Number=SeqID_4944
LVQIVPPIRWRRRHPRHRRRRRRTSGACTQLRPPPRITYARQSQLCEASNLLPVEHNSRFPAEAAPVLEGQGRPALQNTRRRRGRGSSPSPTARRRASGGKGDAKRRRGAGRRSLTALRGRGTGEAGSSGAGHALICACVEEEAAVAG

SEQ ID NO: 70919 - protein, 113 aa, Setaria italica
  Transcript Sequence Number=SeqID_4945
  Gene Ontology: Cellular component=integral to membrane
  Homolog annotation: Hit_ID=B6SNJ7; Match level="QueryCoverage=100%, HitCoverage=71%, E-value=4e-20, Identity=47%"; Hit description =Threonine endopeptidase
LKINQLRLAAARFSKESNSDEDDDLLSELRDKWDAIENKSSLLLYGGGAVLAVWISLVVVRALDSVPLLPGLLELVGLSYSGWFVYRYLLFQENRKELADNLDDLKKRITGDE

SEQ ID NO: 70920 - protein, 73 aa, Setaria italica
  Transcript Sequence Number=SeqID_4946
  Homolog annotation: Hit_ID=Q6AU09; Match level="QueryCoverage=58%, HitCoverage=3%, E-value=1e-09, Identity=74%"; Hit description=Fip1 motif family protein, expressed
QDRHPRRVNDVRRHHDAEERNLRRKDEFSRDGKPDVERSHLPSLGAYLEELLHQIQGVSADLCCYQTCLYYFH

SEQ ID NO: 70921 - protein, 817 aa, Setaria italica
  Transcript Sequence Number=SeqID_4947
  Gene Ontology: Mol. function=identical protein binding
  Homolog annotation: Hit_ID=Q6AU09; Match level="QueryCoverage=99%, HitCoverage=58%, E-value=0.0, Identity=66%"; Hit description=Fip1 motif family protein, expressed
MDDETVDQTEKDSQGGNKKGSHDVEEDKPYPSDKINNSSHNSNLGIKTEHKRQLPVSSESDMLSTGVNVNAHSPPSYKTRGSPRGARSLKGRSLGQNSIREIESSNEVIPRQSSSKRRHDSRRENPVEGQETKVDSEGSLVAADDVADKLSTEDHFDDNDDDGRLALVDSVEVDGDDATSEPPSDTNEDDILDHSGKKQKPISMVEQPAGHNSSEPDELRTSENSKGRSGSSKDQQKRLESGEEVLQDRHPRRVNDVRRHHDAEERNLRRKDEFSRDGKPDVERSHLPSRGREDPHQTYANRDRVDIRSRSYDRVRETEIWPRREDSVHGRRGKEEDLRLEYNAEVGARHNRNKARPTDRNDRDEDLHSRKRLDDGDWRGSRQRERGDVVLNRRESLDDSHIKRNKDDENLRRMKPENEDMVPGYRARDDNNRRKRERDDGVDQKRRDDSGRMREKVDDRHHAKHKDDNWRQREREDRQRPKHENALTLQREEGRGTGRGRVMDDKLVSGGKKKDELRSSVLSKEPQERTRQNEPSRRGQGAEENSLQNKGRSDVHPRDDNSNSERSSRQEKQNNNRLSGSSDARHAGRDRHRESTRKGRSSEPGEHDLHRSSKRRREDHESHRTGKVETKEANEQENSRGHAASSKKSQNPQPDNSLVNQVEEDAISDDENHEDSRRGRSKLERWTSNKEIEYSNIDDDSTQTFPTIKTDVQAPIADLLGKSEVSAAVGNSDIKSSVDTGQTSDKIAEERDRHLDTVERLKRRSERFKLPMPGEKDAPQSKKVDNEVQLPQNEPAAADMEVKPERPARKRRWTSGS

SEQ ID NO: 70922 - protein, 63 aa, Setaria italica
  Transcript Sequence Number=SeqID_4948
  Homolog annotation: Hit_ID=B9SED3; Match level="QueryCoverage=84%, HitCoverage=4%, E-value=5e-14, Identity=71%"; Hit description =Nucleotide binding protein, putative
MDKLRVHRCGGGAVEWSPSPVVALATSPCASQVAAAREDGSLELWLVSPGSVGWHHQLTIQGN

SEQ ID NO: 70923 - protein, 54 aa, Setaria italica
  Transcript Sequence Number=SeqID_4949
HEKGRMYIVCLDQGAGPYAKVERSISEHAGLQLSQNRIKSTGTNLRWGLTLLGA

SEQ ID NO: 70924 - protein, 103 aa, Setaria italica
  Transcript Sequence Number=SeqID_4950
  Gene Ontology: Mol. function=ARF GTPase activator activity; Biological process=regulation of ARF GTPase activity
  Homolog annotation: Hit_ID=B6TIN9; Match level="QueryCoverage=49%, HitCoverage=10%, E-value=8e-15, Identity=80%"; Hit description=ARF GAP-like zinc finger-containing protein ZIGA3
  Subcellular localization annotation: CTP_CleavageSite=87; ConfidenceScore=5.15e-01
PGLTPAAQNGKVPQPTAGGSLNKSSIPDVGWGTLPFQNWTNLGYQNPGLTPAAQNGATKGVSNNQDLSAGNFGFGTPGLYNISSAVPANGAAAAGASNNGTAS

SEQ ID NO: 70925 - protein, 70 aa, Setaria italica
  misc_feature (64)..(64): Xaa can be any naturally occurring amino acid
  Transcript Sequence Number=SeqID_4951
MCIEVLLIIWPFFLMRAVDCRLYNISSAVPANGAAAAGASNNGTASTASSTLPSQSGKDYDFSXLTQGFF

SEQ ID NO: 70926 - protein, 297 aa, Setaria italica
  misc_feature (149)..(149): Xaa can be any naturally occurring amino acid
  misc_feature (257)..(257): Xaa can be any naturally occurring amino acid
  Transcript Sequence Number=SeqID_4952
  Gene Ontology: Mol. function=DNA binding; Biological process =regulation of transcription
  Homolog annotation: Hit_ID=B9SHH4; Match level="QueryCoverage=91%, HitCoverage=65%, E-value=5e-72, Identity=54%"; Hit description =Transcription factor, putative
  Pfam annotation: Domain name=Myb_DNA-binding; Domain location=44-95; Score=51.2; E_value=4e-12; Accession=PF00249.23; Description=Myb -like DNA-binding domain
MYHQQQLHGHNQHLSSRPGLPPEKQFLLQGGDAGLVLSTDAKPRLKWTPELHERFVEAVQQLGGPDKATPKTIMRLMGIPGLTLYHLKSHLQKYRLSKNLQAQANATNAKNVLGCRTGTDKPCERNGSPASHLNTEPQINRSMHISEAXLQMQIEVQRRLHEQLEVQRHLQLRIEAQGKYLQSVLEKAQEALAKQNVDLDAGVLGAAAAAETQQLSELISRASATKCAQHEHLHHQHLGGVGDGSVDSCLTACEGSXRDHDMLSIGLSPAPTPRGGGYPFEAARSSGNERGGASTSC

SEQ ID NO: 70927 - protein, 317 aa, Setaria italica
  Transcript Sequence Number=SeqID_4953
  Gene Ontology: Mol. function=zinc ion binding; Cellular component =intracellular
  Homolog annotation: Hit_ID=Q2Z1Y7; Match level="QueryCoverage=63%, HitCoverage=57%, E-value=1e-50, Identity=46%"; Hit description=Pm27 protein
  Pfam annotation: Domain name=DUF1644; Domain location=48-202; Score =115.2; E_value=2.2e-31; Accession=PF07800.4; Description=Protein of unknown function (DUF1644)
MARSPRNRKMLPQHLSSASHAVPYDYKKMKESDKKNELQSTSEEKDWKNATCSICLERPHDAVLLLCSSHSKGCRPYMCGTNYKHSNCLDLFKNAYSRDKPACDVLTAVAPTNQKPKAMLLACPICRGEVKGWTVVKPARRFLNRKRRTCMHEDCSFVGTYKRLKKHVKSRHRSSKPREVDPVRLAEWEEFENEKERQDAISIVSALNPGSIIMGDYIIDPNSDSDNPYSNDTFDSDMSLDGDPYSDDTFDSDMSLDGDEGSYHRDFVHRERAHRRNRERASQSLRRVGVSGIRCSVSRRLSTPLRVCSTEIRESAK

SEQ ID NO: 70928 - protein, 213 aa, Setaria italica
  Transcript Sequence Number=SeqID_4954
  Gene Ontology: Mol. function=protein binding
  Pfam annotation: Domain name=LRR_2; Domain location=143-167; Score =16.9; E_value=0.083; Accession=PF07723.5; Description=Leucine Rich Repeat
VEVIGNILSHLGVARDVMVASAVCRKWRDACRRHLRLLSFNSDDFPRDMTTRQLEIVITQTIFQTIGLQCLSIHIDNTHEFSAAPVIAWLMYTRETLRSLSYNVRTTPHVNILEKCGRQKLEVLDLDHNTITGVEPSYQRFTCLKSLSLRHVSISALDLSLLVAACPKIEVLALDVLEVVTSDPQSTMELTSHTLRSLFAKSVGVDKIILDAD

SEQ ID NO: 70929 - protein, 362 aa, Setaria italica
  Transcript Sequence Number=SeqID_4955
  Gene Ontology: Mol. function=triacylglycerol lipase activity; Biological process=lipid metabolic process
  Homolog annotation: Hit_ID=B6SYD9; Match level="QueryCoverage=100%, HitCoverage=59%, E-value=1e-159, Identity=79%"; Hit description =Triacylglycerol lipase
  Pfam annotation: Domain name=Lipase_3; Domain location=1-97; Score =38.0; E_value=3.8e-08; Accession=PF01764.17; Description=Lipase (class 3)
MVAGARWIAKRVIPCLSKAVEQFPDYEVKIIGHSMGAGIATILTYILRENEKLSSSTCIAFGPAACMTWDLAESGKDFVTTIVNRNDLVPSLGLVSAAKLRTEVMASSWAHDLRKQIQQTRFLGFVNRSVSFIRSHVPFVSDPRSKVVDVDMLQSQSSEAGSKPSADTLAMVKKRPALVFWSCVAAQKQTVESFKQTQDMENQTDTNVKTVKVTNEAAAELVAIDLRELNLEESDEDNADREEKGSALKETYEEEARELLDSLTDEKQELLPSTSAQERHQLYPPGRILHMVGLQEAEVTTGEQGAQEEVLTLYETPRHLYSKIRLAGSMISEHYMPKYIKTMEQLIEKLAEEDIDNQLDSL

SEQ ID NO: 70930 - protein, 268 aa, Setaria italica
  Transcript Sequence Number=SeqID_4956
  Gene Ontology: Mol. function=lyase activity; Cellular component =anchored to membrane
  Homolog annotation: Hit_ID=B6SWR0; Match level="QueryCoverage=100%, HitCoverage=55%, E-value=1e-118, Identity=80%"; Hit description =Pectate lyase 12
  Pfam annotation: Domain name=Pec_lyase_C; Domain location=1-123; Score=146.2; E_value=1e-40; Accession=PF00544.11; Description =Pectate lyase
TRSDGDGISLFGARDVWVDHCALWRCADGLVDAIEGSTAITVSNSYFAHHDEVMLLGASDAYLPDSGMQVTIAFNRFGPGLVQRMPRCRRGYFHIVNNDYTSWEMYAIGGSASPTINSQGNRYIAPADPNAKEVTKRVDTAEGQWSGWNWRTEGDMMVNGAFFVPSGEGMEEIYEKASSTDPKSSALVDTLTQNAGVLGDPRNDAEETGYTGLNYAGVGNGRGGGGNGYGYLGMVYANDADRGRRSRSMLSLTSSVVTLVALGCLRLL

SEQ ID NO: 70931 - protein, 379 aa, Setaria italica
  Transcript Sequence Number=SeqID_4957
  Gene Ontology: Mol. function=DNA-directed RNA polymerase activity; Cellular component=DNA-directed RNA polymerase II, core complex; Biological process=transcription
  Homolog annotation: Hit_ID=B8AHU1; Match level="QueryCoverage=100%, HitCoverage=20%, E-value=0.0, Identity=84%"; Hit description=DNA -directed RNA polymerase
  Pfam annotation: Domain name=RNA_pol_Rpb1_1; Domain location=3-270; Score=-135.5; E_value=0.0008; Accession=PF04997.4; Description=RNA polymerase Rpb1, domain 1
  Pfam annotation: Domain name=RNA_pol_Rpb1_2; Domain location=300-379; Score=-77.7; E_value=0.1; Accession=PF00623.12; Description=RNA polymerase Rpb1, domain 2
  Pfam module annotation: Pfam domain module=RNA_pol_Rpb1_1::RNA_pol _Rpb1_2; Domain location=3-270::300-379
TYSINDCPVNHPSQLANPFLGLPLEAGKCEACGASENDKCEGHFGYIELPVPIYHPCHISELRQLLSLICFKCLRIKKGKVNKQNGKETASATLSCYYCRDIPALSLKETKTTDGAIRLELRAPPRKHMTERSWNFLDKYGFHYGGSAHSRLLLPEEALNILKKVPDDTRRKLAARGYTVQSGYVMKYLPVPPNCLYIPEFTDGQSIMSYDISIALLKKVLQKIEQIKRSRSGSPNFESHEEESCDIQLAVGQYIHLRGTTRGPQDNSKRFAVGTDTAALSTKQWLEKMRTLFISKGSGFSSRSVLTGDPYIGVDVIGLPSEVAKRVTFEEQVTDININRLQEVVDKGLCLTYRDGKDTYAITVGSKGHTTLKVGQTIS

SEQ ID NO: 70932 - protein, 84 aa, Setaria italica
  misc_feature (57)..(57): Xaa can be any naturally occurring amino acid
  Transcript Sequence Number=SeqID_4958
  Gene Ontology: Mol. function=glutathione gamma-glutamylcysteinyltransf erase activity
  Homolog annotation: Hit_ID=Q8GZS7; Match level="QueryCoverage=100%, HitCoverage=16%, E-value=2e-28, Identity=73%"; Hit description =Phytochelatins synthase
  Pfam annotation: Domain name=Phytochelatin_C; Domain location=1-84; Score=-109.2; E_value=1.7e-05; Accession=PF09328.2; Description =Domain of unknown function (DUF1984)
AAMLSGNLASSDGFCFKETCFKGVQANGDGPKTVISGSVVSEGDEQGVDMLLPMSPXGCCTSSCNSNLGNEIIKYPSRKDVITV

SEQ ID NO: 70933 - protein, 273 aa, Setaria italica
  misc_feature (182)..(182): Xaa can be any naturally occurring amino acid
  Transcript Sequence Number=SeqID_4959
  Gene Ontology: Mol. function=glutathione gamma-glutamylcysteinyltransf erase activity
  Homolog annotation: Hit_ID=Q8GZS7; Match level="QueryCoverage=100%, HitCoverage=62%, E-value=1e-100, Identity=62%"; Hit description =Phytochelatins synthase
  Pfam annotation: Domain name=Phytochelatin_C; Domain location=27-263; Score=392.7; E_value=6.4e-115; Accession=PF09328.2; Description =Domain of unknown function (DUF1984)
ILDVACFKYPPHWVPLQLLWEAMNTADESTGLLRGFLQSCRFESWKCMAKYCAEDLPDILKAESLDNVPALLSSFIYSLPANAGSLIKWVVEVRRKEEDRPCLSKDEKERLLVKENVLQQVHDTKLFMIVHDLQCARIQCCNRLSSSSEDSVTRIAASVCCQGAAMLSGNLASSDGFCFKEXCFKGVQANGCCTSSCNSNLGNEIIKYPSSADVITVLLLALHPSTWLGIINERLKAEFQTLVSTDNLPDVLKREILHLRRQLYYLKTCKDEE

SEQ ID NO: 70934 - protein, 85 aa, Setaria italica
  Transcript Sequence Number=SeqID_4960
  Subcellular localization annotation: CTP_CleavageSite=54; ConfidenceScore=5.13e-01
PRPRGYLKEGSSLMAAFPSPDGAARFPLSASLESPQSTAMQASSIPWPWHPSLLASAGRGRQPPTQARRIPDRLRIKGTKAFYKQ

SEQ ID NO: 70935 - protein, 97 aa, Setaria italica
  Transcript Sequence Number=SeqID_4961
  Subcellular localization annotation: CTP_CleavageSite=67; ConfidenceScore=5.05e-01
PAHKERPHGSLGFSGAGNRGARQSKNGGGQEPGARRDAGGDRAMSRGRRKRTRRENGASGGGASISRGEEEAGAHRKGVGGSRHWQCQLFVGRSGGR

SEQ ID NO: 70936 - protein, 56 aa, Setaria italica
  Transcript Sequence Number=SeqID_4962
  Subcellular localization annotation: CTP_CleavageSite=38; ConfidenceScore=5.34e-01
MQHMISACKAHHTQSPAALLPPRPLPRRAAAFPRLPVPAGYASSPRLVVRRRCQEE

SEQ ID NO: 70937 - protein, 202 aa, Setaria italica
  Transcript Sequence Number=SeqID_4963
  Gene Ontology: Mol. function=protein transporter activity; Cellular component=mitochondrial inner membrane; Biological process=protein transport
  Homolog annotation: Hit_ID=B6T215; Match level="QueryCoverage=80%, HitCoverage=84%, E-value=4e-59, Identity=80%"; Hit description =Protein translocase/ protein transporter
  Pfam annotation: Domain name=Tim17; Domain location=31-149; Score =147.0; E_value=5.8e-41; Accession=PF02466.11; Description =Tim17Tim22Tim23 family
MAAKRENESDGEEFGGEGSNPAGGGATPPPLAAAPVVCLLRSVGDFAGGAFVGSVFGYGQGLITKKGFKGSFSNAGSSAKTFAVLSGVQSLVVCLLRRLRGKDDIVNAGIAGCCTGLALSFPGAPQALLQSCATFAAFSCIMEGLNKQKAAMAHTLGATALTIGNEKGGVLPPFTLPPILDASDALASCCQALVKPKHWKTG

SEQ ID NO: 70938 - protein, 186 aa, Setaria italica
  Transcript Sequence Number=SeqID_4964
  Gene Ontology: Mol. function=protein transporter activity; Cellular component=nuclear pore; Biological process=protein import into nucleus, docking
  Homolog annotation: Hit_ID=Q10GR1; Match level="QueryCoverage=96%, HitCoverage=17%, E-value=1e-89, Identity=85%"; Hit description =Importin-beta N-terminal domain containing protein, expressed
TNLDLLVRRSIFVEDPARSQFLSHLMSGTKEILQTGQGLADHDNYHEFCRLLGRFKVNYQLAELLSVEFYGEWIGLIAEFTTRSLLSWQWASNSVYYLLSLWSRLVTSVPYLKGETPSLLDETVPKITEGFITSRISSVQAILADNSLENPLDSVEILQDQLEFLPYLCRFQYQSASLYIINIMEP

SEQ ID NO: 70939 - protein, 52 aa, Setaria italica
  Transcript Sequence Number=SeqID_4965
  Gene Ontology: Cellular component=plasma membrane; Biological process= intracellular protein transmembrane transport
  Homolog annotation: Hit_ID=B6UEM6; Match level="QueryCoverage=96%, HitCoverage=59%, E-value=6e-20, Identity=92%"; Hit description =Protein transport protein Sec61 beta subunit
  Pfam annotation: Domain name=Sec61_beta; Domain location=1-42; Score =76.5; E_value=9.9e-20; Accession=PF03911.8; Description=Sec61beta family
SNMLRFYTDEAPGLRLSPTMVLVMSLCFIGFVTALHVFGKLYRSRTAAAASA

SEQ ID NO: 70940 - protein, 57 aa, Setaria italica
  Transcript Sequence Number=SeqID_4966
  Gene Ontology: Cellular component=plasma membrane; Biological process= intracellular protein transmembrane transport
  Homolog annotation: Hit_ID=B6UEM6; Match level="QueryCoverage=87%, HitCoverage=59%, E-value=6e-20, Identity=92%"; Hit description =Protein transport protein Sec61 beta subunit
  Pfam annotation: Domain name=Sec61_beta; Domain location=2-47; Score =89.8; E_value=9.5e-24; Accession=PF03911.8; Description=Sec61beta family
AGGGGSNMLRFYTDEAPGLRLSPTMVLVMSLCFIGFVTALHVFGKLYRSRTAAAASA

SEQ ID NO: 70941 - protein, 84 aa, Setaria italica
  Transcript Sequence Number=SeqID_4967
  Subcellular localization annotation: CTP_CleavageSite=40; ConfidenceScore=5.49e-01
SGFVLPSLPTFFRSKSSSSTAPAPPQLHPPDPSHSSDHIAVSAHQTVFMYYCLSSLFFLWNLATYKLLIMDALSVYSSPFPSFD

SEQ ID NO: 70942 - protein, 237 aa, Setaria italica
  Transcript Sequence Number=SeqID_4968
  Gene Ontology: Mol. function=protein binding; Cellular component =cytoplasm; Biological process=regulation of transcription, DNA -dependent
  Homolog annotation: Hit_ID=B4FM01; Match level="QueryCoverage=96%, HitCoverage=98%, E-value=1e-108, Identity=82%"; Hit description=MAGE
  Pfam annotation: Domain name=MAGE; Domain location=24-218; Score =205.5; E_value=1.5e-58; Accession=PF01454.11; Description=MAGE family
MATSEELAQIDISKEEKDKLVAEVMRYMLFKTHQTSGCPIKREELTGIVTKNYRQRALPALVINEARDRLSATFGYEMRELQRTRAPSTRSGRPSQPQPNAEAKSYVLVSQLDHEVYSKYVEDKEAAPLSGFAFTIISLIHLAGGKIPEEDLWHQLKRLGLKNDNDEKHPALGNNKQALELLAQQRYLLKEKLAGPEGHVVMYELAERALDESISGKLKDYIAQIVGTSTVAEENSS

SEQ ID NO: 70943 - protein, 254 aa, Setaria italica
  Transcript Sequence Number=SeqID_4969
  Gene Ontology: Mol. function=substrate-specific transmembrane transporter activity; Cellular component=integral to membrane; Biological process=transmembrane transport
  Homolog annotation: Hit_ID=Q9C757; Match level="QueryCoverage=97%, HitCoverage=41%, E-value=5e-74, Identity=53%"; Hit description =Probable inositol transporter 2
  Pfam annotation: Domain name=Sugar_tr; Domain location=4-224; Score= -157.9; E_value=0.0091; Accession=PF00083.16; Description=Sugar (and other) transporter
GRRKLLVISLVGVILSLGVLTAVFHETASHSPPVGAAETRHFDASLTCPDYTLSAPTTSGGGSFWDCTRCLKAKSTECGFCASGAGGLLPGACLVSNSTARDTCGGEGRRWYTRGCPSRFGWLALVGLALYIIFFSPGMGTVPWIVNSEIYPLRHRGVCGGAAATANWVSNLAVAQSFLSLTEAIGTSWTFLIFGGLSVAALAFVLVCVPETKGLPIEEVEKMLERRELRLRFWAPRDRDGDAHGKDSGKSAGV

SEQ ID NO: 70944 - protein, 244 aa, Setaria italica
  misc_feature (6)..(6): Xaa can be any naturally occurring amino acid
  misc_feature (14)..(14): Xaa can be any naturally occurring amino acid
  misc_feature (44)..(44): Xaa can be any naturally occurring amino acid
  Transcript Sequence Number=SeqID_4970
  Gene Ontology: Mol. function=gamma-glutamyltransferase activity; Cellular component=endoplasmic reticulum; Biological process =cellular response to nitrogen starvation
  Homolog annotation: Hit_ID=B6SSX2; Match level="QueryCoverage=100%, HitCoverage=41%, E-value=1e-118, Identity=83%"; Hit description =Gamma-glutamyltranspeptidase 1
  Pfam annotation: Domain name=G_glu_transpept; Domain location=1-244; Score=-104.3; E_value=3.4e-11; Accession=PF01019.13; Description =Gamma-glutamyltranspeptidase
HGKLPXWKRLVLPXAQLARAFRISPYLQMQMEATRDGILANKGXRAVYAPGGDLLKAGEVCRNVRLARTLRAVAEQGPGVFYDGKVGKRLVKDVREVGGILTAEDLKRYQVKVRRPLTENVMGLQVVTMPPPSAGGAGMLLILNILAQYGIPSGFAGSLGIHRLIESLKHYMAVKMNLGDPDFVNDNGVVSDMMSQTFAAELKKTIYDNMTFDPKHYGGRWDILQDHGTSHLSIIDSERNAVSM

SEQ ID NO: 70945 - protein, 68 aa, Setaria italica
  misc_feature (4)..(4): Xaa can be any naturally occurring amino acid
  Transcript Sequence Number=SeqID_4971
MREXVLLFCFYCSVFMKIISRFFRTNKSKHAHLEFRQEIMFCSFEFQSSKYLLEIINLFSEIQAFEPI

SEQ ID NO: 70946 - protein, 74 aa, Setaria italica
  Transcript Sequence Number=SeqID_4972
SESFLQFGANFNRPTIFFPSYESFSTYLGKWVTKPNVGPNIQSNNLEHVQMHALQTIQVSNLPLLAERELVGST

SEQ ID NO: 70947 - protein, 93 aa, Setaria italica
  misc_feature (79)..(79): Xaa can be any naturally occurring amino acid
  Transcript Sequence Number=SeqID_4973
  Gene Ontology: Mol. function=protein binding; Cellular component =plasma membrane
  Homolog annotation: Hit_ID=Q5ZD87; Match level="QueryCoverage=96%, HitCoverage=8%, E-value=9e-17, Identity=47%"; Hit description=HcrVf2 protein-like
  Pfam annotation: Domain name=LRR_1; Domain location=14-36; Score=7.4; E_value=12; Accession=PF00560.25; Description=Leucine Rich Repeat
  Pfam annotation: Domain name=LRR_1; Domain location=38-60; Score =10.6; E_value=2.9; Accession=PF00560.25; Description=Leucine Rich Repeat
  Pfam annotation: Domain name=LRR_1; Domain location=62-85; Score =11.7; E_value=1.8; Accession=PF00560.25; Description=Leucine Rich Repeat
  Pfam module annotation: Pfam domain module=LRR_1::LRR_1::LRR_1; Domain location=14-36::38-60::62-85
TNFMERLPKCSWSKFCKLNLHRANLTGQLPIWIGNLTGLSYLDLTQNMLAGHVPNGIGALSNLTYLSLALNNFSGVLSXEHFTSLVNLTLGMD

SEQ ID NO: 70948 - protein, 82 aa, Setaria italica
  Transcript Sequence Number=SeqID_4974
LLLVLLVLLVLVSGILARGGPSTCNLRPFEQRNCPSNPWSRGLITTMYQRTPGTNLYYYMLSDAWLCVVLMLVYMAYFSNII

SEQ ID NO: 70949 - protein, 77 aa, Setaria italica
  Transcript Sequence Number=SeqID_4975
QASRKCSMNALQSLDQGLEGIHAAQASRKCSMNALQSLVKGTNLNQCIRRTPATNSRTYSLQQDLKDCLLVLPRFKF

SEQ ID NO: 70950 - protein, 50 aa, Setaria italica
  Transcript Sequence Number=SeqID_4976
MAKNSSTSVQLLLVLLVLLVVVSGILAQGGPSTCDSPEQHECPPIPGQGN

SEQ ID NO: 70951 - protein, 106 aa, Setaria italica
  Transcript Sequence Number=SeqID_4977
  Subcellular localization annotation: CTP_CleavageSite=49; ConfidenceScore=5.65e-01
QWRRTPRPPFSCSSSSSFYWLLSAASSHKADQALATRLSSMNALQSLVKGTNLNQCIRRTPATNSRTYSLQQDLKDCLLVLPPFQILSLVHTFGYVYSRYNVNLSA

SEQ ID NO: 70952 - protein, 470 aa, Setaria italica
  Transcript Sequence Number=SeqID_4978
  Gene Ontology: Mol. function=hydrolase activity; Cellular component =nucleus; Biological process=mRNA transport
  Homolog annotation: Hit_ID=Q8H7L6; Match level="QueryCoverage=86%, HitCoverage=83%, E-value=0.0, Identity=76%"; Hit description =Nucleoside-triphosphatase, putative, expressed
  Pfam annotation: Domain name=GDA1_CD39; Domain location=68-470; Score= 446.3; E_value=4.7e-131; Accession=PF01150.9; Description=GDA1CD39 (nucleoside phosphatase) family
MRPRYSALPNGRQDTLADRLHRYRGVLLVVLAPLALVSLVLLLMPRSPASSAAASRRSGPLDGAAGGKKYAVIFDAGSSGSRVHVFCFDANLDLVNIGSEIELFVQKKPGLSAYASDPREAAESLVSLLDEAKRVVPAELRDQTPVRVGATAGLRNLGAEKSEEILQAVRDLLREKSSFKNQADWVTVLDGSQEGAYEWVTINYLLGNLGKTYADTVGVVDLGGGSVQMAYAIAEKDAEKVPKPSDGEDTYVKKLYLKGTTYNLYVHSYLHYGLLAARAEVLKAGNGNGYSNCMLEGYQGQYKYGSETFEASASPSGASYSKCKDDAVKALKVDEACTHMKCSFGGIWNGGGGAGQKNLFVASFFFDRAAEVGFVNPKAAVAKVKPSDFEQAAKRACKLSVKDAEAAYPGVQKDNLPYICLDLVYQYTLLVDGFGVDPNHEMTLVKKVPYNGAYVEAAWPLGSAIEVASS

SEQ ID NO: 70953 - protein, 296 aa, Setaria italica
  Transcript Sequence Number=SeqID_4979
  Subcellular localization annotation: CTP_CleavageSite=51; ConfidenceScore=5.61e-01
AAVRSTSDGPRRSTLLPPALPFPAARLRFRRPPESSSPTTRRSRAMPPPTEAAAAGGAAGGSFPELTCPADFAAVAAPGGRISVVGFGSLLSERSARSTFPELEGFRVAALRGFRRVFAHSAPIFFERGIAVEATKEFSSLSVEPCEGELIVVTVFEINEEEVPAFIEREHEFRFLAVVPEGLDGVPFTNRAVVCARYSDEEYFQERCQGSKEIYNQRYGRYNIDKIWRDDILPCRLYLRHCVLAAKNLGEPAYSNFLDHTYLGDRKTTIREYLASTGAGIMEEEPPESLKSRYGG

SEQ ID NO: 70954 - protein, 146 aa, Setaria italica
  misc_feature (79)..(79): Xaa can be any naturally occurring amino acid
  misc_feature (92)..(92): Xaa can be any naturally occurring amino acid
  Transcript Sequence Number=SeqID_4980
  Homolog annotation: Hit_ID=A4GX19; Match level="QueryCoverage=84%, HitCoverage=58%, E-value=4e-27, Identity=52%"; Hit description =Putative ureidoglycolate hydrolase
MEPGKKEEVAAVRVVTLRAVEATPESFAPFGQVVSAGSDRAKFGPDDAQLDLSRGIPRFYIMKLENQPLKFSSITHHAXVRQCLGSIGGQDXYLAVAKPSLVDGASELSGQETQDQDGSSRRSPCHWEEPVPSRAGHYYLPPDPAE

SEQ ID NO: 70955 - protein, 222 aa, Setaria italica
  misc_feature (106)..(106): Xaa can be any naturally occurring amino acid
  Transcript Sequence Number=SeqID_4981
  Homolog annotation: Hit_ID=A4GX19; Match level="QueryCoverage=89%, HitCoverage=91%, E-value=9e-53, Identity=53%"; Hit description =Putative ureidoglycolate hydrolase
MEPGKKEEVAAVRVVTLRAVEATPESFAPFGQVVSAGSDRAKFGPDDAQLDLSRGIPRQGYLYFRTKSTTDPFYIMKLENQPLKFSSITHHANVTQCLGSIGGQDXYLAVAKPSLVDGASELSGQETQDQDGSSRRSPCHWEEPVPSRAGHYYLPPDPAEVCAFRVSGLKFLKLHKGTWHAGPLFRADAMDFYNLELSNTNIVDQTIHRFRKLDGVTFVVED

SEQ ID NO: 70956 - protein, 102 aa, Setaria italica
  Transcript Sequence Number=SeqID_4982
EHTFDKKKMAGTIIDTLIRNDKCKRKRLSSSLSCRHSIALPKCIVHPERTGCGSAITDTAQPHPRPISRNPFSQTHQSTEKFHNTKNSIHSPVSRRDIPSAT

SEQ ID NO: 70957 - protein, 228 aa, Setaria italica
  misc_feature (149)..(149): Xaa can be any naturally occurring amino acid
  misc_feature (168)..(168): Xaa can be any naturally occurring amino acid
  misc_feature (173)..(173): Xaa can be any naturally occurring amino acid
  Transcript Sequence Number=SeqID_4983
  Gene Ontology: Mol. function=hydrogen ion transporting ATPase activity, rotational mechanism; Cellular component=vacuolar proton -transporting V-type ATPase, V1 domain; Biological process=regulation of defense response to virus by virus
  Homolog annotation: Hit_ID=B6SIW6; Match level="QueryCoverage=88%, HitCoverage=43%, E-value=1e-111, Identity=96%"; Hit description =Vacuolar ATPase subunit H protein
  Pfam annotation: Domain name=V-ATPase_H; Domain location=1-201; Score= -145.5; E_value=9.7e-08; Accession=PF03224.6; Description=V-ATPase subunit H
KTKENLNKNKTKQVTNYKTTFNRNTCLCILLLSFYDAAVDYLSTTRVMPRLVEVVKGSTKEKVVRVVVLSFRNLLAKGAFAAQMIDLGLPQIVQNLKAQAWSDEDLLDALNQLEVGLKDNLKKLSSFDKYKQQVLLGHLDWSPMHKDPXFWRENINNFEENDFQILRXLMTIXDTSSDTTALAVACYDLSQFLQYHPSGRIVVADLKAKDRVMKLMNHENTEVRKNDN

SEQ ID NO: 70958 - protein, 138 aa, Setaria italica
  Transcript Sequence Number=SeqID_4984
  Gene Ontology: Mol. function=hydrogen ion transporting ATPase activity, rotational mechanism; Cellular component=vacuolar proton -transporting V-type ATPase, V1 domain; Biological process =determination of adult life span
  Homolog annotation: Hit_ID=B6SIW6; Match level="QueryCoverage=97%, HitCoverage=28%, E-value=4e-68, Identity=92%"; Hit description =Vacuolar ATPase subunit H protein
ELPQIVQNLKAQAWSDEDLLDALNQLEVGLKDNLKKLSSFDKYKQQVLLGHLDWSPMHKDPGFWRENINNFEENDFQILRVLMTIIDTSSDTTALAVACYDLSQFLQYHPSGRIVVADLKAKDRVMKDYNRNTTKKQP

SEQ ID NO: 70959 - protein, 504 aa, Setaria italica
  Transcript Sequence Number=SeqID_4985
  Gene Ontology: Mol. function=hydrogen ion transporting ATPase activity, rotational mechanism; Cellular component=vacuolar proton -transporting V-type ATPase, V1 domain; Biological process=regulation of defense response to virus by virus
  Homolog annotation: Hit_ID=B6SIW6; Match level="QueryCoverage=89%, HitCoverage=96%, E-value=0.0, Identity=96%"; Hit description =Vacuolar ATPase subunit H protein
  Pfam annotation: Domain name=Arm; Domain location=248-292; Score =10.3; E_value=0.61; Accession=PF00514.15; Description=Armadillobeta -catenin-like repeat
  Pfam annotation: Domain name=Arm; Domain location=293-334; Score=5.9; E_value=2.2; Accession=PF00514.15; Description=Armadillobeta-catenin -like repeat
  Pfam annotation: Domain name=Arm; Domain location=454-494; Score =14.0; E_value=0.21; Accession=PF00514.15; Description=Armadillobeta -catenin-like repeat
  Pfam annotation: Domain name=V-ATPase_H; Domain location=51-459; Score=145.8; E_value=1.3e-40; Accession=PF03224.6; Description=V -ATPase subunit H
  Pfam module annotation: Pfam domain module=Arm::Arm::Arm::V-ATPase_H; Domain location=248-292::293-334::454-494::51-459
  Subcellular localization annotation: CTP_CleavageSite=50; ConfidenceScore=5.04e-01
PCLSQISLSFSSLLLSPRLYPQIVAGEPPRSLIRLPSRAPGGPGAGACPAAAMDRAELTTEQVLKRDIPWEHYMSTKLISGTCLQLLRRYDHKPESQRAPLLEEDGPAYVRVFLNILGSISKEETVEYVLALIDEMLATNPKRAALFYDQSLSGEDIYEPFLRLLWKGNWFVQEKSCKILTDIISARPKLQNGMLPNGDSSNSKSKLTSTHDVLRGLVDWFCSQLRNPTHPSCSIPTTIHCLSSLLREPYVRTLFVQADGIKLLIPLISPASTQQSIQLLYESCLCIWLLSFYDAAVDYLSTTRVMPRLVEVVKGSTKEKVVRVVVLSFRNLLAKGAFAAQMIDLGLPQIVQNLKAQAWSDEDLLDALNQLEVGLKDNLKKLSSFDKYKQQVLLGHLDWSPMHKDPGFWRENINNFEENDFQILRVLMTIIDTSSDTTALAVACYDLSQFLQYHPSGRIVVADLKAKDRVMKLMNHENTEVRKNALLCIQRLFLGAKYASFLQA

SEQ ID NO: 70960 - protein, 97 aa, Setaria italica
  Transcript Sequence Number=SeqID_4986
  Gene Ontology: Mol. function=drug transporter activity; Cellular component=membrane; Biological process=multidrug transport
  Homolog annotation: Hit_ID=B9T703; Match level="QueryCoverage=70%, HitCoverage=48%, E-value=7e-13, Identity=54%"; Hit description =Multidrug resistance pump, putative
INLLSFYLVGTPVAVYLAFGAGAGFSGLWYGLLSAQATCVALILAAVVWRTDWQVEAMRAKKLAGLELAPTTTAATTTNDAESKRLVAANGEPAEDV

SEQ ID NO: 70961 - protein, 61 aa, Setaria italica
  Transcript Sequence Number=SeqID_4987
SAAINTNSERSSPLMLSCKQRTLGNDFELIVGSTFFYVHGNMRTLFYVHAHVLCIFFAEKL

SEQ ID NO: 70962 - protein, 310 aa, Setaria italica
  Transcript Sequence Number=SeqID_4988
  Gene Ontology: Mol. function=oxidoreductase activity
  Homolog annotation: Hit_ID=B6TRN5; Match level="QueryCoverage=100%, HitCoverage=100%, E-value=1e-167, Identity=91%"; Hit description =Aldose reductase
  Pfam annotation: Domain name=Aldo_ket_red; Domain location=7-283; Score=463.0; E_value=4.4e-136; Accession=PF00248.13; Description =Aldoketo reductase family
MARHFVLNTGAKIPSVGLGTWQSDPGVVGNAVYAAVKAGYRHIDCARVYGNEKEIGLALKKLFEEGVVKREDLFITSKLWNDHHAPEDVPEALNESLNDLQLDYLDLYLIHWPFRVKKGTNISPENFITPDIPATWAAMEKLYDAGKAHAIGVSNFSSKKLGDLLAVARVPPAVDQVECHPGWQQTKLHNFCQTTGVHLTAYSPLGSPGTTWMNGNVLKEPVIISIAEKLGKTPAQVALRWNIQMGHSVLPKSTNEERIKQNLDVYDWSIPDDLLAKFSEIKQARLLRGNFIVGPQSVYKTHEELWDGEL

SEQ ID NO: 70963 - protein, 744 aa, Setaria italica
  Transcript Sequence Number=SeqID_4989
  Gene Ontology: Mol. function=acid-amino acid ligase activity; Cellular component=intracellular; Biological process=ubiquitin -dependent protein catabolic process
  Homolog annotation: Hit_ID=Q6YU89; Match level="QueryCoverage=91%, HitCoverage=38%, E-value=0.0, Identity=72%"; Hit description =Putative HECT ubiquitin-protein ligase 3
  Pfam annotation: Domain name=HECT; Domain location=367-744; Score =378.3; E_value=1.4e-110; Accession=PF00632.17; Description=HECT -domain (ubiquitin-transferase)
  Subcellular localization annotation: CTP_CleavageSite=56; ConfidenceScore=5.89e-01
ANSNSRHSSSSGSSTKNTSSTGLDAAEFRSPSTFGSRGAMSFAAAAMAGLGSRGIRGSRDRSRATEHYNKLIFTAGGKQLNKHLTVYQAVQRQVVHDDEDVDQLGGSDLPDDGNHFWGDVFTVTYQKADYAVEKGPVGGSASAPKFSQSDSCKPLSRKQCTSLLDSILQGELPCDLEKSNQTYNILSLLRVLEGLNQLSPRLRLQATSDNFVEGKVATLDGLYGVGAKVPLEEFVNTKMTPKLARQIQDVLALCSGSLPSWCYQLTKACPFLFPFETRRQYFYSTAFGLSRALHRLQQHPGDNNNTAIEREIRVGRLQRQKVRVSRNRILDSAAKVMEMFSNQKAVLEVEYFGEVGTGLGPTSEFYTLLSHDLQRVDLGLWRSHSTGNSGTQIDGNGYHLIGIKHESESLFESRNVVQAHLGLFPQPWPPSAAALEGSKFFKVVEYFRLVGRVMAKALQDGRLLDLPLSTAFYKLLLGQELELYDVLSFDTEFGKILQELQILVARKRFLESCCSDSRKIEELCFRGAPVEDLCLDFTLPGYPDYVLKEGGENVVVDIYNLEEYISLVVDATVKTGIMRQVEAMKAGFNQVFDISSLQIFSPQELDYLICGRRELWEPEILLEHIKFDHGYTSKSPAIVNFLEIMAEFTPEQQHSFCQFVTGAPRLPPGGLAALNPKLTIVRKHSSSAANTTNATGAIESADDDLPSVMTCANYLKLPPYSTKAIMLKKLLYAINEGQGSFDLS

SEQ ID NO: 70964 - protein, 323 aa, Setaria italica
  Transcript Sequence Number=SeqID_4990
  Gene Ontology: Mol. function=nucleic acid binding; Cellular component= cellular_component; Biological process=gene silencing by RNA
  Homolog annotation: Hit_ID=Q7XTS4; Match level="QueryCoverage=100%, HitCoverage=33%, E-value=1e-150, Identity=76%"; Hit description =Protein argonaute 2
  Pfam annotation: Domain name=Piwi; Domain location=1-296; Score =365.7; E_value=8.2e-107; Accession=PF02171.9; Description=Piwi domain
MSEQHPGYKTLKLICDTQLGILTQCFLSKIANKQQGQDQYMTNLALKINSKLGGSNVQLYDSLPRVSGAPFMFIGADVNHPSPGNVESPSIAAVVASINSGVNKYVSRIRAQPHRCEVIQQLGEICLELIGVFEKQNSVKPERIIYFRDGVSDGQFDMVLNEELADMEKAIKVNGYSPTITVIVAKKRHHTRLFPKDQGQPQTKNGNVPPGTVVDTGVVDPSAYDFYLCSHNGLLGTSRPTHYYSLVDEHGFGSDDLQKLIYNLCFVFARCTKPVSLATPVYYADLAAYRGRLYYEAGMRSGTFEAGSFPRLHKDLEDNMFFI

SEQ ID NO: 70965 - protein, 636 aa, Setaria italica
  misc_feature (11)..(11): Xaa can be any naturally occurring amino acid
  misc_feature (35)..(35): Xaa can be any naturally occurring amino acid
  misc_feature (494)..(494): Xaa can be any naturally occurring amino acid
  Transcript Sequence Number=SeqID_4991
  Gene Ontology: Mol. function=nucleic acid binding; Cellular component= cytoplasm; Biological process=multicellular organismal development
  Homolog annotation: Hit_ID=Q7XTS4; Match level="QueryCoverage=97%, HitCoverage=59%, E-value=0.0, Identity=72%"; Hit description=Protein argonaute 2
  Pfam annotation: Domain name=DUF1785; Domain location=200-250; Score =63.8; E_value=6.3e-16; Accession=PF08699.2; Description=Domain of unknown function (DUF1785)
  Pfam annotation: Domain name=PAZ; Domain location=254-388; Score =106.6; E_value=8.3e-29; Accession=PF02170.14; Description=PAZ domain
  Pfam module annotation: Pfam domain module=DUF1785::PAZ; Domain location=200-250::254-388
GAAPAPASMGXRAKDKEALSASWSVERIDSSELAXGKPSSSLVATPYAGARVPMQRPDRGGSSSQANVKLLVNHFIVKYRKATTIFHYDIDIKLDQASPKASGKELSKAEFLSVKDELFKDTSFRRLSSCVAYDGGRNLFTSAELPEGLFRVRVRSKTYIVSVDLKKQLPLSQLSELPVPREVLQGLDVIVREASRWRKIMVGKGFYSPNSSLDIGQGAVALKGALQTLKHTQQGLILCVDYSVMPFYKAGPVMDLVEKIVGRLDYRTTLNKWQLENLEYELKGRRVTVIHRRTNQKYIVQGLTPLPAGQLTFVDAETGQTNRLVDYYAQKHGKVIEYQMLPCLDLSKSKDKANHVPIELCTLLEGQRYPKANLDRNSDRTLKSEALIPAFKRRKEILDLVNATDGPCSGEIAPQFGISLDVQMTEVMGRILPPPNLKLGAPNGQTSKFSINHESCQWNLMNKKLVEGWDLQCWGIVDFSARTSHPREESLNGXLFVEKIVRKCCELGIRMNTDPCFVHKSEMAVLSDPHRLHEELNKAKQAAVSKKQRLQLLFCPMSEQHPGYKTLKLICDTQLGILTQCFLSKIANKQQGQDQYMTNLALKINSKLGGSNVQLYDSLPRVSGAPFTIVGITERN

SEQ ID NO: 70966 - protein, 85 aa, Setaria italica
  Transcript Sequence Number=SeqID_4992
  Gene Ontology: Mol. function=ribulose-bisphosphate carboxylase activity; Cellular component=chloroplast ribulose bisphosphate carboxylase complex; Biological process=carbon utilization by fixation of carbon dioxide
  Homolog annotation: Hit_ID=P05348; Match level="QueryCoverage=85%, HitCoverage=42%, E-value=1e-30, Identity=79%"; Hit description =Ribulose bisphosphate carboxylase small chain, chloroplastic
  Pfam annotation: Domain name=RuBisCO_small; Domain location=3-81; Score=118.3; E_value=2.5e-32; Accession=PF00101.12; Description =Ribulose bisphosphate carboxylase, small chain
RKLTRQRIRVTYYRENSTSPCYYDGRYWTMWKLPMFGCTEATQVYAEFEECKKAYPDCYIRIIGFDNIKQVQCVMFIAYKPPGSE

SEQ ID NO: 70967 - protein, 77 aa, Setaria italica
  misc_feature (20)..(20): Xaa can be any naturally occurring amino acid
  misc_feature (32)..(32): Xaa can be any naturally occurring amino acid
  Transcript Sequence Number=SeqID_4993
  Gene Ontology: Mol. function=ribulose-bisphosphate carboxylase activity; Cellular component=chloroplast ribulose bisphosphate carboxylase complex; Biological process=carbon utilization by fixation of carbon dioxide
  Homolog annotation: Hit_ID=P05348; Match level="QueryCoverage=100%, HitCoverage=41%, E-value=3e-19, Identity=61%"; Hit description =Ribulose bisphosphate carboxylase small chain, chloroplastic
  Pfam annotation: Domain name=RuBisCO_small; Domain location=1-73; Score=33.0; E_value=9.1e-09; Accession=PF00101.12; Description =Ribulose bisphosphate carboxylase, small chain
ENSTSPCYYDGRYWTNSRKXLDPNSYGLDNRXATQVYAEFEECKKAYPDCYIRIIGFDNMKQVQCVMFIAYKPPGSE

SEQ ID NO: 70968 - protein, 75 aa, Setaria italica
  Transcript Sequence Number=SeqID_4994
  Gene Ontology: Mol. function=ribulose-bisphosphate carboxylase activity; Cellular component=chloroplast ribulose bisphosphate carboxylase complex; Biological process=carbon utilization by fixation of carbon dioxide
  Homolog annotation: Hit_ID=P26667; Match level="QueryCoverage=69%, HitCoverage=29%, E-value=8e-17, Identity=73%"; Hit description =Ribulose bisphosphate carboxylase small chain PW9, chloroplastic
  Pfam annotation: Domain name=RuBisCO_small; Domain location=2-71; Score=50.0; E_value=8.9e-12; Accession=PF00101.12; Description =Ribulose bisphosphate carboxylase, small chain
LLVVHLGGLGAAEHGQLPHGPVAPMFGCTEATQVYAEFEECKKAYPDCYIRIIGFDNMKQVQCVMFIAYKPPGSE

SEQ ID NO: 70969 - protein, 132 aa, Setaria italica
  Transcript Sequence Number=SeqID_4995
  Gene Ontology: Mol. function=ribulose-bisphosphate carboxylase activity; Cellular component=chloroplast ribulose bisphosphate carboxylase complex; Biological process=carbon utilization by fixation of carbon dioxide
  Homolog annotation: Hit_ID=P05348; Match level="QueryCoverage=85%, HitCoverage=66%, E-value=3e-53, Identity=81%"; Hit description =Ribulose bisphosphate carboxylase small chain, chloroplastic
  Pfam annotation: Domain name=RuBisCO_small; Domain location=4-112; Score=248.1; E_value=2.1e-71; Accession=PF00101.12; Description =Ribulose bisphosphate carboxylase, small chain
GNKKFETLSYLPPLSTDEVLKQIDYLIRKNWIPCLEFSKIGFVYRENSTSPCYYDGRYWTMWKLPMFGCTEATQVYAEFEECKKAYPDCYIRIIGFDNIKQVQCVMFIAYKPPRLRVRPAAPNKLIARTARS

SEQ ID NO: 70970 - protein, 65 aa, Setaria italica
  Transcript Sequence Number=SeqID_4996
RKLTNPVLCFSFSKCWFCRFPLPMKQLFQLCLHHAYIQVVFKIFPFFCMTLLSCELSYYHFLSCV

SEQ ID NO: 70971 - protein, 78 aa, Setaria italica
  Transcript Sequence Number=SeqID_4997
QSFRQASLHSAQHDTVRVVVVLSACSISCSHCTHTTPSHEHRSDPVISLDGPPHPSAINPTEKDHKQWINRNSRTPGK

SEQ ID NO: 70972 - protein, 164 aa, Setaria italica
  Transcript Sequence Number=SeqID_4998
  Homolog annotation: Hit_ID=B6TTJ7; Match level="QueryCoverage=73%, HitCoverage=36%, E-value=3e-59, Identity=93%"; Hit description =Thaumatin-like protein 1
  Pfam annotation: Domain name=Thaumatin; Domain location=44-164; Score= 53.9; E_value=6.1e-13; Accession=PF00314.9; Description=Thaumatin family
DLCAPDIQQVKIEMARRSAHVALCSFALLLLLPAAWSATFTMTNNCGYTVWPGLLSGAGTAPLPTTGFALAHGASATVDAPASWSGRMWARTLCATDATTGKFTCATGDCGSGSVQCNGGGAAPPATLAEFTLDGSGGLDFFDVSLVDGYNVPMLIVPQGAGAA

SEQ ID NO: 70973 - protein, 241 aa, Setaria italica
  Transcript Sequence Number=SeqID_4999
  Gene Ontology: Mol. function=glutathione transferase activity; Biological process=auxin mediated signaling pathway
  Homolog annotation: Hit_ID=B6SUR9; Match level="QueryCoverage=95%, HitCoverage=99%, E-value=5e-79, Identity=61%"; Hit description =Glutathione S-transferase
  Pfam annotation: Domain name=GST_C; Domain location=114-207; Score =32.1; E_value=2.3e-06; Accession=PF00043.17; Description=Glutathione S-transferase, C-terminal domain
  Pfam annotation: Domain name=GST_N; Domain location=13-86; Score =75.8; E_value=1.6e-19; Accession=PF02798.12; Description=Glutathione S-transferase, N-terminal domain
  Pfam module annotation: Pfam domain module=GST_C::GST_N; Domain location=114-207::13-86
MSSSSQKPAQEAAPVKLITAFGSPFAHRVEVALALKGVPYELVVEDLANKSALLLAHNPVHRSVPVLIHGGRAVCESLVIVEYVDEAFHGGAAPRILPTDPYDRATARFWAQFIADKCLKPLWLSMWADGEAQARFTRETKESLAILDARLDGKRFFGGDALGFVDLAACTLAHWLDVLEEVAGVRLVGDGEYPALRRWAKEYTSDETVKRFLPDREELVAFFAANKERYTSMVRAALQQQ

SEQ ID NO: 70974 - protein, 72 aa, Setaria italica
  Transcript Sequence Number=SeqID_5000
  Pfam annotation: Domain name=DUF581; Domain location=2-39; Score =47.7; E_value=4.6e-11; Accession=PF04570.6; Description=Protein of unknown function (DUF581)
GLCNRRLGPGHDTFIYRGEVAFCSQECREQQIEYDERMEQTCSLTSIKEAPSVSGASGSDQSGSGGETVAAA

SEQ ID NO: 70975 - protein, 289 aa, Setaria italica
  Transcript Sequence Number=SeqID_5001
  Gene Ontology: Mol. function=catalytic activity; Biological process =cellular metabolic process
  Homolog annotation: Hit_ID=B6U6R0; Match level="QueryCoverage=98%, HitCoverage=82%, E-value=1e-144, Identity=87%"; Hit description =Dihydroflavonol-4-reductase
  Pfam annotation: Domain name=3Beta_HSD; Domain location=1-251; Score=- 46.6; E_value=5.4e-07; Accession=PF01073.11; Description=3-beta hydroxysteroid dehydrogenaseisomerase family
  Pfam annotation: Domain name=Epimerase; Domain location=1-226; Score =34.1; E_value=1.2e-09; Accession=PF01370.13; Description=NAD dependent epimerasedehydratase family
  Pfam annotation: Domain name=NAD_binding_4; Domain location=1-213; Score=-72.3; E_value=0.00024; Accession=PF07993.4; Description=Male sterility protein
  Pfam module annotation: Pfam domain module=3Beta_HSD::Epimerase::NAD _binding_4; Domain location=1-251::1-226::1-213
VKLLLARGYAVRGTSRLADDPKNEHLWALDGAAERLTMLQVDLLDRASLRTAFDGCDGVIHTASPMHDKPEEIIEPIIAGTRNVVEAAADAGVRRLVISSTIGTMYMNPHRDPDAPLDESSWSDLEHCKSTKNWYCYAKTIAEQNAWEAARARGLDLAVVIPVVVLGELMQPSMNTSTLHILKYLTGNAKEYVNESHPDVRLGGVLDVHVRVLEAPGAGGRRYVCAERTLHRGELCRILAELFPEYPIPTRCKDDMNPPKKGYKFTNQPLKDLGIRFTPVHEYLLIASL

SEQ ID NO: 70976 - protein, 66 aa, Setaria italica
  misc_feature (1)..(19): Xaa can be any naturally occurring amino acid
  Transcript Sequence Number=SeqID_5002
XXXXXXXXXXXXXXXXXXXFFFKVVVLYDLLLTWVLYLSSDHQIVRVSTLNKFHEIIDPILMLGDK

SEQ ID NO: 70977 - protein, 121 aa, Setaria italica
  Transcript Sequence Number=SeqID_5003
  Homolog annotation: Hit_ID=Q2QN27; Match level="QueryCoverage=57%, HitCoverage=16%, E-value=3e-24, Identity=75%"; Hit description=Seed maturation protein PM23, putative, expressed
YKKSMPWDLIQDTEPWDLSVIQKDVAPETVDAMKRTISGMLGLLPSDHICVVVEALWNPFFKLLLSSIMTGSITIAAMPGQLPDLEMLAQFGCGTVLLSLGAAFPYGVLSMGMVFMAENVK

SEQ ID NO: 70978 - protein, 394 aa, Setaria italica
  Transcript Sequence Number=SeqID_5004
  Homolog annotation: Hit_ID=Q2QN27; Match level="QueryCoverage=83%, HitCoverage=84%, E-value=1e-115, Identity=60%"; Hit description=Seed maturation protein PM23, putative, expressed
PGSEGGRRGRREESPTTPAEAGSGSGSGGISERRGRGSDRRRPTWGSPAASASPFDELHARGRPVHGPSKKSMLWNLIQDIEPLDLSVIQKDVAPETVDAMKRTISGMLGLLPSDQFRVVVEALWNPFFKLLVSSIMTGYTLRNAEYRLSFERNLELSEEDAECPKTDITEDNHHNINLGKPVTIFRLSEEDMPQDPGKSDEESSYENMVEELGDLTPQAEEYIIQMQSRLDAMKKELHDLRRKNSALQMQQFVGEEKNDLLDYLRSLTPEKVAELSESTCPGVQEAIHSVVHGLLATLSPKIHSKAPPPLENTSGGALNLGGEDDDCAELVENASLPFQPLISVPRDYLARLLFWCMLLGHYIRGLEYRLELAQLLRISSDVGSFANGDDHVV

SEQ ID NO: 70979 - protein, 103 aa, Setaria italica
  Transcript Sequence Number=SeqID_5005
  Subcellular localization annotation: CTP_CleavageSite=60; ConfidenceScore=5.84e-01
RSPEVRARASPPTLFPSSPLSPSAAVGRQAGRKRRRRSAAPTPPAVQPHHPSPRTRRRLRQGGGGGRFSGERRVVGDGAQRRGVGDGVEEGASGVRWALLPLP

SEQ ID NO: 70980 - protein, 243 aa, Setaria italica
  Transcript Sequence Number=SeqID_5006
  Gene Ontology: Mol. function=protein kinase activity; Cellular component=integral to membrane; Biological process=protein amino acid phosphorylation
  Homolog annotation: Hit_ID=Q6L569; Match level="QueryCoverage=75%, HitCoverage=27%, E-value=3e-53, Identity=60%"; Hit description =Putative receptor protein kinase
  Pfam annotation: Domain name=LRR_1; Domain location=103-125; Score =13.4; E_value=0.82; Accession=PF00560.25; Description=Leucine Rich Repeat
  Pfam annotation: Domain name=LRR_1; Domain location=127-148; Score =11.2; E_value=2.1; Accession=PF00560.25; Description=Leucine Rich Repeat
  Pfam annotation: Domain name=LRR_1; Domain location=149-171; Score =12.4; E_value=1.3; Accession=PF00560.25; Description=Leucine Rich Repeat
  Pfam annotation: Domain name=LRR_1; Domain location=30-53; Score=2.6; E_value=95; Accession=PF00560.25; Description=Leucine Rich Repeat
  Pfam annotation: Domain name=LRR_1; Domain location=55-77; Score =15.8; E_value=0.18; Accession=PF00560.25; Description=Leucine Rich Repeat
  Pfam annotation: Domain name=LRR_1; Domain location=79-101; Score =13.4; E_value=0.84; Accession=PF00560.25; Description=Leucine Rich Repeat
  Pfam module annotation: Pfam domain module=LRR_1::LRR_1::LRR_1::LRR _1::LRR_1::LRR_1; Domain location=103-125::127-148::149-171::30 -53::55-77::79-101
ATPHERRLGWNTSTPTCGWVGVTCDSSQSTVVELRLPGIGIVGAIPPGTLGRLTNLRVLSLRSNRVVGSIPDDLLQLPNLKALFLQQNRLSGAIPPGIARLGGLERLVLAHNDLSGPIPFALNNLTALRVLRLDGNNLTGSIPSISIPRLDVFNVSDNNLNGSIPKSLSRFPPEYFSGNLLLCGDPLPPCKSPFFPPAPAPGMSPDGGSPMPGSSKKRKLSGAAIAGIVVGAVVVGLLLLIAI

SEQ ID NO: 70981 - protein, 103 aa, Setaria italica
  Transcript Sequence Number=SeqID_5007
RKIHVAPVKVFLFFLVKRLAIKEPHKGHVQVLEHLDLFSTVWLASTTTCFIWLANMLDQGTTNAAMECISLYRCLFREISSCSFLLLERRKCQYSPVLNNTVL

SEQ ID NO: 70982 - protein, 384 aa, Setaria italica
  Transcript Sequence Number=SeqID_5008
  Gene Ontology: Mol. function=ion channel activity; Cellular component= integral to membrane; Biological process=ion transport
  Homolog annotation: Hit_ID=B6U9Q0; Match level="QueryCoverage=95%, HitCoverage=71%, E-value=0.0, Identity=88%"; Hit description=Cyclic nucleotide-gated ion channel 2
  Pfam annotation: Domain name=cNMP_binding; Domain location=206-304; Score=36.1; E_value=1.4e-07; Accession=PF00027.21; Description =Cyclic nucleotide-binding domain
  Subcellular localization annotation: CTP_CleavageSite=26; ConfidenceScore=5.03e-01
SAAAAGHLGAGRLAWARNAPARATCLASSSGDGSGGYQYGAYKWTVMLVANPSRVERMLLPIFWGLMTLSTFGNLESTTEWLEIVFNILTITGGLILVTMLIGNIKVFLNATTSKKQAMHTRLRAVEWWMRRKGLPRGFRHRVRQFERQRWAATRGVDECQIVRDLPEGLRRDIKYHLCLDLVRQVPLFQHMDDLVLENICDRVKSLIFPKGETIVREGDVVRRMLFIVRGHLACSQALRNGATSSCTLGPGNFSGDELLSWCLRRPFRDRLPTASATLVTLESTEAFGLDAADVKYVTQHFRYTFANEKVRRSARYYSPGWRTWAAVAVQLAWRRYKHRKTLASLSFIRPRRPLSRCSSLGEEKLRLYTAILTSPKPNQDDDF

SEQ ID NO: 70983 - protein, 85 aa, Setaria italica
  Transcript Sequence Number=SeqID_5009
  Gene Ontology: Mol. function=phosphoenolpyruvate carboxylase activity; Cellular component=cytoplasm; Biological process=carbon utilization by fixation of carbon dioxide
  Homolog annotation: Hit_ID=Q8S2Z8; Match level="QueryCoverage=90%, HitCoverage=7%, E-value=1e-38, Identity=98%"; Hit description =Putative C4 phosphoenolpyruvate carboxylase
LPANEPYRVVLGYVRDKLYSTRERSRHLLTSGFSDIPEDSAFKNVEEFLEPLELCYKSLCDCGDKTIADGSLLDFMRTRYYERYG

SEQ ID NO: 70984 - protein, 166 aa, Setaria italica
  misc_feature (95)..(95): Xaa can be any naturally occurring amino acid
  Transcript Sequence Number=SeqID_5010
  Gene Ontology: Mol. function=nucleoside-triphosphatase activity; Cellular component=membrane; Biological process=transport
  Homolog annotation: Hit_ID=Q8GU82; Match level="QueryCoverage=100%, HitCoverage=12%, E-value=1e-83, Identity=90%"; Hit description=PDR -like ABC transporter
  Pfam annotation: Domain name=ABC_tran; Domain location=6-164; Score= -44.3; E_value=0.0094; Accession=PF00005.19; Description=ABC transporter
MSSSTPQYLRAYVSQYDLHHAEMTVRETIDFSSKMLGTNNEFEMLGEAIRRKKATTFGEGSNLTTNYIIKILGLSECADTLVGDELRRGISGGQXKRATIGEMLVGLARCFFMDDISTGLDSSTTFEIMKFLQQMAHLMDLTMVISLLQPPPETLELFDDIILLCE

SEQ ID NO: 70985 - protein, 156 aa, Setaria italica
  misc_feature (8)..(8): Xaa can be any naturally occurring amino acid
  misc_feature (37)..(37): Xaa can be any naturally occurring amino acid
  Transcript Sequence Number=SeqID_5011
  Homolog annotation: Hit_ID=B9T165; Match level="QueryCoverage=100%, HitCoverage=26%, E-value=4e-44, Identity=54%"; Hit description=RNA binding protein, putative
SVFKMPRXAFDYVCSLVKDEMMVRSSSYTFLDGTVLXLEDRVAIALRRLNSGGSLVTVGSSVGVNHSTVSLITWRFIEAMEERASHHLRWPDTGEMEKIKSKFEKIHGLPNCCGVVDTTHITMCLSSAEPNCKVWLDQEKNYSMVLQLLTHADMRF

SEQ ID NO: 70986 - protein, 255 aa, Setaria italica
  misc_feature (42)..(42): Xaa can be any naturally occurring amino acid
  Transcript Sequence Number=SeqID_5012
  Gene Ontology: Mol. function=nucleotide binding
  Homolog annotation: Hit_ID=Q6ZD37; Match level="QueryCoverage=98%, HitCoverage=55%, E-value=1e-128, Identity=86%"; Hit description=AP2 domain-containing protein AP29-like
  Pfam annotation: Domain name=DUF246; Domain location=1-252; Score =156.8; E_value=6.6e-44; Accession=PF03138.6; Description=Plant protein family
YCSKRKGHFDYVESVLPALLEHQYISLTPSANQRRDRYPSYXKTSYCQGCYNALRLNKKVESKAIELLQTIPKPFVSLHLRFEPDMVAYSRCAYTGLSSKSLDSIEAARGEGRMVLTGDAARLWRNRGKCPLTPSETAFILQALGIPTSTNIYLAAGDGLMELEGFTSVYKNIYTKSSLLTNEDFERMHGNTKAALDYYVSINSDAYIATFFGNMDKMVTAVRTMQGLQKTLVLSRRAFANNSAAGLAGEQLAKG

SEQ ID NO: 70987 - protein, 132 aa, Setaria italica
  Transcript Sequence Number=SeqID_5013
  Subcellular localization annotation: CTP_CleavageSite=29; ConfidenceScore=5.27e-01
MELRMAPASPPTPPPAMDFRLDSAATSPYATAPSSPRGRLVRDEGTAGGLFLTAPPSPNPFDLLPPATPRLTGANPFDLFQHFTSAPASPRRAAAIYAHFAEGNGGDGEEDDDGDEEFQPRGSYATGGSSVP

SEQ ID NO: 70988 - protein, 37 aa, Setaria italica
  Transcript Sequence Number=SeqID_5014
  Gene Ontology: Mol. function=transferase activity; Cellular component= membrane; Biological process=RNA-dependent DNA replication
  Homolog annotation: Hit_ID=B6SNQ6; Match level="QueryCoverage=94%, HitCoverage=8%, E-value=6e-13, Identity=94%"; Hit description =Exostosin-like
VGLQVQKHFVWHSPPLSYDAFHMVMYELWLRHNVIKY

SEQ ID NO: 70989 - protein, 103 aa, Setaria italica
  Transcript Sequence Number=SeqID_5015
  Gene Ontology: Cellular component=plasma membrane
  Homolog annotation: Hit_ID=Q9XI10; Match level="QueryCoverage=89%, HitCoverage=12%, E-value=3e-20, Identity=47%"; Hit description =F8K7.10 protein
CRPDGSRLRRVYVAGPEGSAEADKERINHVCFSPDSRWLLFTANLGGVMAEPVSGPNQFQPYGDLYVCRLDGSGLQRLTCNAYENGTPAWGPERRASGWRRCR

SEQ ID NO: 70990 - protein, 104 aa, Setaria italica
  Transcript Sequence Number=SeqID_5016
  Gene Ontology: Cellular component=plasma membrane
  Homolog annotation: Hit_ID=Q9XI10; Match level="QueryCoverage=45%, HitCoverage=6%, E-value=2e-11, Identity=59%"; Hit description =F8K7.10 protein
KKLKKRKKTKKVKKQKNGKRKPTDGVMAEPVSGPNQFQPYGDLYVCRLDGSGLQRLTCNAYENGTPAWGPRAPGSGWRRCRWARPPGRDPMGQFDEPLWLTCDV

SEQ ID NO: 70991 - protein, 106 aa, Setaria italica
  Transcript Sequence Number=SeqID_5017
  Subcellular localization annotation: CTP_CleavageSite=48; ConfidenceScore=5.33e-01
SEIHSLPRLSILQDLKMKVCNSGEVPTNSGELFRRTPVSPGKSNTTTRCASSSSTPWCPRFHEIDSGTPSAAPFFVGSGETPKTPWKIPPYAPQSKSHPFSDLTLS

SEQ ID NO: 70992 - protein, 98 aa, Setaria italica
  Transcript Sequence Number=SeqID_5018
NHAIQFHINFLIKHLRNSLITSVTMLAMYESTYRRHRCSFGLSRQDAPLVMPNELLSLGGRLDGGRGQAAPSPPTPSSVGRRRRPLCCYVPHLQCPTP

SEQ ID NO: 70993 - protein, 284 aa, Setaria italica
  Transcript Sequence Number=SeqID_5019
  Gene Ontology: Mol. function=catalytic activity
MPPIAYGQDDLNKLYKRVCPSVVSVNSYATKNYSFNFFTGFIVYSDRSRSLICVHKSVIEVHSTLYVHFSDGSTEKATVFLEKTASGHAVLVTESRRGHARSGVSFSQCEPRREEIFTIAEVEGGYSGFNFMTGTIISPSCKAEGLRLKLVPESERKFALSCPAVIRPEMVIKEQLEVAKRQIIGAAVFDLEGSLIGTITSLDELTYDLKFAQQACHWVDELEAELKAKDEKISLSKKARKGRPGPSGTKKGPNGTKKRKLKDYDEQIHTVEEKGSSMYDSLNI

SEQ ID NO: 70994 - protein, 197 aa, Setaria italica
  misc_feature (32)..(32): Xaa can be any naturally occurring amino acid
  misc_feature (59)..(59): Xaa can be any naturally occurring amino acid
  misc_feature (81)..(81): Xaa can be any naturally occurring amino acid
  Transcript Sequence Number=SeqID_5020
  Gene Ontology: Mol. function=secondary active sulfate transmembrane transporter activity; Cellular component=integral to membrane; Biological process=sulfate transport
  Homolog annotation: Hit_ID=B9SJ59; Match level="QueryCoverage=90%, HitCoverage=27%, E-value=2e-71, Identity=78%"; Hit description =Sulfate transporter, putative
  Pfam annotation: Domain name=Sulfate_transp; Domain location=85-197; Score=-131.2; E_value=0.00099; Accession=PF00916.12; Description =Sulfate transporter family
  Subcellular localization annotation: CTP_CleavageSite=48; ConfidenceScore=5.25e-01
FFFLSLQFQLSVHGACVDSSFVPPMVYAVLGXSRDLAVGPVSIASLVMGSMLRDAVEPXPPEPLLFLQLAFTSTFFAGLVXQASLGILRLGFIIDFLSKATLVGFMAGAAIIVSLQQLKALLGIVHFTTEMGLVPVMASVFHHTKEWSWQTILMGVCFLAFLLTARHVSMRWPRLFWVSACAPLASVIISTLLVFLF

SEQ ID NO: 70995 - protein, 692 aa, Setaria italica
  misc_feature (270)..(270): Xaa can be any naturally occurring amino acid
  Transcript Sequence Number=SeqID_5021
  Gene Ontology: Mol. function=secondary active sulfate transmembrane transporter activity; Cellular component=integral to membrane; Biological process=sulfate transport
  Homolog annotation: Hit_ID=O04001; Match level="QueryCoverage=94%, HitCoverage=95%, E-value=0.0, Identity=74%"; Hit description =Sulphate transporter protein
  Pfam annotation: Domain name=STAS; Domain location=562-679; Score =113.7; E_value=6.3e-31; Accession=PF01740.13; Description=STAS domain
  Pfam annotation: Domain name=Sulfate_transp; Domain location=206-539; Score=486.8; E_value=2.9e-143; Accession=PF00916.12; Description =Sulfate transporter family
  Pfam module annotation: Pfam domain module=STAS::Sulfate_transp; Domain location=562-679::206-539
VGMRGAYGGGGGYSNGNESRPLGGAAAAAAPMTTTSAEIAGMAVHKVATPPPQSTASKMKARVKETFFPDDPFRAFKGQPLGTQWLMAVKYLFPILDWVPGYSFSLFKSDLVSGLTIASLAIPQGISYAKLASLPPIIGLYSSFVPPMVYAVLGSSRDLAVGPVSIASLVMGSMLRDAVSPTAEPLLFLQLAFTSTFFAGLVQASLGILRLGFIIDFLSKATLVGFMAGAAIIVSLQQLKALLGIVHFTTEMGLVPVMASVFNHTHPRQXLANQRVLIVFLLSPCGVTKEWSWQTILMGVCFLAFLLTARHVSMRWPRLFWVSACAPLASVIISTLLVFLFKAQNHGISIIGQLKCGLNRPSWDKLIFDTTYLGLTMKTGLITGILSLTEGIAVGRTFASLKDYQVDGNKEMMAIGLMNVVGSCTSCYVTTGAFSRSAVNHNAGCKTAMSNVVMALTVMVTLLFLMPLFVYTPNVVLGAIIIAAVIGLIDAPAVYQIWKMDKMDFLVCVCAFAGVIFISVQEGLAIAVGLSVFRVLMQITRPKMIIQGNIKGTDIYRDLHQYKEAQRVPGMLILAIEAPINFANSNYLNERIKRWIEEESSAHNKQTELHFIILDLSAVPAIDTSGIALLIDIKKAIEKRGLELVLVNPTGEVMEKIQRANEALNQFRSNCLYLTTGEAVASLSALAKMTKP

SEQ ID NO: 70996 - protein, 79 aa, Setaria italica
  Transcript Sequence Number=SeqID_5022
  Pfam annotation: Domain name=DUF1298; Domain location=1-68; Score= -52.4; E_value=2e-05; Accession=PF06974.5; Description=Protein of unknown function (DUF1298)
MVVNMHTLVMFDYHLLFPFVKYVQALTILWQSYADTIRVVLAVDDSQFPDCHHLLDDFAESLKLIREAASAHYQEAGNS

SEQ ID NO: 70997 - protein, 114 aa, Setaria italica
  misc_feature (22)..(22): Xaa can be any naturally occurring amino acid
  Transcript Sequence Number=SeqID_5023
  Homolog annotation: Hit_ID=A3QME3; Match level="QueryCoverage=97%, HitCoverage=21%, E-value=7e-24, Identity=49%"; Hit description=Wax synthase
  Pfam annotation: Domain name=DUF1298; Domain location=1-113; Score =152.6; E_value=1.2e-42; Accession=PF06974.5; Description=Protein of unknown function (DUF1298)
VDRKKHSLEVIVTHGIKKGHLXLFGTKVSGAIFHRMISNTTVPFSNMIGPVEPVEFYGHRVVYIAPSVYGHPSALTILWQSYADTIRVVLAVDDSQFPDCHHLLDDFAESLKTN

SEQ ID NO: 70998 - protein, 100 aa, Setaria italica
  misc_feature (4)..(4): Xaa can be any naturally occurring amino acid
  Transcript Sequence Number=SeqID_5024
  Gene Ontology: Mol. function=ATPase activity, coupled to transmembrane movement of ions, phosphorylative mechanism; Cellular component=integral to membrane; Biological process=phospholipid transport
  Homolog annotation: Hit_ID=Q9XIE6; Match level="QueryCoverage=50%, HitCoverage=4%, E-value=2e-18, Identity=78%"; Hit description =Phospholipid-transporting ATPase 3
  Subcellular localization annotation: CTP_CleavageSite=61; ConfidenceScore=5.03e-01
NARXKEMVRVATARLGGEQPGGGGASSSGLGRRESTARLGGAGTSFRRQPQPMAPTVRTVYCNDREANAPVGYKGNSVSTTKYSILTFLPKGLFEQFRRV

SEQ ID NO: 70999 - protein, 93 aa, Setaria italica
  Transcript Sequence Number=SeqID_5025
KQEPAPPPPKVVEVPYPWPYPYPFPAWPSDCCCHHGHGGCHCCSCGKAPEAPPAPPPQYIPMPQYVPQPYPCNPPYGYRVCCEDDPSYACTIM

SEQ ID NO: 71000 - protein, 94 aa, Setaria italica
  Transcript Sequence Number=SeqID_5026
QRRGGHRRRGGGGEGAQGARRRVLAVPVPGLLRGRPLLRLHHHVNAITPSRASLLISMPLITYHSTTSAYCHPNHASCTINPSPYRFIILRILY

SEQ ID NO: 71001 - protein, 155 aa, Setaria italica
  Transcript Sequence Number=SeqID_5027
  Gene Ontology: Mol. function=hydrolase activity; Biological process =metabolic process
  Homolog annotation: Hit_ID=B6TIA5; Match level="QueryCoverage=83%, HitCoverage=39%, E-value=1e-46, Identity=69%"; Hit description =Gibberellin receptor GID1L2
  Pfam annotation: Domain name=Abhydrolase_3; Domain location=1-134; Score=-77.2; E_value=0.013; Accession=PF07859.5; Description =alphabeta hydrolase fold
TIAHVVAARAGGHGAGGLGMRVRGLLIVHPYFSGAADIGDEGAAGKERKARADAFWRFLYPGSPGLDDPLSNPFSEAAGGSAARVAAERVLVCVAEEDDLRDRGVWYYENLKASGYPGEVELLESTGEGHVFYCIKPRCDKAREMQERVLSFLRK

SEQ ID NO: 71002 - protein, 357 aa, Setaria italica
  Transcript Sequence Number=SeqID_5028
  Gene Ontology: Mol. function=catalytic activity; Cellular component =plasma membrane
  Homolog annotation: Hit_ID=B6SV25; Match level="QueryCoverage=100%, HitCoverage=71%, E-value=1e-156, Identity=75%"; Hit description =Protein phosphatase 2C containing protein
  Pfam annotation: Domain name=PP2C; Domain location=1-265; Score=99.1; E_value=1.5e-26; Accession=PF00481.13; Description=Protein phosphatase 2C
GSKHDTVFCGVFDGHGPNGHLVAKRVRDLLPVKLSANLGRNGTTTGGTTPHRVEDTDASLENEENGEHPEFFPALRASFLRAFYVMDRDLKLHRNIDCAFSGTTAVTVFKQGQNLIICNLGDSRAVLGTRDEDNQLVAVQLTVDLKPSIPSEAERIKQRRGRVFSLPDEPNVARVWLPTFNSPGLAMARSFGDFCLKNYGIISMPDVSYHCITEKDEFVVLATDGVWDVLSNDEVVSIISNAPSRVSAARFLVESAQRAWRTRYPTSKTDDCAAVCLFLNTEAASASSSSGTKDSTNIEVSSSMHSLTVKSSTAVPANLVTALVADEEWSVLDAVSGSVTVPILPKPTSVVNESTKD

SEQ ID NO: 71003 - protein, 51 aa, Setaria italica
  Transcript Sequence Number=SeqID_5029
  Gene Ontology: Mol. function=nucleic acid binding
  Pfam annotation: Domain name=SAP; Domain location=3-37; Score=36.6; E_ value=1e-07; Accession=PF02037.19; Description=SAP domain
MDFAGMKRRELQALCKRHGLPAGGTNAALVARLDAALSGPLVRKRRRMWSE

SEQ ID NO: 71004 - protein, 135 aa, Setaria italica
  misc_feature (20)..(20): Xaa can be any naturally occurring amino acid
  Transcript Sequence Number=SeqID_5030
  Gene Ontology: Mol. function=structural constituent of ribosome; Cellular component=ribonucleoprotein complex; Biological process =metabolic process
  Homolog annotation: Hit_ID=Q5JMT5; Match level="QueryCoverage=99%, HitCoverage=56%, E-value=1e-57, Identity=62%"; Hit description=CBS domain-containing protein-like
  Pfam annotation: Domain name=CBS; Domain location=1-99; Score=7.5; E _value=0.02; Accession=PF00571.20; Description=CBS domain
RMREHRVNSVVVMTGNMLLXVIFTSKDLALRVVAQNLPPETTLVEKAMTANPECATLDTSILDALHSMQDGKFLHIPVIDKNGHIIACLDALQLTHATISMVEGASGANDVANSMMQKFWDSALAMHPAEESDAL

SEQ ID NO: 71005 - protein, 57 aa, Setaria italica
  Transcript Sequence Number=SeqID_5031
  Gene Ontology: Mol. function=nucleotide binding; Biological process =defense response
  Homolog annotation: Hit_ID=Q5Z9J6; Match level="QueryCoverage=89%, HitCoverage=3%, E-value=3e-13, Identity=66%"; Hit description =Putative NBS-LRR disease resistance protein
MEVVAVSAARWVLGKALGSVADGLLEAWAASVGLGPNIDALKMELLYAQGIASTNVV

SEQ ID NO: 71006 - protein, 93 aa, Setaria italica
  misc_feature (31)..(31): Xaa can be any naturally occurring amino acid
  Transcript Sequence Number=SeqID_5032
  Gene Ontology: Mol. function=protein tyrosine kinase activity; Biological process=protein amino acid phosphorylation
  Homolog annotation: Hit_ID=Q10EC2; Match level="QueryCoverage=94%, HitCoverage=13%, E-value=4e-28, Identity=71%"; Hit description =Lectin receptor kinase 7, putative, expressed
REARGGGYDAGEATLALKLGLLCSHPLPGAXRPSMRQVMQYLDGDMPFPELTPAHLSFSMLALMRSEGFDSFVMSASHASSTAMSIGTMTGLS

SEQ ID NO: 71007 - protein, 362 aa, Setaria italica
  Transcript Sequence Number=SeqID_5033
  Homolog annotation: Hit_ID=Q6EPK9; Match level="QueryCoverage=81%, HitCoverage=42%, E-value=2e-45, Identity=37%"; Hit description =Ankyrin-like protein
  Pfam annotation: Domain name=Ank; Domain location=59-92; Score=31.3; E_value=3.9e-06; Accession=PF00023.22; Description=Ankyrin repeat
GYGQLIYELCRFCPDCDELLDSRGRNFLHIAIENKKWKVVWRFSGTAELVRMANVMDSEGNTPLHLAVKNADQMIVSLLMATKGVLPNIVNNQGLTALDLAVLATDKGISYTLNPQVIILRCLAWTGAVLSPRRLDHFIDEFGIGKTSGNELKKFTNIAQNLIVGSVLVSTVTFAAVFTLPGGYISDGHPHAGAPILSHRYTFKAFVMANTLAFVGSTLSTIWLTYAGSEHVHPLLRAIYMFLSVISMEQATRSMVIGFALGAYVVLSPVSERIAIVVCVSTFMTLLLRNPSSWQLWFLFMPIKRRLGWKGAFKTHLPQETRSRLTIGVGSNFACLFLRRMLGTIFTYSFIFLFSIAMMTAI

SEQ ID NO: 71008 - protein, 85 aa, Setaria italica
  Transcript Sequence Number=SeqID_5034
  Gene Ontology: Mol. function=microtubule motor activity; Cellular component=microtubule associated complex; Biological process =microtubule-based process
  Homolog annotation: Hit_ID=B4FI70; Match level="QueryCoverage=100%, HitCoverage=66%, E-value=1e-44, Identity=98%"; Hit description =Dynein light chain LC6, flagellar outer arm
  Pfam annotation: Domain name=Dynein_light; Domain location=1-85; Score=165.6; E_value=1.5e-46; Accession=PF01221.10; Description =Dynein light chain type 1
KIQLKSADMKEEMRQEAFEIARIAFEKHTMEKDIAEYIKKEFDKNHGPTWHCIVGRNFGSYVTHETNYFVYFYIDSKAVLLFKSG

SEQ ID NO: 71009 - protein, 129 aa, Setaria italica
  Transcript Sequence Number=SeqID_5035
  Homolog annotation: Hit_ID=Q7XS27; Match level="QueryCoverage=76%, HitCoverage=61%, E-value=3e-34, Identity=60%"; Hit description =OSJNBa0080E14.9 protein
MGKEAAAKAFDAEKAKVMKELEDLKKKVEEIQTKKDLVEGEKDKLRLEILIAEQKHSMSQLEVKRLKMELGALAEEKETIVKSFDPEKAKFMKEVEDLKREIEGIQVSKEAAEKAWRDNNAEVDRQRAE

SEQ ID NO: 71010 - protein, 132 aa, Setaria italica
  Transcript Sequence Number=SeqID_5036
  Homolog annotation: Hit_ID=Q84QW4; Match level="QueryCoverage=75%, HitCoverage=37%, E-value=2e-14, Identity=48%"; Hit description =Putative auxin-induced protein
  Pfam annotation: Domain name=DUF568; Domain location=23-132; Score =130.8; E_value=4.5e-36; Accession=PF04526.5; Description=Protein of unknown function (DUF568)
FVAAPAAPGGWVAWGLNPSGDGMPGAQALVAGPFSDDGTSWAVRTYNVSGYALGNPGPIAFPASDLAAELGADGRARVYGRLALGPSYGGGVLLNQVWQVGAAVAGGSPAPHAMGADNLAAKAKLDLLRSTT

SEQ ID NO: 71011 - protein, 153 aa, Setaria italica
  Transcript Sequence Number=SeqID_5037
  Gene Ontology: Mol. function=metalloendopeptidase activity; Cellular component=chloroplast envelope; Biological process=proteolysis
  Homolog annotation: Hit_ID=B9RMP2; Match level="QueryCoverage=62%, HitCoverage=39%, E-value=7e-14, Identity=46%"; Hit description =Oligopeptidase, putative
KDEDVIIDTAKEQYRVLKTENEFRYGYKVVENGNVRSALTTSNVIELPKKDELKTVVDKVKDFFGDVTAGAKESFAQITGSAVTKEDEEAQGKEKFRSKRRKKQRKSKQGLSKYIETASTIQHHLCKPHCHPLFSHQTESKHVIFRYYLAETE

SEQ ID NO: 71012 - protein, 56 aa, Setaria italica
  Transcript Sequence Number=SeqID_5038
  Gene Ontology: Mol. function=metalloendopeptidase activity; Cellular component=chloroplast envelope; Biological process=proteolysis
  Homolog annotation: Hit_ID=Q9FXD5; Match level="QueryCoverage=73%, HitCoverage=4%, E-value=1e-12, Identity=82%"; Hit description =F12A21.16
LNIITGGTTAKIMLAAKDNFLGKYIYKDTLARNLAAVIYKVIIDISRSLLHSSHAL

SEQ ID NO: 71013 - protein, 220 aa, Setaria italica
  Transcript Sequence Number=SeqID_5039
  Gene Ontology: Mol. function=metalloendopeptidase activity; Cellular component=chloroplast envelope; Biological process=proteolysis
  Homolog annotation: Hit_ID=B9RMP2; Match level="QueryCoverage=83%, HitCoverage=76%, E-value=2e-52, Identity=57%"; Hit description =Oligopeptidase, putative
GRFVRRAAPRRQPARRALVVEARGRSWSERQMEQQRRMPQLPKIEDDGNPRFVIFIRTANVYFWYPLNIITGGTTAKIMLAAKDNFLGKYIYKDTLARNLAAVIYKDEDVIIDTAKEQYRVLKTENEFRYGYKVVENGNVRSALTTSNVIELPKKDELKTVVDKVKDFFGDVTAGAKESFAQITGSAVTKEDEEAQGKEKFRSKRRKKQRKSKQGLKTEK

SEQ ID NO: 71014 - protein, 137 aa, Setaria italica
  Transcript Sequence Number=SeqID_5040
  Gene Ontology: Mol. function=nutrient reservoir activity; Cellular component=extracellular region
  Homolog annotation: Hit_ID=B6TF80; Match level="QueryCoverage=82%, HitCoverage=49%, E-value=3e-52, Identity=91%"; Hit description =Germin-like protein subfamily 3 member 2
AHHLLLLLLAVLLPAAATADPDAVQDYCVPDAGGRGRPLELSLLRTYPCRSPVNLTASDFAFAGVRAAGNFSADTGFAGVSVTPAQFPALHTLGVSFARADLSAAGGVNPPHYHPRATETALVLAGRVYAGFVDSGG

SEQ ID NO: 71015 - protein, 189 aa, Setaria italica
  Transcript Sequence Number=SeqID_5041
  Homolog annotation: Hit_ID=B6T443; Match level="QueryCoverage=37%, HitCoverage=22%, E-value=1e-17, Identity=60%"; Hit description=THUMP domain containing protein
DVEKGETAPAQQQQEVLDSSVPASKDDEEQAGTAEEPREKKQRVEDPPVSEQTEQKEAADETKESTDEPKESTDEPKEPTDEPKEPTDKPKESSERNIDDLIDEDLKELGDRKKILTAHLSSSSHSSSSSASDEEWLKRRKRAHLSSSSDSDEEWEEWLKRRRRRRALAIVCAAVGMMYYYDTYLDKAK

SEQ ID NO: 71016 - protein, 346 aa, Setaria italica
  misc_feature (24)..(24): Xaa can be any naturally occurring amino acid
  misc_feature (36)..(36): Xaa can be any naturally occurring amino acid
  Transcript Sequence Number=SeqID_5042
  Gene Ontology: Mol. function=molecular_function; Cellular component =cellular_component; Biological process=biological_process
  Homolog annotation: Hit_ID=B6T443; Match level="QueryCoverage=98%, HitCoverage=84%, E-value=1e-127, Identity=67%"; Hit description =THUMP domain containing protein
  Pfam annotation: Domain name=THUMP; Domain location=235-326; Score =55.2; E_value=2.5e-13; Accession=PF02926.9; Description=THUMP domain
MLLTPLLLLQFYEDLVDGKGSDEXPKGIHDKPMNKXIKFEDSDSSDDEDKDHSAEEADNGNGNDVEKGETAPAQQQQEVLDSSVPASKDDEEQAGTAEEPREKKQRVEDPPVSEQTEQKEAADETKESTDEPKESTDEPKEPTDEPKEPTDKPKDTTGKPKESSERNIDDLIDEDLKELGDRKKRLFASLESGCNGCIFIQMHKRAGDPGPVEIVQNMMSSAASTRKHMSRFILRVLPVEVACYASEEEITKAISPLVEKYFPTECPGHKFAVLYEARSNTGIDRMKIINAVAKSVPQPHKVDLKNPDKTIIVQIAKTICMIGVVERYKELAKFNLRQLTSPESEK

SEQ ID NO: 71017 - protein, 202 aa, Setaria italica
  Transcript Sequence Number=SeqID_5043
  Gene Ontology: Biological process=protein modification process
DVEIARSAAVWELKAAIEELFFALFDDTEKTIPWQHVWSHFCLCFKDEKLTDDKATLRAFGIRDGDELHFAQHLSVDYSPCKSLPKNQKTASHRRSMTSSDDIRPRSLLDDLNEDEGEKFTDSRCSTSVLEDLCIYEYNEERMEEESRKKGSLFRGWFSYSKLRSNRRTHAEDTVPPSCEKKNARPKLGKWFSSKRSKTQGN

SEQ ID NO: 71018 - protein, 48 aa, Setaria italica
  Transcript Sequence Number=SeqID_5044
PLNSIKEIDNCDIVSQYQSSKLLWDTKGLLLPDTKLQTCSKDVEDVRA

SEQ ID NO: 71019 - protein, 122 aa, Setaria italica
  Transcript Sequence Number=SeqID_5045
  Gene Ontology: Mol. function=structural constituent of ribosome; Cellular component=ribonucleoprotein complex; Biological process =translation
  Homolog annotation: Hit_ID=Q9M573; Match level="QueryCoverage=96%, HitCoverage=97%, E-value=2e-44, Identity=75%"; Hit description=60S ribosomal protein L31
  Pfam annotation: Domain name=Ribosomal_L31e; Domain location=10-104; Score=216.4; E_value=7.6e-62; Accession=PF01198.11; Description =Ribosomal protein L31e
MAGKKGAAARKEDVVTREYTINLHKRLHGCTFKKKAPNAIKEIRKFAQKAMGTTDVRVDVKLNKHIWSSGIRSVPRRVRVRIARRRNDEEDAKEELYSLVTVTEIPAEGLKGLGTKVIDEAD

SEQ ID NO: 71020 - protein, 149 aa, Setaria italica
  Transcript Sequence Number=SeqID_5046
  Gene Ontology: Mol. function=lyase activity
  Homolog annotation: Hit_ID=B6T9C1; Match level="QueryCoverage=100%, HitCoverage=78%, E-value=2e-67, Identity=83%"; Hit description =Pterin-4-alpha-carbinolamine dehydratase
  Pfam annotation: Domain name=Pterin_4a; Domain location=81-149; Score= -13.0; E_value=0.036; Accession=PF01329.11; Description=Pterin 4 alpha carbinolamine dehydratase
  Subcellular localization annotation: CTP_CleavageSite=29; ConfidenceScore=5.18e-01
MIRTATVHARLLLSRSYVSQAKVASRWPLVSRKPSLLGCGRPFYQMDTRGQDENKVSTSRGCHTSPESQELAKKSCVPCNSKDLHPMSEDSAKKLLEQVNGWELTTEGGILKLHRAWKVKNFAKGLEFFQLVAAIAEEEGHHPDLHLVG

SEQ ID NO: 71021 - protein, 75 aa, Setaria italica
  Transcript Sequence Number=SeqID_5047
  Subcellular localization annotation: CTP_CleavageSite=59; ConfidenceScore=5.01e-01
VVSLRSQLDRCLHRHQLLYYIKLAGLRYCSQPLTRGSCSFSQSLSRKNRRALRYFSQTLACEVQSLPFRKNKERR

SEQ ID NO: 71022 - protein, 32 aa, Setaria italica
  Transcript Sequence Number=SeqID_5048
TYFFFGLLADMKRNKCTDLFHYTRTFVSLHIS

SEQ ID NO: 71023 - protein, 162 aa, Setaria italica
  Transcript Sequence Number=SeqID_5049
MGRERALKRAEADGRTQPSSVMRAKCNPIMTDWPSRAAMHVRVQFAINETRTTCRRHASTSPSRPILILSVHFHWHTSSAMASPKHNPTTCKQIKKKQRPLVLRRAMLHSCACFLVGLVTGLAPSDWADAASRAAADANTNLLSRAARAMNHTEALLTTHYQ

SEQ ID NO: 71024 - protein, 66 aa, Setaria italica
  Transcript Sequence Number=SeqID_5050
MLHLFLSSVSTSGSILFLMKTLDSVQLHTYRMAHVICWWMAYIFLIILVFYARTRLILTYLGNIFC

SEQ ID NO: 71025 - protein, 342 aa, Setaria italica
  Transcript Sequence Number=SeqID_5051
  Gene Ontology: Mol. function=protein dimerization activity; Cellular component=membrane; Biological process=regulation of transcription, DNA-dependent
  Homolog annotation: Hit_ID=B6SSU4; Match level="QueryCoverage=86%, HitCoverage=63%, E-value=1e-113, Identity=71%"; Hit description=DNA binding protein
  Pfam annotation: Domain name=bZIP_1; Domain location=187-250; Score =32.3; E_value=1.9e-06; Accession=PF00170.13; Description=bZIP transcription factor
  Pfam annotation: Domain name=bZIP_2; Domain location=187-241; Score =40.8; E_value=5.6e-09; Accession=PF07716.7; Description=Basic region leucine zipper
  Pfam module annotation: Pfam domain module=bZIP_1::bZIP_2; Domain location=187-250::187-241
HRRSHSDIPFGGFAQLSPPLPPPAPVKREVTIAAEGCRSDGGDDAALYDLVNAYMDLDGLDPLNSSEDRHDDRDSRASGTRAGSAAESSENEAESQSTSVDRKDGGKSRHCRSLSMDSFMGKLNFAAGDESPKLPLPSPGGSLTRSGSGSLEGGAVALFDMEFANGEFTESEKKKIMANERLAEIALTDPKRVKRILANRQSAARSKERKMRYIQELEHKVQVLQTEATTLSAQLTMLQRDSAGLATQNNELKIRLQAMEQQAQLRDALNEALTGEVQRLKLATGEISDGRMPKSLQQQMNSQMLQLQQLQIQQQQQQQAPQQQQQQHQHQQQHQQQPQKSA

SEQ ID NO: 71026 - protein, 253 aa, Setaria italica
  Transcript Sequence Number=SeqID_5052
  Gene Ontology: Mol. function=catalytic activity; Biological process =metabolic process
  Homolog annotation: Hit_ID=B6TN48; Match level="QueryCoverage=96%, HitCoverage=57%, E-value=1e-103, Identity=79%"; Hit description=3 -hydroxyisobutyryl-CoA hydrolase/ catalytic
MISLNCLIFGLLGEYLALTGARLNAKEMISAGLATHFVSSEKLEELEKRLLNLDSCDESAVRAVIEEFSTDVQPDEDSLLNKLSTINKCFSAETVEDIIKAFESEASIDGNQWIAPVIKGLRRSSPTALKITLRSIREGRKQSLPECLTKEFRLTMNILRQVVNGDVYEGIRALSIDKDNALRSVSPLSPQYSCCLCTCFNLSMTTQWNPATLEEVKNEDIDRVFQPFSPEHELQVPSDDSDRWSGKYENTVY

SEQ ID NO: 71027 - protein, 384 aa, Setaria italica
  Transcript Sequence Number=SeqID_5053
  Gene Ontology: Mol. function=catalytic activity; Biological process =metabolic process
  Homolog annotation: Hit_ID=B6TN48; Match level="QueryCoverage=100%, HitCoverage=100%, E-value=0.0, Identity=85%"; Hit description=3 -hydroxyisobutyryl-CoA hydrolase/ catalytic
  Pfam annotation: Domain name=ECH; Domain location=21-189; Score=52.7; E_value=1.4e-12; Accession=PF00378.12; Description=Enoyl-CoA hydrataseisomerase family
MAQQQTSPDEVVLGQETDGARVVTLNRPRQLNGISDRVVYLLAQFLEKWEKDDDAKLVIFKGAGRAFSAGGDLKMFYEGKSDDSCLEVVYRMYWLCYHIHTYKKTTVALVNGLVMGGGAAMVAPLKFAVVTEKTIFATPEASVGLHTDCSFSYIHSRLPGYLGEYLALTGARLNAKEMISAGLATHFVSSEKLEELEKRLLNLDSCDESAVRAVIEEFSTDVQPDEDSLLNKLSTINKCFSAETVEDIIKAFESEASIDGNQWIAPVIKGLRRSSPTALKITLRSIREGRKQSLPECLTKEFRLTMNILRQVVNGDVYEGIRALSIDKDNAPKWNPATLEEVKNEDIDRVFQPFSPEHELQVPSDDSDRWSGKYENTVYAKASQ

SEQ ID NO: 71028 - protein, 135 aa, Setaria italica
  misc_feature (49)..(49): Xaa can be any naturally occurring amino acid
  Transcript Sequence Number=SeqID_5054
  Gene Ontology: Mol. function=oxidoreductase activity; Cellular component=endoplasmic reticulum; Biological process=fatty acid biosynthetic process
  Homolog annotation: Hit_ID=B9GEE4; Match level="QueryCoverage=100%, HitCoverage=22%, E-value=6e-64, Identity=79%"; Hit description =Methionine aminopeptidase
  Pfam annotation: Domain name=FA_hydroxylase; Domain location=78-135; Score=-31.8; E_value=0.025; Accession=PF04116.5; Description=Fatty acid hydroxylase
MVAAAFTVDLDKPLVFQVGHLEEQYQEWVHQPIVSKEGPRFFQNDVLEXPLIWLPVVCWCLSTSIQMGHTITEVAMMVVFGICLWTLIEYVLHRFLFHIKTKSYWGNTAHYLLHGCHHKHPMDGLRLVFPPAAAA

SEQ ID NO: 71029 - protein, 247 aa, Setaria italica
  Transcript Sequence Number=SeqID_5055
  Gene Ontology: Mol. function=oxidoreductase activity; Cellular component=endoplasmic reticulum; Biological process=fatty acid biosynthetic process
  Homolog annotation: Hit_ID=B9SB09; Match level="QueryCoverage=95%, HitCoverage=99%, E-value=1e-107, Identity=77%"; Hit description =Sphingolipid fatty acid alpha hydroxylase
  Pfam annotation: Domain name=FA_hydroxylase; Domain location=97-216; Score=73.1; E_value=1e-18; Accession=PF04116.5; Description=Fatty acid hydroxylase
MPYSYHCSKKMVAAAFTVDLDKPLVFQVGHLEEQYQEWVHQPIVSKEGPRFFQNDVLEFLTRTKWWAVPLIWLPVVCWCLSTSIQMGHTITEVAMMVVFGICLWTLIEYVLHRFLFHIKTKSYWGNTAHYLLHGCHHKHPMDGLRLVFPPAAAAILCFPFWNLIKLFSTPSTTPGIFGGGLLGYVIYDCTHYYLHHGQPSSDPAKHLKKYHLNHHFRIQTKGFGITSTLWDHVFGTLPSTKSVDKST

SEQ ID NO: 71030 - protein, 89 aa, Setaria italica
  Transcript Sequence Number=SeqID_5056
LDAASPSPSAAVVGAVPAPPEAAGAGGGVGRCRERSDARGGLMSEGPSPPPLHGGNATKGGLCVRGLVTPSAAATGARRRSGEEEISLS

SEQ ID NO: 71031 - protein, 397 aa, Setaria italica
  misc_feature (382)..(382): Xaa can be any naturally occurring amino acid
  Transcript Sequence Number=SeqID_5057
  Homolog annotation: Hit_ID=C3SA82; Match level="QueryCoverage=95%, HitCoverage=82%, E-value=0.0, Identity=83%"; Hit description=System N amino acid transporter
  Pfam annotation: Domain name=Aa_trans; Domain location=1-372; Score =34.6; E_value=3.9e-07; Accession=PF01490.10; Description =Transmembrane amino acid transporter protein
  Pfam annotation: Domain name=Trp_Tyr_perm; Domain location=1-363; Score=-263.0; E_value=0.015; Accession=PF03222.5; Description =Tryptophantyrosine permease family
  Pfam module annotation: Pfam domain module=Aa_trans::Trp_Tyr_perm; Domain location=1-372::1-363
LAALLTDASIELLVRFSRAVGARSYGAAMGDAFGWWGRRLLQVCVVINNVGVMIVYMIIIGDVLSGTTSSGEHHYGVLEGWFGMHWWNGRFFVLLVTTLCVFTPLACLKRIDSLSYTSTISVALAVVFVIITAGIAIVKLIGGQIPMPKLFPAVPDLASVWELFTAVPILVTAYVCHYNVHPIHNELKDSSQIKPIVHTSLTLCSTIYITTSFFGYLLFGESTLSDVLANFDSNLGIPYSSVLNDAVRMSYAVHLMLVFPMIFHALRLNLDGLLFASARPLSSDNRRFGIMTAVLLLVIFGCANFIPSIWDAFQFTGATAAVCIAFIFPAAITLRDPQGIAKKWDKILAVFMIVLAVVSNVVAVYSDAYKIFHKKTAPSKAXAGESGEELSSCWFVH

SEQ ID NO: 71032 - protein, 69 aa, Setaria italica
  Transcript Sequence Number=SeqID_5058
  Gene Ontology: Mol. function=phosphopantetheine binding; Cellular component=chloroplast; Biological process=fatty acid biosynthetic process
  Homolog annotation: Hit_ID=B6SI66; Match level="QueryCoverage=63%, HitCoverage=33%, E-value=2e-11, Identity=84%"; Hit description=Acyl carrier protein
VVLANEYPLCSLFSSSTKITLSLYLSQVEIVMGLEEEFDISVEESSAQSIATVEDAAELIDKLVAEKSL

SEQ ID NO: 71033 - protein, 78 aa, Setaria italica
  Transcript Sequence Number=SeqID_5059
  Gene Ontology: Mol. function=phosphopantetheine binding; Cellular component=chloroplast; Biological process=fatty acid biosynthetic process
  Homolog annotation: Hit_ID=B6SI66; Match level="QueryCoverage=78%, HitCoverage=46%, E-value=1e-20, Identity=85%"; Hit description=Acyl carrier protein
  Pfam annotation: Domain name=PP-binding; Domain location=3-69; Score =34.5; E_value=4.2e-07; Accession=PF00550.17; Description =Phosphopantetheine attachment site
KIKKKRTRLRLVTKKGQLEVCGASKFSDLGADSLDTVEIVMGLEEEFDISVEESSAQSIATVEDAAELIDKLVAEKSL

SEQ ID NO: 71034 - protein, 137 aa, Setaria italica
  Transcript Sequence Number=SeqID_5060
  Gene Ontology: Mol. function=phosphopantetheine binding; Cellular component=chloroplast; Biological process=fatty acid biosynthetic process
  Homolog annotation: Hit_ID=P15543; Match level="QueryCoverage=85%, HitCoverage=88%, E-value=3e-49, Identity=82%"; Hit description=Acyl carrier protein 3, chloroplastic
  Pfam annotation: Domain name=PP-binding; Domain location=61-128; Score=63.1; E_value=1.1e-15; Accession=PF00550.17; Description =Phosphopantetheine attachment site
MCGSLQITNFVISRCLFLELQAVNTSSLSFSAARKGNAFLRLHSVPKRFAVCYAAKKDTVDKVCEIVKKQLAVPEGTEVCGASKFSDLGADSLDTVEIVMGLEEEFDISVEESSAQSIATVEDAAELIDKLVAEKSL

SEQ ID NO: 71035 - protein, 132 aa, Setaria italica
  Transcript Sequence Number=SeqID_5061
  Gene Ontology: Mol. function=phosphopantetheine binding; Cellular component=chloroplast; Biological process=fatty acid biosynthetic process
  Homolog annotation: Hit_ID=P15543; Match level="QueryCoverage=99%, HitCoverage=99%, E-value=9e-58, Identity=83%"; Hit description=Acyl carrier protein 3, chloroplastic
  Pfam annotation: Domain name=PP-binding; Domain location=56-123; Score=63.1; E_value=1.1e-15; Accession=PF00550.17; Description =Phosphopantetheine attachment site
  Subcellular localization annotation: CTP_CleavageSite=47; ConfidenceScore=5.54e-01
MASIAGSALSFARPVKAVNTSSLSFSAARKGNAFLRLHSVPKRFAVCYAAKKDTVDKVCEIVKKQLAVPEGTEVCGASKFSDLGADSLDTVEIVMGLEEEFDISVEESSAQSIATVEDAAELIDKLVAEKSL

SEQ ID NO: 71036 - protein, 89 aa, Setaria italica
  Transcript Sequence Number=SeqID_5062
  Gene Ontology: Mol. function=identical protein binding; Cellular component=cytoplasm
  Homolog annotation: Hit_ID=B6T319; Match level="QueryCoverage=100%, HitCoverage=51%, E-value=2e-38, Identity=85%"; Hit description=RS21 -C6 protein
  Pfam annotation: Domain name=MazG; Domain location=12-86; Score=8.9; E_value=0.00039; Accession=PF03819.9; Description=MazG nucleotide pyrophosphohydrolase domain
DFAKERDWDQFHSPRNLLLAMVGEVGELSEIFQWRGEVPRGLPGWEARETEHLGEELADVLLYLVRLSDMCGVDLGKAALRKIGLNAIK

SEQ ID NO: 71037 - protein, 113 aa, Setaria italica
  Transcript Sequence Number=SeqID_5063
  Gene Ontology: Mol. function=binding
  Homolog annotation: Hit_ID=Q7XJW6; Match level="QueryCoverage=99%, HitCoverage=13%, E-value=2e-44, Identity=76%"; Hit description =OSJNBa0016O02.4 protein
SIDIQLMAFRILELVVLNFPSSFPSYAEQVFNNFVVVLSNDRINLHDRNKLNSVLGGLGHCLSLVAKVTENDDTSNQQVHNLSARELWKCTTDEDNSGGRAFAMPNLLVKLQS

SEQ ID NO: 71038 - protein, 326 aa, Setaria italica
  misc_feature (149)..(149): Xaa can be any naturally occurring amino acid
  misc_feature (251)..(251): Xaa can be any naturally occurring amino acid
  Transcript Sequence Number=SeqID_5064
  Gene Ontology: Mol. function=binding
  Homolog annotation: Hit_ID=Q01KF2; Match level="QueryCoverage=100%, HitCoverage=27%, E-value=1e-60, Identity=61%"; Hit description =OSIGBa0115M15.7 protein
ELMAFRILELVVLNFPSSFPSYAEQVFNNFVVVLSNDRINLHDRNKLNSVLGGLGHCLSLVAKVTENDDTSNQQIFAHHLQVHNLSARELWKCTTDEDNSGGRAFAMPNLLVKLQSLVQILINSVEVSASELCAKSAIDAQSSEALLSXLHCLDIICRIFIHEVKKPQLKFSISKTQFGPDWLRSSLLIHLKNLWGVKRLFHEKGEDKFFIFNLKIAEIFLYLSAWIDSTMFPAEEFCHFVSSLFTKAKTXLRNKDILEMYLSPLITSIPDLIFNSPDDSKGYLLEAFTDAFRDCKVDCKLILPYLDAVGEMLLPEKTGIWLPEND

SEQ ID NO: 71039 - protein, 92 aa, Setaria italica
  Transcript Sequence Number=SeqID_5065
  Gene Ontology: Mol. function=metal ion binding
  Homolog annotation: Hit_ID=B6TN60; Match level="QueryCoverage=46%, HitCoverage=20%, E-value=4e-13, Identity=72%"; Hit description =Protein binding protein
  Pfam annotation: Domain name=zf-C3HC4; Domain location=40-80; Score =29.5; E_value=1.4e-05; Accession=PF00097.17; Description=Zinc finger, C3HC4 type (RING finger)
  Subcellular localization annotation: CTP_CleavageSite=48; ConfidenceScore=5.09e-01
FSFSKPASGGGAAARRRRFSWRRLGRCSTPSSEAEAPWECAVCLEELRAGDVVAHLPCAHRFHWSCAVPWVRAASRCPVCRAQVHLAPSSPG

SEQ ID NO: 71040 - protein, 482 aa, Setaria italica
  Transcript Sequence Number=SeqID_5066
  Gene Ontology: Mol. function=transferase activity, transferring groups other than amino-acyl groups; Cellular component=membrane; Biological process=fatty acid biosynthetic process
  Homolog annotation: Hit_ID=A9L9N1; Match level="QueryCoverage=91%, HitCoverage=94%, E-value=1e-176, Identity=65%"; Hit description =Putative very long chain fatty acid condensing enzyme CUT1;1
  Pfam annotation: Domain name=ACP_syn_III; Domain location=210-295; Score=-12.6; E_value=0.017; Accession=PF08545.2; Description=3 -Oxoacyl-[acyl-carrier-protein (ACP)]
  Pfam annotation: Domain name=ACP_syn_III_C; Domain location=373-458; Score=4.4; E_value=5.7e-06; Accession=PF08541.2; Description=3 -Oxoacyl-[acyl-carrier-protein (ACP)
  Pfam annotation: Domain name=Chal_sti_synt_C; Domain location=334 -460; Score=13.6; E_value=0.00015; Accession=PF02797.7; Description =Chalcone and stilbene synthases, C-te
  Pfam annotation: Domain name=Chal_sti_synt_N; Domain location=40-280; Score=-73.0; E_value=0.0081; Accession=PF00195.11; Description =Chalcone and stilbene synthases, N-te
  Pfam annotation: Domain name=FAE1_CUT1_RppA; Domain location=71-360; Score=579.5; E_value=3.6e-171; Accession=PF08392.4; Description =FAE1Type III polyketide synthase-like
  Pfam module annotation: Pfam domain module=ACP_syn_III::ACP_syn_III _C::Chal_sti_synt_C::Chal_sti_synt_N::FAE1_CUT1_RppA; Domain location= 210-295::373-458::334-460::40-280::71-360
MSPSPIHKFLKIVYTKTIDNFLLAASVSLTIAAIVVTARSKPHDFTDRIQDLGPSYILSIGLILATAVTVYIMQRPRMVYLVDYACFRAPHNYRIPSAAFVEHARQVTHFSERSVRFMTRLLERSGLGEETSLPQMASYLEAYKYCTLETAREEAELVVFSAIDDLFAKTSIDPITIDMVVVNCSGFSPTPSMPDMIVNKYKMRSDIRSIHLSGMGCSAGLISVELAKNLLQTMPQGARALVVSTETLTPNYYLGNERAMLLPYCLFRMGGAAVLLSTSPAKARFRLKCIVRTLSAADDKSYRCIHQEEDDKGNTGANLTMDIIDVSANTLKTNITTIAPLILPASEKLRFALSFVSQKLLKMRTKLYMPNLLTAFEHICVHAGGRAVIDGIQRSLSLSDEHVEPSRMTLHRFGNTSSSSLWYELAYIEAKRRMHKGNRVWMIGFGSGFKCNSAVWECIVPAHNEDGPWAGCIHRYPVRIIP

SEQ ID NO: 71041 - protein, 141 aa, Setaria italica
  misc_feature (12)..(12): Xaa can be any naturally occurring amino acid
  misc_feature (123)..(123): Xaa can be any naturally occurring amino acid
  Transcript Sequence Number=SeqID_5067
  Gene Ontology: Mol. function=protein serine/threonine kinase activity; Cellular component=integral to membrane; Biological process=protein amino acid phosphorylation
  Homolog annotation: Hit_ID=B9RY42; Match level="QueryCoverage=100%, HitCoverage=13%, E-value=2e-50, Identity=68%"; Hit description =Phytosulfokine receptor, putative
NENFEACLADFXGLCKAIQPYDTHVTTDLVGTLGYIPPEYSQSVIATPKGDVFSFGVVLLELLTGKRPVDVSKSKGSRDLISWVLQMKSEKKEDQIFDRLIWSKAHEKQLLLVLEIACKCISXTPRQRPSIEQVVSSLDNV

SEQ ID NO: 71042 - protein, 127 aa, Setaria italica
  Transcript Sequence Number=SeqID_5068
  Gene Ontology: Mol. function=protein serine/threonine kinase activity; Cellular component=integral to membrane; Biological process=protein amino acid phosphorylation
  Homolog annotation: Hit_ID=Q94IJ4; Match level="QueryCoverage=100%, HitCoverage=20%, E-value=2e-17, Identity=49%"; Hit description =Somatic embryogenesis receptor-like kinase 2
  Subcellular localization annotation: CTP_CleavageSite=57; ConfidenceScore=5.18e-01
NICGPGTTEPSPGASYFSPPPVQSPGSCSCIGAIATGVSASATLLLAIPAICCALCRCRKSKEHLFDVQSEDNKLLVAAKLGQLKRFSFWELRAATDVFSYRNLLGRGGFGNVYKGRLADGSLVAVR

SEQ ID NO: 71043 - protein, 223 aa, Setaria italica
  misc_feature (11)..(11): Xaa can be any naturally occurring amino acid
  Transcript Sequence Number=SeqID_5069
  Homolog annotation: Hit_ID=Q4JQF9; Match level="QueryCoverage=100%, HitCoverage=8%, E-value=1e-115, Identity=89%"; Hit description =Aberrant pollen transmission 1
  Pfam annotation: Domain name=Apt1; Domain location=1-215; Score= -178.3; E_value=0.00016; Accession=PF10351.1; Description=Golgi-body localisation protein domain
SFAEAEINDMXFDFDRDYKDIGIAQLTTKLFVLKNGLANAKSDTVLAPWNPPSEWGKNAMLRVNARQGAPTGGNSVIESFLVDIYPLKIYLTEAMYRMMWGYFFPGDEQQPQKRQELFKVSTTAGTRRKKSTSVAETNSPNNQSSKETTFTQKPELRRTSSFDRSWEETVAESVANELVSQIQVQSNAQSESQDAAKDSKLLRPVRSTREDKKIVEPNEVKQT

SEQ ID NO: 71044 - protein, 55 aa, Setaria italica
  Transcript Sequence Number=SeqID_5070
  Subcellular localization annotation: CTP_CleavageSite=33; ConfidenceScore=5.04e-01
FISVVFSLGKLVSFPSSLPFFFYKNHDVGNLPTVSLDVQNNISNFFHVLQPQFVK

SEQ ID NO: 71045 - protein, 227 aa, Setaria italica
  Transcript Sequence Number=SeqID_5071
  Gene Ontology: Mol. function=oxidoreductase activity, acting on CH-OH group of donors; Biological process=cellular alcohol metabolic process
  Homolog annotation: Hit_ID=B6SWA6; Match level="QueryCoverage=91%, HitCoverage=35%, E-value=1e-110, Identity=89%"; Hit description =Protein HOTHEAD
MAFSVFIKLLACLLCFFELSQGKQQFTLNNLPPLRKASSYPTGCPTTYDYIVVGGGTAGCPLAATLSLKYRVLLLERGGSPYGNRNVSYMENFHIGLMNMAPDSSSQAFISTDGVINARARVLGGGTCINAGFYSRASSSFIQEVGWDEDLVNKSFPWVEEKIVQWPKIAPWQAALRDGLLQAGVAPFNGYTYDHVSGTKVGGTIFDETGYRHTAADLLAAGDPNNL

SEQ ID NO: 71046 - protein, 486 aa, Setaria italica
  Transcript Sequence Number=SeqID_5072
  Gene Ontology: Mol. function=oxidoreductase activity, acting on CH-OH group of donors; Cellular component=vacuole; Biological process =cellular alcohol metabolic process
  Homolog annotation: Hit_ID=B6SWA6; Match level="QueryCoverage=97%, HitCoverage=80%, E-value=0.0, Identity=93%"; Hit description=Protein HOTHEAD
  Pfam annotation: Domain name=GMC_oxred_C; Domain location=322-471; Score=105.1; E_value=2.4e-28; Accession=PF05199.5; Description=GMC oxidoreductase
  Pfam annotation: Domain name=GMC_oxred_N; Domain location=3-227; Score=46.1; E_value=1.9e-11; Accession=PF00732.11; Description=GMC oxidoreductase
  Pfam module annotation: Pfam domain module=GMC_oxred_C::GMC_oxred_N; Domain location=322-471::3-227
GPFYSSYRKVVLFNSTDGVIKARARVLGGGTCINAGFYSRASSSFIQEVGWDEDLVNKSFPWVEEKIVQWPKIAPWQAALRDGLLQAGVAPFNGYTYDHVSGTKVGGTIFDETGYRHTAADLLAAGDPNNLRVLLHASVHKIVFDSRQGRLKPRAIGVQFTDENGRHHQAFLNNNKNSEIIVSAGAIGTPQLLLLSGIGPKNHLKSHNIPVVLHNKYVGKGMADNPMNSIFIPTRSPPRQSLIETVGITEEGVFIEASSGFGQSSESVHCHHGIMSAEIGQLSTIPPKQRTLEAAQKYAHNKLNLPKEVFHGGFILEKIDGPLSTGHLVLTDTDVRNNPAVTFNYFSHPQDLDRCVYGIKTIERILKTNRFSELAADGTGFSMERVLNMSVQANVNLIPKHTNDTESLGQFCKDTVITIWHYHGGCHVGKVVDQHYRVLGVSGIRVVDGSTFSKSPGTNPQATVMMMGRYMGVKILRERLGRAAGV

SEQ ID NO: 71047 - protein, 189 aa, Setaria italica
  Transcript Sequence Number=SeqID_5073
  Pfam annotation: Domain name=Frigida; Domain location=1-189; Score= -123.5; E_value=0.053; Accession=PF07899.3; Description=Frigida-like protein
LRWICRRMDAAALWRFMAARRRELTALRREAGPAVASAVDPPRLVLDVVSDFLAAGEGTGEDQFWVLGMLLRSLFDSDSRKPPEIGDTLVERAVAVTKEWQERFGINMDKLISENQEVEMAEADGVGNSGAEEKKEERGDAEEEEEEEDPEEVVLGSGDEGEEDPEEAEEHEELEKEAKEVKGEEAEGK

SEQ ID NO: 71048 - protein, 298 aa, Setaria italica
  Transcript Sequence Number=SeqID_5074
  Gene Ontology: Mol. function=nucleoside-triphosphatase activity; Cellular component=membrane; Biological process=transport
  Homolog annotation: Hit_ID=B9GZM7; Match level="QueryCoverage=90%, HitCoverage=24%, E-value=9e-80, Identity=50%"; Hit description=White- brown-complex ABC transporter family (Fragment)
TPDEVKFYFSSLYDRDGDKNINLKTNINCNISSWGKGCDPGWACASDPVPDPRNRDRSNIPLRRRNCQACCEGFFCPRGLTCMLPCPLGSYCPRATANETTGLCDPYKYQITPNSTESCGGADMWADIQSTEEIFCPAGYYCPTTTKKDSCTSGHFCRLGSTAENKCIIKRNCDENADKENIVILGACIVGALCLLLLIIYNCSDKFLSIRERRKAKSRENAIQLARQQMKAQEGWKAAKQFARRHVNGMQGHLSRTFSRRKSFRQQANLETSSHRVQEAPLMGNVKTQELSDSAVFA

SEQ ID NO: 71049 - protein, 90 aa, Setaria italica
  misc_feature (72)..(72): Xaa can be any naturally occurring amino acid
  Transcript Sequence Number=SeqID_5075
  Homolog annotation: Hit_ID=B6U539; Match level="QueryCoverage=100%, HitCoverage=38%, E-value=7e-18, Identity=66%"; Hit description =Homeobox-leucine zipper protein ATHB-6
  Pfam annotation: Domain name=Homeobox; Domain location=47-90; Score= -3.1; E_value=0.024; Accession=PF00046.21; Description=Homeobox domain
MERDCQFMVVPPRHPYEDGGGHFMHHQLMVAGDHDPAGAGRGGGGERKRRFTEEQVWSLETTFHARRAKLEXPREKAELARELGLQPRQV

SEQ ID NO: 71050 - protein, 153 aa, Setaria italica
  Transcript Sequence Number=SeqID_5076
  Homolog annotation: Hit_ID=B4FLA8; Match level="QueryCoverage=100%, HitCoverage=97%, E-value=9e-64, Identity=79%"; Hit description =Plasma membrane associated protein
  Pfam annotation: Domain name=AWPM-19; Domain location=15-153; Score =317.2; E_value=3.4e-92; Accession=PF05512.3; Description=AWPM-19 -like family
MANAGLKPVAGLLLVLNFCMYVIVAAVGGWAINHAINYGFFIGSGLQLPAHFSPIYFPIGNAATGFFVIFAVIAGVVGAAAALAGFHHVRAWSSESLPAAASSGFIAWTLTLLAMGLAVKEIELHGRNARLICMESFTIILSATQLFYLLAIH

SEQ ID NO: 71051 - protein, 104 aa, Setaria italica
  Transcript Sequence Number=SeqID_5077
  Subcellular localization annotation: CTP_CleavageSite=71; ConfidenceScore=5.36e-01
SFFFFSPLAFPRLLLGAMHTPNGEQAQLRQPQQWALAPSCRRFSSQSTHPCARRPASRLIQKGNNSYASTGAEAKGSTAASYSVLLQVAIIGIREGRRRRRAKG

SEQ ID NO: 71052 - protein, 167 aa, Setaria italica
  misc_feature (59)..(59): Xaa can be any naturally occurring amino acid
  Transcript Sequence Number=SeqID_5078
  Gene Ontology: Mol. function=histone acetyltransferase activity; Cellular component=nucleus; Biological process=regulation of transcription, DNA-dependent
  Homolog annotation: Hit_ID=C3VEZ5; Match level="QueryCoverage=95%, HitCoverage=43%, E-value=2e-68, Identity=69%"; Hit description=FVE
  Pfam annotation: Domain name=WD40; Domain location=135-164; Score =1.7; E_value=25; Accession=PF00400.24; Description=WD domain, G-beta repeat
  Pfam annotation: Domain name=WD40; Domain location=2-41; Score=13.8; E_value=0.7; Accession=PF00400.24; Description=WD domain, G-beta repeat
  Pfam annotation: Domain name=WD40; Domain location=86-125; Score =42.4; E_value=1.8e-09; Accession=PF00400.24; Description=WD domain, G-beta repeat
  Pfam module annotation: Pfam domain module=WD40::WD40::WD40; Domain location=135-164::2-41::86-125
ESRPDLILTGHQENAEFALAMCPAEPYVLSGGKDKSVVLWSIQDHISALGDTPRINFRXSPSSAQEFCSVGDDACLILWDARTGTSPAVKVEKAHSGDVHCVDWNPLDVNYILTGSADNSVRMWDRRNLGSGGAGSPIHKFEGHKAAVLCVQWSPDRASVFFFPTFS

SEQ ID NO: 71053 - protein, 82 aa, Setaria italica
  Transcript Sequence Number=SeqID_5079
  Gene Ontology: Cellular component=nucleus; Biological process =regulation of transcription, DNA-dependent
  Homolog annotation: Hit_ID=B9SN37; Match level="QueryCoverage=81%, HitCoverage=14%, E-value=1e-18, Identity=65%"; Hit description=WD -repeat protein, putative
MVHYISCISYCTYLGRDKIVDFHWNSSDPWTIVSVSDDGESTGGGGTLQIWRMSDLIYRPEEEVLTELENFKSHLASCTPRN

SEQ ID NO: 71054 - protein, 62 aa, Setaria italica
  Transcript Sequence Number=SeqID_5080
  Gene Ontology: Biological process=response to desiccation
  Homolog annotation: Hit_ID=B6STY9; Match level="QueryCoverage=87%, HitCoverage=16%, E-value=2e-22, Identity=92%"; Hit description=Salt tolerance protein
FSFRPKELGSAVWDMIRGRGTGYTIKGKIDVDTPWGNMKLPISKEGGTTRIKKEEDDDDDDN

SEQ ID NO: 71055 - protein, 163 aa, Setaria italica
  Transcript Sequence Number=SeqID_5081
LEGGGGGWVGFWFWRSDEAGEFMDCFAAETPSFFLGRQRHPLIFSSSYGRPAWMLLLLASLSSDFLMSFSFVGLLFFSTGSIRSKVLSPLPDTDEKEDFFFFCEVARNLLVGSSLLCHDGGGGGEDGRVPDEPGACGGGGRLGGAEACDDAQPSEASRHSSVL

SEQ ID NO: 71056 - protein, 56 aa, Setaria italica
  Transcript Sequence Number=SeqID_5082
  Gene Ontology: Biological process=response to desiccation
  Homolog annotation: Hit_ID=B6STY9; Match level="QueryCoverage=85%, HitCoverage=15%, E-value=1e-18, Identity=91%"; Hit description=Salt tolerance protein
ELGSAVWDMIRGRGTGYTIKGKIDVDTPWGNMKLPISKEGGTTRIKKEEDDDDDDN

SEQ ID NO: 71057 - protein, 74 aa, Setaria italica
  Transcript Sequence Number=SeqID_5083
  Gene Ontology: Biological process=response to desiccation
  Homolog annotation: Hit_ID=B6STY9; Match level="QueryCoverage=89%, HitCoverage=20%, E-value=4e-29, Identity=90%"; Hit description=Salt tolerance protein
IDKQGITRMQIPFSFRPKELGSAVWDMIRGRGTGYTIKGKIDVDTPWGNMKLPISKEGGTTRIKKEEDDDDDDN

SEQ ID NO: 71058 - protein, 149 aa, Setaria italica
  misc_feature (144)..(144): Xaa can be any naturally occurring amino acid
  Transcript Sequence Number=SeqID_5084
  Gene Ontology: Biological process=response to desiccation
  Homolog annotation: Hit_ID=B6STY9; Match level="QueryCoverage=81%, HitCoverage=38%, E-value=5e-60, Identity=95%"; Hit description=Salt tolerance protein
  Pfam annotation: Domain name=LEA_2; Domain location=26-148; Score =133.5; E_value=6.7e-37; Accession=PF03168.5; Description=Late embryogenesis abundant protein
MSSSENPTVTDRGSKHKEGGDKEGGGGFIDKVKDFIHDIGEKIEEAVGFGKPSADVSGIHIPHISLNRADLVVDVLIKNPNPVPIPLVDIDYLIDSDGRKLVSGLIPDAGTIHAHGQETVKIPISLVFDDIKSTYKDIQPGSIXPYLVR

SEQ ID NO: 71059 - protein, 103 aa, Setaria italica
  misc_feature (34)..(34): Xaa can be any naturally occurring amino acid
  misc_feature (64)..(64): Xaa can be any naturally occurring amino acid
  misc_feature (75)..(75): Xaa can be any naturally occurring amino acid
  Transcript Sequence Number=SeqID_5085
  Subcellular localization annotation: CTP_CleavageSite=56; ConfidenceScore=5.77e-01
GLSIVASLGTPKPSSASARPRLIRNAPVFAAATXRRVSRRTRSSSKSQTRERRGVVASKPAGHXRGEDERVPLPXKKKGGGLRSEAVHKFPRLVTPPEPEAHP

SEQ ID NO: 71060 - protein, 201 aa, Setaria italica
  misc_feature (151)..(151): Xaa can be any naturally occurring amino acid
  Transcript Sequence Number=SeqID_5086
  Gene Ontology: Cellular component=anchored to membrane
  Homolog annotation: Hit_ID=Q06I94; Match level="QueryCoverage=75%, HitCoverage=54%, E-value=3e-61, Identity=76%"; Hit description =Fasciclin-like protein FLA12
  Pfam annotation: Domain name=Fasciclin; Domain location=44-179; Score= 85.6; E_value=1.7e-22; Accession=PF02469.14; Description=Fasciclin domain
MAARILLAAALVALAVPAVLCQAPGPAAPKGPPNVTAILEKGGQYATFIRLMKSTQQDTQLNSQLNNSFGSGYTVFAPTDNAFTSLKPGTLNKLSQQEQVSLVQYHILPQFYSLDSFETASNPVRTQASGSDGPYTLNITADSNNQVNVSXGLVATRVGTALRDTQPLAVYSVDKVLLPNDLFGVKPPSSAPPAPNKKPSK

SEQ ID NO: 71061 - protein, 311 aa, Setaria italica
  Transcript Sequence Number=SeqID_5087
  Gene Ontology: Cellular component=plasma membrane; Biological process= response to desiccation
  Homolog annotation: Hit_ID=B6STY9; Match level="QueryCoverage=88%, HitCoverage=86%, E-value=1e-148, Identity=93%"; Hit description=Salt tolerance protein
  Pfam annotation: Domain name=LEA_2; Domain location=26-181; Score =234.6; E_value=2.5e-67; Accession=PF03168.5; Description=Late embryogenesis abundant protein
MSSSENPTVTDRGSKHKEGGDKEGGGGFIDKVKDFIHDIGEKIEEAVGFGKPSADVSGIHIPHISLNRADLVVDVLIKNPNPVPIPLVDIDYLIDSDGRKLVSGLIPDAGTIHAHGQETVKIPISLVFDDIKSTYKDIQPGSIIPYLVRVVLLVDVPIIGRIKIPLEKSGEIPVPYKPDVDVEKIKFHHFSFEETTATLHLKLENKNDFDLGLNLLEYEMWLGDDSIASAELTQNTKIDKQGITRMQIPFSFRPKELGSAVWDMIRGRGTGYTIKGKIDVDTPWGNMKLPISKEGGTTRIKKEEDDDDDDN

SEQ ID NO: 71062 - protein, 238 aa, Setaria italica
  misc_feature (39)..(39): Xaa can be any naturally occurring amino acid
  Transcript Sequence Number=SeqID_5088
  Gene Ontology: Cellular component=anchored to membrane
  Homolog annotation: Hit_ID=Q06I92; Match level="QueryCoverage=74%, HitCoverage=78%, E-value=1e-41, Identity=53%"; Hit description =Fasciclin-like protein FLA14
  Pfam annotation: Domain name=Fasciclin; Domain location=54-174; Score= 42.0; E_value=2.4e-09; Accession=PF02469.14; Description=Fasciclin domain
MNVVYCPPFSRIAVTAAFLALAVVPAALAQAPGPAAAPXAGPPTVTAILEKGGQYTTFMRLMKETQQDTQLNSQLNSSFGNGGSGYTVFAPTDNAFNNLKPGTLNSLTQQQQVPPATPSAPRPPGRDGPYTLNITSDTNNQVNVSSGVVDVRISNALYSNKPLAVYSVDKVLLPMELFGAKAPAAAPTASEGKPKKGGSSDAASGPAGSDDSAPTGAASARAVGWSVAGLAAVLGYLL

SEQ ID NO: 71063 - protein, 83 aa, Setaria italica
  Transcript Sequence Number=SeqID_5089
WVDITISCSQLKPTYLHMLHRPIVDMFRIRPLSTCLESVGNSSTCDKGHPVHSLSATGLMVFKLLLSLRYTDFLLTVLVTCDQ

SEQ ID NO: 71064 - protein, 168 aa, Setaria italica
  Transcript Sequence Number=SeqID_5090
  Gene Ontology: Mol. function=serine-type endopeptidase activity; Cellular component=cell wall; Biological process=negative regulation of catalytic activity
  Homolog annotation: Hit_ID=B6SWW5; Match level="QueryCoverage=94%, HitCoverage=19%, E-value=1e-81, Identity=93%"; Hit description=SLP3
  Pfam annotation: Domain name=PA; Domain location=26-139; Score=63.4; E_value=8.4e-16; Accession=PF02225.14; Description=PA domain
NRKNNKNTILTLGNGKLLSGLGVSPATHGNKSFSLISAADALLGSSATKYSALDCQRPELLNKRKVQGKILLCGYSFNYISGTASIKKVSQTAKSLGATGFIVAVENSYPGTKFDPVPVSIPGILITDVSKTTDLIDYYNSSTTRDWAGRASVFKATAGIADGLAPTL

SEQ ID NO: 71065 - protein, 100 aa, Setaria italica
  Transcript Sequence Number=SeqID_5091
  Gene Ontology: Mol. function=binding; Cellular component =ribonucleoprotein complex; Biological process=ribosome biogenesis
  Homolog annotation: Hit_ID=Q01I26; Match level="QueryCoverage=100%, HitCoverage=4%, E-value=2e-45, Identity=91%"; Hit description =OSIGBa0106P14.4 protein
MASIASQLQAIKSALGAAPEPARRPITRPSVLFDAKEAADIDLRAILPIALSGLEHLASVDERFARYSNTLFRETSLEVNREQQTPKENDKLNKSISTYL

SEQ ID NO: 71066 - protein, 221 aa, Setaria italica
  Transcript Sequence Number=SeqID_5092
  Gene Ontology: Mol. function=DNA binding; Cellular component=nucleus; Biological process=regulation of transcription, DNA-dependent
  Homolog annotation: Hit_ID=Q0JKI9; Match level="QueryCoverage=100%, HitCoverage=30%, E-value=3e-65, Identity=57%"; Hit description=Auxin response factor 2
RFQKVLQGQEVFRPFRGGALADVHIRTVGMYQPDGTHASSAAYKWPTPQGCDIRHPTKPVLLQASSPSSVLMFPQTSSKIPHLEYEYSCLDEDEDGRRDRAVPTQDMGRSNQALSLWPHLVSGEAIDECTVTEKMHSPVSGAEHESNNESTVVNRIGLVCISLAEQVRSCDEADSCNANCNSRLQPSQSQMQSLGTCWATVHEERPVVGNVVDVSLVDMMI

SEQ ID NO: 71067 - protein, 190 aa, Setaria italica
  Transcript Sequence Number=SeqID_5093
  Gene Ontology: Mol. function=microtubule motor activity; Cellular component=microtubule associated complex; Biological process =microtubule-based movement
  Homolog annotation: Hit_ID=B6U192; Match level="QueryCoverage=98%, HitCoverage=23%, E-value=2e-76, Identity=79%"; Hit description=ATP binding protein
  Pfam annotation: Domain name=Kinesin; Domain location=1-128; Score= -14.1; E_value=1.4e-14; Accession=PF00225.15; Description=Kinesin motor domain
SSRSHAILQVVVEYRSMDGVDVVTRVGKLSLIDLAGSERALATDQRTQRSIEGANINRSLLALSSCINALVEGKKHIPYRNSKLTQLLKDSLGGSYNTVMIANISPSNLSFGETQNTLHWADRAKEIKTKALTTANEEVLNVPDSDTDQAKLLLELQKENSVLREQLVKQQQKLLTVQAQSLASNTSPNN

SEQ ID NO: 71068 - protein, 92 aa, Setaria italica
  Transcript Sequence Number=SeqID_5094
TQTFPIQRKKVLMLLLEVEEESVSWMLTHACQLHVGPGHRVVLSAVVVHDTFSLSAVGKFFVPLILYSSFIYFYLLCSFRFETPNTCTSPLN

SEQ ID NO: 71069 - protein, 101 aa, Setaria italica
  Transcript Sequence Number=SeqID_5095
  Gene Ontology: Mol. function=catalytic activity; Cellular component =mitochondrion; Biological process=metabolic process
  Homolog annotation: Hit_ID=B6T7E3; Match level="QueryCoverage=83%, HitCoverage=15%, E-value=2e-42, Identity=96%"; Hit description=Long -chain-fatty-acid-CoA ligase-like protein
  Subcellular localization annotation: CTP_CleavageSite=31; ConfidenceScore=5.00e-01
VPTMYTRLLQGYDSMDPDQQSASSYSAKQLRLMMCGSSALPSPLMKRWEEVTGHRLLERYGMTEFVMALSNPLHGIRKEGTVGKPLPVVVSIPSSIIILAS

SEQ ID NO: 71070 - protein, 608 aa, Setaria italica
  Transcript Sequence Number=SeqID_5096
  Gene Ontology: Mol. function=catalytic activity; Cellular component =mitochondrion; Biological process=metabolic process
  Homolog annotation: Hit_ID=B6T7E3; Match level="QueryCoverage=91%, HitCoverage=100%, E-value=0.0, Identity=91%"; Hit description=Long -chain-fatty-acid-CoA ligase-like protein
  Pfam annotation: Domain name=AMP-binding; Domain location=112-527; Score=338.7; E_value=1.2e-98; Accession=PF00501.20; Description=AMP -binding enzyme
MLLLEVEEESVSWMLTHACQLHVGPGHRVVLSAVASSSLPAYHTRQNTHTFMEVVQEVLKHGSANGVRTAIRADKKSYSLLQLIAASLDVHNILCSKNMTQNGIQDSSKGKIGTGFLHGARVGIVAKPSPEFVAGVFGTWLSGGVAVPLALSYPEAELLHVMNDSDISMVLSTKEHHENMKNLSIKCSAYCSLLPSITSIPSEINPQEPSSNEVTSSVSSLITEINSSKKIKGDDPALILYTSGTTGKPKGVVHTHKGILSQVQILSEAWGYQSEDQFLHCLPLHHVHGLFNALFAPLYSGSVVEFIPKFSVSGIWQRWRESYPKDASKNDEAITVFTGVPTMYTRLLQGYDSMDPDQQSASSYSAKQLRLMMCGSSALPSPLMKRWEEVTGHRLLERYGMTEFVMALSNPLHGIRKEGTVGKPLPRVEAKIIMEDGIETTTGVGELCIRSPSLFKEYWKRPEVTAESFIDGGFFKTGDTVTFDEEGYFIILGRTNADIMKVGGYKLSALEIEAVLLEHDTVLECAVLGLPDEAYGEVVCAIIVPKEDAKKMAEQDSKPALTLEALTSWSKDKLAPYKIPTRLYLWDSLPRNAMGKVNKKELKKLLGA

SEQ ID NO: 71071 - protein, 181 aa, Setaria italica
  Transcript Sequence Number=SeqID_5097
  Gene Ontology: Mol. function=protein serine/threonine kinase activity; Biological process=protein amino acid phosphorylation
  Homolog annotation: Hit_ID=B6UCC0; Match level="QueryCoverage=98%, HitCoverage=25%, E-value=2e-84, Identity=82%"; Hit description=Wall -associated kinase 3
  Pfam annotation: Domain name=EGF; Domain location=14-49; Score=21.1; E_value=0.0048; Accession=PF00008.19; Description=EGF-like domain
  Pfam annotation: Domain name=EGF_CA; Domain location=10-49; Score =44.7; E_value=3.6e-10; Accession=PF07645.7; Description=Calcium binding EGF domain
  Pfam module annotation: Pfam domain module=EGF::EGF_CA; Domain location=14-49::10-49
NPYLQGGCQDVDECSSRPCPSDGVCHNTEGGYRCSCRAGRKFNRQRTTCDPDTGLIIGVTVGSLVLVIFSSFGYMILQKRKLNQVRQEHFREHGGMILFERMRSEKGLAFTVFSEAELIQATNNYDKSRIIGKGGHGTVYKGIVKGNMPVAIKRCALIDERQKKEFGQEMLILSQINNPLV

SEQ ID NO: 71072 - protein, 105 aa, Setaria italica
  Transcript Sequence Number=SeqID_5098
  Gene Ontology: Mol. function=binding
  Homolog annotation: Hit_ID=Q7EY18; Match level="QueryCoverage=99%, HitCoverage=5%, E-value=4e-43, Identity=80%"; Hit description =Putative tetratricopeptide repeat(TPR)-containing protein
NLLKGITADENTAAHDVDSLGIINLRYCGYVAVAKVNNIDKTKVTSSIKPINIADQPEGGAHALNINSLRMLLNEANSTGEKKISSLSQNHRHEELTTAQNFVEK

SEQ ID NO: 71073 - protein, 711 aa, Setaria italica
  misc_feature (275)..(275): Xaa can be any naturally occurring amino acid
  misc_feature (277)..(277): Xaa can be any naturally occurring amino acid
  misc_feature (292)..(292): Xaa can be any naturally occurring amino acid
  misc_feature (305)..(305): Xaa can be any naturally occurring amino acid
  misc_feature (697)..(697): Xaa can be any naturally occurring amino acid
  misc_feature (704)..(704): Xaa can be any naturally occurring amino acid
  Transcript Sequence Number=SeqID_5099
  Gene Ontology: Mol. function=binding
  Homolog annotation: Hit_ID=Q7EY18; Match level="QueryCoverage=100%, HitCoverage=39%, E-value=0.0, Identity=73%"; Hit description =Putative tetratricopeptide repeat(TPR)-containing protein
QPRQEEQPSDDHLAFDNAYEDLMKAFLERNKFGNFPYGFRANTWLVPPIAAQSPSTFPPLPAEDETWGGSGGGWGRDGKSDMLPWADEFLYLTSMPCKTAEEREIRDRRAFLLHSLFVDVAIFRAIAAVRHVMESTEISASTKVDEVLYSETVGNFSITVTRDSSDASCKLDTKIDGSQATGMDSKNLAERNLLKGITADENTAAHDVDSLGIINLRYCGYVAVAKVNNIDKTKVTSSIKPINIADQPEGGAHALNINSLRMLLNEANSTGEKKXIXLSQNHRHEELTTAQXFVEKLLKESLQKXLRKRKNGKQSFMRWELGACLVQHLQDQKNSDKDKKQGGEKDKKKTVDKSLKETKIEGLGKPLKALKNSKIVDTADMGSSLGAKSSAEGQKDKPSDTELPQGESNASENENLLKDLLPESAFTRLKESETGLHQKSPPELIEMALKYYDEVALPKLVADFGSLELSPVDGRTLTDFMHTRGLQMRSLGRVVKLSDKLSHVQSLCVHEMIVRAFKHIVRSVIAAISDTRQLALTIAAALNLLLGVPESDVSGSSPSVHPLVWRWLVTFLKKRYEFELTEKHYHDMRKYAILRGLCHKVGIELAPRDFVMDSAFAFHKQDIISLVPVHKQVACSSADGRQLLESSKTALDKGKLEDAVNYGTKALSKLITVCGPYHRMTAGAYSLLAGVLYHTGXFNQATYXYRQKALD

SEQ ID NO: 71074 - protein, 60 aa, Setaria italica
  misc_feature (10)..(10): Xaa can be any naturally occurring amino acid
  misc_feature (14)..(14): Xaa can be any naturally occurring amino acid
  Transcript Sequence Number=SeqID_5100
  Gene Ontology: Mol. function=protein dimerization activity; Cellular component=endoplasmic reticulum lumen; Biological process=proteolysis
  Homolog annotation: Hit_ID=Q8S9S4; Match level="QueryCoverage=88%, HitCoverage=11%, E-value=3e-20, Identity=92%"; Hit description=IAA -amino acid hydrolase ILR1-like 1
MAGSGCFEAXISGXGGHAALPHHTIDPILAASNVIVSLQQLISREADPLDSQVRSHLCPT

SEQ ID NO: 71075 - protein, 121 aa, Setaria italica
  Transcript Sequence Number=SeqID_5101
  Gene Ontology: Mol. function=protein dimerization activity; Cellular component=endoplasmic reticulum lumen; Biological process=proteolysis
  Homolog annotation: Hit_ID=Q8S9S4; Match level="QueryCoverage=100%, HitCoverage=26%, E-value=3e-49, Identity=78%"; Hit description=IAA -amino acid hydrolase ILR1-like 1
FLTKDRPFFPQTINSPELHDFFVNVASEMVGSKNVRDRQPLMGAEDFAFYAEAIPSTYYYFVGMYNETRGPQAPHHSPYFTINEDALPYGAAAQAAMAARYLHEHQQPASTLDKAKTHDEL

SEQ ID NO: 71076 - protein, 447 aa, Setaria italica
  Transcript Sequence Number=SeqID_5102
  Gene Ontology: Mol. function=protein dimerization activity; Cellular component=endoplasmic reticulum lumen; Biological process=proteolysis
  Homolog annotation: Hit_ID=Q8S9S4; Match level="QueryCoverage=92%, HitCoverage=93%, E-value=0.0, Identity=85%"; Hit description=IAA -amino acid hydrolase ILR1-like 1
  Pfam annotation: Domain name=M20_dimer; Domain location=214-320; Score=39.0; E_value=1.9e-08; Accession=PF07687.6; Description =Peptidase dimerisation domain
  Pfam annotation: Domain name=Peptidase_M20; Domain location=109-426; Score=230.4; E_value=4.5e-66; Accession=PF01546.20; Description =Peptidase family M20M25M40
  Pfam module annotation: Pfam domain module=M20_dimer::Peptidase_M20; Domain location=214-320::109-426
MAAAAPPPLLACFALAVLAAAVWPSLGAGASLLDDPAGLLRRAKEPAFADWMVAVRRRIHENPELGYEEFETSELVRRELDAMGIPYRHPFAVTGVVATIGTGGPPFVALRADMDALPMQESVEWEHKSKVPGKMHGCGHDAHVAMLLGSAKILQEHRDELKGTVVLVFQPAEEGGGGAQKMIEAGAVENIDAIFGIHIADSIPIGVLASRPGPIMAGSGFFEAVISGKGGHAALPHHTIDPILAASNVIVSLQQLVSREADPLDSQVVTIGKFQGGGAFNVIPDSVTIGGTFRAFLKESFNQLKQRIEEVIVSQASVQRCTATVDFLTKDRPFFPPTINSPELHDFFVNVASEMVGSKNVRDRQPLMGAEDFAFYAEAIPSTYYYFVGMYNETRGPQAPHHSPYFTINEDALPYGAAAQAAMAARYLHEHQQPASTPDKAKAHEEL

SEQ ID NO: 71077 - protein, 87 aa, Setaria italica
  Transcript Sequence Number=SeqID_5103
  Gene Ontology: Cellular component=integral to membrane
  Homolog annotation: Hit_ID=B6TFH7; Match level="QueryCoverage=78%, HitCoverage=33%, E-value=1e-32, Identity=95%"; Hit description =Peroxisomal membrane protein PMP22
  Pfam annotation: Domain name=Mpv17_PMP22; Domain location=14-81; Score=69.3; E_value=1.4e-17; Accession=PF04117.4; Description=Mpv17 PMP22 family
NLLLYLVSPRVLIPSCNLGRPLKDVTIRVKKQYPSVQLSAWMFWPIVSWINHQYMPLQFRVIFHSFVACCWGIFLNLRARAMSLKQA

SEQ ID NO: 71078 - protein, 179 aa, Setaria italica
  Transcript Sequence Number=SeqID_5104
  Gene Ontology: Cellular component=integral to membrane
  Homolog annotation: Hit_ID=B6TFH7; Match level="QueryCoverage=55%, HitCoverage=49%, E-value=3e-41, Identity=82%"; Hit description =Peroxisomal membrane protein PMP22
MDSPTQEHRRIRPSKKNTSERTEAACAVLGCRRRSRWADRSKGFRRWGWWSVAMAAAGGAGRGGGKGEGSLAYRAWRQYLLQLQQHPLRTKMVTAGCLAGVSDSVAQKLSGYQKIEKRRLFLKMLFGFAYGGPFGHFLHKILDYIFKGKKDTKTIAKKVLLEQVTSSPWNKFVSYLVTN

SEQ ID NO: 71079 - protein, 91 aa, Setaria italica
  Transcript Sequence Number=SeqID_5105
FGNSLNKLTNLELFQCEASNMNSENEKKRKHTLLESISKSACYLTGYRCPNYVQYFYWNPPKKSCSNQDFGQLASISSRLLQSNSLSLINY

SEQ ID NO: 71080 - protein, 190 aa, Setaria italica
  Transcript Sequence Number=SeqID_5106
  Gene Ontology: Mol. function=protein binding; Cellular component =integral to membrane; Biological process=cellular response to stress
  Homolog annotation: Hit_ID=B6TFH7; Match level="QueryCoverage=88%, HitCoverage=83%, E-value=6e-84, Identity=87%"; Hit description =Peroxisomal membrane protein PMP22
  Pfam annotation: Domain name=Mpv17_PMP22; Domain location=116-184; Score=77.3; E_value=5.6e-20; Accession=PF04117.4; Description=Mpv17 PMP22 family
KNVNKGNVRKGTSNLDYQDYQDKHPLRTKMVTAGCLAGVSDSVAQKLSGYQKIEKRRLFLKMLFGFAYGGPFGHFLHKILDYIFKGKKDTKTIAKKVLLEQVTSSPWNNLLFLFYYGYVVERRPLKDVTIRVKKQYPSVQLSAWMFWPIVSWINHQYMPLQFRVIFHSFVACCWGIFLNLRARAMSLKQA

SEQ ID NO: 71081 - protein, 97 aa, Setaria italica
  Transcript Sequence Number=SeqID_5107
WDWSPAPDDDEKHALAGATEAAKVGDDGDERCGGGGRGWKRQVLEVVVEWGEGKLLLLRRAKKRLALYLLGCHYGGRPALPFRSGGGSSTASMLTSR

SEQ ID NO: 71082 - protein, 365 aa, Setaria italica
  Transcript Sequence Number=SeqID_5108
  Gene Ontology: Mol. function=hydrolase activity, hydrolyzing O -glycosyl compounds; Cellular component=anchored to membrane; Biological process=carbohydrate metabolic process
  Homolog annotation: Hit_ID=B6UBU1; Match level="QueryCoverage=100%, HitCoverage=67%, E-value=0.0, Identity=85%"; Hit description=Glucan endo-1,3-beta-glucosidase 3
  Pfam annotation: Domain name=Glyco_hydro_17; Domain location=1-202; Score=-16.3; E_value=5.7e-10; Accession=PF00332.10; Description =Glycosyl hydrolases family 17
  Pfam annotation: Domain name=X8; Domain location=217-302; Score =182.3; E_value=1.3e-51; Accession=PF07983.5; Description=X8 domain
  Pfam module annotation: Pfam domain module=Glyco_hydro_17::X8; Domain location=1-202::217-302
  Subcellular localization annotation: CTP_CleavageSite=21; ConfidenceScore=5.37e-01
STPLPFSVVLDPFPPSQAFFNQSLAKSFIAPLLGHLANTSAPLMLNLYPYYSLMQSGGVIPLDNALFRPLPPSQEMVDPNTLLHYTNVFDAMLDAVRVAVRNLNVTAGGGVPILVTETGWPSYGDRRAEPYATRDNADAYNSNLIKHVLEDKPGTPMAPGAAAQSSAYIYELFNEDLRPGPVSEANWGLFYGNGTPVYLLHVSGAGGFLGNDTTDRSFCVAADDADEKAVQAAMDWACGPGRADCTAIQPGQGCYLPNDVRSHASYAFDAYYQSQGRAAGSCYFQGAGMVTTTDPSHDNCLFPGSKLLSNDTKSGSANNTTTSTSDAEGSAIWRLRTGREKGFLLFLRLLLSIAVVIVTDSNFWT

SEQ ID NO: 71083 - protein, 63 aa, Setaria italica
  Transcript Sequence Number=SeqID_5109
  Subcellular localization annotation: CTP_CleavageSite=28; ConfidenceScore=5.10e-01
SSGRSSGPDSSGDTGLAVLGCNFSFFVPYHSGSRVIEFFLGFSLFCEDFHRIFMLCLKCNFCK

SEQ ID NO: 71084 - protein, 46 aa, Setaria italica
  Transcript Sequence Number=SeqID_5110
HMLLHKLITVNLGHVSIRSSYINLDSQLTKFVYPCALFIYFNTIPI

SEQ ID NO: 71085 - protein, 131 aa, Setaria italica
  misc_feature (122)..(122): Xaa can be any naturally occurring amino acid
  Transcript Sequence Number=SeqID_5111
  Gene Ontology: Mol. function=protein tyrosine kinase activity; Cellular component=integral to membrane; Biological process=protein amino acid phosphorylation
  Homolog annotation: Hit_ID=Q10M75; Match level="QueryCoverage=74%, HitCoverage=9%, E-value=1e-24, Identity=56%"; Hit description =Leucine Rich Repeat family protein, expressed
  Pfam annotation: Domain name=LRR_1; Domain location=15-37; Score =14.0; E_value=0.64; Accession=PF00560.25; Description=Leucine Rich Repeat
  Pfam annotation: Domain name=LRR_1; Domain location=39-58; Score=7.3; E_value=12; Accession=PF00560.25; Description=Leucine Rich Repeat
  Pfam annotation: Domain name=LRR_1; Domain location=61-83; Score=7.2; E_value=13; Accession=PF00560.25; Description=Leucine Rich Repeat
  Pfam module annotation: Pfam domain module=LRR_1::LRR_1::LRR_1; Domain location=15-37::39-58::61-83
HFNGSLPDDISSLSGLRVLDISTNNFTGPLPAAVSKLGALTDLDMSTNQFTGPLPEDLPDNLLSFNASYNDLSGVVPENLRKFPESSFHPGNSKLEYPASSSGSGNSPSGSGGGKSLSTGAXKIGIVAASI

SEQ ID NO: 71086 - protein, 435 aa, Setaria italica
  Transcript Sequence Number=SeqID_5112
  Gene Ontology: Mol. function=peptidyl-prolyl cis-trans isomerase activity; Cellular component=chloroplast; Biological process=protein folding
  Homolog annotation: Hit_ID=Q7XIK0; Match level="QueryCoverage=86%, HitCoverage=80%, E-value=0.0, Identity=84%"; Hit description =Putative peptidyl-prolycis-trans isomerase protein
  Pfam annotation: Domain name=Pro_isomerase; Domain location=263-421; Score=-60.6; E_value=0.0081; Accession=PF00160.13; Description =Cyclophilin type peptidyl-prolyl cis-tr
  Subcellular localization annotation: CTP_CleavageSite=50; ConfidenceScore=5.33e-01
MASRVAAMALAGARPTAHAPSSAADTERRAWRTRLSLNRRGRGTPGLIARASHRPPCAAEGVIQWLRSAAAALAIAAQISVSLPADAVLYSPDTKIPRTGELALRKAIPANPNMKIIQESLEDISYLLRIPQRKPYGTMEGDVKKAMKIAMDNKEAILGSIPAERKEDGAKLYTSLLEEKGGLLTLLKYIKENNPDKLSIALASSLDTIAELELLQAPGLSFLLPQQYLEYPRLTGRGVVEFTVEKGDGSTFFPTGGGEPKSTATIQVVIDGYSAPLTAGNFAKLVLDGAYDGVTLKCASQAISADNETGKKGYTVPLEVMPAGQFEPLYRTPLSIQDGELPVLPMSVYGAVAMAHSVDSDEYSSPTQFFFYLYDKRNSGLGGISFDEGQFSVFGYTTDGRDVLTQIKTGDKIRSAKLVQGRERLVLPSAAPEES

SEQ ID NO: 71087 - protein, 263 aa, Setaria italica
  misc_feature (76)..(76): Xaa can be any naturally occurring amino acid
  Transcript Sequence Number=SeqID_5113
  Gene Ontology: Mol. function=protein serine/threonine kinase activity; Biological process=protein amino acid phosphorylation
  Homolog annotation: Hit_ID=Q5N7S6; Match level="QueryCoverage=86%, HitCoverage=54%, E-value=6e-35, Identity=34%"; Hit description =Receptor serine/threonine kinase PR5K-like
KAVPDHDGESYCGYPGLAVTCDGGNRAVLKLGGYNYTVSRIHYANLIVSLADADAAAAGNGCPIVDHNVTFPAGAXAVPPHSSVLIDYLFFFINCSFGHPDAPAPTKPKPPKPPTIKPITCGDFDEPDSMTFVLPSREVPPADWSGACKSVFGAPVLRDAVPRDAQDPKWRSDGYSKALRSGFQLGWERSSGECSRCEQSGGKCGFSGAGEFLGCLCADGRMGDGGCSKTLADSSSLGSKKTPLKVIAGASAAAAGLAVLGAG

SEQ ID NO: 71088 - protein, 146 aa, Setaria italica
  misc_feature (13)..(13): Xaa can be any naturally occurring amino acid
  Transcript Sequence Number=SeqID_5114
  Gene Ontology: Mol. function=holo-[acyl-carrier-protein] synthase activity; Biological process=macromolecule biosynthetic process
  Homolog annotation: Hit_ID=B6TPH1; Match level="QueryCoverage=100%, HitCoverage=46%, E-value=3e-59, Identity=76%"; Hit description=4 -phosphopantetheinyl transferase sfp
  Pfam annotation: Domain name=ACPS; Domain location=1-68; Score=68.1; E_value=3.2e-17; Accession=PF01648.12; Description=4'-phosphopantethe inyl transferase superfamily
IGIDIEEKKRKTXKNFLSLARRYFTPSEVDYLDKIPDPDAQQKEFIKLWTLKEAYVKALGRGFSGAPFNKFSIVLAAKNGIQISVAPKVFNDSDSCDCLSENWQFALAELNNSHYMAVCVEDDSRSSDSGNGRRLPLALKIWKTVP

SEQ ID NO: 71089 - protein, 250 aa, Setaria italica
  misc_feature (31)..(31): Xaa can be any naturally occurring amino acid
  misc_feature (106)..(106): Xaa can be any naturally occurring amino acid
  misc_feature (129)..(129): Xaa can be any naturally occurring amino acid
  misc_feature (139)..(139): Xaa can be any naturally occurring amino acid
  Transcript Sequence Number=SeqID_5115
  Gene Ontology: Mol. function=holo-[acyl-carrier-protein] synthase activity; Biological process=macromolecule biosynthetic process
  Homolog annotation: Hit_ID=B6TPH1; Match level="QueryCoverage=100%, HitCoverage=75%, E-value=1e-94, Identity=69%"; Hit description=4 -phosphopantetheinyl transferase sfp
  Pfam annotation: Domain name=ACPS; Domain location=74-155; Score =27.6; E_value=6e-06; Accession=PF01648.12; Description=4' -phosphopantetheinyl transferase superfamily
FQKGAVLSRALVRTTLSRYCKVDPRSFEFKXKQNLGKPEILWQPDDNRMGWPLHFNISHTSSLIACGVTMDTPIGIDIEEKKRKTKKNFLSLARRYFTPSEVDYLXKIPDPDNQNNRIVNKRTSGCLHXTVFIDVLILXEAYVKALGRGFSGAPFNKFSIVLAAKNGIQISVAPKVFNDSDSCDCLSENWQFALAELNNSHYMAVCVEDDSRSSDSGNGRRLPLALKIWKTVPFLEDTLVSGTEAVTLIS

SEQ ID NO: 71090 - protein, 67 aa, Setaria italica
  Transcript Sequence Number=SeqID_5116
  Gene Ontology: Mol. function=holo-[acyl-carrier-protein] synthase activity; Biological process=macromolecule biosynthetic process
  Homolog annotation: Hit_ID=B6TPH1; Match level="QueryCoverage=85%, HitCoverage=18%, E-value=1e-21, Identity=87%"; Hit description=4 -phosphopantetheinyl transferase sfp
VHVWYLLPDELNDASQLKMYMDLLSPSERKAALAMNGEKFQKGAVLSRALVRTTLSRCMKQSATCEI

SEQ ID NO: 71091 - protein, 56 aa, Setaria italica
  Transcript Sequence Number=SeqID_5117
VYTFIFQRYTNNYRLNHECKYLNKNYSICPFHLSHLNSTRGRYSSLDCIKNSVDRT

SEQ ID NO: 71092 - protein, 160 aa, Setaria italica
  misc_feature (21)..(21): Xaa can be any naturally occurring amino acid
  Transcript Sequence Number=SeqID_5118
  Homolog annotation: Hit_ID=B9SYW7; Match level="QueryCoverage=70%, HitCoverage=40%, E-value=7e-17, Identity=41%"; Hit description =Transcription regulator, putative
  Pfam annotation: Domain name=DUF573; Domain location=50-146; Score =37.5; E_value=5.2e-08; Accession=PF04504.6; Description=Protein of unknown function, DUF573
  Subcellular localization annotation: CTP_CleavageSite=33; ConfidenceScore=5.41e-01
PGARKLPIKRRSPRPSSSPPXPPPPPASSDPLRAPTAGGGGGSDQQQPPFKFQRIWSESDELRFLQGLLGCGAQGLVFPRDLNVFYDRFSESMPQPYTRAQLSEKLRRLKNKYRSVSARVAGGLDPARLAPHDRDVLHLCSRLWDPANAATSPFASGAGS

SEQ ID NO: 71093 - protein, 598 aa, Setaria italica
  Transcript Sequence Number=SeqID_5119
  Gene Ontology: Mol. function=protein binding; Cellular component =nucleus; Biological process=ubiquitin-dependent protein catabolic process
  Homolog annotation: Hit_ID=B6SW30; Match level="QueryCoverage=100%, HitCoverage=99%, E-value=0.0, Identity=88%"; Hit description =Coronatine-insensitive protein 1
  Pfam annotation: Domain name=LRR_1; Domain location=172-194; Score =7.1; E_value=13; Accession=PF00560.25; Description=Leucine Rich Repeat
  Pfam annotation: Domain name=LRR_1; Domain location=227-248; Score =5.0; E_value=33; Accession=PF00560.25; Description=Leucine Rich Repeat
  Pfam annotation: Domain name=LRR_1; Domain location=300-326; Score =6.5; E_value=17; Accession=PF00560.25; Description=Leucine Rich Repeat
  Pfam annotation: Domain name=LRR_1; Domain location=494-518; Score =5.2; E_value=31; Accession=PF00560.25; Description=Leucine Rich Repeat
  Pfam module annotation: Pfam domain module=LRR_1::LRR_1::LRR_1::LRR _1; Domain location=172-194::227-248::300-326::494-518
MGGEVPEPRRLSRALSFGGSGGVPEEALHLVFGYVDDPRDREAASLVCRRWHRIDALSRKHVTVGFCYAVEPARLLARFPRLESLALKGKPRASMYGLIPEDWGAYAAPWVAQLAATLECLKAVHLRRMTVTDEDIAVLVRARGHMLQVLKLDKCSDFSTDALRLVARSCRSLRTLFLEECKIGDKGSEWLHELAVNNSVLVTLNFYMTDLKVEPSDLELLAKNCKSLISLKMSDCDLSDLIGFLQTSKALQEFAGGAFSEVGECTKYEKVQFPPRLCFLGSLTFMGKNEMPIIFPFSATLKKLDLQYTLLTTEDHCQLIAKCPNLLVLEVRNVIGDRGLEVVADTCKKLRRLRIERGEDDPGQEEQGGVSQLGLTAVAVGCRELEYIAAYVSDITNGALESIGTFCKNLYDFRLVLLDQQKEVTDLPLDNGVRALLRNCTKLRRFAFYLRPGGLSDVGLGYIGQFSGNIQYMLLGNVGESDNGLIQFAMGCTNLRKLELRSCCFSERALAVAVLQMPSLRYIWVEGYRASPTGQDLLLMARPFWNIEFAPLSPESVYRMMADGQQPCVGNQAQVLAYYSLAGRRPDCPQWLVTLHPA

SEQ ID NO: 71094 - protein, 95 aa, Setaria italica
  misc_feature (51)..(51): Xaa can be any naturally occurring amino acid
  Transcript Sequence Number=SeqID_5120
  Homolog annotation: Hit_ID=B9SEZ8; Match level="QueryCoverage=63%, HitCoverage=14%, E-value=8e-12, Identity=55%"; Hit description=Cell cycle regulatory protein, putative
  Pfam annotation: Domain name=RCC1; Domain location=32-80; Score=19.7; E_value=0.006; Accession=PF00415.10; Description=Regulator of chromosome condensation (RCC1)
MRSLLLRTRAFASRRLLSSLAGAGGGDGTPRTGSVYGFGDNSHGAVGQPAXADAYVPTPVPFLPSSVSAVAAGHYHSLAVSADEEVWAWGRNDEG

SEQ ID NO: 71095 - protein, 444 aa, Setaria italica
  Transcript Sequence Number=SeqID_5121
  Gene Ontology: Mol. function=galactosyltransferase activity; Cellular component=Golgi stack; Biological process=plasma membrane organization and biogenesis
  Homolog annotation: Hit_ID=Q2MGS1; Match level="QueryCoverage=99%, HitCoverage=77%, E-value=1e-122, Identity=47%"; Hit description =Glycosyltransferase sugar-binding region containing DXD motif; Alpha 1,4-glycosyltransferase conserved region
  Pfam annotation: Domain name=Gb3_synth; Domain location=312-444; Score=90.8; E_value=4.7e-24; Accession=PF04572.4; Description=Alpha 1,4-glycosyltransferase conserved region
  Pfam annotation: Domain name=Gly_transf_sug; Domain location=223-309; Score=98.4; E_value=2.6e-26; Accession=PF04488.7; Description =Glycosyltransferase sugar-binding region containing DXD motif
  Pfam module annotation: Pfam domain module=Gb3_synth::Gly_transf_sug; Domain location=312-444::223-309
RRAAAFGSDDELVDLELRVEISSIAGIEDALLLKPASAKSAETRLRAGWARWLEGKADYLRRDRMLRSNLESLNPRNHPLLQDPDSPGLTSLTRGDRMVQRMLLAELDKPASKNFERRRLQSYENKQGMRATVKEKQQKGRRWGYFPGIDPHLGFSEFMERFFELGKCSMRVFMVWNSPQWAYGVRHQRGLESLLKQHLEACVVMLSETLELESFREFVKEGYKVAVAVPDLDELLESTPTHEFASVWYEWRQTKYYPLHYSELVRLAALYKYGGIYLDSDVIVLKPLTSLRNTIGAANHVPGNSSYSGAVLAFEKHSPLLEECLKEFYSTYDDTLLQWNGAELMTRVISNLSSKADENMGHLDTKLEPSATFYPISSTNIMRYFSEPDNMVEKAHHDAIFSRIVNDSTTFHFWNGITSTLVPESNSLVEKILNRYCLHCLDVL

SEQ ID NO: 71096 - protein, 156 aa, Setaria italica
  misc_feature (26)..(26): Xaa can be any naturally occurring amino acid
  Transcript Sequence Number=SeqID_5122
  Gene Ontology: Mol. function=serine-type endopeptidase activity; Cellular component=chloroplast; Biological process=proteolysis
  Homolog annotation: Hit_ID=B4FVF7; Match level="QueryCoverage=100%, HitCoverage=49%, E-value=8e-77, Identity=92%"; Hit description =Protease Do-like 5
GKSYSKEGRLIGCDPAYDLAVLKCRXVDVDGDKLRPALIGTSRGLRVGQSCFAIGNPYGYEHTLTTGVVSGLGREIPSPNGRAIRGAIQTDAAINAGNSGGPLIDSYGHVIGVNTATFTRKGSGISSGVNFAIPIDTVVQSVPNLIVYGTSVSNRF

SEQ ID NO: 71097 - protein, 131 aa, Setaria italica
  Transcript Sequence Number=SeqID_5123
  Gene Ontology: Mol. function=transporter activity; Cellular component= membrane; Biological process=oligopeptide transport
  Homolog annotation: Hit_ID=B6SWZ7; Match level="QueryCoverage=100%, HitCoverage=23%, E-value=1e-48, Identity=74%"; Hit description =Peptide transporter PTR2
AAFRKRKARLAQADGAAVPLHEEEEDAAANGGQRLSRTKGLRCLDKAAVIVKEQDREQEGEWSLCTVSEVEGVKILVRMLPIWLTCVLYAASLGQMTTTFIQQGMVMDARLGGRFKVPAASLVSVEVVFML

SEQ ID NO: 71098 - protein, 214 aa, Setaria italica
  Transcript Sequence Number=SeqID_5124
  Gene Ontology: Mol. function=transcription repressor activity; Biological process=regulation of nitrogen utilization
  Homolog annotation: Hit_ID=B6SZW0; Match level="QueryCoverage=100%, HitCoverage=53%, E-value=1e-112, Identity=92%"; Hit description=PCB2
SAICVQKPLLEFQRAKLKFEEELAAEAARDPSFTYSIVRPTAFFKSLGGQVDIVKNGQPYVMFGDGKLCACKPISEEDLAAFIADCIYDEDNINKVLPIGGPGKALTPLEQGEMLFRLVGREPKFIKVPIQIMDAVIWVLDGLAKLFPGLEDAAEFGKIGRYYASESMLLLDPETGEYSDEKTPSYGKDTLEQFFERVLREGMAGQELGEQTIF

SEQ ID NO: 71099 - protein, 115 aa, Setaria italica
  Transcript Sequence Number=SeqID_5125
YAQAQQPPPPQYGGYHPQAPPPQYPPHPYGAPLPQYPPAPYARPMPPAYSHLAPHQQPPPPYGGHPPPHVMSTHSPPPHHHYMHPPPFESAPPPPAAPPADPELQKRIDKLVEYI

SEQ ID NO: 71100 - protein, 78 aa, Setaria italica
  Transcript Sequence Number=SeqID_5126
CVSEEDDEKKQASVQCFVQHFTIPLSNRQYSRQPPLNQSYQTMARARRNRTEQRRWLLVDGRSEPSNLTLCLQYLRRV

SEQ ID NO: 71101 - protein, 238 aa, Setaria italica
  Transcript Sequence Number=SeqID_5127
  Gene Ontology: Mol. function=hydrolase activity, hydrolyzing O -glycosyl compounds; Cellular component=anchored to membrane; Biological process=carbohydrate metabolic process
  Homolog annotation: Hit_ID=B6TL03; Match level="QueryCoverage=89%, HitCoverage=93%, E-value=1e-55, Identity=58%"; Hit description =Glucan endo-1,3-beta-glucosidase 4
  Pfam annotation: Domain name=X8; Domain location=79-164; Score=158.1; E_value=2.7e-44; Accession=PF07983.5; Description=X8 domain
MHWHCHRSRWLPRILSVGQWNSKMLDKTLHGCLLLLVVLLANASGSHAETTVDSEQALAPALPDSDEGKRRSLATGGGMFCVASQGADPAALQAGLNWACGPGHADCTAIQPGGPCYKQNNLQALASYAYNDYYQRSAKTSTACDFNGTATATTTDPSSGQCVFTGSSMAGGGTPTASAPSGLSPFTPGTGGFGNGSSSFGSPTGGLVPFDGAESLLSGARWAVCVLLLALPLFFFFL

SEQ ID NO: 71102 - protein, 72 aa, Setaria italica
  Transcript Sequence Number=SeqID_5128
  Subcellular localization annotation: CTP_CleavageSite=45; ConfidenceScore=5.27e-01
MDILGALKLAASPPALAGAALLAATPARSSVHFHLANAGAAALVAASLLVADPSLAFIVSLLLVQFDLAKIL

SEQ ID NO: 71103 - protein, 199 aa, Setaria italica
  Transcript Sequence Number=SeqID_5129
  Gene Ontology: Mol. function=molecular_function; Cellular component =chloroplast thylakoid lumen; Biological process=biological_process
  Homolog annotation: Hit_ID=O22160; Match level="QueryCoverage=71%, HitCoverage=63%, E-value=4e-58, Identity=77%"; Hit description =Thylakoid lumenal 15 kDa protein 1, chloroplastic
  Pfam annotation: Domain name=Pentapeptide; Domain location=131-171; Score=29.8; E_value=1.1e-05; Accession=PF00805.14; Description =Pentapeptide repeats (8 copies)
  Pfam annotation: Domain name=Pentapeptide; Domain location=91-130; Score=46.3; E_value=1.2e-10; Accession=PF00805.14; Description =Pentapeptide repeats (8 copies)
  Pfam module annotation: Pfam domain module=Pentapeptide::Pentapeptide; Domain location=131-171::91-130
  Subcellular localization annotation: CTP_CleavageSite=45; ConfidenceScore=5.15e-01
MDILGALKLAASPPALAGAALLAATPARSSVHFHLANAGAAALVAASLLVADPSLAFIGGGPYGKQVTRGQDLTGKDFSGQTLVKQDFKTSILRQANFKGANLLGASFFDADLTSADLSDADLRGADFSLANLTKVNLTNANLEGALTTGNTTFKGANITGADFTDVPLRDDQREYLCKIADGVNSTTGNATKETLFCN

SEQ ID NO: 71104 - protein, 118 aa, Setaria italica
  Transcript Sequence Number=SeqID_5130
  Gene Ontology: Mol. function=molecular_function; Cellular component =chloroplast thylakoid lumen; Biological process=biological_process
  Homolog annotation: Hit_ID=O22160; Match level="QueryCoverage=83%, HitCoverage=43%, E-value=7e-35, Identity=76%"; Hit description =Thylakoid lumenal 15 kDa protein 1, chloroplastic
  Pfam annotation: Domain name=Pentapeptide; Domain location=49-89; Score=29.8; E_value=1.1e-05; Accession=PF00805.14; Description =Pentapeptide repeats (8 copies)
  Pfam annotation: Domain name=Pentapeptide; Domain location=9-48; Score=46.3; E_value=1.2e-10; Accession=PF00805.14; Description =Pentapeptide repeats (8 copies)
  Pfam module annotation: Pfam domain module=Pentapeptide::Pentapeptide; Domain location=49-89::9-48
SLNLLLLQSILRQANFKGANLLGASFFDADLTSADLSDADLRGADFSLANLTKVNLTNANLEGALTTGNTTFKGANITGADFTDVPLRDDQREYLCKIADGVNSTTLTVDMHRPFLFF

SEQ ID NO: 71105 - protein, 252 aa, Setaria italica
  Transcript Sequence Number=SeqID_5131
  Gene Ontology: Mol. function=metal ion binding; Cellular component =nucleus; Biological process=negative regulation of transcription, DNA-dependent
  Homolog annotation: Hit_ID=B9SHH0; Match level="QueryCoverage=99%, HitCoverage=98%, E-value=4e-96, Identity=65%"; Hit description =Inhibitor of growth protein, putative
  Pfam annotation: Domain name=PHD; Domain location=201-251; Score =52.5; E_value=1.6e-12; Accession=PF00628.21; Description=PHD-finger
MAIARTGVYVDDYLEYSSTLAGDLQRILSTMRELDDRAHGIMGQTKEQIKYLLGVSSHGYDRPNMDDDESERMKKDIEASQDNALSLCTEKVLLARQAYDLIESHIKRLDEDLGQFAEDLKHEGKIPPDEPPVLPPIPVVSRDEKRRLGFSTPQASKKFREREWDRERGMDFDLMPPPGSSKKAGTPMDVDQMIDPNEPTYCICHQVSYGDMIACDNENCEGGEWFHYTCVGLTPETRFKGKWFCPTCRNLQ

SEQ ID NO: 71106 - protein, 554 aa, Setaria italica
  Transcript Sequence Number=SeqID_5132
  Gene Ontology: Mol. function=endonuclease activity; Biological process=DNA integration
  Homolog annotation: Hit_ID=Q109Y2; Match level="QueryCoverage=79%, HitCoverage=99%, E-value=1e-157, Identity=66%"; Hit description =NUMOD3 motif family protein, expressed
  Pfam annotation: Domain name=NUMOD3; Domain location=110-123; Score =12.3; E_value=1.8; Accession=PF07460.3; Description=NUMOD3 motif
  Pfam annotation: Domain name=NUMOD3; Domain location=78-91; Score =16.3; E_value=0.13; Accession=PF07460.3; Description=NUMOD3 motif
  Pfam module annotation: Pfam domain module=NUMOD3::NUMOD3; Domain location=110-123::78-91
DSSRPRLLRLVPTRRPCNGAVRVVADAGPALALALDGGADAVGIELLTEEQQEDVDERERLRRMRISQANKGNTPWNKGRKHSPETLQRIRERTRIAMQDPKVKKKLMNLGHAQSEETRVKISAGVRRGWSLRLQRLMVQDGCFVEWRDMVADAARKGFAGGVGLQCNSYKIITEQMRQEWLENHQKRRSMPRPRGGNRRAPKTPEQRRKIAEAIAAKWLDQEYRERVCSGIASYHGSSTGTKTPRKPRPAEEPGVKRETTKKKYLQARAVILEDSLGKGATVKRKKSATPYKDPMAGEKLEMLSKIRAQRAALEIEKKEAIKRARSLIAEAEKAADALETAAAMSPFAQASLIEARKLVTEARVSLECVDLEGPPENASDDTSEDSALLDYDHRLETQNESNVLEQENKPVNGIKFPPTNVNGIGFHFDESAFTGIKQLYQRIENSMERAFLLPSASSKIKGVNGDFGIIDFQVRQSMVNDMANHDCIAAESTDHPGTLGEDAPRSAENAETREDCPPGTLEEDTPSSEEKYKMRWVRGRLVKVENEYEDPEI

SEQ ID NO: 71107 - protein, 188 aa, Setaria italica
  Transcript Sequence Number=SeqID_5133
HARTFFLWYSNNFYTLTNIFLENDQHFFTYTNIFLLLISGHTPTLIDIDQHYFYINQHLLCLQNIFPHSPTIYFTYTNIFLDTPTFPLNNSTFIDGCQHFLTMYQYILKAVLNSYQHFRIYSIYFEHISNISFIFLNICFLNQHLLMIAQHFSSISNIFLTIINNFFMRSFFLNFIFFNIIQHFIDIH

SEQ ID NO: 71108 - protein, 64 aa, Setaria italica
  Transcript Sequence Number=SeqID_5134
GLSCYLAHMRSLTGSVSFVLYLSMLSSSKASGFSVRSERIIHEAIHHFLYYINVNEICMSCSKR

SEQ ID NO: 71109 - protein, 53 aa, Setaria italica
  Transcript Sequence Number=SeqID_5135
NESSPHEELEHLINQAIINHFTAYLFEQLIHISFTLTDLEECHYYHTKKKIHL

SEQ ID NO: 71110 - protein, 83 aa, Setaria italica
  Transcript Sequence Number=SeqID_5136
MAYYSIKNDVLLHVLFARFSQRSQTLYLSLALKDTKRMRQSLQDSSCGQDSKTSLKGPHEHPSRAMSLSSENPQSSTMKATAS

SEQ ID NO: 71111 - protein, 265 aa, Setaria italica
  Transcript Sequence Number=SeqID_5137
  Pfam annotation: Domain name=NEP; Domain location=14-135; Score =204.6; E_value=2.7e-58; Accession=PF10167.1; Description =Uncharacterised conserved protein
HHRPASSAVAAESSLPLSPADGFLCVKDGVDGMIKYVANEPSVGLYFVQQHSRASMPILLDVKGKLVEKTHEVTLHTEDMEDSICAVRSMADFGLPLADDMIKDINRSLQIMSKTQPKRGLIQNPSWGFQSGKSSGTWEELGATNGSSSRNYLSSMFNTAKQKASSLRWPQPDFTTKDDSSENSASSAAPESSQADGQGASMPDTERDEVPISSRLSDGTSTTNKGLPATDIAETVETYNKFKEEQELKLQEWLRESEKAEDNRD

SEQ ID NO: 71112 - protein, 358 aa, Setaria italica
  misc_feature (6)..(6): Xaa can be any naturally occurring amino acid
  Transcript Sequence Number=SeqID_5138
  Gene Ontology: Mol. function=transferase activity, transferring glycosyl groups; Cellular component=intracellular; Biological process=protein amino acid ADP-ribosylation
  Homolog annotation: Hit_ID=Q0E0Q3; Match level="QueryCoverage=100%, HitCoverage=42%, E-value=1e-168, Identity=79%"; Hit description=Poly [ADP-ribose] polymerase 3
  Pfam annotation: Domain name=BRCT; Domain location=174-253; Score =39.5; E_value=1.4e-08; Accession=PF00533.18; Description=BRCA1 C Terminus (BRCT) domain
  Pfam annotation: Domain name=PADR1; Domain location=88-141; Score =91.9; E_value=2.2e-24; Accession=PF08063.4; Description=PADR1 (NUC008) domain
  Pfam module annotation: Pfam domain module=BRCT::PADR1; Domain location=174-253::88-141
ESKDQXRGQHVTSKNKKSAENKGQDGESEAPMKNRKLKAEESEPNGKGTAAREFTEFCKAIGEHLSVEDMRKILQANEQDASGSEDAVVARCEDMMFYGPLKKCPICGGQLEFKGWKYKCTGNYSEWAHCTFSTNDPPRKSGPIEVPEDIKDDFVHKWLKQQEGKEFPKRDVDEEAHIFSGMMIALSGRMSRSHGYFKEQITKHGGKVNNSVLGVTCVVASPAERDKGGSGGFAEALERGTPVVSENWIMDSIEKKEVQPLAAYDIASDVVPEGRGLPLGQLDPSEEAIETLAAEVKLAGKRAVHKDSKLEKDGGCIFEKDGIIYNCAFALCDLGCDMNQLCIMQLVMVPENRHHLFY

SEQ ID NO: 71113 - protein, 73 aa, Setaria italica
  misc_feature (24)..(24): Xaa can be any naturally occurring amino acid
  Transcript Sequence Number=SeqID_5139
  Homolog annotation: Hit_ID=B6U851; Match level="QueryCoverage=63%, HitCoverage=7%, E-value=6e-17, Identity=93%"; Hit description=Appr-1- p processing enzyme family protein
  Subcellular localization annotation: CTP_CleavageSite=7; ConfidenceScore=5.44e-01
MQHRSPSAASASASPTASSAAASXMAPGVGGVEPAVTLDQVPRWSDPDQRISPLSPTSAGSETPPSSFLSFSD

SEQ ID NO: 71114 - protein, 81 aa, Setaria italica
  Transcript Sequence Number=SeqID_5140
LPNSDKLHKGPPNGCLLRAMLPVMDQCGLHYVHSRVAPPQALDRKTRVRMWYSTPRPTCKTTDSPLCYKTPSLQQFLLSDV

SEQ ID NO: 71115 - protein, 495 aa, Setaria italica
  Transcript Sequence Number=SeqID_5141
  Homolog annotation: Hit_ID=B9RDS4; Match level="QueryCoverage=99%, HitCoverage=21%, E-value=6e-95, Identity=45%"; Hit description=CRP, putative
LDLIAAPLYSEVVHLLGKLQESLVMDVKWILQGQDAILGRRSTRQQLVHIAQRKGLSTKAQVWKPWGWSSLLSDVIASKTAKRKLEVTSIEEGEVVDDTVDAKRPVKTPSHSVDRSFEGIRSINKYLTEKALAELVLPCIDRSSADIRGILSGDLIKQMGTISDHIKAVTRNGAKQAGSVPSGNEMPSSKSSGRKGIRGGSPNIGRRAPVGNDPSPPSASALRAALWLRLQFIIRLLPVIMADRSMRHTLASAILGLLATRMIYEDADLPLPPTNAIALRREVDSLLEPPLDVLLDRPGESLFERLLCVLHALLGSCKPSWLKSRPASKSTIRTQRDFSAFDNEAAEGLQSALDHMELPETIRRRIQAAMPILPPCRHPSIQCQPPQLSLAALTPLQSCILGAGPQQKSSSVSWVPTNVSSRSKAVLPSHDPEMEVDPWTLLEDGTSCPSTSSGSNGPSGVTGDLANLKACSWLKGAVRVRRTELTYIGSLDDDS

SEQ ID NO: 71116 - protein, 288 aa, Setaria italica
  Transcript Sequence Number=SeqID_5142
  Gene Ontology: Mol. function=heat shock protein binding; Biological process=response to stress
  Homolog annotation: Hit_ID=Q7XKR2; Match level="QueryCoverage=94%, HitCoverage=37%, E-value=1e-110, Identity=72%"; Hit description =OSJNBa0053B21.9 protein
  Pfam annotation: Domain name=DnaJ; Domain location=20-81; Score =109.9; E_value=8.5e-30; Accession=PF00226.23; Description=DnaJ domain
MISTLDVHLASESKIDGESDWYRILSLTAWADEEEVKKQYRKLALQLHPDKNKSVGAEAAFKLISEAWSVLSDKSRKMLYDQKRRDHSAINGTNGLYACDMKANKRARKNAAAAASAAVEATTCPSGADTFWTSCNRCRMQYEYLRIYLNHNLLCPNCHHAFMAVETGFPCNGTSSSFTWTTKAQQQKNHTTVDHSYQSASRTSSIPGTGHGAYQQENTYESYNNQSFQFNQYPRTTGAAGANGYSTQALEKSKRKHENYIYNYFSSSNEYPSGRGRHSKRRRNVNNG

SEQ ID NO: 71117 - protein, 39 aa, Setaria italica
  Transcript Sequence Number=SeqID_5143
  Gene Ontology: Mol. function=oxidoreductase activity, acting on the CH-NH2 group of donors, NAD or NADP as acceptor; Biological process =glutamate biosynthetic process
  Homolog annotation: Hit_ID=Q4FCR8; Match level="QueryCoverage=100%, HitCoverage=23%, E-value=3e-11, Identity=87%"; Hit description=NADH -dependent glutamate synthase protein (Fragment)
RVKWEKVDGRFQLKEIQGSEEIIEADLVLLAMGFLGFEV

SEQ ID NO: 71118 - protein, 41 aa, Setaria italica
  Transcript Sequence Number=SeqID_5144
  Gene Ontology: Mol. function=oxidoreductase activity, acting on the CH-NH2 group of donors, NAD or NADP as acceptor; Cellular component =chloroplast; Biological process=glutamate biosynthetic process
  Homolog annotation: Hit_ID=Q9LV03; Match level="QueryCoverage=85%, HitCoverage=1%, E-value=2e-13, Identity=94%"; Hit description=NADH -dependent glutamate synthase
IIENPVSIKSIECAIIDKGFEEGWMVPRPPLQRTGYLLLRF

SEQ ID NO: 71119 - protein, 34 aa, Setaria italica
  Transcript Sequence Number=SeqID_5145
YKGQLKPCQLKGYYYADLGHENFTSYMALVNTKP

SEQ ID NO: 71120 - protein, 1560 aa, Setaria italica
  misc_feature (62)..(62): Xaa can be any naturally occurring amino acid
  misc_feature (288)..(288): Xaa can be any naturally occurring amino acid
  Transcript Sequence Number=SeqID_5146
  Gene Ontology: Mol. function=oxidoreductase activity, acting on the CH-NH2 group of donors, NAD or NADP as acceptor; Cellular component =chloroplast; Biological process=nitrogen compound metabolic process
  Homolog annotation: Hit_ID=A7VKB1; Match level="QueryCoverage=95%, HitCoverage=67%, E-value=0.0, Identity=82%"; Hit description=NADH -glutamate synthase 2
  Pfam annotation: Domain name=GATase_2; Domain location=96-473; Score =782.1; E_value=3.9e-232; Accession=PF00310.13; Description=Glutamine amidotransferases class-II
  Pfam annotation: Domain name=GXGXG; Domain location=1375-1560; Score =325.2; E_value=1.3e-94; Accession=PF01493.11; Description=GXGXG motif
  Pfam annotation: Domain name=Glu_syn_central; Domain location=567 -860; Score=617.5; E_value=1.4e-182; Accession=PF04898.6; Description= Glutamate synthase central domain
  Pfam annotation: Domain name=Glu_synthase; Domain location=924-1295; Score=826.2; E_value=2e-245; Accession=PF01645.9; Description =Conserved region in glutamate synthase
  Pfam module annotation: Pfam domain module=GATase_2::GXGXG::Glu_syn _central::Glu_synthase; Domain location=96-473::1375-1560::567 -860::924-1295
  Subcellular localization annotation: CTP_CleavageSite=26; ConfidenceScore=5.25e-01
MSTTQGTALKSAPMGAGRRARRGRPVAAPYRSGWQAYGGVSLEGSGFLGGGQRTEERVVPRXPRAVTRDAEVVRPLSKLPDSSIGLYDPSFERDACGVGFVAELSGDYKRETVNDAIEMLERMAHRGACGCEKNTGDGAGILVALPHDFFKEVTKDVGFELPPPGEYAVGMFFMPTDEKRREKGKAEFKKVAESLGHVILGWRPVPTDNSDLGESALETEPAIEQVFITKSSRSEAEFEQQLYILRRFSIRSIRAALDIRRGGERDFYMCSLSSRTIVYKGQLKPCQXKGYYYADLGHENFTSYMALVHSRFSTNTFPSWDRAQPMRVLGHNGEINTLRGNKNWMTAREGLLEAEKLGLSKEQLSIILPIVDATSSDSGAFDNVLELLVRGGRSLPEAVMMMIPEAWQNDANMDPEKKALYEFLSALMEPWDGPALISFTDGRYLGATLDRNGLRPGRFYVTHSGRVIMGSEVGVVDVPPEDVLRKGRLNPGMMLLVDFENHTVVDDEALKSQYSKAHPYGEWLKKQKLCLKDIVESVPEVDRVAPSISSSFSQKNVAKESVGVNGIMTPLKAFGYTVEALEMLLLPMAKDGTEALGSMGNDTPLAVMSNREKLTFEYFKQMFAQVTNPPIDPIREKIVTSMECMIGPEGDLLETTEKQCNRLALKGPLVSIDEMEAIKKMNYRGWRSKVLDITYPKKSGRKGLEETLDRICAEAREALRQGYTILVLSDRGFSSDRVAASSLLAVGAVHQHLVANLERTRIGLLVESAEPREVHHFCTLVGFGADAICPYLAIEAIWCLQKDGKIPPNSDEQPYSKEELVKKYFYASNYGMMKVLAKMGISTLASYKGAQIFEALGLSSEVIGKCFEGTPSRIEGATFEMLARDALRLHELAFPSRTPPPGSADAKALPNPGDYHWRKNGEVHLNDPLAIGKLQEAARVNSRAAYKEYSKRIQELNKTCNLRGMLKFKDITGKISLDEVEPASEIVKRFCTGAMSYGSISLEAHTALAMAMNKLGGKSNTGEGGEQPSRMEPLPDGSMNPRRSAIKQVASGRFGVSSYYLTNADELQIKMAQGAKPGEGGELPGHKVIGDIAVTRHSTAGVGLISPPPHHDIYSIEDLAQLIHDLKNSNPGARISVKLVSEAGVGVVASGVVKGHADHVLISGHDGGTGASRWTGIKNAGLPWELGLAETHQTLVANGLRGRAVLQTDGQLKTGRDVAVACLLGAEEFGFSTAPLITLGCIMMRKCHMNTCPVGIATQDPVLREKFAGEPEHVINFFFMLAEELREIMANLGFRTITEMVGRSDMLEVDPEVVKSNEKLENIDLSLILKPAAEIRPGAAQYCVEKQDHGLDMALDNKLIDLSRTAIEKQVRVFIETPIQNTNRAVGTMLSHEVTKRYHMNGLPAGTIHVKFTGSAGQSFGAFLCPGITLELEGDSNDYVGKGLSGGKIVVYPPRNSSFSPEDNIVIGNVALYGATKGEAYFNGMAAERFCVRNSGAQAVVEGIGDHGCEYMTGGTVVILGKTGRNFAAGMSRGIAYVYDVDGKFSARCNNELVDLYHVE

SEQ ID NO: 71121 - protein, 122 aa, Setaria italica
  Transcript Sequence Number=SeqID_5147
  Subcellular localization annotation: CTP_CleavageSite=48; ConfidenceScore=5.23e-01
MDGDDFTFAAVPPPLLAAGGGGGGRMGPLYPVFGRPRSPPRPAPEPVTATARVPLGRLLLVDREPTPAEDGDLDSVPAEMYCPWSPGWAAAAASPARCKKSGSTGSVLRWRPRLVGRSQSDG

SEQ ID NO: 71122 - protein, 131 aa, Setaria italica
  misc_feature (27)..(27): Xaa can be any naturally occurring amino acid
  Transcript Sequence Number=SeqID_5148
  Gene Ontology: Mol. function=cysteine-type peptidase activity; Cellular component=cytoplasm; Biological process=ubiquitin-dependent protein catabolic process
  Homolog annotation: Hit_ID=Q0ILU8; Match level="QueryCoverage=100%, HitCoverage=14%, E-value=4e-57, Identity=83%"; Hit description =Ubiquitin carboxyl-terminal hydrolase
  Pfam annotation: Domain name=UCH; Domain location=1-111; Score=0.0; E_ value=2.8e-07; Accession=PF00443.21; Description=Ubiquitin carboxyl -terminal hydrolase
LDLWRLPEILIIHLKRFSYSRYTKNKXLETCVDFPIHDLDLSKYIGHRRQQIPHNYRLYAISNHYGSMGGGHYTAYVYDEVKKGWYDFDDRHVGPITEDSIKTSAAYVLFYRRIQEDSLDTGTDIDSDIAT

SEQ ID NO: 71123 - protein, 112 aa, Setaria italica
  misc_feature (64)..(64): Xaa can be any naturally occurring amino acid
  Transcript Sequence Number=SeqID_5149
  Gene Ontology: Mol. function=DNA-directed DNA polymerase activity; Cellular component=nucleus; Biological process=nucleobase, nucleoside, nucleotide and nucleic acid metabolic process
  Homolog annotation: Hit_ID=O48653; Match level="QueryCoverage=100%, HitCoverage=7%, E-value=2e-42, Identity=77%"; Hit description=DNA polymerase alpha catalytic subunit
EVNKKYRCLEIDLDGIYKRMLLLKKKKYAAIKVALDGSLRENIERKGLDMVRRDWSLLSKEIGXFCLNQILSGGTCDDVIESIHSSLVQVLEQMRSGQIELENYVITKSLTK

SEQ ID NO: 71124 - protein, 103 aa, Setaria italica
  Transcript Sequence Number=SeqID_5150
  Gene Ontology: Mol. function=DNA binding; Cellular component=nucleus; Biological process=imaginal disc-derived wing margin morphogenesis
  Homolog annotation: Hit_ID=B9HUU3; Match level="QueryCoverage=99%, HitCoverage=25%, E-value=8e-46, Identity=81%"; Hit description=PAF1 complex component
  Pfam annotation: Domain name=CDC73; Domain location=1-102; Score= -53.4; E_value=3.6e-05; Accession=PF05179.6; Description=RNA pol II accessory factor, Cdc73 family
AVSFEVRDKPASLKSDDWGRVVAVFVLGKEWQFKDWPFKDHVEIFNRVIGFYVRFEDDSVEAAKVVKQWNVKIISISKNKRHQDRTAALEVWERLEEFMRART

SEQ ID NO: 71125 - protein, 99 aa, Setaria italica
  Transcript Sequence Number=SeqID_5151
  Gene Ontology: Cellular component=extracellular region
  Homolog annotation: Hit_ID=Q6H5X0; Match level="QueryCoverage=98%, HitCoverage=50%, E-value=1e-41, Identity=81%"; Hit description =Putative ripening-related protein 2
GHSCDECCKAGKSYPTYRCSPPVVSGSTKAIMTLNDFDAGGDGGDPSKCDEKFHKNTERVVALSTGWYAGGKRCGKNVRINAKGKSVLAKVVDECDSLH

SEQ ID NO: 71126 - protein, 133 aa, Setaria italica
  Transcript Sequence Number=SeqID_5152
MSHRELIHPQTIYTTDIRAHTGNDHPQTPIYPPTTDIRAQIRMYGRQSTHTSGYPGYADTQSTLTSSHGVSSLGSAGRSTMDRYTPRLHETNHATGLYGVPGNRSELTPDPLNFTSRQQYPYPHPGSFGDWHG

SEQ ID NO: 71127 - protein, 398 aa, Setaria italica
  misc_feature (360)..(360): Xaa can be any naturally occurring amino acid
  Transcript Sequence Number=SeqID_5153
  Gene Ontology: Mol. function=metal ion binding; Biological process =biological_process
  Homolog annotation: Hit_ID=UPI0001505866; Match level="QueryCoverage =75%, HitCoverage=22%, E-value=2e-72, Identity=46%"; Hit description =EDM2; transcription factor
  Pfam annotation: Domain name=C1_1; Domain location=213-263; Score =2.0; E_value=0.018; Accession=PF00130.14; Description=Phorbol estersdiacylglycerol binding do
  Pfam annotation: Domain name=PHD; Domain location=96-153; Score=18.5; E_value=0.00024; Accession=PF00628.21; Description=PHD-finger
  Pfam module annotation: Pfam domain module=C1_1::PHD; Domain location= 213-263::96-153
YEVKPSDDDIRDHVRLIKLFSERDPAIAKSQTLQLFIKEESMEKIDEAGSNDLDNKQPFVVDDKEREEVVEDNNKHEPSNDDDEEDEDDGDLFDSVCAICDNGGELLCCEGSCMRSFHAKLGDGEDSYCATLGYTKAEVKAIKNFLCKNCEYKQHQCFVCGELEPSDGTNAKVFLCNNATCGHFYHPKCVAQLLHPNNKNEALELEKSIVAGISFTCPVHWCFQCKGLEDRTQESLQFAVCRRCPRSYHRKCLPMEISFEDNDAEGIITRAWELSKRILIYCLDHDMDIDIGTPSRDHLKFPRISKPLDSVKKKVKELAEKKKRTSDYLYVNEPMQKSSRRVGMKGSFDQSGFEPEKKKXKNLKGMIQPEEPVVKRAALVSSLKHLKEEEQELESLSS

SEQ ID NO: 71128 - protein, 247 aa, Setaria italica
  Transcript Sequence Number=SeqID_5154
  Gene Ontology: Mol. function=metal ion binding
  Homolog annotation: Hit_ID=B9SSQ5; Match level="QueryCoverage=99%, HitCoverage=18%, E-value=4e-36, Identity=34%"; Hit description =Protein binding protein, putative
MMSSDDDDAEPRLRAVQGYYFVDDDDALVSFDVLPFQFDAAEEVPSFKKDVYLRGLADGGLQNVYKQVVAWKLGLDGDSPEITVLCTEGSWIALLKPRPSYEETVRSVLVTVEMLHFVRRSPTASEENIWGYLRRVFDKYEVKPSDDDIRDHVRLIKLFSERDPAIAKSQTLQLFIKEESMEKIDEAGSNDLDNKQPFVVDDKEREEVVEDNNKHEPSNDDDEEDEDDGDLFDSVCAICDNGGELLW

SEQ ID NO: 71129 - protein, 691 aa, Setaria italica
  misc_feature (122)..(122): Xaa can be any naturally occurring amino acid
  Transcript Sequence Number=SeqID_5155
  Gene Ontology: Mol. function=metal ion binding
  Homolog annotation: Hit_ID=B9SSQ5; Match level="QueryCoverage=45%, HitCoverage=25%, E-value=1e-109, Identity=60%"; Hit description =Protein binding protein, putative
TLVSSLKHLKEEEQELESLSSLATGKTPQSSFPVIDGDTEKRVLALVEKEVCSLTLDDISRRCAIPSTYKTSGRQIDKIIARGKLERSIQAVQAALQKLEHGGTIDDAKAVCEAEVLRQLTXNKLRVYLAPFIHGMRYTSFGRHFTKKEKLNEIVDKLHWYVQPGDTIVDFSCGLNDFSQFMKEKLDKVGKKCNFRNYDVIRPKNSFCFEKRDWMTVRPKELPHGSKLIMGLNPPFGSKAILANKFIDKALTFKPKLIILIVPKETERLDEKRQPYDLVWEDTGSLSGKSFYLPGSLDVTDKQMDQWNVTPPPIYLWSRPDWTQKHRRIAEEHGHSTLKNGRSGTRNETYMGENTNFIFEKQERVNGLPAEKHVEIACEEMKFALKRSDECQENQNGAHCERREEIASNTTRRIRELESTVYATKPDSDMSISPSETRNSQYKSRSDSPIHSEYPSDRMAHQDNYFSNPVHEPCTSPHERVPYEDYIRDVAEYGVASVEKHLAFSADNVGVGLRMHSPDLKELNGVNAGGPNSNLYGPASGGTGGSFYRNQNLENYPMDYSMENTVFAQRNAVTGVDVEDARMYDGRIRDNHNLSVSTATDIRAQIRMYGGHTGNDHPQTPIYPPTTDIRAHTGNDHPQTPIYPPTTDIRAQIRMYGRQSTHTSGYPGYADTQSTLTSSHGVSLLTLSLVL

SEQ ID NO: 71130 - protein, 56 aa, Setaria italica
  Transcript Sequence Number=SeqID_5156
  Gene Ontology: Mol. function=protein serine/threonine kinase activity; Biological process=protein amino acid phosphorylation
  Homolog annotation: Hit_ID=UPI0001A7B201; Match level="QueryCoverage =98%, HitCoverage=8%, E-value=9e-12, Identity=58%"; Hit description =ATP binding / kinase/ protein kinase/ protein serine/threonine kinase/ protein tyrosine kinase
MEKKFTDSFKSMIATCLIKDPTKRPSAKKLLKHPFFRKAKAEHNAVKCILNKLPSL

SEQ ID NO: 71131 - protein, 201 aa, Setaria italica
  Transcript Sequence Number=SeqID_5157
  Gene Ontology: Mol. function=protein serine/threonine kinase activity; Cellular component=cytoplasm; Biological process=protein amino acid phosphorylation
  Homolog annotation: Hit_ID=Q6ETL7; Match level="QueryCoverage=100%, HitCoverage=37%, E-value=4e-86, Identity=79%"; Hit description =Putative oxidative-stress responsive 1
  Pfam annotation: Domain name=Pkinase; Domain location=1-176; Score =59.6; E_value=1.2e-14; Accession=PF00069.17; Description=Protein kinase domain
  Pfam annotation: Domain name=Pkinase_Tyr; Domain location=1-176; Score=-85.6; E_value=4.9e-08; Accession=PF07714.9; Description =Protein tyrosine kinase
  Pfam module annotation: Pfam domain module=Pkinase::Pkinase_Tyr; Domain location=1-176::1-176
MKSSYPKGFEDENFIAFVLRETLKGLEYLHENGHIHRDVKAGNILLDQEQGVKLSDFGVTASLYDSIINRHGKRKTLVGTPCWMAPEVMEQKDYDFKADIWSFGITALELAIGHAPFSSQPPAKVFLMTLQHAPPSLHNTKEKKFTDSFKSMIATCLIKDPTKRPSAKKLLKHPFFRKAKAEHNAVKCILNKLPSLAERMQ

SEQ ID NO: 71132 - protein, 91 aa, Setaria italica
  misc_feature (73)..(73): Xaa can be any naturally occurring amino acid
  Transcript Sequence Number=SeqID_5158
  Subcellular localization annotation: CTP_CleavageSite=85; ConfidenceScore=5.43e-01
PSQSFPSISKRNDVAATHPPPPPPICRAHVTSAPPGPPAPPLPPPKLAVANNASQKSSTIRPPPPSRGGHPKXSSNSLPSKGSVVSSNPPP

SEQ ID NO: 71133 - protein, 132 aa, Setaria italica
  Transcript Sequence Number=SeqID_5159
  Gene Ontology: Mol. function=metal ion binding; Biological process =metal ion transport
  Homolog annotation: Hit_ID=B6T2B5; Match level="QueryCoverage=100%, HitCoverage=99%, E-value=2e-41, Identity=69%"; Hit description=Metal ion binding protein
  Pfam annotation: Domain name=HMA; Domain location=69-129; Score=56.0; E_value=1.4e-13; Accession=PF00403.18; Description=Heavy-metal -associated domain
MASRGFTFKRILRWFPRSSASGGLQEEDEDSSERSGLLRSHLQHQIVPVTDSSDTSKALAVRVEPKTVALKVSMHCHGCARKVEKQVSKMQGVVSFKVELESKKVTVVGDVSPADVLESICKVMKRAELLVA

SEQ ID NO: 71134 - protein, 257 aa, Setaria italica
  Transcript Sequence Number=SeqID_5160
  Gene Ontology: Mol. function=nucleotidyltransferase activity; Cellular component=ribosome; Biological process=metabolic process
ELKHGLEILLKSKAAIVLVRNGSDSDAEFLSLLSSLCELMKVIGNHVPPPFIIVSPPGHVESVRTCLIENDYFNLDIKKVWVLEELELPIVSMSSEASRKKVLMKSPWEIIKKTAGSGGIFSLLSSNKILDSLNQMGVQYTQICSSSSRPVIGHPLLFGAVASSGADVGVKLSTSGETEDDFDLIISIDLLNKMCRDVTQLRFSARPDQNAHVEHVDGQWVAVQPEATNSHRLHADVTSILNSCAPDKVCVMEIIEQ

SEQ ID NO: 71135 - protein, 473 aa, Setaria italica
  misc_feature (27)..(27): Xaa can be any naturally occurring amino acid
  Transcript Sequence Number=SeqID_5161
  Gene Ontology: Mol. function=phosphoinositide phospholipase C activity; Biological process=intracellular signaling cascade
  Homolog annotation: Hit_ID=Q9LNG5; Match level="QueryCoverage=35%, HitCoverage=12%, E-value=7e-26, Identity=36%"; Hit description =Serine/threonine protein phosphatase 7 long form homolog
  Pfam annotation: Domain name=PMD; Domain location=1-170; Score=-12.0; E_value=9.4e-08; Accession=PF10536.1; Description=Plant mobile domain
RPLVRSPCTETGIEQDLPPIGFRWVGXRTQSDNATRSLKQYRDELNLQRVDQVKWEPYLFVESSSLPPLCTRDSDLWLTQAPLINFPIVEMYLPERVMRQFSLRQCVPPPFRPTLQSLHRISRRGRERENWEETHHEYIQEWEARRQRIFRDTEQYDPSSYEEYLNWYSGATRRYLVPATSDDAEAGPLPPPGDSLDLQNQAKSPLIRKAVDKLEGMVKKAKRAMTSTADTTTQALVAEFLHGFQDVLQDLSEIDTSPHVDAAELLHEAEQNIDTNQEEQEQEDEELDTVEHASLSLEPMDEENNLSNNVLTEHHSLGVEENCDSAAPATGNYDTATAATELVQPSEDLQQDEHLEDHPEMDQTIFMVEPKCEEDDGSNFVLPSSPPELMLEEQDDSANPAEEQGHLAPQGTESCTVQQSLEVGEAEDQENLNTAEHDGTMVEHTGEENNNCNGVPSSCPASSALVDPIPIEQ

SEQ ID NO: 71136 - protein, 488 aa, Setaria italica
  Transcript Sequence Number=SeqID_5162
  Gene Ontology: Mol. function=serine-type endopeptidase activity; Cellular component=nucleus; Biological process=proteolysis
  Homolog annotation: Hit_ID=Q9FL12; Match level="QueryCoverage=99%, HitCoverage=81%, E-value=0.0, Identity=82%"; Hit description =Protease Do-like 9
  Pfam annotation: Domain name=Trypsin; Domain location=31-218; Score =74.6; E_value=3.6e-19; Accession=PF00089.18; Description=Trypsin
KTMVEVPAAMEPLRWEQVVKVMPSMDAVVKVFCVHTEPNFSLPWQRKRQYSSSSSGFIIGGRRVLTNAHSVEHHTQVKLKKRGSDTKYLATVLAIGTECDIAMLTVEDDEFWEGVSPVEFGSLPALQDAVTVVGYPIGGDTISVTSGVVSRIEILSYVHGSTELLGLQIDAAINSGNSGGPAFNDKGKCVGIAFQSLKHEDAENIGYVIPTPVIKHFIEDYEKSGEYTGFPILGIEWQKMENPDLRKAMGMKSDQKGVRVRRVEPTAPESGCLHPSDIILSFDGIDIANDGTVPFRHGERIGFSYLVSQKYTGEKARVKLLRNSKIHEFNIKLATHKRLIPAHIKGRPPSYYIVAGFVFTVVSVPYLRSEYGKDYEYDAPVKLLDKHSHAMAQSPDEQLVVVSQVLVSDINIGYEDIVNIQVLAFNGTPVKNLKHLATMVEECNEAFLKFDLDYDQLVVLETKTAKAATQDILTTHCIPSAMSEDLKS

SEQ ID NO: 71137 - protein, 51 aa, Setaria italica
  Transcript Sequence Number=SeqID_5163
LVVGEEPRPQLYRKPAPADRDHGVGGGLGLVYLGNLVKRNLYNLGLIKSCS

SEQ ID NO: 71138 - protein, 60 aa, Setaria italica
  Transcript Sequence Number=SeqID_5164
MASSSMDTEAAGQELKGSDYTVSATAHAVDSDSWQQVGLLLVIGFNCAYVLSFSNLMMAA

SEQ ID NO: 71139 - protein, 84 aa, Setaria italica
  Transcript Sequence Number=SeqID_5165
  Gene Ontology: Mol. function=protein serine/threonine kinase activity; Biological process=protein amino acid phosphorylation
  Homolog annotation: Hit_ID=Q7XGR6; Match level="QueryCoverage=98%, HitCoverage=11%, E-value=1e-17, Identity=54%"; Hit description =Protein kinase domain containing protein
  Pfam annotation: Domain name=EGF_CA; Domain location=34-75; Score =17.6; E_value=0.0033; Accession=PF07645.7; Description=Calcium binding EGF domain
YHSECVNSANGGYVCNCTKGYEGNPYVRGGCTNIDECTRLEEFPCHGVCKDTEGSYQCMCGLGYESDGDPKENSCHPRLSGSAK

SEQ ID NO: 71140 - protein, 54 aa, Setaria italica
  Transcript Sequence Number=SeqID_5166
  Gene Ontology: Mol. function=hydrolase activity
  Homolog annotation: Hit_ID=B6T675; Match level="QueryCoverage=75%, HitCoverage=16%, E-value=2e-12, Identity=82%"; Hit description =Peroxisomal coenzyme A diphosphatase NUDT7
KYSPCPWQHLLVVVPVIGILSDIQAFIPVLNVAEVDEIFDVPLEMFLKVCNLIF

SEQ ID NO: 71141 - protein, 97 aa, Setaria italica
  Transcript Sequence Number=SeqID_5167
  Homolog annotation: Hit_ID=B4FX33; Match level="QueryCoverage=100%, HitCoverage=15%, E-value=7e-39, Identity=82%"; Hit description=DNA binding protein
GIPMTHAQVLGMFSGMNGKANGYIHGHQLTADSLKAAQNGDVGKATVNPVQGASHDPKIVNDNSSAHPSLNAGVQSSGSLPKGKLVNPKHPDLALQL

SEQ ID NO: 71142 - protein, 474 aa, Setaria italica
  misc_feature (48)..(48): Xaa can be any naturally occurring amino acid
  Transcript Sequence Number=SeqID_5168
  Gene Ontology: Mol. function=oxidoreductase activity; Cellular component=plastid inner membrane; Biological process=lipid metabolic process
  Homolog annotation: Hit_ID=P46312; Match level="QueryCoverage=83%, HitCoverage=88%, E-value=0.0, Identity=77%"; Hit description=Omega-6 fatty acid desaturase, chloroplastic
  Pfam annotation: Domain name=FA_desaturase; Domain location=176-430; Score=104.0; E_value=5e-28; Accession=PF00487.16; Description=Fatty acid desaturase
  Subcellular localization annotation: CTP_CleavageSite=59; ConfidenceScore=5.68e-01
NRSPAALGTRHYPRAPRSSPPRHGGGGGGGVATASGVSAGPVLQLPSXRVPASRLRPPRAATGAPAGNFLVKRDVAYNRRSYHHFLPLNQRGGLQAAVLPVATPILDDEEKRKQMAEDFGFTQIGEELPDSVTLKDVMDTLPKEVFEINDIKAWTSVLISVTSYALGLFFIAKSPWYLLPLAWAWTGTAVTGFFVIGHDCAHKSFSRNKLVEDIVGTLAFMPLIYPYEPWRFKHDRHHAKTNMLIEDTAWQPVWQKEIESSPFLRKAIIFGYGPIRPWMSIAHWLLWHFDLKKFRPNEVPRVKISLACVFAFMSIGWPLIILKSGLAGWFKFWFMPWMVYHFWMSTFTMVHHTAPHIPFKSSEEWNAAQAQLNGTVHCTYPKWIEILCHDINVHVPHHISPRIPSYNLRAAYDSIRQNWGKYVNEANWNWRLMKTILTRCHVYDKERYYVPFDELAPEESQPIKFLRKFMPDYA

SEQ ID NO: 71143 - protein, 155 aa, Setaria italica
  Transcript Sequence Number=SeqID_5169
  Gene Ontology: Mol. function=fructose-bisphosphate aldolase activity; Cellular component=chloroplast; Biological process=metabolic process
  Homolog annotation: Hit_ID=Q40677; Match level="QueryCoverage=99%, HitCoverage=39%, E-value=1e-80, Identity=92%"; Hit description =Fructose-bisphosphate aldolase, chloroplastic
  Pfam annotation: Domain name=Glycolytic; Domain location=1-155; Score= 77.7; E_value=4.2e-20; Accession=PF00274.11; Description=Fructose -bisphosphate aldolase class-I
HPNGPSELAVKEAATTRVTYAAISQDNGLVPIVEPEILLDGEHGIERTFEVAQKVWAETFYAMAENNVMFEGILLKPSMVTPGAEAKDRATPEQVAEYTLKLLHRRIPPSVPGIMFLSGGQSEVEATQNLNAMNQGPNPWHVSFSYARALQNTCL

SEQ ID NO: 71144 - protein, 78 aa, Setaria italica
  Transcript Sequence Number=SeqID_5170
  Subcellular localization annotation: CTP_CleavageSite=67; ConfidenceScore=5.89e-01
MIEAAAMAACSSIPTPFTTKASPHQRSRVSSPRRLRLPATPTPFRQSRSPFSAFSPATRLRPRASVSASAAPSKDYEF

SEQ ID NO: 71145 - protein, 85 aa, Setaria italica
  Transcript Sequence Number=SeqID_5171
PLEQGPHADAWPRTESNESTADLQLASKAGEEKDSHNLVRFFFFCNRQFDCDVLLYSKLKYVQMSLPVLTCLLTWNVQCRHADLP

SEQ ID NO: 71146 - protein, 109 aa, Setaria italica
  Transcript Sequence Number=SeqID_5172
  Gene Ontology: Cellular component=membrane
  Homolog annotation: Hit_ID=B6TIX8; Match level="QueryCoverage=100%, HitCoverage=29%, E-value=3e-35, Identity=72%"; Hit description =Nodulin-like protein
LEVVRLRSPSGMAKAAGVALCLAGVLTIALYTGPSMSPVNHHRAFAGSGAAEHHATTSSSKGTWIKGTFLMLLSNTTWSLWIVLQASLLKEYPNKLLSTLVQCMLSTAQ

SEQ ID NO: 71147 - protein, 91 aa, Setaria italica
  Transcript Sequence Number=SeqID_5173
  Subcellular localization annotation: CTP_CleavageSite=37; ConfidenceScore=5.69e-01
ASTPPSSSPATNPNPNPRSPNPSSKIHPHPPHAALPPVAAPAELSQTAGPISPPRPPLQLQPPPWAASAAAPPPPSTTASAAQRLRRLRSS

SEQ ID NO: 71148 - protein, 46 aa, Setaria italica
  Transcript Sequence Number=SeqID_5174
SWLQQQVLAACGAEAIAHTYRQEWEEKSGREKMVIVLPSPHLPIYG

SEQ ID NO: 71149 - protein, 41 aa, Setaria italica
  Transcript Sequence Number=SeqID_5175
  Gene Ontology: Mol. function=oxidoreductase activity
  Homolog annotation: Hit_ID=B6TK00; Match level="QueryCoverage=100%, HitCoverage=10%, E-value=3e-15, Identity=90%"; Hit description=Omega- 6 fatty acid desaturase, endoplasmic reticulum isozyme 2
MGAGGRMTEKEREKQELLGRAAGGAAMQRSPVDKPPFTLGQ

SEQ ID NO: 71150 - protein, 355 aa, Setaria italica
  misc_feature (231)..(231): Xaa can be any naturally occurring amino acid
  misc_feature (339)..(339): Xaa can be any naturally occurring amino acid
  misc_feature (343)..(343): Xaa can be any naturally occurring amino acid
  Transcript Sequence Number=SeqID_5176
  Gene Ontology: Mol. function=oxidoreductase activity; Cellular component=endoplasmic reticulum membrane; Biological process=lipid metabolic process
  Homolog annotation: Hit_ID=B1PHV2; Match level="QueryCoverage=84%, HitCoverage=77%, E-value=1e-155, Identity=90%"; Hit description =Fatty acid desaturase
  Pfam annotation: Domain name=FA_desaturase; Domain location=143-353; Score=33.5; E_value=8.4e-07; Accession=PF00487.16; Description=Fatty acid desaturase
PSVNGGLSTGERCIAHHNSFSSRGEEGRDEGRGVRLICSDPKRLRVPSSSVSAKWVAGGRMTEKEREKQELLGRAAGGAAMQRSPVDKPPFTLGQIKKAIPPHCFERSVIKSFSYVVYDLVIVAALLYFALVFIPALPSPLHFAAWPLYWIMQGCVCTGVWVIAHECGHHAFSDYQLLDDIVGLVLHSSLMVPYFSWKYSHRRHHSNTGSLERDEVFVPKKKEAMPWYTPXTVYNNPVGRLLHIVVQLTLGWPLYLTTNASGRPYPRFACHYDPYGPIYNDRERMQIFISDAGVMAVSFGLYKLAATFGFWWVVRIYAVPLLIVNAWLVLITYLQHTHXALPXYDSSEWDWLRGA

SEQ ID NO: 71151 - protein, 386 aa, Setaria italica
  misc_feature (49)..(49): Xaa can be any naturally occurring amino acid
  Transcript Sequence Number=SeqID_5177
  Gene Ontology: Mol. function=translation release factor activity, codon specific; Cellular component=cytoplasm; Biological process =translational termination
  Homolog annotation: Hit_ID=B6U6C9; Match level="QueryCoverage=92%, HitCoverage=100%, E-value=0.0, Identity=89%"; Hit description =Peptide chain release factor 1
  Pfam annotation: Domain name=PCRF; Domain location=91-206; Score =165.3; E_value=1.8e-46; Accession=PF03462.10; Description=PCRF domain
  Pfam annotation: Domain name=RF-1; Domain location=235-348; Score =249.2; E_value=1e-71; Accession=PF00472.12; Description=Peptidyl -tRNA hydrolase domain
  Pfam module annotation: Pfam domain module=PCRF::RF-1; Domain location=91-206::235-348
ATWRRPCPPPRLYSTAEMSQQLPPNLVGIMEQRMKLIEQKSAYLQEQIXRQPATSPEEYSRANKELRKLESTMELIKELRSKQEEIEGLKSLVTNACEEKDMREMAAEELLETVEEEKRLQHELFRSLLPKDEADERDCILEVRAGTGGEEASLFAMDIFRMYEKYAQKNGWKFDVIGIMESAVKGYKEASGTISGPGAFGKLKFESGIHRVQRVPVTEKSGRLHTSAVSVAVLPQADEVDVQLRNEDLRIDTYRSGGSGGQSVNTTDSAVRVTHIPTGTVVAIQDERSQHMNKAKALKILRARLYEIERQRLHMNRSKLRSEQIGSGDRSERIRTYNFPQGRVTDHRVGITHHSIADVMEGENLDVFIDALLLQEEMDAIASFAA

SEQ ID NO: 71152 - protein, 153 aa, Setaria italica
  Transcript Sequence Number=SeqID_5178
  Gene Ontology: Mol. function=metal ion binding; Biological process =metal ion transport
  Homolog annotation: Hit_ID=B6U4D0; Match level="QueryCoverage=50%, HitCoverage=20%, E-value=1e-32, Identity=89%"; Hit description=ATFP3
  Pfam annotation: Domain name=HMA; Domain location=49-111; Score=43.1; E_value=1.1e-09; Accession=PF00403.18; Description=Heavy-metal -associated domain
GEGREQREFLERERRRRFWGRRRGKGSGREGEPEPPKPEEKKEPPVIAVVLKVHMHCEACAEGIRKRILKMKGVQSAEPDLKASEVTVKGVFEEAKLAEYVYKRTGKHAAIIKCEPVPPPESAGGDDKAKEEKKAEGAVILLLLAATFCLLLL

SEQ ID NO: 71153 - protein, 198 aa, Setaria italica
  misc_feature (8)..(8): Xaa can be any naturally occurring amino acid
  Transcript Sequence Number=SeqID_5179
  Gene Ontology: Mol. function=metal ion binding; Biological process =metal ion transport
  Homolog annotation: Hit_ID=Q6K791; Match level="QueryCoverage=36%, HitCoverage=31%, E-value=4e-28, Identity=83%"; Hit description =Putative farnesylated protein
  Pfam annotation: Domain name=HMA; Domain location=26-88; Score=47.6; E_value=4.9e-11; Accession=PF00403.18; Description=Heavy-metal -associated domain
KEEEKKLXPEGSKPQEKKEEPTVLAVVLKVHMHCEACAQVIKKRILKMKGVQSVEADLKASQVTVKGVFEEAKLADYVHRRTGKHAAIVKSEPVAAENGGDGNAKDDKKAAEGGEEKKDDGKEEKKDGGDAGGDGKEADKQKDDGSGGDGEEKDKDPAAMANLYMHYPRFNHPSGYGYGYQYPPQLFSDENPNACSVM

SEQ ID NO: 71154 - protein, 369 aa, Setaria italica
  Transcript Sequence Number=SeqID_5180
  Gene Ontology: Mol. function=metal ion binding; Biological process =metal ion transport
  Homolog annotation: Hit_ID=B6U4D0; Match level="QueryCoverage=47%, HitCoverage=46%, E-value=5e-54, Identity=67%"; Hit description=ATFP3
  Pfam annotation: Domain name=HMA; Domain location=163-225; Score =43.1; E_value=1.1e-09; Accession=PF00403.18; Description=Heavy-metal- associated domain
  Pfam annotation: Domain name=HMA; Domain location=62-127; Score=41.6; E_value=3e-09; Accession=PF00403.18; Description=Heavy-metal -associated domain
  Pfam module annotation: Pfam domain module=HMA::HMA; Domain location =163-225::62-127
EQSRAGGAEEGEPWARRRRRRRWRRPPADKGKEAEEKKDEGGGGEEKKEDAPPPPPPPPEEVVMRVFMHCEGCARKVKKSLKGFDGVEDVSADSKAHKVVVKGKKAAADPMKVVERVQKKTGRKVELLSPMPPPKEEKKEEEKKEEPEPPKPEEKKEPPVIAVVLKVHMHCEACAEGIRKRILKMKGVQSAEPDLKASEVTVKGVFEEAKLAEYVYKRTGKHAAIIKCEPVPPPESAGGDDKAKEEKKAEGGGEEKKDDGKEEKKEGKEGGGEEKKDEKEKEKESGETAAGDEKDKADKEKDAAAIAAASLYMHYPRFPFPAGYYPPPPLPPPGYVYQPAYPPPSYAAHHQTMAPQIFSDENPNACSVM

SEQ ID NO: 71155 - protein, 72 aa, Setaria italica
  Transcript Sequence Number=SeqID_5181
  Subcellular localization annotation: CTP_CleavageSite=31; ConfidenceScore=5.22e-01
RPATAHHHRRAARPPACYCSPVSALSEHRVRVGVAPTWNSLGRRPRSGRFLAASRWLAGGRGRERLGEWRPC

SEQ ID NO: 71156 - protein, 110 aa, Setaria italica
  misc_feature (11)..(11): Xaa can be any naturally occurring amino acid
  misc_feature (69)..(69): Xaa can be any naturally occurring amino acid
  Transcript Sequence Number=SeqID_5182
  Subcellular localization annotation: CTP_CleavageSite=25; ConfidenceScore=5.18e-01
PHPPNPFTPAXPRPCPPGLPLPHPSSTAGDPYIFAPNLPAPPSKPTHTHSPSPQLRVLDAAQHPAAQLXPRPSPLLPRRATPPGTMSAAQQAEPTTSPASPTPPAPAAPR

SEQ ID NO: 71157 - protein, 263 aa, Setaria italica
  Transcript Sequence Number=SeqID_5183
  Homolog annotation: Hit_ID=B6TJM6; Match level="QueryCoverage=68%, HitCoverage=67%, E-value=6e-12, Identity=37%"; Hit description=KID -containing protein
MSTAVAAGMPPAHGGFRGSEKVNPDPDDAGSRRNTNGFFVEEEEESGGAEAAVRRELEEEEEEALSENSSIGVASSDSSSIGENSASDKEDGDEEEVESKVEGLGLMGLGTLESLEDALPIKRGISNFYAGKSKSFTSLAEAAATAAAKEIAKPENPFNKRRRVLAAWNRRRASCSALATAYLPPLLAPDHAVLEEDDEEGADDEDEDHQPGGGLRSRRPPTFPSPRLSVHTTGGQMGRNPHASSFRSPRSFSMTDLQNAGYN

SEQ ID NO: 71158 - protein, 124 aa, Setaria italica
  misc_feature (26)..(26): Xaa can be any naturally occurring amino acid
  misc_feature (116)..(116): Xaa can be any naturally occurring amino acid
  misc_feature (123)..(123): Xaa can be any naturally occurring amino acid
  Transcript Sequence Number=SeqID_5184
  Gene Ontology: Mol. function=protein serine/threonine kinase activity; Biological process=protein amino acid phosphorylation
  Homolog annotation: Hit_ID=B6SVR9; Match level="QueryCoverage=99%, HitCoverage=20%, E-value=4e-46, Identity=78%"; Hit description =Protein kinase
IGNQPAPVRAPGKLKHRKEGHANGRXKVAALEVLEKWSVDRSQLLIGHRFASGAHSRLFHGIYKEQPVAVKFIRQPDDEEDAELAAQLEKQFNTEVSTLSRLHHPNVIKLVRKTMXSSPPVFXV

SEQ ID NO: 71159 - protein, 128 aa, Setaria italica
  misc_feature (53)..(53): Xaa can be any naturally occurring amino acid
  Transcript Sequence Number=SeqID_5185
  Gene Ontology: Mol. function=aspartic-type endopeptidase activity; Biological process=DNA integration
  Homolog annotation: Hit_ID=Q25AF6; Match level="QueryCoverage=99%, HitCoverage=8%, E-value=3e-42, Identity=66%"; Hit description =H0512B01.8 protein
  Pfam annotation: Domain name=RVT_2; Domain location=1-128; Score =29.0; E_value=8.9e-20; Accession=PF07727.6; Description=Reverse transcriptase (RNA-dependent DNA pol
VHHMDVKSAFLNGELQEEVFVQQPPGFAVAGEEHKVLRLRKALYGLRQAPCAXNTKLDESLTSLRFTKCATEHVLYIRRAACKALIVGVYVDGLIITGPEQEDIDALKREMTAMFRMSDLGLLSYYLR

SEQ ID NO: 71160 - protein, 195 aa, Setaria italica
  misc_feature (171)..(171): Xaa can be any naturally occurring amino acid
  Transcript Sequence Number=SeqID_5186
  Gene Ontology: Mol. function=protein binding; Cellular component =clathrin adaptor complex; Biological process=intracellular protein transport
  Homolog annotation: Hit_ID=B6T4T8; Match level="QueryCoverage=98%, HitCoverage=43%, E-value=4e-92, Identity=84%"; Hit description=Pre -mRNA cleavage complex II protein Clp1
  Pfam annotation: Domain name=Clp1; Domain location=114-195; Score= -121.9; E_value=5.9e-06; Accession=PF06807.6; Description=Pre-mRNA cleavage complex II protein Cl
RAAPPTGWVSIPPRSKIAIFSWHGATLELDGPTESEYPSVETPMVIYVNTHAILDARRARARAAAAQGGDLEASQGPRVIVVGPTDSGKSTLCRMLLSWAAKLGWKPTYVDLDIGQGSITIPGCISATPIEKPIDIVDGIPLEMPLVYFYGHPTPSINPDVYKVFMKELAXTLERQFSGNAESRAAGMVINTMGW

SEQ ID NO: 71161 - protein, 338 aa, Setaria italica
  Transcript Sequence Number=SeqID_5187
  Gene Ontology: Mol. function=protein binding; Cellular component =clathrin adaptor complex; Biological process=intracellular protein transport
  Homolog annotation: Hit_ID=B6T4T8; Match level="QueryCoverage=95%, HitCoverage=73%, E-value=0.0, Identity=95%"; Hit description=Pre -mRNA cleavage complex II protein Clp1
  Pfam annotation: Domain name=Clp1; Domain location=64-337; Score =516.8; E_value=2.9e-152; Accession=PF06807.6; Description=Pre-mRNA cleavage complex II protein Cl
SGLKGLKGLVLSSLLAQGGDLEASQGPRVIVVGPTDSGKSTLCRMLLSWAAKLGWKPTYVDLDIGQGSITIPGCISATPIEKPIDIVDGIPLEMPLVYFYGHPTPSINPDVYKVFMKELAKTLERQFSGNAESRAAGMVINTMGWVEGLGYELLLNAIETFKANVVLVLGQEKLWKMLKDAVQSKPNIDVVKLQKSEGVVLRNSKYRQKTRSFRIKEYFYGIANDLAPHSNIVNFSDVSVYRIGGGHQAPRSALPIGAEPVADPTRLVAVNISTDMIHTVLAISYAKEPDEIISSNVAGFIHVTDVDIQRKKLTYIAPCPGDLPSRLLIASSLTWYEA

SEQ ID NO: 71162 - protein, 82 aa, Setaria italica
  misc_feature (73)..(73): Xaa can be any naturally occurring amino acid
  Transcript Sequence Number=SeqID_5188
  Subcellular localization annotation: CTP_CleavageSite=16; ConfidenceScore=5.06e-01
SSQILSFLSRLHLSLSCSIASSSHGLGERRRPAAEGGEERRRPRTAVLVSYLVVGGQREEAQQQQEPEREEPXWTIRIEDVD

SEQ ID NO: 71163 - protein, 169 aa, Setaria italica
  Transcript Sequence Number=SeqID_5189
  Gene Ontology: Mol. function=metal ion binding
  Homolog annotation: Hit_ID=B6U2Q9; Match level="QueryCoverage=75%, HitCoverage=67%, E-value=1e-25, Identity=54%"; Hit description =Ubiquitin-protein ligase CIP8
  Pfam annotation: Domain name=zf-C3HC4; Domain location=69-107; Score =51.7; E_value=2.8e-12; Accession=PF00097.17; Description=Zinc finger, C3HC4 type (RING finger)
GAPVPSAVQRGGGGGPGVLVVQHFILDGDGDLFSGGVGGGVPPASKAAIAALKEVKAGEVEGGGPLGDCAICLDGVEDAGKEMPCGHRFHGECLERWLGVHGNCPTCRHELPPAKEVDNAAAEGGEERRRPRTAVLVSYLVVGGQREEAQQQQEPEREEPWTIRIEDVD

SEQ ID NO: 71164 - protein, 169 aa, Setaria italica
  Transcript Sequence Number=SeqID_5190
  Homolog annotation: Hit_ID=Q7XS27; Match level="QueryCoverage=92%, HitCoverage=20%, E-value=3e-10, Identity=33%"; Hit description =OSJNBa0080E14.9 protein
AKVVEVGKKHSAVVTEVSRLQSEIDTVEQANKAAAAEHDAERKRMEAELEVLKGKVDQIQAEKDASLSMVHDKDAKVGNLRDELEKLHGSMADLRALCDDLEGKNSCLEGERDLVLKALEQQKAEAEKLRLTIGELEVCNGKKDLEIGTLKEEVEGKEFQTDDLNRKLE

SEQ ID NO: 71165 - protein, 126 aa, Setaria italica
  Transcript Sequence Number=SeqID_5191
  Gene Ontology: Mol. function=nucleotide binding; Biological process =defense response
  Homolog annotation: Hit_ID=Q5Z9J6; Match level="QueryCoverage=92%, HitCoverage=9%, E-value=1e-16, Identity=40%"; Hit description =Putative NBS-LRR disease resistance protein
RYLPWPSSSCFPFPTSLQSLNLDGMETLAPLSNLASLTELSIARCGGFGGVDLEMLQLQSLQTDDVASVLAAPICRLFSSSLTSLSITMRDMERVTKEQDEALQLLTSLQRLSLLCCDKLQCLPAG

SEQ ID NO: 71166 - protein, 106 aa, Setaria italica
  Transcript Sequence Number=SeqID_5192
  Homolog annotation: Hit_ID=A6N0P2; Match level="QueryCoverage=63%, HitCoverage=73%, E-value=3e-11, Identity=59%"; Hit description=60S ribosomal protein l31 (Fragment)
  Subcellular localization annotation: CTP_CleavageSite=21; ConfidenceScore=5.32e-01
LVIPVVDQRKKYRSTRKLPARGTMRKMPRRNSTLWSQLLRSLQRVSKAWVLRLLRMRIKSHRGFNQLALGAYHESKFDNVALAYCYLLLMTYVIEDWRLRSFLSSA

SEQ ID NO: 71167 - protein, 125 aa, Setaria italica
  misc_feature (84)..(84): Xaa can be any naturally occurring amino acid
  misc_feature (110)..(110): Xaa can be any naturally occurring amino acid
  Transcript Sequence Number=SeqID_5193
  Gene Ontology: Mol. function=structural constituent of ribosome; Cellular component=ribonucleoprotein complex; Biological process =translation
  Homolog annotation: Hit_ID=B6U961; Match level="QueryCoverage=100%, HitCoverage=100%, E-value=1e-43, Identity=71%"; Hit description=60S ribosomal protein L31
  Pfam annotation: Domain name=Ribosomal_L31e; Domain location=12-107; Score=211.7; E_value=1.9e-60; Accession=PF01198.11; Description =Ribosomal protein L31e
MAEKKQRPGGARKDEVVTREYTINLHKRLHGCTFKKKAPNAIKEIRKFAQKAMGTTDVRVDVKLNKHIWSSGIRSVPRRVRVRXIARKRNDEEDAKEELYSLVTVAEIPXEGLKGLGTKLVEEDE

SEQ ID NO: 71168 - protein, 154 aa, Setaria italica
  Transcript Sequence Number=SeqID_5194
  Homolog annotation: Hit_ID=Q8W437; Match level="QueryCoverage=96%, HitCoverage=67%, E-value=3e-65, Identity=75%"; Hit description =PBng143
  Pfam annotation: Domain name=DUF393; Domain location=19-131; Score =151.2; E_value=3.2e-42; Accession=PF04134.4; Description=Protein of unknown function, DUF393
EFGGWVRGEDAAEAWRIKMLYDGDCPLCMREVNMLRERNKSYGAIKFVDISSKDYSPDDNQGLDYETVMGRIHAILSDGTIVTDVEAFRRLYEEVGLGWVYAVTKYEPVATMANAVYGVWAKYRMQITGRPPLEEIMASRKAAGECKDDKVCKM

SEQ ID NO: 71169 - protein, 467 aa, Setaria italica
  misc_feature (30)..(30): Xaa can be any naturally occurring amino acid
  Transcript Sequence Number=SeqID_5195
  Gene Ontology: Mol. function=acid-amino acid ligase activity; Cellular component=intracellular; Biological process=ubiquitin -dependent protein catabolic process
  Homolog annotation: Hit_ID=Q9AUK0; Match level="QueryCoverage=99%, HitCoverage=62%, E-value=0.0, Identity=77%"; Hit description =Putative ubiquitin protein ligase
NGSSMRTLFMDLLKPIYQQWHLRKLLTLAXKEDVSCSRGTNYDPIRSLKLSDVVCFYYHLLRIFSSFNPSIGALPILNMLAFSPGFLVDLWGALEISIFGQAIQNLQETGHDKQLATSSSGEQVSSTRQRRNAKDTATKWANVLQKITGKSNDSEEGTMPDNILISQQSNDDALTLWDIEAMRHASEGIGKDLMCMMYLFCAIYGHLLLVLDDIEFYEKQVPFTLEQQRKIASALNTFVYNSFVQNGGSYSKPLLDVSVRCLNLLYERDSRHKFCPISLWLAPARKGRIPIAAAARAHEAAFGNFPGNNSSGIPTRSSVLTTLPHVYPFEERVQMFREFIESDKASRRVTGEISGPGPGSIAIVIRRGHIIEDGYRQLNCLRSKLKSCIHVSFVSECGLPEAGLDYGGLSKEFLTDLSKTAFSPEYGLFSQTSASDTSLIPSNSARLLDNGIDMIEFLGRVVGKALY

SEQ ID NO: 71170 - protein, 74 aa, Setaria italica
  Transcript Sequence Number=SeqID_5196
  Subcellular localization annotation: CTP_CleavageSite=31; ConfidenceScore=5.30e-01
ATGGQVSGAGGQAASGRSDWAGERPQGPGRRAASAAGATSRRREAEERRRWRAKHLRVSVRAESSFRHPSPSTI

SEQ ID NO: 71171 - protein, 101 aa, Setaria italica
  Transcript Sequence Number=SeqID_5197
  Gene Ontology: Mol. function=tRNA (5-methylaminomethyl-2 -thiouridylate)-methyltransferase activity; Cellular component =cytoplasm; Biological process=tRNA processing
  Homolog annotation: Hit_ID=B6U875; Match level="QueryCoverage=71%, HitCoverage=14%, E-value=4e-11, Identity=59%"; Hit description=tRNA methyltransferase
  Subcellular localization annotation: CTP_CleavageSite=69; ConfidenceScore=5.44e-01
MLRSVASTLPGLRPLLRRRPLLNPKALLRSRLPPRPFCALSSSAPPAAAAAPSVEGAGGAVAVEEHLTRCAAADRAPLRVAVLVSGGVDSSVALRLLHAAG

SEQ ID NO: 71172 - protein, 79 aa, Setaria italica
  Transcript Sequence Number=SeqID_5198
LASPTSGWLTICSIALQRVYALDRFGSATCLTKLSYLPSLRELQLVMLEMDYTNLAHMYAFFRCCQCPQLERLFVQLPS

SEQ ID NO: 71173 - protein, 62 aa, Setaria italica
  Transcript Sequence Number=SeqID_5199
PPPTNSSSSIIQISIAPESIQPRKAQVLADLKRNQIVLSIFPTIQGTLSSLLLLFNSSNANN

SEQ ID NO: 71174 - protein, 237 aa, Setaria italica
  Transcript Sequence Number=SeqID_5200
  Gene Ontology: Mol. function=actin binding; Cellular component =cytoskeleton; Biological process=negative regulation of actin filament depolymerization
  Homolog annotation: Hit_ID=B9RQ50; Match level="QueryCoverage=84%, HitCoverage=28%, E-value=5e-91, Identity=78%"; Hit description =Fimbrin, putative
  Pfam annotation: Domain name=CH; Domain location=1-74; Score=23.5; E _value=0.00032; Accession=PF00307.23; Description=Calponin homology (CH) domain
  Pfam annotation: Domain name=CH; Domain location=90-198; Score=82.7; E_value=1.3e-21; Accession=PF00307.23; Description=Calponin homology (CH) domain
  Pfam module annotation: Pfam domain module=CH::CH; Domain location=1 -74::90-198
LEVLDKVAPGSVNWKMANRPPIKLPFKKVENCNQVLKIGKELKFSLVNIAGNDIVQGNKKLILAFLWQLMRYNILQLLKNLRFHSNGKEITDNDILAWANKKVKDSGKHHSRMESFKDRSLSSGTFFLDLLSAVEPRVVNWSLVTKGEKDEEKQMNASYIISVARKLGCSIFLLPEDILEVNQKMMLTLTASIMYWYLKRPTSHSLDSENGSSCETSSTTTSDDSASESSFDDNAAR

SEQ ID NO: 71175 - protein, 38 aa, Setaria italica
  Transcript Sequence Number=SeqID_5201
  Gene Ontology: Mol. function=actin binding; Cellular component =cytoskeleton
  Homolog annotation: Hit_ID=O50064; Match level="QueryCoverage=100%, HitCoverage=5%, E-value=5e-13, Identity=94%"; Hit description =Fimbrin 2
GKELKFSLVNIAGNDIVQGNKKLILAFLWQLMRYNILQ

SEQ ID NO: 71176 - protein, 69 aa, Setaria italica
  Transcript Sequence Number=SeqID_5202
LGRLMQEGLHEYNQGRRAANIEKKRRRGEIEVKKEEEKVEDEETAQLDSAEKREERRRFYKVLFDDGNR

SEQ ID NO: 71177 - protein, 137 aa, Setaria italica
  Transcript Sequence Number=SeqID_5203
  Gene Ontology: Mol. function=DNA binding; Cellular component=nucleus; Biological process=regulation of transcription, DNA-dependent
  Homolog annotation: Hit_ID=Q6Z461; Match level="QueryCoverage=85%, HitCoverage=49%, E-value=6e-37, Identity=70%"; Hit description =Squamosa promoter-binding-like protein 13
  Pfam annotation: Domain name=SBP; Domain location=20-98; Score=169.8; E_value=8.1e-48; Accession=PF03110.6; Description=SBP domain
SSSPVPARRGAAAGGGGGPRCQAERCNADLSDAATYNRRHKVCQTHSKAPVVLVAGLRQRFCQQCSRFHELSEFDETRRSCRLRLAGHNERRRKSSADTHGGGSGGSNSGGGDGCRHADQDGRGHQGNPPPNHFQIR

SEQ ID NO: 71178 - protein, 90 aa, Setaria italica
  Transcript Sequence Number=SeqID_5204
CFILAAYSYHACTSDNHLYKIVIVTFAFNYQAPELHLEIQRQMASQAASQASSASNPRVIYLALKDNLNACLLENSSIHHFLILDLYDLM

SEQ ID NO: 71179 - protein, 205 aa, Setaria italica
  Transcript Sequence Number=SeqID_5205
  Gene Ontology: Mol. function=protein binding; Cellular component =mitochondrial outer membrane translocase complex; Biological process= protein import into mitochondrial outer membrane
  Homolog annotation: Hit_ID=Q5JJI4; Match level="QueryCoverage=95%, HitCoverage=96%, E-value=7e-80, Identity=72%"; Hit description =Probable mitochondrial import receptor subunit TOM20
  Pfam annotation: Domain name=TOM20_plant; Domain location=9-201; Score=476.0; E_value=5.2e-140; Accession=PF06552.4; Description =Plant specific mitochondrial import recep
MELGALSDRERMLFFEAACRNAEAAYAQNPLDADNLTRWGGALLELSQVKAGPESLKCLEDAESKLEEALKVDPIKADALWCLGNAQTSHGFFSADNEKANEYFVKATECFQKAVDVEPANELYRKSLDLSSKAPELHLEIQRQMASQAASQASSASNPRQSRKKKKDTDFWYDVCGWVILGVGIFAWVGMARSNIPPPPPPPAR

SEQ ID NO: 71180 - protein, 101 aa, Setaria italica
  Transcript Sequence Number=SeqID_5206
  Subcellular localization annotation: CTP_CleavageSite=70; ConfidenceScore=5.61e-01
AAAPRPLHARPWPTARLVQSTFNGRAQPGNGWQRQAAGSWLTAMATASSSSTPAKLVHGPRPWLAAKLVHGQRARSRYVQFFFFITGMTPHLCWKGNKKQN

SEQ ID NO: 71181 - protein, 117 aa, Setaria italica
  Transcript Sequence Number=SeqID_5207
  Homolog annotation: Hit_ID=B9T0M0; Match level="QueryCoverage=85%, HitCoverage=38%, E-value=1e-10, Identity=37%"; Hit description =Vesicle-associated membrane protein, putative
IEEMKLKVVYTLPSGGSDDSSVSSLGSRSFKGASDDLTMLKNASLEEIQTIQRLKDERDNMLQQNQQMQRELDVLRRRRSRKGDTGFSLTFAAFAGLIGVLVGLLMSLIFSSPPATA

SEQ ID NO: 71182 - protein, 83 aa, Setaria italica
  Transcript Sequence Number=SeqID_5208
PAAARRPARRRAEQVRQGAPCGPHHEAMEPSREVKDEAEERLRSDEEEEEEEGEEGWDDWCSDGDDAGGGLLCLFCSSRFDAD

SEQ ID NO: 71183 - protein, 69 aa, Setaria italica
  misc_feature (40)..(40): Xaa can be any naturally occurring amino acid
  Transcript Sequence Number=SeqID_5209
  Homolog annotation: Hit_ID=Q9LKV7; Match level="QueryCoverage=72%, HitCoverage=28%, E-value=4e-10, Identity=68%"; Hit description=Fw2.2
EEGECPDFLVHCCCEHLALCQEYRELKNRGFDLGIGRTEXWDANVDRQRRGVAGGAVMGAPAMPLGMIR

SEQ ID NO: 71184 - protein, 68 aa, Setaria italica
  misc_feature (11)..(11): Xaa can be any naturally occurring amino acid
  Transcript Sequence Number=SeqID_5210
RAEYDLEEGEXCPDFLVHCCCEHLALCQEYRELKNRGFDLGIGKRSLCLALLRFNLKFSGSGLVFSYI

SEQ ID NO: 71185 - protein, 185 aa, Setaria italica
  Transcript Sequence Number=SeqID_5211
  Gene Ontology: Cellular component=integral to membrane
  Homolog annotation: Hit_ID=Q9LKV7; Match level="QueryCoverage=75%, HitCoverage=91%, E-value=7e-40, Identity=58%"; Hit description=Fw2.2
  Pfam annotation: Domain name=PLAC8; Domain location=46-145; Score =155.0; E_value=2.3e-43; Accession=PF04749.9; Description=PLAC8 family
  Subcellular localization annotation: CTP_CleavageSite=27; ConfidenceScore=5.17e-01
MYPSAPPDAYNKFTTGAPPTAPPPAAYQQHGANMNPSRPGGALRTWSTGLFHCMDDPGNCLITCLCPCITFGQIADIVDKGTCSCIASGLLYGLICASTGMGCLYSCLYRSRLRAEYDLEEGECPDFLVHCCCEHLALCQEYRELKNRGFDLGIGSWDANVDRQRRGVAGGAVMGAPAMPLGMIR

SEQ ID NO: 71186 - protein, 47 aa, Setaria italica
  Transcript Sequence Number=SeqID_5212
VSGLCFKDALLVRKLIPHLFFVQKAPLCTCTFRFIIDGSDQKCNCNF

SEQ ID NO: 71187 - protein, 110 aa, Setaria italica
  Transcript Sequence Number=SeqID_5213
  Gene Ontology: Mol. function=aminoacyl-tRNA ligase activity; Cellular component=cytoplasm; Biological process=tRNA aminoacylation for protein translation
  Homolog annotation: Hit_ID=Q10ST2; Match level="QueryCoverage=99%, HitCoverage=11%, E-value=5e-51, Identity=86%"; Hit description=Valyl- tRNA synthetase, putative, expressed
VVVGLDYRQWCNKLWNAIRFAMGKLGDHYIPPSTVDVSSMPPICKWILSVLNKAIGKTVSSLEAYKLSDATSTIYSWWQYQLCDVFIEAIKPYFFSDSQEFESARAASRE

SEQ ID NO: 71188 - protein, 254 aa, Setaria italica
  misc_feature (231)..(231): Xaa can be any naturally occurring amino acid
  Transcript Sequence Number=SeqID_5214
  Gene Ontology: Mol. function=aminoacyl-tRNA ligase activity; Cellular component=cytoplasm; Biological process=tRNA aminoacylation for protein translation
  Homolog annotation: Hit_ID=Q10LT6; Match level="QueryCoverage=99%, HitCoverage=25%, E-value=1e-136, Identity=90%"; Hit description =Valyl-tRNA synthetase, putative
  Pfam annotation: Domain name=tRNA-synt_1; Domain location=1-254; Score=-129.6; E_value=3.7e-13; Accession=PF00133.14; Description =tRNA synthetases class I (I, L, M and V)
STMDEQRSNAVTEAFVRLHKEGLIYRDYRLVNWDCTLLTSISDIEVDHIDLKEETMLKIPGYAAPVQFGVLISFAYPLEGLGEIIVATTRIETMLGDTAIAVHPEDRRYQHLHGRYAVHPFNGRKLKIICDPEFVDPTFGTGAVKIAPAHDPNDFEVGRRHNLQFINIFTDDGKINSNGGAQFEGMPRFTARICVIEALKAKGLYKGTKKTEMTLCVCSRTNDVLEPMIKXPQWFVNCNTLAKVGLDAVRSKKI

SEQ ID NO: 71189 - protein, 278 aa, Setaria italica
  misc_feature (257)..(257): Xaa can be any naturally occurring amino acid
  Transcript Sequence Number=SeqID_5215
  Gene Ontology: Mol. function=aminoacyl-tRNA ligase activity; Cellular component=cytoplasm; Biological process=tRNA aminoacylation for protein translation
  Homolog annotation: Hit_ID=Q10LT6; Match level="QueryCoverage=91%, HitCoverage=24%, E-value=1e-131, Identity=87%"; Hit description =Valyl-tRNA synthetase, putative
  Pfam annotation: Domain name=Anticodon_1; Domain location=105-257; Score=151.2; E_value=3.2e-42; Accession=PF08264.5; Description =Anticodon-binding domain
GMTPEGIAKRLEEGNLDPTVLNIANERKLNDYPDGIAECGTDALRFALISYTSQSNRINLDIKRVVGYRHWCNKLWNASRFAMGKLGDHYSPPATVDVSLMPPICKWILSALNKATGRTIACLEAYKFSDAASAIYSWWQYQLCDVFIEAIKPYFFNDPQEFESARVASRDTLWVCLDTGLRLLHPFMPYLTEELWQRLPQPKYSCRQASIMISEYPSLVEEWTNDNLEHEMDVVLDAVNKIRSLKPPTERNKRRPXAFALCRGQDIIATINDHQSLI

SEQ ID NO: 71190 - protein, 193 aa, Setaria italica
  Transcript Sequence Number=SeqID_5216
  Gene Ontology: Mol. function=aminoacyl-tRNA ligase activity; Cellular component=cytoplasm; Biological process=tRNA aminoacylation for protein translation
  Homolog annotation: Hit_ID=Q10LT6; Match level="QueryCoverage=97%, HitCoverage=18%, E-value=2e-97, Identity=88%"; Hit description=Valyl- tRNA synthetase, putative
  Pfam annotation: Domain name=Anticodon_1; Domain location=72-193; Score=99.5; E_value=1.1e-26; Accession=PF08264.5; Description =Anticodon-binding domain
DNKLECGTDALRFALIAYTSQSDRINLDIKRVVGYRQWCNKLWNAIRFAMGKLGDHYIPPSTVDVSSMPPICKWILSVLNKAIGKTVSSLEAYKLSDATSTIYSWWQYQLCDVFIEAIKPYFFSDSQEFESARAASRDTLWICLETGLRLLHPFMPYVTEELWQRLPQPKDSCRKDSIMISEYPSLVEVIPVS

SEQ ID NO: 71191 - protein, 299 aa, Setaria italica
  Transcript Sequence Number=SeqID_5217
  Gene Ontology: Mol. function=aminoacyl-tRNA ligase activity; Cellular component=cytoplasm; Biological process=tRNA aminoacylation for protein translation
  Homolog annotation: Hit_ID=P93736; Match level="QueryCoverage=85%, HitCoverage=22%, E-value=1e-111, Identity=73%"; Hit description =Valyl-tRNA synthetase
  Pfam annotation: Domain name=tRNA-synt_1; Domain location=1-297; Score=-72.3; E_value=2.5e-15; Accession=PF00133.14; Description=tRNA synthetases class I (I, L, M and V)
RAPFDICSRVYQVVVEKKLVRERKLTRHDIGRKNFVSEVLKWKDQYGGTILNQLHRLGASLDWSHEAFTMDEQRSKAVTGALVRLHKEGLIFKLVPSLLFVRVDYRLVNWDCILRTAISDIEVDHIDLKDETMLKVPGYANEVQFGVLISFAYPLEEGLGEIVVATTRIETMLGDTAIAVHPEDKRYKHLHGRYAVHPFNGRKLKIICDAELVDPTFCTGAVKITPAHDPNDFEVGKRHNLDFINIFTDDGKINSNGGAQFEGMPRFTARVAVIEALKKKVLLDFLNYIPLISDYQSFL

SEQ ID NO: 71192 - protein, 267 aa, Setaria italica
  misc_feature (235)..(235): Xaa can be any naturally occurring amino acid
  Transcript Sequence Number=SeqID_5218
  Gene Ontology: Mol. function=protein dimerization activity; Cellular component=nucleus; Biological process=regulation of transcription, DNA-dependent
  Homolog annotation: Hit_ID=Q653H7; Match level="QueryCoverage=99%, HitCoverage=39%, E-value=1e-102, Identity=72%"; Hit description =Auxin response factor 18
  Pfam annotation: Domain name=Auxin_resp; Domain location=230-267; Score=-21.2; E_value=0.029; Accession=PF06507.5; Description=Auxin response factor
  Pfam annotation: Domain name=B3; Domain location=71-176; Score=117.2; E_value=5.6e-32; Accession=PF02362.13; Description=B3 DNA binding domain
  Pfam module annotation: Pfam domain module=Auxin_resp::B3; Domain location=230-267::71-176
AQGPVELPAGQVPAGLSRTSAAVRFMADPDTDEVFAKIRLAPVRPNESGYAADAEDAIGAAAGGQEDKPASFAKTLTQSDANNGGGFSVPRYCAETIFPRLDYSADPPVQTVLAKDVHGVVWKFRHIYRGTPRRHLLTTGWSTFVNQKKLVAGDSIVFMRTENGDLCVGIRRAKKGGIGGPEFLHQPPPPGGNYGGFSMFLRGDEDGNKMMATRGKVRVRVRPEEVVEASKLAVXSGQPFEVVYYPRASTPEFCVKAGAVRAAMRTQ

SEQ ID NO: 71193 - protein, 435 aa, Setaria italica
  misc_feature (425)..(425): Xaa can be any naturally occurring amino acid
  Transcript Sequence Number=SeqID_5219
  Gene Ontology: Mol. function=serine-type endopeptidase activity; Cellular component=chloroplast; Biological process=proteolysis
  Homolog annotation: Hit_ID=B6U4F7; Match level="QueryCoverage=100%, HitCoverage=56%, E-value=0.0, Identity=88%"; Hit description =Acylamino-acid-releasing enzyme
HIAKSVHGSLYTDEWFEGISWNQEETFVAYVAEEPPQPKPVFNDYGFKKEGSSEKDCKSWKGQGDMLTTNSAGNSKKRIPALFVVNISSGEVRPVKGIPRSLSVGQVIWAPSPSYGLVFVAWSSDNGFQHTPRKLGIKYCYNRPCALYAAPHPFREEAEKPSTEGDKGETTTMIKLTADLNSAFFPRFSPDGKYLVFISAKSAVDSGAHNATNSMHRIEWPTDGKLDGSLGVADVVPIVMCPKENCFPGLYCFGLLRDPWLTDGRTMILSSVWGSKEVVLSINVVSCEVLRVSPQDSDCSWNVLALDKNDILAVSSSLITLPQIYYGIKVSQIESHWEWQEVSTPLPKLSDEISSILSEHKFSILKVPISNLSDKLADGAKLPFEAIFVSHKDSASNPTIVVLHGGPHSVYPSSYSKSLAFLFSXGYNLLVVNYR

SEQ ID NO: 71194 - protein, 74 aa, Setaria italica
  Transcript Sequence Number=SeqID_5220
  Subcellular localization annotation: CTP_CleavageSite=46; ConfidenceScore=5.26e-01
MASASEDEAASDRCCGSYSPSADVSESETSSDCSAPTTRRFASSSSASATVSRLASSSSSLPTPASAAAFLPLQ

SEQ ID NO: 71195 - protein, 135 aa, Setaria italica
  Transcript Sequence Number=SeqID_5221
  Gene Ontology: Mol. function=acid phosphatase activity
  Homolog annotation: Hit_ID=B9SRV6; Match level="QueryCoverage=94%, HitCoverage=35%, E-value=9e-48, Identity=66%"; Hit description =Purple acid phosphatase, putative
RNSSNEAHRGDGDAMRAAMEELLYGGRVDAVFAGHVHAYERFARVYGGEEDPCAPVYVTIGDGGNREGLAGKYADPQPAISAFREASFGHGRLEVVNATHALWAWHRNDDDEAVLADQVWITSLAANPACHRSKN

SEQ ID NO: 71196 - protein, 137 aa, Setaria italica
  misc_feature (10)..(10): Xaa can be any naturally occurring amino acid
  misc_feature (12)..(12): Xaa can be any naturally occurring amino acid
  Transcript Sequence Number=SeqID_5222
KRQREEERKXSXRSKRQRDEERMEMEKKRQQEREEERPRDREQDRRKGGNGVERDYKRKLEDDRYDPNLSRVRDEGYRGHQNRGDERRHEEHGRHRARDLDIHDSKRSRHDDDSYYHSRSDRGDRYSRDEHRDRRRH

SEQ ID NO: 71197 - protein, 230 aa, Setaria italica
  misc_feature (2)..(2): Xaa can be any naturally occurring amino acid
  Transcript Sequence Number=SeqID_5223
  Gene Ontology: Mol. function=transferase activity; Cellular component= chloroplast; Biological process=isoprenoid biosynthetic process
  Homolog annotation: Hit_ID=B9SUY3; Match level="QueryCoverage=96%, HitCoverage=63%, E-value=2e-59, Identity=53%"; Hit description =Geranyl geranyl pyrophosphate synthase, putative
  Pfam annotation: Domain name=polyprenyl_synt; Domain location=2-217; Score=42.9; E_value=5.2e-12; Accession=PF00348.9; Description =Polyprenyl synthetase
PXALEMLHAASLVHDDLPCFDAAPTRRGRPSTHAAFGTDMAVLAGDALFPLAYTHVIAHTPSPDPVPHAVLLRVLAELARAVGSTGMAAGQFLDLAGATALGEAEVMRVLTKKFGEMAECSAACGAMLGGAGPDEEAALRRYGRTIGVLYELVDDIRSASGNGKMRRNASVLRALGMDRALGIVEELKAQAKTEADRFGDKYGDRVLPLYSFVDYAVERGFELQDAAATP

SEQ ID NO: 71198 - protein, 130 aa, Setaria italica
  Transcript Sequence Number=SeqID_5224
  Gene Ontology: Cellular component=integral to membrane
  Homolog annotation: Hit_ID=Q10QE9; Match level="QueryCoverage=100%, HitCoverage=33%, E-value=6e-46, Identity=75%"; Hit description =UPF0496 protein 1
  Pfam annotation: Domain name=DUF677; Domain location=1-130; Score= -104.0; E_value=1.7e-05; Accession=PF05055.4; Description=Protein of unknown function (DUF677)
IKAWRRVSSIIFATTFAAVLICSVVAAAIAAPPVAAALAAAAAVPLGSMGKWIDSLLKGYQDALRGQKEVVSAMQVGTFIAIKDLDSIRVLINRVEVEISSMIDCVEFAERDEEAVKFGVEEIKKKLENF

SEQ ID NO: 71199 - protein, 97 aa, Setaria italica
  Transcript Sequence Number=SeqID_5225
  Gene Ontology: Mol. function=glycerophosphodiester phosphodiesterase activity; Cellular component=anchored to membrane; Biological process=glycerol metabolic process
  Homolog annotation: Hit_ID=Q9ZTU6; Match level="QueryCoverage=80%, HitCoverage=16%, E-value=1e-24, Identity=69%"; Hit description=S222
  Subcellular localization annotation: CTP_CleavageSite=77; ConfidenceScore=5.06e-01
IVGICSLGLISWASGSSQTTTINDLKAGPGVFTFNLTWDDISKNLKPLISSPMNKYLLFRNPRNKNAGNFMRLSDFLAFAKDKDLSGIMITVEVRIL

SEQ ID NO: 71200 - protein, 743 aa, Setaria italica
  Transcript Sequence Number=SeqID_5226
  Gene Ontology: Mol. function=glycerophosphodiester phosphodiesterase activity; Cellular component=anchored to membrane; Biological process=glycerol metabolic process
  Homolog annotation: Hit_ID=Q9FZI0; Match level="QueryCoverage=93%, HitCoverage=64%, E-value=0.0, Identity=48%"; Hit description=F1O19.6 protein
  Pfam annotation: Domain name=GDPD; Domain location=358-650; Score =142.0; E_value=1.9e-39; Accession=PF03009.9; Description =Glycerophosphoryl diester phosphodiesterase family
GASRACSVLGSALLLLLVSLGSAAAQKGSTWKTLSGKAPVIIAKGGFSGLFPDSSDLAYQFVPIASSPDTALLCDVRLTKDGAGICLPNIKMDNCTFISDVFPQGKSTYNVNGVSTTGWFSVDFTSTDLQNVTLRQSIFSRPSYFDGSMQIVPVEAVLSVFKAPAVWLNVQHDSFYSQFKLSMRSYILSLSKQYIADYISSPEVNFLTSISGRVSKRTKLVFRFLDERSIEPSTNQTYGSMLKNLTFVKTFASGILVPKNYIWPVTPDNYLLSYTSVAADAHKAGLEIYAADFANDFTISYNYSYDPLAEYLYFIDNDAFSVDGVLTDFPITPSEAVGCFSNLNNSKTDHAKPLVISHNGASGDYPDCTDQAYQKAVDDGADVIDCPVQVTKDGIPICMSSIDLIDVTNVAKSEFASQTTTINDLKAGPGVFTFNLTWDDISKNLKPMISSPMNKYLLFRNPRNKNAGNFMRLSDFLAFAKDKDLSGIMITVENAAFMAEKLGFGVVDAVIKALDDSGYNKQTAQKVMIQSTNSSVLVKFKQETKYDLVYMIEESVRDAAPSSLADIKKFASAVSVNTQSVFPTTNQFLINQTNKLVPTLQSAGLSVYAYVLMNEFTSQPYDFFSDATAQINAYVQSAKVDGIITDFPGTAHRYKLNSCMGKNAPDFMRPAQPGGLISVMDQRAQPPAAAPMPLLTDSDVAEPPLPPVSNTTTASSPSHAALRMKTDVSILVTLLVLCASLLI

SEQ ID NO: 71201 - protein, 83 aa, Setaria italica
  Transcript Sequence Number=SeqID_5227
  Gene Ontology: Cellular component=integral to membrane
  Homolog annotation: Hit_ID=Q10QE9; Match level="QueryCoverage=93%, HitCoverage=20%, E-value=2e-34, Identity=93%"; Hit description =UPF0496 protein 1
KKKKKNIRVLINRVEVEISSMIDCVEFAERDEEAVKFGVEEIKKKLENFMKSVEDLGEQADRCSRDIRRARTVVLQRIIRNPN

SEQ ID NO: 71202 - protein, 275 aa, Setaria italica
  Transcript Sequence Number=SeqID_5228
  Gene Ontology: Cellular component=chloroplast
  Homolog annotation: Hit_ID=B9RA24; Match level="QueryCoverage=62%, HitCoverage=79%, E-value=5e-45, Identity=56%"; Hit description =Pterin-4-alpha-carbinolamine dehydratase, putative
MQEGEQETFLSKKKEKKRLEARKRTRRWSDKRKQEALVVERNSSIHSIPFRSHPKRKRKTMALSLSLVAPPVVAAAAGSTFSSRSSRTALRRGGRNGRVVAMADILGDFGARDPFPEEIESKFGEKVLGNVDTLHQILIPTLSALSLAGLPLQPGAEPLSLDDARGLLFKVVGWRLLLSEHDDQRPARLQCVWKVRDESCGQELIARINVALDGAGHAPAALLLEAPTNQQLQVRAELSTPSAAGDSLTINDYILAARIDKVKTLDLIPKKRVWA

SEQ ID NO: 71203 - protein, 76 aa, Setaria italica
  Transcript Sequence Number=SeqID_5229
  Gene Ontology: Mol. function=transferase activity, transferring groups other than amino-acyl groups; Cellular component=chloroplast; Biological process=fatty acid biosynthetic process
  Homolog annotation: Hit_ID=A1Z3W6; Match level="QueryCoverage=75%, HitCoverage=12%, E-value=3e-22, Identity=89%"; Hit description =Plastid 3-keto-acyl-ACP synthase I
  Pfam annotation: Domain name=Ketoacyl-synt_C; Domain location=1-69; Score=-1.7; E_value=8.9e-06; Accession=PF02801.14; Description=Beta -ketoacyl synthase, C-terminal do
SDAYHMTDPRSDGLGVSSCIKQSLEDAGVAPEEVNYINAHATSTLAGDLAEVNATKAVSYHGLGCIYFDPRWVLKD

SEQ ID NO: 71204 - protein, 109 aa, Setaria italica
  Transcript Sequence Number=SeqID_5230
  Gene Ontology: Mol. function=transferase activity, transferring groups other than amino-acyl groups; Cellular component=chloroplast; Biological process=fatty acid biosynthetic process
  Homolog annotation: Hit_ID=P23902; Match level="QueryCoverage=100%, HitCoverage=23%, E-value=1e-42, Identity=78%"; Hit description=3 -oxoacyl-[acyl-carrier-protein] synthase I, chloroplastic
FAAQIRDFSSEGYIDGKNDRRLDDCLRYCIVSGKKALENAGLAKGSDAHVKLDKVRAGVLVGTGMGGLTVFSDGVQNLIEKGYRKISPFFIPYAITNMGSALLAMDVGF

SEQ ID NO: 71205 - protein, 169 aa, Setaria italica
  misc_feature (164)..(164): Xaa can be any naturally occurring amino acid
  Transcript Sequence Number=SeqID_5231
  Gene Ontology: Mol. function=transferase activity, transferring groups other than amino-acyl groups; Cellular component=chloroplast; Biological process=fatty acid biosynthetic process
  Homolog annotation: Hit_ID=P23902; Match level="QueryCoverage=75%, HitCoverage=27%, E-value=1e-48, Identity=74%"; Hit description=3 -oxoacyl-[acyl-carrier-protein] synthase I, chloroplastic
  Pfam annotation: Domain name=ketoacyl-synt; Domain location=47-169; Score=-82.4; E_value=0.0068; Accession=PF00109.18; Description=Beta -ketoacyl synthase, N-terminal domain
  Subcellular localization annotation: CTP_CleavageSite=28; ConfidenceScore=5.38e-01
MQAPAHTLGLRLPPPSSSARRRALRPVRTAAAAATQAAPRRETDPKKRVVITGMGLVSVFGNDVDAYYDRLLAGESGIGPIDRFDASKFPTRFAGQIRGFSSEGYIDGKNDRRLDDCLRYCIVSGKKALESAGIALGSKPMEKIDKARAGVLVGTGMGGLTVFXDGVQN

SEQ ID NO: 71206 - protein, 134 aa, Setaria italica
  Transcript Sequence Number=SeqID_5232
  Gene Ontology: Mol. function=transferase activity, transferring groups other than amino-acyl groups; Cellular component=chloroplast; Biological process=fatty acid biosynthetic process
  Homolog annotation: Hit_ID=P23902; Match level="QueryCoverage=98%, HitCoverage=28%, E-value=7e-63, Identity=88%"; Hit description=3 -oxoacyl-[acyl-carrier-protein] synthase I, chloroplastic
  Pfam annotation: Domain name=Ketoacyl-synt_C; Domain location=1-90; Score=79.8; E_value=1e-20; Accession=PF02801.14; Description=Beta -ketoacyl synthase, C-terminal do
TTSCITGALKMQVLAPEEVNYINAHATSTLAGDLAEVRAIKQVFNNTSEIKINSTKSMIGHCLGAAGGLEAIATVEAITTGWVHPTINQFNPEPEVEFDTVANEKKQHEVNVAISNSFGFGGHNSVVVFAPFKA

SEQ ID NO: 71207 - protein, 261 aa, Setaria italica
  Transcript Sequence Number=SeqID_5233
  Gene Ontology: Mol. function=phospholipase D activity; Cellular component=membrane; Biological process=phosphatidylcholine metabolic process
  Homolog annotation: Hit_ID=P93844; Match level="QueryCoverage=91%, HitCoverage=29%, E-value=9e-94, Identity=70%"; Hit description =Phospholipase D alpha 2
  Pfam annotation: Domain name=PLDc; Domain location=100-127; Score =38.9; E_value=2e-08; Accession=PF00614.14; Description=Phospholipase D. Active site motif
IEAGEPFAVYAVVPMWPEGDPSSWNVQAILHWQRKTMEMMYGDIAAALKAKNIDADPKDYLSFFCLGNREAKLEVPREYEPKSHPPRGSDYDRAQKARRTMVYVHSKLMIVDDEYIIVGSANINQRSMDGGRDTEIAMGAYQPAHLNADGQAARGQVHGFRMSLWYEHLAELKDVFKDPGSLKCVRAVNKMAGEFWQRYTSDEVADLHGHLLSYPVDVKRDGTVAALEGVEFFPDTVAPVLGGLSLLVNVGSPLTNFVLST

SEQ ID NO: 71208 - protein, 491 aa, Setaria italica
  Transcript Sequence Number=SeqID_5234
  Gene Ontology: Mol. function=transporter activity; Cellular component= integral to membrane; Biological process=transport
  Homolog annotation: Hit_ID=Q25AI7; Match level="QueryCoverage=100%, HitCoverage=100%, E-value=0.0, Identity=83%"; Hit description =H0702G05.6 protein
  Pfam annotation: Domain name=MFS_1; Domain location=31-441; Score =104.6; E_value=3.3e-28; Accession=PF07690.8; Description=Major Facilitator Superfamily
  Pfam annotation: Domain name=Sugar_tr; Domain location=24-490; Score =70.5; E_value=6.3e-18; Accession=PF00083.16; Description=Sugar (and other) transporter
  Pfam module annotation: Pfam domain module=MFS_1::Sugar_tr; Domain location=31-441::24-490
MMEEQSASYTVDDALLSSGFGKFQILILSYAGIGLIAEAMEMMLLSFVGPSVQLEWKLTSHQESMITSVVFVGMLIGAYSWGVVSDNYGRRRGFLFTAIVTSGAGFLSSFAPNYLSLISLRFLVGIGLGGGPVLGSWFLEFVPAPSRGTWMVVFSAFWTVGTIFEASLAWMVMPKFGWRWLLALSSVPSFLLLLFYAITPESPRFLCMKGRTTEAVDVLEKMARLNNVPLPSGKLVSDKNIELDEVSVSSESTTLLDGAEESYNIDKDEGSDFGGFKSVGKLLSPKLIRATLLLWMAFFGNAFAYYGIVLLTSELSNGNRICAKEEVESVHSNNASLYKNVFISSFAEIPGSILSAMVVDRFGRRLSMASMLFTSCVFLFPLVFSRTDIITRISLFGARLCIAASFTIVYIYAPEIYPTSVRTTGIGIASSVGRIGGILCPLVAVALVHSCHQTTAIILFEIVVFSSGLAVAFFPFETKGCRLNDTEVDMN

SEQ ID NO: 71209 - protein, 61 aa, Setaria italica
  Transcript Sequence Number=SeqID_5235
  Subcellular localization annotation: CTP_CleavageSite=51; ConfidenceScore=5.60e-01
MRPLLTRLFTSTHIAMAASPSSSSPSRRLAHLTRHLAASSSGELSSVGAPAAAADTVPAKS

SEQ ID NO: 71210 - protein, 222 aa, Setaria italica
  misc_feature (10)..(10): Xaa can be any naturally occurring amino acid
  Transcript Sequence Number=SeqID_5236
  Gene Ontology: Mol. function=transcription regulator activity; Cellular component=nucleus; Biological process=protein modification process
  Homolog annotation: Hit_ID=Q10PJ7; Match level="QueryCoverage=84%, HitCoverage=23%, E-value=2e-71, Identity=73%"; Hit description=Helix- loop-helix DNA-binding domain containing protein, expressed
  Pfam annotation: Domain name=HLH; Domain location=63-113; Score=39.1; E_value=1.8e-08; Accession=PF00010.18; Description=Helix-loop-helix DNA-binding domain
TGKCLKGAKXEGFRRDSSSLHSLDETGALLQRKVSMQCADEKATDAGTNREDYVHVRAKRGQATNSHSLAERFRREKINERMKLLQDLVPGCNKITGKAMMLDEIINYVQSLQRQVEFLSMKLSAISPEMNCDFDLQDILCSQDACAAFPGYSLQMSSVHLNLFRASQQGFLRPEPCGVSPNPANVHVARPVQQLLQLPTFSSERSELGRGTSHRCSRCFRF

SEQ ID NO: 71211 - protein, 296 aa, Setaria italica
  Transcript Sequence Number=SeqID_5237
  Gene Ontology: Mol. function=protein serine/threonine kinase activity; Cellular component=plasma membrane; Biological process =protein amino acid phosphorylation
  Homolog annotation: Hit_ID=B9RS14; Match level="QueryCoverage=100%, HitCoverage=27%, E-value=4e-94, Identity=57%"; Hit description =Serine-threonine protein kinase, plant-type, putative
  Pfam annotation: Domain name=Pkinase; Domain location=2-240; Score =44.8; E_value=3.7e-11; Accession=PF00069.17; Description=Protein kinase domain
  Pfam annotation: Domain name=Pkinase_Tyr; Domain location=1-240; Score=-2.7; E_value=1.5e-13; Accession=PF07714.9; Description =Protein tyrosine kinase
  Pfam module annotation: Pfam domain module=Pkinase::Pkinase_Tyr; Domain location=2-240::1-240
AEVDVLGHIRHSNIVKLLCCLSRAETKLLVYEFMENGSLDKWLHGQKWMAGSAIARAPSVRQAPLDWPTRVRVAVGAARGLCYMHHECSPPIVHRDVKSSNILLDSDLNAKVADFGLARILVETGKADTVSAVAGSFGYMAPECAYSRKVNEKVDVYSFGVVLLELTTGREANDGGEHGSLADWAWRHLQSGRRIADAADKCIRDAGYGDDVEAVFKLGIICTGRQPSTRPTMKDVLQILQRCEQAHQRAADEKVAADYDAAPLLQVQVRGGSRRKQLSDARVMDDGSEGGFDCNV

SEQ ID NO: 71212 - protein, 95 aa, Setaria italica
  misc_feature (85)..(85): Xaa can be any naturally occurring amino acid
  misc_feature (89)..(89): Xaa can be any naturally occurring amino acid
  Transcript Sequence Number=SeqID_5238
  Homolog annotation: Hit_ID=O64487; Match level="QueryCoverage=97%, HitCoverage=14%, E-value=7e-28, Identity=55%"; Hit description =F20D22.3 protein
MPKDIQYDRADVEGNAQDGPVARLSFASLFDALGRCLNDESSVLLLYSLVHGNCDFQEYVLVRTDLDTLLMPILEMLYNASRKTXSNQXYMLLII

SEQ ID NO: 71213 - protein, 519 aa, Setaria italica
  Transcript Sequence Number=SeqID_5239
  Gene Ontology: Mol. function=binding
  Homolog annotation: Hit_ID=Q6YSD1; Match level="QueryCoverage=96%, HitCoverage=51%, E-value=5e-80, Identity=38%"; Hit description =Putative BLE2 protein
LGWTAQQDRDIRLFAARVIAELAGSLRLASVPSMLKLVSSLLVDAENQPAWHHHQQDFLSHAISVSINGENVADNQSRGQQSSAQPVHGNGGNLDNQTTQGEGDNGGCSLLCQCWPRMKEKHWSIPKEPPLTHQDSFTVLGMLILERLAYDIDNCTEISRATDLIFKITGFISYTSDTVGDDDVQQKAVICSSLNLIRRLSITEGKIGTMLRQELWESPFLLGNLASILEDNRSDPQIWKPAVDIIAMFALDEEARQEIGHTKVIISKLVHLFLGRDGTTNVYYGQQLRTASGEALANLAMGSTANCSAILEEPGYELVKDIKNMISDDEYRCVATSVLQNLCALSRDELRCPGARDHLSSALTVVMEKIMTAEGKELESLISLASQIGDVIPECFAHELESNTNGTGLVQKLVYTLNSNKKPCPKYPRMRRAIIQITISFVESCPRYATTFAVEGMAEALSKVDRTPSKVEKYRAFLGNTGVVLESGLPLTILVAKAKGLIDSATATPTPSAQQGDHV

SEQ ID NO: 71214 - protein, 181 aa, Setaria italica
  Transcript Sequence Number=SeqID_5240
  Gene Ontology: Mol. function=protein binding
  Homolog annotation: Hit_ID=Q9SF14; Match level="QueryCoverage=68%, HitCoverage=21%, E-value=3e-19, Identity=41%"; Hit description =F26K24.14 protein
VDAVHGVPVMAPEDCCYLGAPMGNEEVGFRAGGGGWTEEAEIQKLKARLQALEADRESMRHTIMSMGDEKVQVVLLREIAQQLCKDTAPFPAVPLKVQPRLQPVVMAQRKVVKKRNSFVKIFIVTVLKWVASMFCWRRKSNRIRYPIGMCGSNVGLMLILDRFPKQRQKKIPKRKLSASIL

SEQ ID NO: 71215 - protein, 157 aa, Setaria italica
  Transcript Sequence Number=SeqID_5241
  Gene Ontology: Cellular component=membrane
  Homolog annotation: Hit_ID=B6T9F8; Match level="QueryCoverage=99%, HitCoverage=41%, E-value=3e-61, Identity=74%"; Hit description =Nodulin protein
  Pfam annotation: Domain name=DUF6; Domain location=1-125; Score=14.1; E_value=0.012; Accession=PF00892.12; Description=Integral membrane protein DUF6
DILQSNTLQSYPAEMSLTALICGVGTVMSGAVALFAERRDMSAWVIGFDTRLFTVVYSGIVCSGVAFYVQGLVTRVRGPVFVTAFQPLCMIFTTIMGSTILKEETTLGSVVGAAIIVVGLYSLIWGKSKDHLGDGKPGAGVVTELPLTSAPTPNGNG

SEQ ID NO: 71216 - protein, 110 aa, Setaria italica
  Transcript Sequence Number=SeqID_5242
  Homolog annotation: Hit_ID=B9RE28; Match level="QueryCoverage=96%, HitCoverage=8%, E-value=2e-30, Identity=61%"; Hit description=F-box and wd40 domain protein, putative
  Pfam annotation: Domain name=uDENN; Domain location=4-107; Score =10.5; E_value=0.0028; Accession=PF03456.10; Description=uDENN domain
MGSSSRIFEYFVVCGLGPEIRALDGAKGFHGVEDMYMPAFLEQFPPSNHALYPPPPPQLPTCVLPAGVRIYSSGLDTDDISTYPRSYPIVLTEGDGSKIYVSCIAFRDPI

SEQ ID NO: 71217 - protein, 332 aa, Setaria italica
  Transcript Sequence Number=SeqID_5243
  Homolog annotation: Hit_ID=Q4WCK4; Match level="QueryCoverage=97%, HitCoverage=62%, E-value=3e-54, Identity=37%"; Hit description =DUF895 domain membrane protein
QGAIMTSYPPPNRRGTYISLFWCLFNLGGVLGGLLPFSFNYNHGDKPGSVNNGTYIAFMAFMLTGAALTALVLPPARIVRDDGTRATRVTFSSPATEGAEILKLFANWKMLLVLPAAWASNFFYTYQFNNVNGKLFTLRTKGLNNVFYWGAQMLGSAGIGYFLDFGFASRRKRGLVGVVAVTVLGTAIWGGGLANQLKFDHGNLAVPIDFKDGHRYAGPFLLYFSYGLLDAMFQSLIYWIIGALANDSQILSRYVGFYKGVQSAGAAVAWQVDRRKTSLISQLIVNWGLMTISYPLLALLVFLAVKDEDNSVSSVEDGKEKDSKLSAPTSFH

SEQ ID NO: 71218 - protein, 109 aa, Setaria italica
  Transcript Sequence Number=SeqID_5244
  Gene Ontology: Mol. function=protein binding
  Homolog annotation: Hit_ID=A0AAQ3; Match level="QueryCoverage=72%, HitCoverage=22%, E-value=1e-18, Identity=60%"; Hit description =Polygalacturonase inhibiting protein 4
  Pfam annotation: Domain name=LRRNT_2; Domain location=35-73; Score =46.2; E_value=1.3e-10; Accession=PF08263.4; Description=Leucine rich repeat N-terminal domain
RVTLARPHAVLLVLLLLAAAEASAAAAPASKQQCHSGDRAALLAVKAAFGNASYFISWTADIPCCHWFGVRCDDAESSSSTPAGGRRVVSLAIMRDANIRGPVPGAAIA

SEQ ID NO: 71219 - protein, 57 aa, Setaria italica
  Transcript Sequence Number=SeqID_5245
LDLAHAIILGSTFNTFAQQFAYTHDASRRSHEQKLASNHINPTSKKVRGNFKWKHLS

SEQ ID NO: 71220 - protein, 178 aa, Setaria italica
  Transcript Sequence Number=SeqID_5246
VRRQQAALPGRVAGGEPEPEPAAGEASEGGGDGEAVRAAEEGPGEAAGHLRAAAGGGQVPRRRQLHHRRPVAPAQRRPPRLRPALPPPLRDPQERQQVVERRLQPRHLAVRQEPAAPAAHRRQRQFQERPAPAAAGAAHAVHRRAQQEELPAAAAAGPARALLAVPSSGNNNNYLPRM

SEQ ID NO: 71221 - protein, 67 aa, Setaria italica
  Transcript Sequence Number=SeqID_5247
SMMPKIQSPLASQLSYALLFCTGYCFTISELFFSADLMILDFILFCMPIIASCWVTLLLGVSFVVCL

SEQ ID NO: 71222 - protein, 108 aa, Setaria italica
  misc_feature (70)..(70): Xaa can be any naturally occurring amino acid
  Transcript Sequence Number=SeqID_5248
  Homolog annotation: Hit_ID=B8Q8B4; Match level="QueryCoverage=93%, HitCoverage=32%, E-value=4e-15, Identity=52%"; Hit description=SKIP interacting protein 28 (Fragment)
HFFYLQHASEVCGEKAILTTEARELQSRLQRLSDERNKNLVIIEQIRQTLDERLVAAQQEIVEAEKEKIXKEAAAQALLDEQEKNDEITIVEESRRLQKEAEENLKVL

SEQ ID NO: 71223 - protein, 140 aa, Setaria italica
  Transcript Sequence Number=SeqID_5249
TKGNKSINLDRIEFSYFSDLLAFSSNDQVSSGILITGKDSFSPVLDVPSPDKEGSSTGTSGVIEQKNTSNSGTDCDKQLSGDILENDDILLSSKTDMLPDLNLNHFASTSSTHSSHSVSIECLEDCIADARSNKNDLLPS

SEQ ID NO: 71224 - protein, 628 aa, Setaria italica
  Transcript Sequence Number=SeqID_5250
  Homolog annotation: Hit_ID=B8Q8B4; Match level="QueryCoverage=47%, HitCoverage=98%, E-value=3e-80, Identity=57%"; Hit description=SKIP interacting protein 28 (Fragment)
DHRILKAIAIEHHKDVDSAVVAVLDEVMPSMTDSAGALSADHDVLPSFAGSVGNVFANHSTHEVGSSSSAGHDIRVNEVDGSVHSGQDTSSVEVTSGTQENIDSELHEGRLTSIHGMSEQLDRHSDPIPNGNQHDLIPNLDAVSSNTRPERKLANSDTEVGYGVLSSACFSQLSTGANCGDSISSEAPQLHDQDSSNIPVGDCFPQKNSLKMFSGYEDINFDDDLFFSDLLAFSSNDQVSSGILITGKDSFSPVLDVPSPDKEGSSTGTSGVIEQKNTSNSGTDCDKQLSGDILENDDILLSSKTDMLPDLNLNHFASTSSTHSSHSVSIECLEDCIADARSNKNDLLPSLELVTKMIEDVELLEEKAKVAKHESSVAGTGILTKVEELKEMLTHAKEANDMHASEVCGEKAILTTEARELQSRLQRLSDERNKNLVIIEQIRQTLDERLVAAQQEIVEAEKEKIEKEAAAQALLDEQEKMMNSIVEESRRLQKEAEENLKLKEFLVERGQIVDMLQGEIAVICEDVSLLKRVVDERLSLSKLQRSTMSSLSSSLHSSLHKSCSSSDRTTEAVESPDKHTVPVAASPVARDLNDNPSTVEVSDGNDTTDKGICKRVDSSEDADGWEIC

SEQ ID NO: 71225 - protein, 248 aa, Setaria italica
  Transcript Sequence Number=SeqID_5251
  Homolog annotation: Hit_ID=Q9FZ23; Match level="QueryCoverage=37%, HitCoverage=40%, E-value=5e-11, Identity=41%"; Hit description =T6A9.7 protein
MMEAKGDQDALLDLESGNGAAGSNNNSGVDASFSVGQGRTAPNGAWNGCVGANGCLKDDRNQHMDCSPPALDAVAKNGDDRKSEGEDKLGLLDSSGGEKAKKKRSKKPPRPPRPSTPTPLDVSDQKLLNELSELAMLKRARIERMKALKKMKNAKQGSSGGNLCPLIITIIFCVVILWQGFFSGHGSAVSFHGSPESSIRAHSSLISIRFYKKNHSNVRPPSVTTAAPDNVEAVSSLVNHNQARRLSR

SEQ ID NO: 71226 - protein, 60 aa, Setaria italica
  Transcript Sequence Number=SeqID_5252
YQYMDTGHNSTVPCHYYFTSYEKSCMHSSNVSAVRSCHKDVSDICTLTKPFFVPCAHTHK

SEQ ID NO: 71227 - protein, 56 aa, Setaria italica
  Transcript Sequence Number=SeqID_5253
YKQAQDRRIVGAFVDALIGDPPSLVAQLVDAFMDVVCIKEKPPQPQQKGACCKLWH

SEQ ID NO: 71228 - protein, 50 aa, Setaria italica
  misc_feature (20)..(20): Xaa can be any naturally occurring amino acid
  Transcript Sequence Number=SeqID_5254
TDESWRFVDALIGDPPSLVXQLVDAFMDVVCIKEKPPQPQQKGACCKLWH

SEQ ID NO: 71229 - protein, 605 aa, Setaria italica
  Transcript Sequence Number=SeqID_5255
  Gene Ontology: Mol. function=metal ion binding; Cellular component =nucleus; Biological process=regulation of transcription, DNA -dependent
  Homolog annotation: Hit_ID=B9RJY2; Match level="QueryCoverage=100%, HitCoverage=92%, E-value=1e-122, Identity=42%"; Hit description =Protein VERNALIZATION-INSENSITIVE, putative
AVEILQCWTRRDLLELICVELGKERKYTNVPKSKMIAYLLKLVSRNSGQLKDGNAEAMLSGQDNKDETQMKECEEQVQHSLKTANPDSSMRREARAGTVVCSNVACQAIRNAGDKYCKRCSCCICNKYDDNKDPSLWLVCSSDNPYSGCSCGISCHLKCALKNKKAGIVKNGCNKLDCSFYCVSCGKINWLMRSLRKQLAIAREARRVDMLCERLSLSHKMVKGSEHYKEIASIISSAVKTLEKEVGGALDQVSAIMGRGIVNRLSCSAEVQNLCSSALEIVDSTVDNILEFELNDNPQVLGPQPRILFDEITPFSLVIVLKYQDNIGKEHIDGCKVWHRSAKVLNYSSEPTCHILRPNTRSLVSGLSPSTEYFFKVLPFGSIQGFTEQEAKCTTRSLDQGSSQCSTQNSESVCLKEDSVQHQKKDLNLQNHQRAIQHDSPKGSTNSSENNLSCDRYSKRAKIARLDGASDNDESQLPPTSEVLPFPSSNSSPSEAPSKPDVLIGTPDSSSKNYVEQQYEYCVKVIRWLEHEGHMDSDFRVKFLTWFSLKATAQDRRIVGAFVDALIGDPPSLVAQLVDAFMDVVCIKEKPPQPQQKGACCKLWH

SEQ ID NO: 71230 - protein, 433 aa, Setaria italica
  Transcript Sequence Number=SeqID_5256
  Gene Ontology: Mol. function=transferase activity, transferring alkyl or aryl (other than methyl) groups; Cellular component=chloroplast; Biological process=aromatic amino acid family biosynthetic process
  Homolog annotation: Hit_ID=A0AR17; Match level="QueryCoverage=95%, HitCoverage=92%, E-value=0.0, Identity=88%"; Hit description=3 -phosphoshikimate 1-carboxyvinyltransferase (Fragment)
  Pfam annotation: Domain name=EPSP_synthase; Domain location=13-427; Score=606.7; E_value=2.3e-179; Accession=PF00275.12; Description =EPSP synthase (3-phosphoshikimate 1-carboxyvinyltransferase)
LLTCLPYVTLLYLKPVNLPLLSALAEGTTVVDNLLDSEDVHYMLGALKALGLSVEADKAAKRAVVAGCGGKFPVEKDAKEEVQLFLGNAGTAMRPLTAAVTAAGGNATYVLDGVPRMRERPIGDLVVGLKQLGADVDCFLGTDCPPVRVKGIGGLPGGKVKLSGSISSQYLSALLMAAPLALGDVEIEIIDKLISIPYVDMTLRLMERFGVKAEHSDNWDRFYIKGGQKYKSPKNAYVEGDASSASYFLAGAAITGGTVTVEGCGTTSLQGDVKFAEVLEKMGAKVTWTETSVTVTGPPREPFGRKHLKAIDVNMNKMPDVAMTLAVVALFADGPTAIRDVASWRVKETERMVAIRTELTKLGASVEEGPDYCIITPPEKLNVTAIDTYDDHRMAMAFSLAACAEVPVTIRDPGCTRKTFPDYFDVLSTFVKN

SEQ ID NO: 71231 - protein, 52 aa, Setaria italica
  Transcript Sequence Number=SeqID_5257
NTCKYTHLRHTSNRNHSLFFLGVYHKHASISSLVAHATKEEKLDCVSDRHLG

SEQ ID NO: 71232 - protein, 60 aa, Setaria italica
  Transcript Sequence Number=SeqID_5258
YLEHEIHRVDQEKNGTMIHTHYLDLATRLKKKIQVVLNKKEIFFLPILFAQKTIFFSFNK

SEQ ID NO: 71233 - protein, 96 aa, Setaria italica
  Transcript Sequence Number=SeqID_5259
  Gene Ontology: Mol. function=protein kinase activity; Cellular component=integral to membrane; Biological process=protein amino acid phosphorylation
  Homolog annotation: Hit_ID=Q4AC13; Match level="QueryCoverage=71%, HitCoverage=6%, E-value=1e-15, Identity=62%"; Hit description=117M18_ 5
  Pfam annotation: Domain name=LRR_1; Domain location=41-63; Score =10.9; E_value=2.5; Accession=PF00560.25; Description=Leucine Rich Repeat
  Pfam annotation: Domain name=LRR_1; Domain location=65-87; Score =16.1; E_value=0.15; Accession=PF00560.25; Description=Leucine Rich Repeat
  Pfam module annotation: Pfam domain module=LRR_1::LRR_1; Domain location=41-63::65-87
RELPAAWRGVVCDGGAVVGVALDGLGLSGELKMATLAGMRALQNLSLAGNAFSGRLPPAIGTLSSLRHLDLSGNRFYGPIPGRLSDLNGLVHLNLS

SEQ ID NO: 71234 - protein, 90 aa, Setaria italica
  Transcript Sequence Number=SeqID_5260
  Gene Ontology: Mol. function=dolichyl-diphosphooligosaccharide -protein glycotransferase activity; Cellular component=endoplasmic reticulum membrane; Biological process=protein amino acid glycosylation
  Homolog annotation: Hit_ID=Q54NM9; Match level="QueryCoverage=96%, HitCoverage=12%, E-value=8e-33, Identity=72%"; Hit description =Dolichyl-diphosphooligosaccharide--protein glycosyltransferase subunit STT3
MRFMQSLDVNYVLVVFGGVTGYSSDDINKFLWMVRIGGGVFPVIKEPDYLVNGEYRVDKGAAPKMLNCLMYKLCYYRFGELTTEYGKPPG

SEQ ID NO: 71235 - protein, 169 aa, Setaria italica
  misc_feature (40)..(40): Xaa can be any naturally occurring amino acid
  Transcript Sequence Number=SeqID_5261
  Gene Ontology: Mol. function=dolichyl-diphosphooligosaccharide -protein glycotransferase activity; Cellular component=oligosaccharylt ransferase complex; Biological process=protein amino acid N-linked glycosylation via asparagine
  Homolog annotation: Hit_ID=B0X8A0; Match level="QueryCoverage=91%, HitCoverage=22%, E-value=1e-59, Identity=68%"; Hit description =Oligosaccharyl transferase
PDAVPIPRAKVMSWWDYGYQITAMGNRTVIVDNNTYNKTXTVGCAMSSYEDEAYEIMQSLDVNYVLVVFGGVTGYSSDDINKFLWMVRIGGGVFPVIKEPDYLVNGEYRVDKGAAPKMLNCLMYKLCYYRFGELTTEYGKPPGYDRVRGVEIGNKDIKLDVVNASSKYS

SEQ ID NO: 71236 - protein, 125 aa, Setaria italica
  misc_feature (81)..(81): Xaa can be any naturally occurring amino acid
  misc_feature (92)..(92): Xaa can be any naturally occurring amino acid
  Transcript Sequence Number=SeqID_5262
  Gene Ontology: Mol. function=dolichyl-diphosphooligosaccharide -protein glycotransferase activity; Cellular component=endoplasmic reticulum membrane; Biological process=protein amino acid glycosylation
  Homolog annotation: Hit_ID=B9RL89; Match level="QueryCoverage=64%, HitCoverage=10%, E-value=4e-34, Identity=90%"; Hit description =Oligosaccharyl transferase, putative
SYLFGLLSYCSFFIEDEAYEIMQSLDVNYVLVVFGGVTGYSSDDINKFLWMVRIGGGVFPVIKEPDYLVNGEYRVDKGAAXPKMLNCLMYKXLCYYRFGELTTEYGKPPGYVLTIYIAVRHSCIP

SEQ ID NO: 71237 - protein, 720 aa, Setaria italica
  Transcript Sequence Number=SeqID_5263
  Gene Ontology: Mol. function=dolichyl-diphosphooligosaccharide -protein glycotransferase activity; Cellular component=endoplasmic reticulum membrane; Biological process=protein amino acid glycosylation
  Homolog annotation: Hit_ID=B9RL89; Match level="QueryCoverage=89%, HitCoverage=86%, E-value=0.0, Identity=80%"; Hit description =Oligosaccharyl transferase, putative
  Pfam annotation: Domain name=DUF996; Domain location=224-329; Score= -48.7; E_value=0.029; Accession=PF06195.5; Description=Protein of unknown function (DUF996)
  Pfam annotation: Domain name=STT3; Domain location=26-671; Score =626.7; E_value=2.2e-185; Accession=PF02516.6; Description =Oligosaccharyl transferase STT3 subunit
  Pfam module annotation: Pfam domain module=DUF996::STT3; Domain location=224-329::26-671
MATTALDFLPAPLRSLRLKTKQQELLLRVSTLALIYVLAFAVRLFSVLRYESMIHEFDPYFNYRTTLFLSENGFSEFWNWFDSESWYPLGRVVGGTLFPGLMVTAALLHRLLRALSLAVHIREVCVLTAPFFAANTTLVAYAFGREIWDSGAGLVAAALIAIVPGYISRSVAGSYDNEGVAIFALLLTFYLFVRAVNTGSLAWALASAFGYFYMVSAWGGYVFIINLVPLYVLVLLVTGRYSQRLYVAYNCMYVLGMLLAMQIRFVGFQHVQSGEHMAAMGVFFLLQVFFFLDWVKYLLNDARLFKSFLRITLTCVITVGALALGIGTASGYISPWTGRFYSLLDPTYAKDHIPIIASVSEHQPTAWSSFMFDFHILLFLFPAGLYFCFKRLSDATIFIVMYGLTSMYFAGVMVRLILVAAPAVCLISAIAASATIKNLTTLIRAKSKSPQATSGKTTGSKAAAKGAVDQSLPFQHNAAIALLLGAFYLLSRYAIHCTWVTSEAYSSPSIVLAARGHNGGRVIFDDYREAYYWLRQNTPPDAKIMSWWDYGYQITAMGNRTVIVDNNTWNNTHIATVGCAMSSYEDEAYEIMQSLDVNYVLVVFGGVTGYSSDDINKFLWMVRIGGGVFPVIKEPDYLVNGEYRVDKGAAPKMLNCLMYKLCYYRFGELTTEYGKPPGYDRVRGVEIGNKDIKLEYLEEAFTTSNWIVRIYKVKPPKNRS

SEQ ID NO: 71238 - protein, 129 aa, Setaria italica
  Transcript Sequence Number=SeqID_5264
  Gene Ontology: Mol. function=transcription factor activity; Cellular component=transcription factor complex; Biological process =regulation of transcription, DNA-dependent
  Homolog annotation: Hit_ID=Q27W79; Match level="QueryCoverage=86%, HitCoverage=26%, E-value=2e-50, Identity=87%"; Hit description =Transcription regulator of the cell cycle TaE2Fe
  Pfam annotation: Domain name=E2F_TDP; Domain location=25-90; Score =107.6; E_value=4.3e-29; Accession=PF02319.12; Description =Transcription factor E2Fdimerisation partner (TDP)
VQVGGASSGSGSSVARACRHHAYSRKQKSLGLLCSNFVALYDREDVETIGLDDAAKRLGVERRRIYDIVNVLESVGILVRRAKNRYTWLGFGGVPAALKELKERALREMSGSPVLLPMEESSTANLSDF

SEQ ID NO: 71239 - protein, 51 aa, Setaria italica
  Transcript Sequence Number=SeqID_5265
APQLRALDTEHLGQAELRSRVLYRGAAGDVKHAGDEPFSVFSHSDARVFDN

SEQ ID NO: 71240 - protein, 245 aa, Setaria italica
  Transcript Sequence Number=SeqID_5266
  Gene Ontology: Mol. function=protein dimerization activity; Cellular component=nucleus; Biological process=regulation of transcription, DNA-dependent
  Homolog annotation: Hit_ID=Q6K223; Match level="QueryCoverage=99%, HitCoverage=34%, E-value=7e-84, Identity=68%"; Hit description=Auxin response factor 8
AIQGARHAQFVPPLSDLHLTHLQSSLLYPGLRRPDHVGRAAPIPARISTDLTIGGAPARDDMSCALSIGADKKQPGGAKPAGLVLFGRTILTEQQMSLSGSAGATSPAATGNGYMNWNADKGPNASEGSGSGVIQNSPTKNASSSERPPWFTELAGLEPGQCKVFVESDTVGRNLDLSALGSFDELYGRLSEMFCIESAELRSRVLYRGAAGDVKHAGDEPFSVFVKSARRITILTDAGSDNLGS

SEQ ID NO: 71241 - protein, 125 aa, Setaria italica
  misc_feature (25)..(25): Xaa can be any naturally occurring amino acid
  Transcript Sequence Number=SeqID_5267
  Gene Ontology: Mol. function=sucrose-phosphatase activity; Biological process=metabolic process
  Homolog annotation: Hit_ID=A3AZW5; Match level="QueryCoverage=98%, HitCoverage=30%, E-value=1e-38, Identity=63%"; Hit description =Probable sucrose-phosphatase 3
  Pfam annotation: Domain name=S6PP_C; Domain location=1-113; Score =163.2; E_value=7.7e-46; Accession=PF08472.2; Description=Sucrose-6 -phosphate phosphohydrolase C-termi
KPAEVVVKFYVLYEKWRRGGASKSXSVLQYLKSITHSNGIIIHPSGSERSLHASIDALSSCYGDKQGNKFRVWVDRLVTSPIGTSNWLVRFDNWEKEGLPSASSHDTLIVALNTSQWLSLFHIAS

SEQ ID NO: 71242 - protein, 108 aa, Setaria italica
  Transcript Sequence Number=SeqID_5268
  Gene Ontology: Mol. function=sucrose-phosphatase activity; Biological process=metabolic process
  Homolog annotation: Hit_ID=Q84ZX8; Match level="QueryCoverage=100%, HitCoverage=24%, E-value=1e-45, Identity=77%"; Hit description =Sucrose-phosphatase 2
  Pfam annotation: Domain name=S6PP_C; Domain location=1-78; Score =76.8; E_value=7.6e-20; Accession=PF08472.2; Description=Sucrose-6 -phosphate phosphohydrolase C-termi
HSNGIIIHPSGSERSLHASIDALSSCYGDKQGNKFRVWVDRLVTSPIGTSNWLVRFDNWEKEGGARNCCRTTLLLNMKPETPEGLELTHIHKTWVEGHSAGSENAFIL

SEQ ID NO: 71243 - protein, 89 aa, Setaria italica
  Transcript Sequence Number=SeqID_5269
TLDENRTLLLIYKTFIEQSIIGQARFHATKCNIQRSTENSFEQGFSVMYQRGTKCSGRNTRGGAIYDLTYVPGNNTVVTTSSGLCLSIL

SEQ ID NO: 71244 - protein, 152 aa, Setaria italica
  Transcript Sequence Number=SeqID_5270
  Gene Ontology: Mol. function=metal ion binding; Biological process =metal ion transport
  Homolog annotation: Hit_ID=B6UFP9; Match level="QueryCoverage=46%, HitCoverage=34%, E-value=2e-23, Identity=73%"; Hit description =Extensin
MATLIITVDPECCRCSSKIQKVLCYIQERCEFVIEKVVYEKDKVIVSGPFDANKLSCYLWCKAGRIIKNIEIPEPPPPPPPPPPPPPEPKCKLICPYPYPYPCPKPGAWSPPCSCPPPHCGCQYKPPSPPPPPPPLPKQPPCKYPTWSSSCY

SEQ ID NO: 71245 - protein, 105 aa, Setaria italica
  Transcript Sequence Number=SeqID_5271
  Homolog annotation: Hit_ID=B6TAM4; Match level="QueryCoverage=26%, HitCoverage=6%, E-value=2e-09, Identity=100%"; Hit description=Zinc finger C-x8-C-x5-C-x3-H type family protein
RGGCSRDTCSFAHGHAELRRFPGSRTSFPPRAGRRDYRGGDFRDRFDRRRSPHRRHSPDRDSRDHRPFHDRRPISQERESSYSRSPSRKSERRHEKKPDDGETNS

SEQ ID NO: 71246 - protein, 79 aa, Setaria italica
  Transcript Sequence Number=SeqID_5272
  Homolog annotation: Hit_ID=Q5JJP6; Match level="QueryCoverage=79%, HitCoverage=7%, E-value=1e-10, Identity=60%"; Hit description =Adenylyl cyclase-like
IKTIDQYKPTNNPDASGPSFSEALKSKKPPLQYDTSESADGGPGGKGAKKKAKKGKQIDPSLLGFKVHSNRIMMGRCSR

SEQ ID NO: 71247 - protein, 69 aa, Setaria italica
  Transcript Sequence Number=SeqID_5273
SSVRAPPVSWLPHLVPSPRRIRWHSYWLSFDLTTIRISRLLSRFIRLNCCQRIIRPLYRFFTWYFDDLL

SEQ ID NO: 71248 - protein, 184 aa, Setaria italica
  misc_feature (146)..(146): Xaa can be any naturally occurring amino acid
  Transcript Sequence Number=SeqID_5274
  Gene Ontology: Mol. function=nucleic acid binding
  Homolog annotation: Hit_ID=B6TAM4; Match level="QueryCoverage=64%, HitCoverage=26%, E-value=1e-56, Identity=94%"; Hit description=Zinc finger C-x8-C-x5-C-x3-H type family protein
LKGRRDYRGGDFRDRFDRRRSPHRRHSPDRDSRDHRPFHDRRPISQERESSYSRSPSRKSERRHEKKPDDGETNSSRSLSISDNNDDRKKETLLSGDDKEDQEIQLKQIRQDMELLRDDKSHLEIILDEKNAEVRKISSRVNDLDXQLRKEKEECHRMTSKIKKFIKAHARFLKAQEELKRSQA

SEQ ID NO: 71249 - protein, 88 aa, Setaria italica
  Transcript Sequence Number=SeqID_5275
  Gene Ontology: Mol. function=nucleic acid binding
  Homolog annotation: Hit_ID=B6TAM4; Match level="QueryCoverage=85%, HitCoverage=16%, E-value=2e-24, Identity=76%"; Hit description=Zinc finger C-x8-C-x5-C-x3-H type family protein
  Pfam annotation: Domain name=zf-CCCH; Domain location=33-57; Score =28.3; E_value=3.1e-05; Accession=PF00642.16; Description=Zinc finger C-x8-C-x5-C-x3-H type (and similar)
MRDRSVDREFPSRERGDRPPPGMLGPPRRGPAYKTKLCALWQRGGCSRDTCSFAHGHAELRRFPGSRTSFPPRAGIHIPFSCPHSPLV

SEQ ID NO: 71250 - protein, 1107 aa, Setaria italica
  Transcript Sequence Number=SeqID_5276
  Gene Ontology: Cellular component=chloroplast
  Homolog annotation: Hit_ID=Q5JJP6; Match level="QueryCoverage=75%, HitCoverage=99%, E-value=0.0, Identity=64%"; Hit description =Adenylyl cyclase-like
  Pfam annotation: Domain name=GYF; Domain location=77-132; Score=42.0; E_value=2.3e-09; Accession=PF02213.8; Description=GYF domain
EENAGSNEYGITGIQEGLKTDEAKSSADPDLSTKLPDDSNTLFDVAPFEHRSETPMPYQNSDMDMKSGGHASYPEELTLYYLDPQGGMQGPFLGADIISWYEDGYFGLELPVRLSQAPDDVPFRPLVEVMPHLGQKPQSHPPALCDENAESLDSAQSKFEAAIPTPASSGKGDQASKWDSESNAVDPKRSDHEASLPSRTGWLSSPETGKDIANISNRQQHIPESVPQDAEVLYTGRPNSSIGQSVRDLENDRADFQLASRDPHSGVGEANLPQHDVPRESDLSPLGLLWSELEGMHPKQPLSSNVLGLNERRSPKPTAPKDIPPVNIRHGQLSRMNEASSIRDEWPANFGRLDGMNDANIPGRIPQVEAEHHLNFEEQLLLQQIRREQLQQEQMMARNNLEFPGPFPGQVFDSLHQHRQPMNQPLSDVEHLLRVQFELDQQQQRRQQLQQEQHQRQLQQQRQAQLLQQQQQQQQQQQQMILEQLLQQQLQGSNFGPANMVDQVLLREHVLNELHQQPHHLQRQHDAAIEQLIQAKFGHGLHREHHNDMLDVLSRPNQRQMLPLEQQILLGLQHEQLQSQQLANALRQHSGREEERHLSGVWPMDDAAQFIRPGTSPNQGHASRHGRFDLLENLQRSSSFEQHEPLDRSLSLHERLHRGGQGIHSLERSGSLPGGGPVPNPDVINALARHHGLGQLETHGDLYSLGQMPMLPSGVHPQQHRLQEQHSGSHLGRLERHWSDANGQLQNSLMESSRINQLQIEAEKQRRNVEMNLAADNPHAWAALMNKERNAEQDLSDMIHKKLVLQSQQSLGFPDVPVPASFGRKDHFAQPVVENPLRSPVDRLSFEESLAERSLFSKTGQSAQEGSVNLDSLTNSIENSGKYNLRSGSGSMLEQKHFLGIDDVQRDFSDVTGGRASANHLVGSVNELTRGKKQGSSVNLAGDDTNFSEEAVNNWSDSGISKGSSHSLLKRSTNQHPATSQAVSTDLSTIRMKKAGLASSDENKMEPGVVSSVAQAMETSVPSNKETGAYSMPSATNNPDASGPSFSEALKSKKPPLQYDTSESADGGPGGKGAKKKAKKGKQIDPSLLGFKVHSNRIMMGEIVRDD

SEQ ID NO: 71251 - protein, 403 aa, Setaria italica
  Transcript Sequence Number=SeqID_5277
  Gene Ontology: Mol. function=nucleic acid binding
  Homolog annotation: Hit_ID=B6TAM4; Match level="QueryCoverage=75%, HitCoverage=69%, E-value=1e-132, Identity=83%"; Hit description=Zinc finger C-x8-C-x5-C-x3-H type family protein
LKGCGKLTGLWVTYLHIDTFFVQYCIFPCITFALSLGRRDYRGGDFRDRFDRRRSPHRRHSPDRDSRDHRPFHDRRPISQERESSYSRSPSRKSERRHEKKPDDGETNSSRSLSISDNNDDRKKETLLSGDDKEDQEIQLKQIRQDMELLRDDKSHLEIILDEKNAEVRKISSRVNDLDLQLRKEKEECHRMTSKIKKFIKAHARFLKAQEELKRSQARFERLGDLLASDILKRGANEEVSSINVDEDPNGPYERSPNAATAKKRSILYSTSEEAKAVKKRRERDAEFDKPSKGTEPTKGLYLKKKLWEDEKDKIGNVVSSANTDKVKDSPVKHVLPSTGMAAHAVDDLFEAVELEDRHDPINALIENDAGDETRSPAMPSQPPPVVNAYEQYEGDDEEVDVE

SEQ ID NO: 71252 - protein, 267 aa, Setaria italica
  Transcript Sequence Number=SeqID_5278
  Gene Ontology: Biological process=cell division
  Homolog annotation: Hit_ID=Q0DTM7; Match level="QueryCoverage=97%, HitCoverage=100%, E-value=1e-118, Identity=78%"; Hit description =Cyclin-J18-like
MEVEEDAVAAAAASAWPGSSRRRHLLQFLLHASKRLDLRPIVKYSALEFFAGRFLPELPRKLGFCGARSGRAVRSWLLEPLRDSNLELFALVAVWIASKIHDLRPLSVKSLKALGDRIIADQHFTCRDFANAELVFMEVVEHNIGSSSIAFVYLEDLLIHFREISKLGDLLDLDVCMEILDILYETEDTSLLFNSPCSLAASTLVAAYAISVPKQTWEFPILPWVRFATSYDEEEIMKIVLTILLHVLKPDGIREKDKGDFDVRCLL

SEQ ID NO: 71253 - protein, 200 aa, Setaria italica
  Transcript Sequence Number=SeqID_5279
  Gene Ontology: Mol. function=serine-type endopeptidase activity; Biological process=negative regulation of catalytic activity
  Homolog annotation: Hit_ID=Q9ZSB3; Match level="QueryCoverage=88%, HitCoverage=23%, E-value=1e-50, Identity=48%"; Hit description =F3H7.3 protein
  Pfam annotation: Domain name=Inhibitor_I9; Domain location=29-109; Score=86.7; E_value=8.3e-23; Accession=PF05922.8; Description =Peptidase inhibitor I9
MAFHSRSQRLSACLLICFSFMIRADGSRKLYIAYLGDKKHDDPSLVAASHHEMLSTILGSKEEAIDSVAYSYKHGFSGFAAMLTEDQAENLAELPEVISVTPNQKHELLTTRSWDFLGLNYQRPSELLQRSNYGEDIIIGIIDTGIWPESRSFSDHGYGIIPPRWKGVCQLGQEWGRTNCSRKIIGARYYAAGLNKASHK

SEQ ID NO: 71254 - protein, 67 aa, Setaria italica
  Transcript Sequence Number=SeqID_5280
LSFSKEEAIDSVAYSYKHGFSGFAAMLTEDQAENLAGALALAKKFSSLLSLLLLVKIAKLNICDPIC

SEQ ID NO: 71255 - protein, 290 aa, Setaria italica
  Transcript Sequence Number=SeqID_5281
  Homolog annotation: Hit_ID=Q94DU1; Match level="QueryCoverage=89%, HitCoverage=39%, E-value=6e-24, Identity=70%"; Hit description =P0460E08.2 protein
  Pfam annotation: Domain name=DUF688; Domain location=1-289; Score= -139.0; E_value=0.0041; Accession=PF05097.4; Description=Protein of unknown function (DUF688)
TESFAMNCSVSGLSGAPDPGPGAEPCAPGFMMDRFLPAAQAVAVGSPQYTFRKAGAAGGTGNSGRDHARAAVAKASVGNGDDRMRRTPVQLPYQHLPPNYLSCAYPRREEHEEEDEEDDDDYDVHSTRGFSAKGCGLLPGLCVKTSLLLLNPMPAMKRGKAQGRGRGRLFPSKGRGQMAQSPLARSSQNKHLGCDSNGQSWEDVYKHKLEQKYLGQGEDGSSKLTSESNQLTFWSDSQTVDGSSPYHRSIAGGMLPYRNYAVMSPSSRANGSSRIGDRDDKASRSNGSGS

SEQ ID NO: 71256 - protein, 75 aa, Setaria italica
  Transcript Sequence Number=SeqID_5282
  Gene Ontology: Mol. function=hydrolase activity, hydrolyzing O -glycosyl compounds; Cellular component=cytosolic ribosome; Biological process=carbohydrate metabolic process
  Homolog annotation: Hit_ID=B5ABY0; Match level="QueryCoverage=58%, HitCoverage=9%, E-value=7e-17, Identity=90%"; Hit description=Beta -mannosidase/beta-glucosidase (Fragment)
MQRTMKKLTAPAVLLAAAAHVLLLTLRTAQCFNPEIYNTGGLSRRAFPAGFVFGTAASAYQVEGMAKQGGRGPSI

SEQ ID NO: 71257 - protein, 40 aa, Setaria italica
  Transcript Sequence Number=SeqID_5283
  Gene Ontology: Mol. function=acid phosphatase activity
  Homolog annotation: Hit_ID=Q2QN72; Match level="QueryCoverage=100%, HitCoverage=7%, E-value=3e-09, Identity=75%"; Hit description =Diphosphonucleotide phosphatase 1, putative, expressed
MTVTWTSGYGTNEATPFVRWGIQGQIQILSPAGTLTFSRN

SEQ ID NO: 71258 - protein, 397 aa, Setaria italica
  Transcript Sequence Number=SeqID_5284
  Gene Ontology: Mol. function=acid phosphatase activity; Cellular component=chloroplast
  Homolog annotation: Hit_ID=Q8VX11; Match level="QueryCoverage=82%, HitCoverage=53%, E-value=1e-137, Identity=67%"; Hit description =Diphosphonucleotide phosphatase 1
LRRHSLTAHCCIIYCLALYHNSYFKREEFFLLAACCLEQASMMQSLPRTAVAVAVYALVALTAAAAGGGEQPLSRIAIHRATVAPQPGAFVDASPALLGLQGKDREWVTVTYSNPKPSKDDWIGVFSPANFNDSICPSENQWVEAPLLCTAPIKFQFANYTSRDYGNTGKGSLRLQLINQREDFSFALFSGGLSNPKLIAHSKSVTFINPKAPVYPRLAQGKSWNEMTVTWTSGYGTNEATPFVRWGIQGQIQILSPAGTLTFSRNTMCGPPARTVGWRDPGFIHTSFLRDLWPNSMYTYQIGHRLFDGSIVWGHQYSFKAPPYPGEDSLQRVVIFGDMGKAEVDGSNEFNDFEPGSLNTTNQLIKDLKNFDVVFHIGDITYANGYLSQWDQFTAQG

SEQ ID NO: 71259 - protein, 339 aa, Setaria italica
  Transcript Sequence Number=SeqID_5285
  Gene Ontology: Mol. function=acid phosphatase activity; Cellular component=chloroplast
  Homolog annotation: Hit_ID=B9RED8; Match level="QueryCoverage=97%, HitCoverage=53%, E-value=1e-150, Identity=74%"; Hit description =Hydrolase, putative
  Pfam annotation: Domain name=Metallophos; Domain location=14-230; Score=50.8; E_value=5.2e-12; Accession=PF00149.20; Description =Calcineurin-like phosphoesterase
SLPSFIPWGKTSLQRVVIFGDMGKAEVDGSNEFNDFEPGSLNTTNQLIKDLKNFDVVFHIGDITYANGYLSQWDQFTAQVEPIASTVPYMVGSGNHERDWPGSGSFYGNLDSGGECGVPAQNMFYVPAENREQFWYSMDYGMFRFCIANTELDWRPGTEQYKFIEHCLSSVDRQKQPWLIFLAHRVLGYSSATFYADEGTTEEPMGRESLQSLWQKYKVDIAMYGHVHGYERTCPVYENVCVAKGSDRYTGAFTATTHVVVGGGGASLADYTAARARWSHARDRDFGFAKLTAFNHTTLLFEYKKSRDGSVHDHFTVSRDYRDVLACGVDNCPSTTLAS

SEQ ID NO: 71260 - protein, 47 aa, Setaria italica
  Transcript Sequence Number=SeqID_5286
MARGSSWRLAAVGVLVACAAVVLAPPAAALDIGIQSAGDGVSKQQAA

SEQ ID NO: 71261 - protein, 379 aa, Setaria italica
  misc_feature (7)..(7): Xaa can be any naturally occurring amino acid
  Transcript Sequence Number=SeqID_5287
  Gene Ontology: Mol. function=binding; Cellular component=cytoplasmic membrane-bounded vesicle; Biological process=signal transduction
  Homolog annotation: Hit_ID=Q6H7S8; Match level="QueryCoverage=100%, HitCoverage=13%, E-value=1e-168, Identity=78%"; Hit description =Putative LvsC
  Pfam annotation: Domain name=WD40; Domain location=130-168; Score =39.7; E_value=1.2e-08; Accession=PF00400.24; Description=WD domain, G-beta repeat
  Pfam annotation: Domain name=WD40; Domain location=195-233; Score =21.2; E_value=0.0042; Accession=PF00400.24; Description=WD domain, G- beta repeat
  Pfam annotation: Domain name=WD40; Domain location=279-316; Score =0.0; E_value=39; Accession=PF00400.24; Description=WD domain, G-beta repeat
  Pfam annotation: Domain name=WD40; Domain location=320-357; Score =10.2; E_value=2.5; Accession=PF00400.24; Description=WD domain, G -beta repeat
  Pfam module annotation: Pfam domain module=WD40::WD40::WD40::WD40; Domain location=130-168::195-233::279-316::320-357
  Subcellular localization annotation: CTP_CleavageSite=15; ConfidenceScore=5.05e-01
PIAHPLXYFAPQSITVTSVVPTTITPSSVLFIGLLDSNIVLLNEGLILSVKLWLTTQLQSGGNFTFSGSLEPFFGIGSDVISPRKIGTSLAENVEFGRQCLAAVQIHGDNYLILCGNWENSFQIISLSDGKIVQSIRQHKDVVSCVAVSSDGSVIATGSYDTTVMIWYAFRGRSNDKRSRNANYDISTKDHVIIESPSHILCGHDDIITCIFVSTELDIVISGSKDGTCMFHTLCEGTYVRSIRHPSGASLSKLVTSQHGRLVIYSDSDLSLHMYSINGKHIASSESNSRLSCMELSCCGEFMVCAGDHGQIVLRSMHSLDVVWRYEGAGKTITSLVVTPEECFLAGTKDGSLIVFSIENPLLRKSTMQRHKAKPSIGG

SEQ ID NO: 71262 - protein, 122 aa, Setaria italica
  misc_feature (10)..(10): Xaa can be any naturally occurring amino acid
  Transcript Sequence Number=SeqID_5288
  Gene Ontology: Mol. function=iron-sulfur cluster binding
  Homolog annotation: Hit_ID=B6SVA6; Match level="QueryCoverage=100%, HitCoverage=59%, E-value=4e-59, Identity=51%"; Hit description=Leaf protein
  Pfam annotation: Domain name=PPR; Domain location=22-56; Score=32.8; E_value=1.3e-06; Accession=PF01535.12; Description=PPR repeat
  Pfam annotation: Domain name=PPR; Domain location=57-91; Score=33.3; E_value=9.9e-07; Accession=PF01535.12; Description=PPR repeat
  Pfam module annotation: Pfam domain module=PPR::PPR; Domain location =22-56::57-91
DMAAVNNILXLMEQFGIKPDIVTYSHQLNTFSSLGHMAKCMKVFDKMIEAGIEPDPQVYSILAKGYVRAQQPEKAEELLLQMSQLGVRPNVVTFTTVISGWCSVADMDSAMRVLVKMCKSGV

SEQ ID NO: 71263 - protein, 68 aa, Setaria italica
  Transcript Sequence Number=SeqID_5289
MAGKSEQKSRKERRKEARSEKQKLRFLSWVQHQGGKKKKLAMPAVEPSPAEEKKPKKEPAAVKKKRKR

SEQ ID NO: 71264 - protein, 51 aa, Setaria italica
  Transcript Sequence Number=SeqID_5290
  Gene Ontology: Mol. function=DNA binding
RPTRPAVLNSRALDLRDDPSFLKEEAKDDKKRRAGMILRASMENPQELPQL

SEQ ID NO: 71265 - protein, 73 aa, Setaria italica
  Transcript Sequence Number=SeqID_5291
HVTCCKSLVLAVNCSRGPSLNAIGFILICNLHCYKFECRYQNGETLARQCIGVYMFFSYRKMIQRSIKACMHH

SEQ ID NO: 71266 - protein, 94 aa, Setaria italica
  Transcript Sequence Number=SeqID_5292
VHHQIFAKHPNRRRPYCTIRPACCIKKLALESNPLGTSILSETSLGQENQVSFCTNISLQFYQGIQLQKVNSGASFFWMPCLGRGNTASQISSV

SEQ ID NO: 71267 - protein, 213 aa, Setaria italica
  Transcript Sequence Number=SeqID_5293
  Gene Ontology: Mol. function=DNA binding; Cellular component=nucleus; Biological process=regulation of transcription
  Homolog annotation: Hit_ID=Q9SEC4; Match level="QueryCoverage=91%, HitCoverage=66%, E-value=5e-34, Identity=45%"; Hit description=Myb -related transcription factor
  Pfam annotation: Domain name=Myb_DNA-binding; Domain location=2-47; Score=42.0; E_value=2.3e-09; Accession=PF00249.23; Description=Myb -like DNA-binding domain
KRGLLTDAEEQVVIDLHAKLGNRWSKIAAKLPGRTDNEIKNHWNTHIKKKLIKMGIDPVTHEPLDRKTSSPATTSHSVVTADSTSKSDEATKQQSPASDVVRDVLAADGFSPTESSTNTVSTGGSSSSSGGSHDQDPLVKWLLEEDPPTGDEPWLDFTAGSVDVDEFSSIAAGPELPWDGATDWLLDYQDFGLEDSSLVVDGYMINGSNGAKF

SEQ ID NO: 71268 - protein, 77 aa, Setaria italica
  Transcript Sequence Number=SeqID_5294
PASLTKACPKRVITKEENSMRRCRTTPTRTRTCRSSKQIRAHAEHGTHVRRTQRVHCYTGAPKSSDRPAQKHGMRRR

SEQ ID NO: 71269 - protein, 83 aa, Setaria italica
  misc_feature (15)..(15): Xaa can be any naturally occurring amino acid
  misc_feature (27)..(27): Xaa can be any naturally occurring amino acid
  Transcript Sequence Number=SeqID_5295
  Gene Ontology: Mol. function=zinc ion binding; Cellular component =intracellular
  Homolog annotation: Hit_ID=B6TSL1; Match level="QueryCoverage=100%, HitCoverage=22%, E-value=2e-42, Identity=96%"; Hit description=Zinc finger, C2H2 type family protein
  Pfam annotation: Domain name=zf-C2H2; Domain location=48-70; Score =21.6; E_value=0.0033; Accession=PF00096.18; Description=Zinc finger, C2H2 type
PPASLMRLPCYCCAXGCRNNIEHPRAXPLKDFRTLQTHYRRKHGARPYACRRCGKRFAVRGDWRTHEKNCGRLWFCVCGSDFK

SEQ ID NO: 71270 - protein, 59 aa, Setaria italica
  Transcript Sequence Number=SeqID_5296
FRMHVCCMQYSSGQYSNHILATIYSCIQIIYRQSSCQAIQQEERVCVCVCIQYTMAAAA

SEQ ID NO: 71271 - protein, 147 aa, Setaria italica
  Transcript Sequence Number=SeqID_5297
  Gene Ontology: Mol. function=small conjugating protein ligase activity; Cellular component=cytosol; Biological process=ubiquitin -dependent protein catabolic process
  Homolog annotation: Hit_ID=P35132; Match level="QueryCoverage=100%, HitCoverage=99%, E-value=2e-78, Identity=94%"; Hit description=SUMO -conjugating enzyme UBC9
  Pfam annotation: Domain name=UQ_con; Domain location=5-142; Score =273.7; E_value=4.2e-79; Accession=PF00179.18; Description=Ubiquitin -conjugating enzyme
MASKRIQKELKDLQKDPPTSCSAGPVGEDMFHWQATIMGPCDSPYSGGVFLVTIHFPPDYPFKPPKVAFRTKVFHPNINSNGSICLDILKDQWSPALTISKVLLSICSLLTDPNPDDPLVPEIAHMYKTDRHKYENTARTWTQRYAM

SEQ ID NO: 71272 - protein, 166 aa, Setaria italica
  misc_feature (98)..(98): Xaa can be any naturally occurring amino acid
  Transcript Sequence Number=SeqID_5298
  Gene Ontology: Mol. function=transcription factor activity; Cellular component=nucleus; Biological process=regulation of transcription, DNA-dependent
  Homolog annotation: Hit_ID=B9GL91; Match level="QueryCoverage=46%, HitCoverage=28%, E-value=1e-11, Identity=39%"; Hit description =AP2/ERF domain-containing transcription factor
  Pfam annotation: Domain name=AP2; Domain location=72-123; Score=65.3; E_value=2.3e-16; Accession=PF00847.12; Description=AP2 domain
MMPCMQKVRIFCSDPDATDSSDDEDGQNIKVKKMVREVLVPVKNSKTSKCLETLVPCGTKDLEVSEKKGKSSRFRGVRKRPWGRWAAEIRDPVRKTRXWIGSYDSEEAAAAAYQAYANQIHAEVLAKKAQESVSERAALSSSSVSCVSSSAPCEQTARVAEGSCFM

SEQ ID NO: 71273 - protein, 308 aa, Setaria italica
  Transcript Sequence Number=SeqID_5299
  Gene Ontology: Mol. function=metal ion binding; Cellular component =cell wall; Biological process=metal ion transport
  Homolog annotation: Hit_ID=Q2QXS5; Match level="QueryCoverage=28%, HitCoverage=12%, E-value=2e-34, Identity=78%"; Hit description=Heavy metal-associated domain containing protein, expressed
  Pfam annotation: Domain name=HMA; Domain location=13-73; Score=47.5; E_value=5e-11; Accession=PF00403.18; Description=Heavy-metal -associated domain
MSKEDVLKVQTCVLKVNIHCDGCEKKVKKILQKIDGVYQSSVDAEQGKVTVSGLMDPATVIKKLNRAGKPANLWGAKPGVVSQVQKLQLGGAGAGGKGQQPKDAGGKGQPKDAGGKGQPKDAGGKGQPKGGAGAGNAGGGGGGGAKDAKPLAMPQPTPQQLQQLQQLQQQMQMKGMKLPPQLMAMGGKMPFPAAAPPAKDPKAVKFNVPVDEEFGDDGSEFDDEFDDYFDDDDFEDDDLYDDPKMMAKPMPMPMGAGGGDKKSANGGGNGGKKGGGGNEIPVQIKGNANNGGKKDSGAKQNAGGGGGN

SEQ ID NO: 71274 - protein, 119 aa, Setaria italica
  Transcript Sequence Number=SeqID_5300
  Homolog annotation: Hit_ID=B6TYX2; Match level="QueryCoverage=92%, HitCoverage=45%, E-value=1e-57, Identity=93%"; Hit description=F-box domain containing protein
MAKPFWMCRLAAPEYWRNLDPSWKHTGPPMRRYFHPDGYHSADPHDAVWGGHECTYTVITSFVGDGRIREHYVRINRWPPLKVSRKDDWSWELSNHLYRYNSIPDADRKGCTGPLFPVW

SEQ ID NO: 71275 - protein, 211 aa, Setaria italica
  Transcript Sequence Number=SeqID_5301
  Homolog annotation: Hit_ID=B6TYX2; Match level="QueryCoverage=99%, HitCoverage=86%, E-value=1e-110, Identity=90%"; Hit description=F -box domain containing protein
  Pfam annotation: Domain name=F-box; Domain location=3-50; Score=24.4; E_value=0.00046; Accession=PF00646.25; Description=F-box domain
RATPSEALGEVVMGRVMELLDARSVARCTVVSRAWRGVAADDRLWAPKCAELMAGKAHIPRLTLIRTGSKLSTYSMAIMDGKRSRITKEDLCDHAWEYCFTIAAPEYWRNLDPSWKHTGPPMRRYFHPDGYHSADPHDAVWGGHECTYTVITSFVGDGRIREHYVRINRWPPLKVSRKDDWSWELSNHLYRYNSIPDADRKGCTGPLFPVW

SEQ ID NO: 71276 - protein, 67 aa, Setaria italica
  Transcript Sequence Number=SeqID_5302
  Gene Ontology: Mol. function=potassium ion transmembrane transporter activity; Cellular component=integral to membrane; Biological process=potassium ion transport
  Homolog annotation: Hit_ID=Q1T759; Match level="QueryCoverage=91%, HitCoverage=7%, E-value=7e-27, Identity=91%"; Hit description =Potassium transporter
VPVPHVLPAERYLVGRIGPPGHHSYRCIVRYGYRDVHQDVDSFETELVESLATFIKLDSLLEVGMVY

SEQ ID NO: 71277 - protein, 166 aa, Setaria italica
  Transcript Sequence Number=SeqID_5303
SSVVRHDSLFRGAMPTPNSVSMSAMRDGINQETEPEKLGSDHEATPALQPCSKKETHQRRQTSNATSRCPNGLSSRPFPWPALISNKKMEKPRQTSKQKQSRSDRQCERGSRNGTGGEGNKICARGGESKHQEITDGTGIHIQARATIKVSGALTPHRRGSISGGR

SEQ ID NO: 71278 - protein, 206 aa, Setaria italica
  Transcript Sequence Number=SeqID_5304
  Gene Ontology: Mol. function=potassium ion transmembrane transporter activity; Cellular component=integral to membrane; Biological process=potassium ion transport
  Homolog annotation: Hit_ID=Q1T759; Match level="QueryCoverage=100%, HitCoverage=25%, E-value=9e-91, Identity=84%"; Hit description =Potassium transporter
RVGPPGHHSYRCIVRYGYRDVHQDVDSFETELVESLATFIKLDALFRCSDAGGEQRDSSYYERENALTVIGSNPLRRHLGLGYDDSHDGVSSAHEAAGSANGIELAAAAPAIKKQVRFAVESAAPRSPGVDERVLEELQELCEAREAGTAFILGHSHVQTKPGSSVLKKLAVGVGYNFLRRNCRGPDVVLRVPPASLLEVGMVYVL

SEQ ID NO: 71279 - protein, 141 aa, Setaria italica
  Transcript Sequence Number=SeqID_5305
  Gene Ontology: Mol. function=potassium ion transmembrane transporter activity; Cellular component=integral to membrane; Biological process=potassium ion transport
  Homolog annotation: Hit_ID=Q1T759; Match level="QueryCoverage=89%, HitCoverage=15%, E-value=3e-64, Identity=95%"; Hit description =Potassium transporter
  Subcellular localization annotation: CTP_CleavageSite=48; ConfidenceScore=5.12e-01
LALGDKLGMVRVPGIGLVYTDLTSGVPANFSRFVTNLPAFHRVLVFVCVKSVPVPHVLPAERYLVGRVGPPGHHSYRCIVRYGYRDVHQDVDSFETELVESLATFIKLDALFRCSDAGGEQRDSSYYVAARGRHGLRAMTT

SEQ ID NO: 71280 - protein, 605 aa, Setaria italica
  Transcript Sequence Number=SeqID_5306
  Gene Ontology: Mol. function=potassium ion transmembrane transporter activity; Cellular component=integral to membrane; Biological process=potassium ion transport
  Homolog annotation: Hit_ID=Q1T759; Match level="QueryCoverage=95%, HitCoverage=74%, E-value=0.0, Identity=92%"; Hit description =Potassium transporter
  Pfam annotation: Domain name=DUF417; Domain location=318-466; Score= -67.5; E_value=0.071; Accession=PF04224.4; Description=Protein of unknown function, DUF417
  Pfam annotation: Domain name=K_trans; Domain location=22-604; Score =1183.2; E_value=0; Accession=PF02705.8; Description=K+ potassium transporter
  Pfam module annotation: Pfam domain module=DUF417::K_trans; Domain location=318-466::22-604
MDTEFGVGMAPRKRESWRTTLLLAYQSLGVVYGDLSISPLYVYKSTFAEDITHSETNEEIYGALSFVFWTLTLIPLIKYVTIVLRADDNGEGGTFALYSLICRHANVSLLPNRQVADEELSTYKLECPPEVAQRSRVKEWLEKHKKLHTALLVMVMIGTCMVIGDGVLTPAISVFSAVSGLELSLSKHQHEYAVIPITCAILVFLFALQHYGTHRVGFLFAPIVLCWLLCMSAIGLYNIIHWNPHVYQALNPCYMITFLKKTRKSGWMSLGGILLCMTGSEAMFADLGHFSYSAIQLAFTSLVYPSLILGYMGQAAYLSKHHNFDASYQIGFYIAVPESVRWPVLVLAILASVVGSQAIISGTFSIINQSQSLSCFPRVKVVHTSAKIHGQIYIPEVNWMLMILCIAVTVGFRNTKHMGNASGLAVITVMMVTTCLMSVVIMLCWHRSPLLALAFFLFFGSIEALYFSASLIKFLEGAWVPILLSLILLAVMFVWHHTTIKKYEYDMQNKVTLEWLLALGDKLGMVRVPGIGLVYTDLTSGVPANFSRFVTNLPAFHRVLVFVCVKSVPVPHVLPAERYLVGRVGPPGDRPGPTNYLTGRQYVDD

SEQ ID NO: 71281 - protein, 62 aa, Setaria italica
  Transcript Sequence Number=SeqID_5307
NRTGCKAPEKKFVKGATCPAHPQKAEPIIVVSYRPSAEDHLTNGGKSNVKQQEQTYHRLGVP

SEQ ID NO: 71282 - protein, 96 aa, Setaria italica
  Transcript Sequence Number=SeqID_5308
  Gene Ontology: Cellular component=cell projection
  Homolog annotation: Hit_ID=Q9SYB4; Match level="QueryCoverage=100%, HitCoverage=100%, E-value=5e-41, Identity=84%"; Hit description =Postsynaptic protein CRIPT, putative
  Pfam annotation: Domain name=Cript; Domain location=11-96; Score =172.9; E_value=9.5e-49; Accession=PF10235.1; Description=Microtubule- associated protein CRIPT
  Pfam annotation: Domain name=DUF2039; Domain location=16-86; Score= -39.5; E_value=0.097; Accession=PF10217.1; Description=Uncharacterized conserved protein (DUF2039)
  Pfam module annotation: Pfam domain module=Cript::DUF2039; Domain location=11-96::16-86
MVCAKCEKKLGKVIVPDKWKEGASNTNESGGRKINENKLLSKKNRWTPYGNTKCIICKQQVHQDAKYCHTCAYSKGVCAMCGKQVLDTKLYKQSNV

SEQ ID NO: 71283 - protein, 83 aa, Setaria italica
  Transcript Sequence Number=SeqID_5309
HVLKANIIGTKSCRYIHGEENNEIITRHQLLHSQMNNKRNSKASTVGTCPADQKTKLKNSPALPLPWPRKIARPRRASRRRWW

SEQ ID NO: 71284 - protein, 269 aa, Setaria italica
  misc_feature (258)..(258): Xaa can be any naturally occurring amino acid
  misc_feature (261)..(261): Xaa can be any naturally occurring amino acid
  Transcript Sequence Number=SeqID_5310
  Gene Ontology: Mol. function=protein serine/threonine kinase activity; Cellular component=apoplast; Biological process=protein amino acid phosphorylation
  Homolog annotation: Hit_ID=B9RTY0; Match level="QueryCoverage=100%, HitCoverage=46%, E-value=4e-76, Identity=52%"; Hit description =Mitogen activated protein kinase kinase kinase 3, mapkkk3, mekk3, putative
  Pfam annotation: Domain name=Pkinase; Domain location=1-145; Score =45.8; E_value=3.2e-11; Accession=PF00069.17; Description=Protein kinase domain
  Pfam annotation: Domain name=Pkinase_Tyr; Domain location=1-145; Score=-116.4; E_value=5.5e-06; Accession=PF07714.9; Description =Protein tyrosine kinase
  Pfam module annotation: Pfam domain module=Pkinase::Pkinase_Tyr; Domain location=1-145::1-145
YLHNNAIIHRDIKGANILVDNKGCIKLADFGASKQVAKLATVTAAKTMKGTPHWMAPEVIVGSGHSFSADIWSVGCTVIEMATGKPPWSQQYQEVALLFHVGTTKSHPPIPEHLSPEAKDFLLKCLQKEPELRSTASDLLKHPFVTGEPDELQPLNHTAQEDSFNEIPAHDMPNGLGLNHSSNWSTMNSNKSSKIKPLWEGSCDDDDMCEFADKDDYPAVGSSYNPMSEPFDNWESKFDMSLEQNSHQSMEFSGLAKXPEXSITENDFT

SEQ ID NO: 71285 - protein, 129 aa, Setaria italica
  Transcript Sequence Number=SeqID_5311
  Gene Ontology: Mol. function=extracellular-glutamate-gated ion channel activity; Cellular component=integral to membrane; Biological process=ion transport
  Homolog annotation: Hit_ID=Q653Y6; Match level="QueryCoverage=100%, HitCoverage=15%, E-value=1e-60, Identity=83%"; Hit description =Putative ionotropic glutamate receptor ortholog GLR6
  Subcellular localization annotation: CTP_CleavageSite=16; ConfidenceScore=5.16e-01
GLSVTAPEILYQKPPNTSSNAQRLHNVVWPGDSTTTPKGWVFPNNGQPLRVGVPIKASFKELVSGGRGPDNVTGYCIDIFNAAIKLLPYPVPCQFITIGDGTKNPNYDDIIKMIAANSLDAAVGDFAIV

SEQ ID NO: 71286 - protein, 232 aa, Setaria italica
  Transcript Sequence Number=SeqID_5312
  Gene Ontology: Mol. function=metal ion binding
  Homolog annotation: Hit_ID=B9RT06; Match level="QueryCoverage=87%, HitCoverage=77%, E-value=8e-71, Identity=60%"; Hit description=Zinc finger protein, putative
  Pfam annotation: Domain name=zf-C3HC4; Domain location=121-163; Score= 27.9; E_value=4.1e-05; Accession=PF00097.17; Description=Zinc finger, C3HC4 type (RING finger)
  Pfam annotation: Domain name=zf-CHY; Domain location=1-68; Score =22.6; E_value=5.7e-06; Accession=PF05495.4; Description=CHY zinc finger
  Pfam module annotation: Pfam domain module=zf-C3HC4::zf-CHY; Domain location=121-163::1-68
FLFLFPCASSFCSRSASLDWIGLGAERRARAGQVICLVCDTEQPVAQVCCNCGVCMGEYFCATCKFFDDDVDKEQYHCKDCGICRVGGKENFFHCQKCGSCYSTTLRDKHCCIENSMKNNCPICYEYLFDSLRETSVLRCGHTMHLQCFHEMLKHDKFSCPICSTSIFDMDKFLTALDAEMEASYFYMGKGWIVCNDCRDTTRVFSGVAGHKCCHCQSHNTCRVGPLFFPSQ

SEQ ID NO: 71287 - protein, 52 aa, Setaria italica
  Transcript Sequence Number=SeqID_5313
  Gene Ontology: Mol. function=metal ion binding
MCRWKQALLHGKGWIVCNDCRDTTRVFSGVAGHKCCHCQSHNTCRVGPPVLP

SEQ ID NO: 71288 - protein, 97 aa, Setaria italica
  Transcript Sequence Number=SeqID_5314
  Gene Ontology: Mol. function=oxidoreductase activity, acting on the CH-OH group of donors, NAD or NADP as acceptor; Biological process =metabolic process
  Homolog annotation: Hit_ID=B9RQL1; Match level="QueryCoverage=92%, HitCoverage=28%, E-value=1e-29, Identity=63%"; Hit description =Glycerate dehydrogenase, putative
  Pfam annotation: Domain name=2-Hacid_dh_C; Domain location=1-97; Score=-28.0; E_value=1.1e-07; Accession=PF02826.11; Description=D -isomer specific 2-hydroxyacid dehydr
MTLLIFLQFSGKRVAILGLGRIGLAVAKRAEAFGCSISYHSRSEKPFPFPNYKFYANAVDLAANCDVLVVACSLNAETYHIVNREVIDALGPEGVVV

SEQ ID NO: 71289 - protein, 317 aa, Setaria italica
  Transcript Sequence Number=SeqID_5315
  Gene Ontology: Mol. function=oxidoreductase activity, acting on the CH-OH group of donors, NAD or NADP as acceptor; Biological process =metabolic process
  Homolog annotation: Hit_ID=B6TL24; Match level="QueryCoverage=100%, HitCoverage=100%, E-value=1e-129, Identity=73%"; Hit description =Glyoxylate reductase
  Pfam annotation: Domain name=2-Hacid_dh; Domain location=6-317; Score= 110.4; E_value=5.8e-30; Accession=PF00389.22; Description=D-isomer specific 2-hydroxyacid dehydr
  Pfam annotation: Domain name=2-Hacid_dh_C; Domain location=112-285; Score=259.1; E_value=1e-74; Accession=PF02826.11; Description=D -isomer specific 2-hydroxyacid dehydr
  Pfam module annotation: Pfam domain module=2-Hacid_dh::2-Hacid_dh_C; Domain location=6-317::112-285
MESLGVLLLHPMNAYLEQELDRRCRLHRFWEAPPGPPRDEFLRAHAGSIRAVVGNASYGADAALIDALPALEIVASFSVGIDRVDLAKCRERGIRVTNTPDVLTDDVADLAVGLAIAVLRRIPQADRFVRAGLWKAKGDYALTTRFSGKRVGIIGLGRIGLAVAKRVEAFDCPVNYYQRTKQDYPNYTYYPSVVELAANSDLLVVACPLNAQTRHIVNREVMDALGPKGVLINIGRGPHVDEPELVAALVEGRLGGAGLDVFEDEPNVPEALFTMDNVVVVPHIGSGTNETRKGMADLVLGNLEAHVLKKPLLTPVL

SEQ ID NO: 71290 - protein, 180 aa, Setaria italica
  Transcript Sequence Number=SeqID_5316
RWDLDFGRERRGSRWSDEVRSSVTEVVREEAPLTAKAVAGLDMENTRSKIVRSVDDVRKDADAAPEVTEETEEGEMEDDSEALNSESDVVNQERDTDVSNASAGVVMESEPKQLPDGKIQDEVPDEEAEDDKRVLDEAALDNNTSDGEVTYVENDMHDGKKNLIDYCNFTRAPTRPRSVR

SEQ ID NO: 71291 - protein, 105 aa, Setaria italica
  misc_feature (7)..(7): Xaa can be any naturally occurring amino acid
  Transcript Sequence Number=SeqID_5317
RRRQRGXFLDDQRAVMIPAGIEGLVAVPSGVVDAQSRVVGSGVASTSGRAANGASAARGFLAWMHHQGMEIDALVRLEAERMRAGLEEARRRHARALLAAAGRAA

SEQ ID NO: 71292 - protein, 292 aa, Setaria italica
  Transcript Sequence Number=SeqID_5318
  Gene Ontology: Mol. function=nucleic acid binding
  Homolog annotation: Hit_ID=B4FMD2; Match level="QueryCoverage=95%, HitCoverage=76%, E-value=1e-122, Identity=78%"; Hit description=Myb -related transcription activator
  Pfam annotation: Domain name=Myb_DNA-binding; Domain location=34-81; Score=36.6; E_value=9.8e-08; Accession=PF00249.23; Description=Myb -like DNA-binding domain
TPGPGGGDGGAGYVSDDPAHASCSTNGRAERKKGTPWTEGEHRMFLMGLQKLGKGDWRGISRNFVVSRTPTQVASHAQKYFIRQSNSSRRKRRSSLFDMVPEMPMDESPAAVEQFTLQNTQDEAASSNQLPALHLGQQKKVEVAKQLPTFQLSQHEESEYAEPSLPLPDLEMNSGAPFKTISVPAVPAFYPTLVPVPLTLWPPSVAHVEESGTTHEVLKPTPLNGKEAVKADDVVGMSKLSIGEASSVSMEPTALSLQLIGSTDARQSAFHVSPPMNRPELSKRNSSPIHAV

SEQ ID NO: 71293 - protein, 128 aa, Setaria italica
  Transcript Sequence Number=SeqID_5319
  Gene Ontology: Mol. function=sugar:hydrogen symporter activity; Biological process=carbohydrate transport
  Homolog annotation: Hit_ID=B2ZAP4; Match level="QueryCoverage=99%, HitCoverage=34%, E-value=1e-29, Identity=53%"; Hit description =Putative integral membrane protein
  Subcellular localization annotation: CTP_CleavageSite=44; ConfidenceScore=5.37e-01
DQMKVDSSKVSNWLSFDVVLPVALSCLFGLSISFFGFSCRRAISATGFTVLGIVNKLLTVVINLLIWDKHASFVGTIGLLICMSGGVLYQQSTTKPKAPKVEPKEENDEEQQKLLQMQGVQESSSTQK

SEQ ID NO: 71294 - protein, 271 aa, Setaria italica
  Transcript Sequence Number=SeqID_5320
  Gene Ontology: Mol. function=sugar:hydrogen symporter activity; Biological process=carbohydrate transport
  Homolog annotation: Hit_ID=Q9S845; Match level="QueryCoverage=84%, HitCoverage=61%, E-value=3e-99, Identity=75%"; Hit description =GONST3 Golgi Nucleotide sugar transporter
  Pfam annotation: Domain name=DUF6; Domain location=35-161; Score=5.6; E_value=0.036; Accession=PF00892.12; Description=Integral membrane protein DUF6
SEGSGTIQKNGAWSNALNTLLQQASVYGVAAGYCLSASLLSIINKWAVMKFPYPGALTALQYFTSVAGVLLCGQLKLIEHDGLNLRTMWKFLPAAVMFYISIFTNSELLLHANVDTFIVFRSAVPIFVAIGETLYLHQPWPSLKTWLSLSTILGGSVIYVFTDNQFTVTAYTWAVAYLVSMSIDFVYIKHVVMTIGLNTWGLVLYNNLEALMLFPLELLIMGEFDQMKVDSSKVSNWLSFDVVLPVALSCLFGLSISFFGFSCTNLRKTLE

SEQ ID NO: 71295 - protein, 385 aa, Setaria italica
  Transcript Sequence Number=SeqID_5321
  Gene Ontology: Mol. function=transporter activity; Cellular component= integral to membrane; Biological process=transport
  Homolog annotation: Hit_ID=Q2R9P7; Match level="QueryCoverage=51%, HitCoverage=38%, E-value=3e-55, Identity=57%"; Hit description =Ankyrin repeat family protein, putative, expressed
  Pfam annotation: Domain name=Ank; Domain location=115-147; Score =11.0; E_value=0.95; Accession=PF00023.22; Description=Ankyrin repeat
  Pfam annotation: Domain name=Ank; Domain location=154-186; Score =19.7; E_value=0.012; Accession=PF00023.22; Description=Ankyrin repeat
  Pfam annotation: Domain name=Ank; Domain location=188-252; Score=8.4; E_value=2.3; Accession=PF00023.22; Description=Ankyrin repeat
  Pfam annotation: Domain name=Ank; Domain location=253-287; Score=4.2; E_value=9.1; Accession=PF00023.22; Description=Ankyrin repeat
  Pfam annotation: Domain name=Ank; Domain location=288-318; Score =13.2; E_value=0.45; Accession=PF00023.22; Description=Ankyrin repeat
  Pfam annotation: Domain name=Ank; Domain location=322-357; Score=4.0; E_value=9.7; Accession=PF00023.22; Description=Ankyrin repeat
  Pfam annotation: Domain name=Ank; Domain location=358-383; Score =16.9; E_value=0.082; Accession=PF00023.22; Description=Ankyrin repeat
  Pfam annotation: Domain name=Ank; Domain location=79-111; Score=10.7; E_value=1; Accession=PF00023.22; Description=Ankyrin repeat
  Pfam module annotation: Pfam domain module=Ank::Ank::Ank::Ank::Ank::An k::Ank::Ank; Domain location=115-147::154-186::188-252::253-287::288 -318::322-357::358-383::79-111
MQPQHDGARLTSMCNFLHLAVYKGLKVEVMAQLPEQHAAATDSQATGAFIVNLQEKEFEVSETGILKHGQCNIHEVTAGRNTVLHVAAERGHHELIQELYLRFRDQGVLSRRNSALDTPLHCAARAGHVSAVTILAQVARDCGESTLLGWKNEAGDTALHLAARHGHGAAVEVLVSEAAESAAELNNAGVSALYLAVISRSEQAVRAIMACRDVSSAGPSSQNALHAAVFQSSEMVSLLLNWRPALVDQVDCNGSSPVHFAASDGDSTIVQAILRATPPRTLYKKDSAGLSALHVAARMDHSAIVADMVNSCLDAAELRDDNGRTFVHTAAREKRSKVVSLATSNPFLHGLLDTQDKDGNTPLHLAVAAGAPGVVEELLRKGKVR

SEQ ID NO: 71296 - protein, 106 aa, Setaria italica
  misc_feature (3)..(3): Xaa can be any naturally occurring amino acid
  misc_feature (7)..(7): Xaa can be any naturally occurring amino acid
  Transcript Sequence Number=SeqID_5322
AGXFGAXGRCEPAASSQQQQATRRRQGGGASDPEPSALHLEPRAGCIAGRGRCEETTTRHALLPDRAPTPSCRPSRGDRMMIPREPRRPEPPSTPDSGSPAIAAAA

SEQ ID NO: 71297 - protein, 276 aa, Setaria italica
  misc_feature (6)..(6): Xaa can be any naturally occurring amino acid
  Transcript Sequence Number=SeqID_5323
  Gene Ontology: Mol. function=oligosaccharyl transferase activity; Cellular component=membrane; Biological process=protein amino acid glycosylation
  Homolog annotation: Hit_ID=P46977; Match level="QueryCoverage=94%, HitCoverage=36%, E-value=9e-52, Identity=42%"; Hit description =Dolichyl-diphosphooligosaccharide--protein glycosyltransferase subunit STT3A
MVCSWXGYTFIINLIPIHVLLCIVTGRYSSRLYIAFAPLVVLGTLLAALVPVVGFNAVMTSEHFASFLVFIILHVVALVYYIKGLLTPRLFKVAMTFVITVGLAVCFAVAAILIALVASSPTKGWSGRSLSLLDPTYASKYIPIIASVSEHQPPTWPSYFMDINVLAFLVPAGIISCFLPLSDASSFLVLYLVTSVYFSGVMVRLMLVLAPAACILSGIALSEAFGVLTRSMKFQRPTSNDGYSTAGDGSSNTPADSEAVSKESQPKKNRKKGKDS

SEQ ID NO: 71298 - protein, 77 aa, Setaria italica
  Transcript Sequence Number=SeqID_5324
  Pfam annotation: Domain name=Pirin_C; Domain location=2-59; Score= -4.5; E_value=9.9e-05; Accession=PF05726.5; Description=Pirin C -terminal region
GGDGDGVDVRAEAAGAGARVMLVAARPHGEAVVRDGPFVMNTREEVEQAREDFRHRRNGFEMADGWTSDHAATTAAR

SEQ ID NO: 71299 - protein, 96 aa, Setaria italica
  misc_feature (82)..(82): Xaa can be any naturally occurring amino acid
  Transcript Sequence Number=SeqID_5325
  Gene Ontology: Mol. function=DNA binding; Cellular component=nucleus
SWATQDDIKPVDAHSSPVVALQSVDNDVEILEYLSSSVNRQSDTTCSTSGSDTCRKSLRNRPPIDYSRFDLVADDDSDAEVXEKGASSARHRQQFP

SEQ ID NO: 71300 - protein, 41 aa, Setaria italica
  Transcript Sequence Number=SeqID_5326
RAAEEAGVALPLPDMLKATDEELRRMIEKEKRLQEQTEATD

SEQ ID NO: 71301 - protein, 86 aa, Setaria italica
  misc_feature (27)..(27): Xaa can be any naturally occurring amino acid
  Transcript Sequence Number=SeqID_5327
  Subcellular localization annotation: CTP_CleavageSite=44; ConfidenceScore=5.30e-01
LTSERSSRTRSRRSTPRRLLPRQTAKXLFLTAAPGLPRMARRVQAEMTACMRESRWRQWAEAAALGPAMEKEWRRRRFGADGLQWK

SEQ ID NO: 71302 - protein, 75 aa, Setaria italica
  Transcript Sequence Number=SeqID_5328
SSSEIAIINPSCAPRYCDQIFTGSLDLEHKAKDHSQIKPAVQSQSGRAGLLPRTCHCMSANSQMKQSVLVLKFRL

SEQ ID NO: 71303 - protein, 114 aa, Setaria italica
  misc_feature (88)..(88): Xaa can be any naturally occurring amino acid
  Transcript Sequence Number=SeqID_5329
  Gene Ontology: Cellular component=integral to membrane
  Homolog annotation: Hit_ID=O04347; Match level="QueryCoverage=68%, HitCoverage=39%, E-value=8e-31, Identity=82%"; Hit description =Putative integral membrane protein
  Pfam annotation: Domain name=TPT; Domain location=1-79; Score=15.6; E_ value=7.6e-05; Accession=PF03151.8; Description=Triose-phosphate Transporter family
LLLFHLQFFIVLSCLISVSVNFSTFLVIGKTSPVTYQVLGHLKTCLVLTFGYVLLHDPFSWRNILGILIAVVGMVLYSYFCTVETQQXNTEVSPQQIKGAASLSFTCCGETSGE

SEQ ID NO: 71304 - protein, 379 aa, Setaria italica
  Transcript Sequence Number=SeqID_5330
  Gene Ontology: Cellular component=integral to membrane
  Homolog annotation: Hit_ID=Q9FWG4; Match level="QueryCoverage=79%, HitCoverage=80%, E-value=1e-87, Identity=55%"; Hit description =Putative glucose-6-phosphate/phosphate-translocator
  Pfam annotation: Domain name=DUF6; Domain location=154-321; Score =4.0; E_value=0.045; Accession=PF00892.12; Description=Integral membrane protein DUF6
  Pfam annotation: Domain name=Nuc_sug_transp; Domain location=114-297; Score=-172.6; E_value=0.047; Accession=PF04142.7; Description =Nucleotide-sugar transporter
  Pfam annotation: Domain name=TPT; Domain location=179-321; Score =170.2; E_value=6.2e-48; Accession=PF03151.8; Description=Triose -phosphate Transporter family
  Pfam annotation: Domain name=UAA; Domain location=37-327; Score= -142.6; E_value=0.0032; Accession=PF08449.3; Description=UAA transporter family
  Pfam module annotation: Pfam domain module=DUF6::Nuc_sug _transp::TPT::UAA; Domain location=154-321::114-297::179-321::37-327
LESFDLWGAFVGLLVGGGAFGERRRWGVGGEKFQLGTVGALSLSVVSSVSIVICNKALMSSLGFNFATTLTSWHLLVTFCSLHVALWMKFFEHKPFDSRTVMGFGVLNGISIGLLNLSLGFNSVGFYQMTKLAIIPCTVILETLFFRKKFSRSIQMSLSVLLLGVGVATVTDLQLNAVGSTLSLLAIITTCIAQIMTNTIQKKFKVSSTQLLYQSCPYQSLTLFLIGPFLDGFLTNQNVFAFNYTSQVVFFIVLSCLISVSVNFSTFLVIGKTSPVTYQVLGHLKTCLVLTFGYVLLHDPFSWRNILGILIAVVGMVLYSYFCTVETQQKNTEVSPQQVKESEAAPLISDSLSKVENGGGVADDEPLKVPMWSSKYSRE

SEQ ID NO: 71305 - protein, 85 aa, Setaria italica
  Transcript Sequence Number=SeqID_5331
STEPSYRGCKLVSFAAFCEATGTLFFVMADWVVALDRTTGRLQRLWRNADVSRPLGDVYPCEMLQWPPVLKDLGETHDHEAGGVC

SEQ ID NO: 71306 - protein, 241 aa, Setaria italica
  misc_feature (2)..(2): Xaa can be any naturally occurring amino acid
  Transcript Sequence Number=SeqID_5332
  Gene Ontology: Mol. function=4 iron, 4 sulfur cluster binding; Cellular component=nucleus; Biological process=base-excision repair
  Homolog annotation: Hit_ID=B3W6G6; Match level="QueryCoverage=100%, HitCoverage=12%, E-value=6e-52, Identity=48%"; Hit description =Putative transcriptional activator DEMETER
PXKNVPDINSSIILLQSIPTDFTENLLSSPPASLRQKQMANQLLTGYERPEYPMTQTQGFERLYTRNGVTADQMPGSYILASNRKTPANTEQNSVMENLNQLVTTDDHLRITGPYRYTGAAPRSHASQDSSHIHAMDSRRGKTASNDAQTMLGTNFSHQNNGLASVNAWHSTIPEASYFPEIYKRMRLNNHDYRLNGAVDNCSSSSPYLCNSENANLVPAVNSNVCTLADAQRLIAHEKSR

SEQ ID NO: 71307 - protein, 85 aa, Setaria italica
  Transcript Sequence Number=SeqID_5333
  Gene Ontology: Mol. function=catalytic activity; Biological process =trehalose biosynthetic process
  Homolog annotation: Hit_ID=B6SH67; Match level="QueryCoverage=97%, HitCoverage=9%, E-value=9e-38, Identity=89%"; Hit description =Trehalose 6-phosphate synthase
IVNAVRDGMNLIPYEYTVCRQGNEDIDKLRGSDKSSLHTSTLIVSEFVGCSPSLSGAFRVNPWSVEDVADALYSATDLTQFEKIQ

SEQ ID NO: 71308 - protein, 138 aa, Setaria italica
  misc_feature (46)..(46): Xaa can be any naturally occurring amino acid
  Transcript Sequence Number=SeqID_5334
EESSTDIKLKESGLLAKITTDQPLPRPQVPPNSKLPCGAAACMLCXAYLREQARLPLHIFLQAAKMSVAVCRGPVMTTFEAPSWLRPVETYKKPEVVVDDRPAQLDVWNAIQAADVDKAAKKASKPYVHPLVRRSSSL

SEQ ID NO: 71309 - protein, 102 aa, Setaria italica
  misc_feature (89)..(89): Xaa can be any naturally occurring amino acid
  Transcript Sequence Number=SeqID_5335
  Homolog annotation: Hit_ID=B6U372; Match level="QueryCoverage=100%, HitCoverage=76%, E-value=3e-21, Identity=54%"; Hit description=Tat pathway signal sequence family protein
  Subcellular localization annotation: CTP_CleavageSite=63; ConfidenceScore=5.80e-01
MAMASLQVASIPPLLPSRNGCASTRPRVAAFAFSCKYNQSANAQGRTRFRNHITRRDTLSFMSSAMLAALLVASPAEARTSRLENKRKXMEKLERLREKALG

SEQ ID NO: 71310 - protein, 129 aa, Setaria italica
  Transcript Sequence Number=SeqID_5336
  Homolog annotation: Hit_ID=B6U372; Match level="QueryCoverage=92%, HitCoverage=90%, E-value=1e-22, Identity=52%"; Hit description=Tat pathway signal sequence family protein
  Subcellular localization annotation: CTP_CleavageSite=61; ConfidenceScore=5.75e-01
RRKDNLSSTALPPSPRNGCASTRPRVAAFAFSCKYNQSANAQGRTRFRNHITRRDTLSFMSSAMLAALLVASPAEARTSRLENKKKAMEKLERLREKALGPKGKNGSTRKEMPPPANLLIPPAAVEASL

SEQ ID NO: 71311 - protein, 76 aa, Setaria italica
  Transcript Sequence Number=SeqID_5337
MEEFTFPSVPFEHCNAAPHFASPSPWLVVPGGVVDTAAHEYDHRRSFSAVEQQTAAGSDHHHHLGGYDGHHHGSAR

SEQ ID NO: 71312 - protein, 102 aa, Setaria italica
  misc_feature (29)..(29): Xaa can be any naturally occurring amino acid
  Transcript Sequence Number=SeqID_5338
  Gene Ontology: Mol. function=binding
MHPNVVLGASVSLVAYFCTECDKRISLLXNKISDSYKLLAKILLFCLGEAIVFAKLVHEIGYLSENGSSNDVIGWSSFRQCIQVIQGSLHSTNIQLCTEGAN

SEQ ID NO: 71313 - protein, 1347 aa, Setaria italica
  misc_feature (103)..(103): Xaa can be any naturally occurring amino acid
  misc_feature (553)..(553): Xaa can be any naturally occurring amino acid
  misc_feature (770)..(770): Xaa can be any naturally occurring amino acid
  misc_feature (797)..(797): Xaa can be any naturally occurring amino acid
  Transcript Sequence Number=SeqID_5339
  Gene Ontology: Mol. function=binding
  Homolog annotation: Hit_ID=UPI0001A7B1EE; Match level="QueryCoverage =83%, HitCoverage=50%, E-value=0.0, Identity=45%"; Hit description =SWEETIE (SWEETIE); binding
KPILGETEISTAQRRAACEGLGLLARVGNDIFTARMARSLLGELVTATDLSYTASVAFSLGCIHRSAGGMALSTLVTPTVSSLSHLSKSSNSNLQLWSLHALXLTIEAAGLSYVSQVQGTLFLAMEILLLEENGYGDLRQGIGHLINAIVAVLGPELAPGSTFFSRCKSVIAEISSSNEMATLLESVRFAQQLVLFASQAVPVHSHVQGLIPTLYSRQPSLRYLAVSTLRHLIERDPAAMIDENIEENLFSMLDEETDSEIAMLVRSTIIRLLYTSCPLRPSRWLTVLRNMVLATSITRNTGEVLSSSGQNPTDSTSENDVYYGEDEDNMISSSKQEQVHRAASISSQFPQRNKHLRYRTRVLAAECVSHVPIAVGAEPAHFDLLLARSAIAKGTYLSNDWLVLKLQELVSLSYQISTGQFEGMQPIGVKLLCLIMDKFGMAVDPEFPGHILLEQFQAQLVSAVRTAISTASGPLLLEAGLELATRVMTSSVIGGDRVALNRLFSLISRPLSDIEGLFYPSFADWVVCKIKVRLLTAHAAVKCYTYQFLRMKXNAPDEYQQLAPSLVNSSTLLGKYWIGVLKDYVSISFGLHSKINYKPFLDGIQSLLVSSKVQKYLEEVWALILQATALDAAPMEFDMNKSDGLLEQTFISGHCMVKLDRTEFEFLWGLSILVLFHARQSVENSTLKISLDFRHDKNFGGFIVHGLDDKKPCDQVLPVLLSLTTEVFFSNNFLSVDICQELLQALTYADSSSAPIIRLFTQIIRLCPDXFFEVEAFVSAALELFSRYLSMILQCRXGSSQKHPSNTLISELSIASETMACRMKGEHLWKLMILLVSTSQQSFQQVSTNLCLSNIISFLQNILPLMRKCFTERAESDGVHMHPNVVLGASVSLVAYFCTECDKRISLLENKISDSYKLLAKILLFCLGEAIVFAKLVHEIGYLSENGSSNDVIGWSSFRQCIQVIQGSLHSTNIQVHLLGLHVLRSYAQKELTEGSESHKDSFMMLLTELLGDVFLVMQTTLKECSNKESVGVIDECSKLLFLFHTLAQSKKYQQDATTLLLEALLMVFSLSSDTVSQELAEVNIISRKLFSHFIQIPSVAIQIKDIMLSAPPERRQQLQDMVRASVSQGQITVPMNMSARSEQNVQDTNNNNPGSTADSTPEGSECCVTQGKDEKEVDDDDWDDDWDAFQSLPATAANDAVDSGENSSASSHHKQTPPENTSQGIIDEDITAGAMEDRTCSKELEEPSDLQCSSTEQQANYEFAAASHEDHVELERHPTVDCEEPLAHIEMADELLHVHEDADEASEDLNGISTEDESNNSSDISLRVDGKLVKDESREEHPVDLS

SEQ ID NO: 71314 - protein, 72 aa, Setaria italica
  misc_feature (35)..(35): Xaa can be any naturally occurring amino acid
  Transcript Sequence Number=SeqID_5340
KSILLLRIKQSSTLVGSGESNQYRSIALAAAKLTXIQSLLSELGCTSSSPPTIWCDNLGATYFLQAWRRCPI

SEQ ID NO: 71315 - protein, 100 aa, Setaria italica
  Transcript Sequence Number=SeqID_5341
  Subcellular localization annotation: CTP_CleavageSite=75; ConfidenceScore=5.34e-01
VPDPPPAGSPGCRASAGTATLAALLSHYPFLSALTVVSAATPAGDADAVLLAVAAAPAAARFSTLRLLPDSAVSPAALVAACPALSGLTSLHLTAVRPLY

SEQ ID NO: 71316 - protein, 387 aa, Setaria italica
  Transcript Sequence Number=SeqID_5342
  Gene Ontology: Mol. function=metal ion transmembrane transporter activity; Cellular component=membrane; Biological process=metal ion transport
  Homolog annotation: Hit_ID=B6SVT5; Match level="QueryCoverage=100%, HitCoverage=86%, E-value=1e-159, Identity=73%"; Hit description=GMN10
  Pfam annotation: Domain name=CorA; Domain location=55-387; Score =311.0; E_value=2.4e-90; Accession=PF01544.10; Description=CorA-like Mg2+ transporter protein
AAEGKDGRAVTTEEVMEEEEDLEVRKEGESGGASEDAARGSGRFAADYISLGIKEPVYEVIEVRSSGRMSTKKISRRQLLKSSGLRLRDTRSVDPSLWLMNSMPSLLVREQAILINLGSLRAIAMYERVLIFNYNSQGGKAFLELLLPRLNPRNINGGPAMPFQLEVVEAALLSRILRLEQRLMKIEPSVAALLEVLPNRLTADVLEQLRLSKQELVELGSRAGDLKQMLIDLLEDPHEIRRICIMGRNCTLDKLSDDMECSVPLDKQIAEEEEEEIEMLLENYLQRCESCHGQAERLLDSAREMEDSISVNLSSRRLEVSRVELLLQVGTFCVAVGALIAGIFGMNLKSYLETNAWAFWATTGGIVVGAVAGFFLMYSYLKARKIL

SEQ ID NO: 71317 - protein, 198 aa, Setaria italica
  Transcript Sequence Number=SeqID_5343
  Gene Ontology: Cellular component=nucleus
  Homolog annotation: Hit_ID=B6U4M9; Match level="QueryCoverage=99%, HitCoverage=35%, E-value=4e-86, Identity=79%"; Hit description=SET domain containing protein
NHSVSPHILHYGRVDEATKSLKFPLSRPCDAGEQCFLSYGKHPGSHLVTFYGFLPRGDNPYDVIPLDLDTSADDEDGAAQSVSTSQTTHMVRGTWLSRCRGFPTYGLPRPLLSHLRVALGCDIDESTTTEADIKENDRVVLETLLSIFNPMLEELPEPDESDGESASWDLKLALEYKNLQRRIISSIVTSCTSALGNA

SEQ ID NO: 71318 - protein, 69 aa, Setaria italica
  Transcript Sequence Number=SeqID_5344
RCHYGSFVSPVRLIIHKGGELSNLKYSTFGGKIINVMAVQFQESEYSRSQQSEQQIQVAPLSTTSYIQN

SEQ ID NO: 71319 - protein, 192 aa, Setaria italica
  Transcript Sequence Number=SeqID_5345
  Gene Ontology: Mol. function=metal ion binding
  Homolog annotation: Hit_ID=B6SVN2; Match level="QueryCoverage=83%, HitCoverage=30%, E-value=7e-51, Identity=63%"; Hit description=RING -finger protein like
FESNVSSNVAPFNPSEYHSRSNWPSLEGSSITGTNGFNSMAVHPEPAQRASYTFPTTHIGHSWMSQAANGIADGVPQWEYINATTNVQGRFAHSGATEMANGGFHEYQNGPSAVDKGLAFECDQADYELACHASHAGGNKVQVPYKQLKGHSDIHGSLHLPFLWLLNGQICLLKAKHFKPYHSSKELRIPFS

SEQ ID NO: 71320 - protein, 521 aa, Setaria italica
  Transcript Sequence Number=SeqID_5346
  Gene Ontology: Mol. function=metal ion binding
  Homolog annotation: Hit_ID=B6SVN2; Match level="QueryCoverage=100%, HitCoverage=100%, E-value=0.0, Identity=78%"; Hit description=RING -finger protein like
  Pfam annotation: Domain name=zf-C3HC4; Domain location=468-508; Score= 29.1; E_value=1.8e-05; Accession=PF00097.17; Description=Zinc finger, C3HC4 type (RING finger)
MAFRNMVCTPQVIDLTSERGQTRGGNDSEISEQGAQHAVRVVGNATNIGLSDMRSYYDANINHQHQPVHNPPPSLGVDSGFVFTSTMYNPSLASTSMNRYASHAQSFVSGNQPLPLNPVPGSMDENSRNDSTGESARGHIKRKNAAVAGSYHFVNGFASSSSSSHAPQNPMLRPWDPSFESNVSSNVAPFNPSEYHSRSNWPSLEGSSITGTNGFNSMAVHPEPAQRASYTFPTTHIGHSWMSQAANGIADGVPQWEYINATTNVQAGRFAHSGATEMANGGFHEYQNGPSAVCRGPVPYFPQHAMHGMRAHNLLDHTQMQVPYQQCHNNGVLHGGVNYSGNHLHIGPRIPVLFSSSERTFGLPHHPFLANPVNHQNIRILPPEHATMMDFSRLYEVPNSVDEHRDMRLDIDSMTYEELLALEEQIGDVNTGLTKNHIVDKLRTSLYVPGTSSTSDQPSKSSLENDACIICQEEYQVKDCIGTLDCGHSYHAECVKQWLMVKNLCPICKTTALSAHRRHGQ

SEQ ID NO: 71321 - protein, 148 aa, Setaria italica
  Transcript Sequence Number=SeqID_5347
  Gene Ontology: Cellular component=integral to membrane; Biological process=response to stress
  Homolog annotation: Hit_ID=B6SRB1; Match level="QueryCoverage=98%, HitCoverage=96%, E-value=7e-56, Identity=78%"; Hit description=HVA22- like protein e
  Pfam annotation: Domain name=TB2_DP1_HVA22; Domain location=4-101; Score=178.3; E_value=2.2e-50; Accession=PF03134.11; Description =TB2DP1, HVA22 family
MGKLWTILTHLHSLAGPTVMLLYPLYASVQAMESPSKLDDEQWLAYWILYSFITLMEMVLESLIYWIPIWYELKLLFIAWLVLPNFRGAAFIYDKFVREQLRKHGLTAGGGSSGKSKKDDKSSPSSSPKDKEKPKSKFLAFVTPKKVT

SEQ ID NO: 71322 - protein, 151 aa, Setaria italica
  Transcript Sequence Number=SeqID_5348
  Gene Ontology: Cellular component=integral to membrane; Biological process=response to stress
  Homolog annotation: Hit_ID=B6SRB1; Match level="QueryCoverage=100%, HitCoverage=100%, E-value=3e-59, Identity=78%"; Hit description =HVA22-like protein e
  Pfam annotation: Domain name=TB2_DP1_HVA22; Domain location=4-101; Score=178.3; E_value=2.2e-50; Accession=PF03134.11; Description =TB2DP1, HVA22 family
MGKLWTILTHLHSLAGPTVMLLYPLYASVQAMESPSKLDDEQWLAYWILYSFITLMEMVLESLIYWIPIWYELKLLFIAWLVLPNFRGAAFIYDKFVREQLRKHGLTAGGGSSGKSKKDDKSSPSSSPKDKEKPKSKFLAFVTPKKDHEAY

SEQ ID NO: 71323 - protein, 112 aa, Setaria italica
  Transcript Sequence Number=SeqID_5349
  Gene Ontology: Mol. function=intramolecular transferase activity, phosphotransferases; Cellular component=cytoplasm; Biological process=carbohydrate metabolic process
  Homolog annotation: Hit_ID=Q6ZDQ1; Match level="QueryCoverage=100%, HitCoverage=19%, E-value=1e-43, Identity=75%"; Hit description =Phosphoacetylglucosamine mutase
MAPAVCRAGILAALRSLKLAGAAVGIVITASHNPVGDNGVKIADPDGGMMAQHWEPFADALANAPDPEVLLQLVLQFVKDEGIPLGGHHRAQVLLGRDTRPTGGYLLGAALQ

SEQ ID NO: 71324 - protein, 233 aa, Setaria italica
  Transcript Sequence Number=SeqID_5350
FVSGTMNSDGYTDDGKLRTFRGPDSNVLKIQLFPQIYNKLGNLRLLQPLVQDFTQGSAFSDVGSLNASLQNPSDGVVNTTLYISYLSDYIVEISNESVVGPVSVIASIGGLYAFSVAICLCLMSQCEARIKKLRDEDTRMLKILSKRRARRNWDKVRKFVMYTWGPGYPDPTDRSGQQPEGSTVDSLHRTLHKRREPIRQATSDANRPNRVPADMGAIDIERAGEAKQPSSSR

SEQ ID NO: 71325 - protein, 69 aa, Setaria italica
  Transcript Sequence Number=SeqID_5351
KRLTYFKTSNNLSTYSNQRKAGPGSISNYITSEAIVVTGSRRIHFQKNSLDHLYSLSMHEHDNDSNNVR

SEQ ID NO: 71326 - protein, 114 aa, Setaria italica
  Transcript Sequence Number=SeqID_5352
  Gene Ontology: Mol. function=glucose-6-phosphate isomerase activity; Cellular component=cytoplasm; Biological process=gluconeogenesis
  Homolog annotation: Hit_ID=P49105; Match level="QueryCoverage=91%, HitCoverage=18%, E-value=1e-44, Identity=83%"; Hit description =Glucose-6-phosphate isomerase, cytosolic
RSIDANQTRFLEGASSIDNHFYTSSFEKNIPVLGLLRVWNVSFLGYPARAILPYSPALEKLAPHIEQLSMESNGKGISTDGVQLPLEIGEIDFGEPETNGQRSFYQIHQSRAAS

SEQ ID NO: 71327 - protein, 230 aa, Setaria italica
  Transcript Sequence Number=SeqID_5353
  Gene Ontology: Mol. function=transcription regulator activity; Cellular component=nucleus; Biological process=regulation of transcription
  Homolog annotation: Hit_ID=B9SV96; Match level="QueryCoverage=96%, HitCoverage=34%, E-value=2e-92, Identity=73%"; Hit description =Pentatricopeptide repeat-containing protein, putative
  Pfam annotation: Domain name=PPR; Domain location=126-160; Score =13.7; E_value=0.21; Accession=PF01535.12; Description=PPR repeat
  Pfam annotation: Domain name=PPR; Domain location=161-195; Score =37.3; E_value=6.1e-08; Accession=PF01535.12; Description=PPR repeat
  Pfam annotation: Domain name=PPR; Domain location=21-55; Score=19.0; E_value=0.02; Accession=PF01535.12; Description=PPR repeat
  Pfam annotation: Domain name=PPR; Domain location=56-90; Score=18.1; E_value=0.036; Accession=PF01535.12; Description=PPR repeat
  Pfam annotation: Domain name=PPR; Domain location=91-125; Score=43.8; E_value=7e-10; Accession=PF01535.12; Description=PPR repeat
  Pfam module annotation: Pfam domain module=PPR::PPR::PPR::PPR::PPR; Domain location=126-160::161-195::21-55::56-90::91-125
FAEMESTLLKMLSQNCKPDVWTMNSTLRAFGSSGQIETMENCYEKFQASGISPNIKTYNILLDSYGKAKMYEKMGAVMEYMQKYYYSWTIVTYNVVIDAFGRAGDLEQMEYIFRLMKSERIKPNCVTLCSLVRAYGRAEEVKKIKTVLRIVENSDITLDIVFFNCLVDAYGRVGCLAEMWDVLDLMKEHRCKPDKVTCTTMIKWFLVKGINDHRVQYLRDLKDGRITDDT

SEQ ID NO: 71328 - protein, 567 aa, Setaria italica
  Transcript Sequence Number=SeqID_5354
  Gene Ontology: Mol. function=glucose-6-phosphate isomerase activity; Cellular component=cytoplasm; Biological process=gluconeogenesis
  Homolog annotation: Hit_ID=P49105; Match level="QueryCoverage=100%, HitCoverage=100%, E-value=0.0, Identity=92%"; Hit description =Glucose-6-phosphate isomerase, cytosolic
  Pfam annotation: Domain name=PGI; Domain location=51-547; Score =1060.8; E_value=0; Accession=PF00342.11; Description=Phosphoglucose isomerase
MASPALICDTEQWKALQAHVGAIQKTHLRDLMADADRCKAMTAEYEGIFLDYSRQQATSETIEKLLKLAEAAKLKEKIEKMFKGEKINSTENRSVLHVALRAPRDAVINSDGVNVVPEVWSVKDKIKQFSETFRSGSWVGATGKALTNVVSVGIGGSFLGPLFVHTALQTDPEAAECAKGRQLRFLANVDPVDVARSIKDLDPETTLVVVVSKTFTTAETMLNARTLKEWIISSLGPQAVSKHMIAVSTNLKLVKEFGIDPNNAFAFWDWVGGRYSVCSAVGVLPLSLQYGFPIVQRFLEGASSIDNHFYTSSFEKNIPVLLGLLSVWNVSFLGYPARAILPYSQALEKLAPHIQQLSMESNGKGVSIDGVQLPLETGEIDFGEPGTNGQHSFYQLIHQGRVIPCDFIGVVKSQQPVYLKGETVSNHDELMSNFFAQPDALAYGKTPEQLQSEKVPEHLIPHKTFKGNRPSLSLLLPTLSAYEIGQLLSIYEHRIAVQGFIWGINSFDQWGVELGKSLASQVRKQLHGSRMEGKPVEGFNHSTSSLLARYLAVKPSTPYDTTVLPKV

SEQ ID NO: 71329 - protein, 170 aa, Setaria italica
  misc_feature (141)..(141): Xaa can be any naturally occurring amino acid
  misc_feature (147)..(147): Xaa can be any naturally occurring amino acid
  misc_feature (160)..(160): Xaa can be any naturally occurring amino acid
  Transcript Sequence Number=SeqID_5355
  Gene Ontology: Mol. function=binding
FLAAKLHERSSHNKNLTWCTSPENAMIYAPESPMYHVDDSEMKPNGLQSNISHGSLNNLSNSVLELKNADSYSTSNYSAKDGMFPQCSPRCEVRCFSNFSTKFIKKSSLSDLVSRGSMSRKFKTSTTSEDWSDVSSRWGKXSQVDFXERFENAVSKLLVXDGLESCLDAG

SEQ ID NO: 71330 - protein, 66 aa, Setaria italica
  Transcript Sequence Number=SeqID_5356
NTSESRNVTRLKKQPMIYRSISYKYLKDSILLALPPQKSTFLCRDRAWWRDMNCSFRQKTKEESSL

SEQ ID NO: 71331 - protein, 325 aa, Setaria italica
  Transcript Sequence Number=SeqID_5357
  Gene Ontology: Mol. function=molecular_function; Cellular component =cellular_component; Biological process=response to oxidative stress
  Homolog annotation: Hit_ID=B6TJ62; Match level="QueryCoverage=53%, HitCoverage=48%, E-value=4e-44, Identity=49%"; Hit description=TLD family protein
  Pfam annotation: Domain name=TLD; Domain location=180-318; Score =143.7; E_value=5.8e-40; Accession=PF07534.8; Description=TLD
  Subcellular localization annotation: CTP_CleavageSite=59; ConfidenceScore=5.09e-01
AWKERVADRLARLLADSPVSPSPAPAAVGPPQAISFPAEHFTSPKKSLLSSCVLSLLPTANSGHEQNSPCSETLRPLPPESLPKRWRGSDFTWQELPLELSEESGSESARDERNSYVSKNQVHQSYRSEENSNGNEETSTSDCAGTLHYLTEKSMFVSPKLYAFFESSLPGTLKGCHWVLLYSTWKHGISLRTLLRRSENVQGPCLLIVGDMQGAVFGGLLNSPLRPTEKRKYQGTNQTFVFTTVHGEPRLFRPTGANRFYYLCLKDALAFGGGGSFALCVDEDLLHGSSGSCDTFGSSCLAYTPEFELKNVELWGFTHSWSRSK

SEQ ID NO: 71332 - protein, 175 aa, Setaria italica
  Transcript Sequence Number=SeqID_5358
  Gene Ontology: Mol. function=nucleoside-triphosphatase activity; Cellular component=membrane; Biological process=transport
  Homolog annotation: Hit_ID=B6U174; Match level="QueryCoverage=100%, HitCoverage=22%, E-value=1e-91, Identity=95%"; Hit description =ATPase, coupled to transmembrane movement of substances
  Pfam annotation: Domain name=ABC_tran; Domain location=58-175; Score=- 21.1; E_value=0.00016; Accession=PF00005.19; Description=ABC transporter
LLPFVLKFTDLTYSVKQRKKGSCLPALPFRRGGGEPAEPEAPRMKTLLDNISGEAREGEIMAVLGASGSGKSTLIDALANRIVKESLHGSVTLNGESLDSNLLKVISAYVMQDDLLYPMLTVEETLMFAAEFRLPRSLPTKEKKKRVQALIDQLGLRNAAGTIIGDEGHRGVSGG

SEQ ID NO: 71333 - protein, 103 aa, Setaria italica
  Transcript Sequence Number=SeqID_5359
  Gene Ontology: Mol. function=aspartyl esterase activity; Cellular component=cell wall; Biological process=cell wall modification
  Pfam annotation: Domain name=Pectinesterase; Domain location=1-89; Score=-125.0; E_value=4e-12; Accession=PF01095.11; Description =Pectinesterase
NTPVYLGRPWKQYSRVVVMETTMDGSVAPDGWLAWPDQPTPSTTLYYGEYRNSGAGAGTKGRVTWTGVHTSMSTADATGFTVAKFIMGDSWLGATGVRYTSGL

SEQ ID NO: 71334 - protein, 185 aa, Setaria italica
  Transcript Sequence Number=SeqID_5360
  Gene Ontology: Cellular component=chloroplast; Biological process =electron transport chain
  Homolog annotation: Hit_ID=B6U0M5; Match level="QueryCoverage=69%, HitCoverage=100%, E-value=2e-41, Identity=70%"; Hit description=PGR5
MLTSTKHSISSILAGSRTTTHQTINTIAFLPASLLLFSDEDIVAPANEVAIEGGGGGMAAAVSFSRVQALPTWSSSVSGSGDDHHSYPMLAMSARPRSRSSARPLRSPTRMMGNVNAGKGLFAPLVVVARNIIGRKRFNQLRGKAIALHSQVITEFCKTIGADAKQRQGLIRLAKKNGEKLGFLA

SEQ ID NO: 71335 - protein, 92 aa, Setaria italica
  Transcript Sequence Number=SeqID_5361
  Gene Ontology: Mol. function=ER retention sequence binding; Cellular component=integral to membrane; Biological process=protein retention in ER lumen
  Homolog annotation: Hit_ID=Q8LD89; Match level="QueryCoverage=38%, HitCoverage=12%, E-value=5e-12, Identity=97%"; Hit description =Putative ER lumen protein retaining receptor
MSERFRREAPLMATDHSPALSMVLLSEIVQTFILADFCYYYVKSVFGGQLVLRLPVRGGVKLQQDTEHTVGFFSLCPSYNATVIMLVLLVAP

SEQ ID NO: 71336 - protein, 357 aa, Setaria italica
  Transcript Sequence Number=SeqID_5362
  Gene Ontology: Mol. function=triacylglycerol lipase activity; Biological process=lipid metabolic process
  Homolog annotation: Hit_ID=B9T3A3; Match level="QueryCoverage=94%, HitCoverage=66%, E-value=5e-41, Identity=58%"; Hit description =Triacylglycerol lipase, putative
ESGVHFITTVINGADLVPTFSAASVDDLRSEVTASAWLNDLRHQIEQTRILSTFYRSASALGSRLPSMANAKARVAGAGAILRPVSTGTQVVMRRARSVAQVWLTRPALQLSSWTCIGPRRRNNVSSTSTVTSEEIRTSTSGGSESTSLLTETTVETSETVASEAIQCTASQEVHNSVAVAVDALGLVDDKVDSDEDIVDHHVDEDRMTDVELWQQLESELYSKREGDDDDIAEEMTESTIAEEVGGVAEDVLSETKEVHRFYPPGKIMHILTSSREETAHEEEPDVHQDDATNGELQSSMGIFLTPRSLYGKLRLSKMMINDHYMPIYRRNIEQLISDLEKDSPDLTGDNINNTSS

SEQ ID NO: 71337 - protein, 235 aa, Setaria italica
  Transcript Sequence Number=SeqID_5363
  Gene Ontology: Mol. function=oxidoreductase activity, acting on the CH-CH group of donors; Cellular component=integral to membrane; Biological process=lipid metabolic process
  Homolog annotation: Hit_ID=A9XUG8; Match level="QueryCoverage=100%, HitCoverage=66%, E-value=1e-105, Identity=77%"; Hit description =Trans-2-enoyl-CoA reductase
  Pfam annotation: Domain name=Steroid_dh; Domain location=55-187; Score=70.3; E_value=7.2e-18; Accession=PF02544.8; Description=3-oxo -5-alpha-steroid 4-dehydrogenase
MIRGPKYYYLPVYKFFGYEGERVIHPVQTYAMYYWCFHYFKRIMETFFVHRFSHATSPLSNVFRNCAYYWTFGAYIAYYCNHPLYTPVSELQMKIGFGFGIICQIANFYCHILLRNLRSPSGSGGYQIPRGFLFNIVTCANYTTEIYQWVGFNIATQTVAGYIFLVVAASIMTNWALGKHSRLKKASCASPDIDLLTNYYACFISLLTMLLLQLFDGKDGRPKYPRRWVILPPFL

SEQ ID NO: 71338 - protein, 236 aa, Setaria italica
  Transcript Sequence Number=SeqID_5364
  Gene Ontology: Mol. function=metal ion binding; Cellular component =plasma membrane
  Homolog annotation: Hit_ID=B6SWB7; Match level="QueryCoverage=99%, HitCoverage=34%, E-value=1e-131, Identity=94%"; Hit description =Ankyrin-like protein
  Pfam annotation: Domain name=DUF248; Domain location=1-236; Score =246.0; E_value=8.9e-71; Accession=PF03141.8; Description=Putative methyltransferase
  Pfam annotation: Domain name=Methyltransf_11; Domain location=85-180; Score=25.5; E_value=0.00022; Accession=PF08241.4; Description =Methyltransferase domain
  Pfam annotation: Domain name=Methyltransf_12; Domain location=85-178; Score=24.4; E_value=0.00046; Accession=PF08242.4; Description =Methyltransferase domain
  Pfam module annotation: Pfam domain module=DUF248::Methyltransf _11::Methyltransf_12; Domain location=1-236::85-180::85-178
LVPAPKGYKAPIPWPQSRDEVWFSNVPHTRLVDDKGGQNWITKAKDKFRFPGGGTQFIHGADQYLDQISQMVPDVAFGSHTRVVLDVGCGVASFGAYLLSRDVLTLSIAPKDVHENQIQFALERGVPAMVAAFATHRLLYPSQAFDIIHCSRCRINWTRDDGILLLEVNRLLRAGGYFAWAAQPVYKHEEAQQEAWKEMEDLTARLCWELVKKEGYIAMWRKPLNNSCYMNRDPPT

SEQ ID NO: 71339 - protein, 57 aa, Setaria italica
  Transcript Sequence Number=SeqID_5365
NLRHLIPTLKLQMLGMYTISAFPLFPQRQEPNRIPWLSYHTLASKLLKLTDLEQKCM

SEQ ID NO: 71340 - protein, 62 aa, Setaria italica
  Transcript Sequence Number=SeqID_5366
  Subcellular localization annotation: CTP_CleavageSite=39; ConfidenceScore=5.20e-01
KLGSIRCSPISGYSVQEDQQKRCLIFSGSSSSYLRRPASCSKPRSPSSSPLFFRKIHHCCID

SEQ ID NO: 71341 - protein, 109 aa, Setaria italica
  misc_feature (63)..(63): Xaa can be any naturally occurring amino acid
  Transcript Sequence Number=SeqID_5367
  Subcellular localization annotation: CTP_CleavageSite=27; ConfidenceScore=5.62e-01
QQWPQQRTGDATDGRPCGPCSSWLCSTASTAWPSSPPRRPCGCSPPSSSASSSSTASPTPPPXTRRSATSPPPAPPPPRTTAQTTGPRPPARRTISSAARKRRRRRWSR

SEQ ID NO: 71342 - protein, 142 aa, Setaria italica
  Transcript Sequence Number=SeqID_5368
ACREAWAATCWPAGLQTELHELGRKAGFLQLIGWAASLDLLLLGCCFTARLPVESSWAVRGSRPGLRCGLVQLAPPGGLRPAAGLWACCAPSACWPGSHAAPCVRRHRFVGSTWRTERKRRTPRTRTKLQFVRSLPILRGSR

SEQ ID NO: 71343 - protein, 138 aa, Setaria italica
  misc_feature (131)..(131): Xaa can be any naturally occurring amino acid
  Transcript Sequence Number=SeqID_5369
  Gene Ontology: Mol. function=nucleotide binding; Biological process =defense response
  Homolog annotation: Hit_ID=Q2R0M3; Match level="QueryCoverage=92%, HitCoverage=11%, E-value=8e-27, Identity=52%"; Hit description =Leucine Rich Repeat family protein, expressed
NLEDKNRKKLEHLNVIECSSLTQLPRGIGQLKRLQMLLGYIVSYADGNPMSELESLTNLHGLSLQSLEKVIDPLDARFARLNYKTNLESLTLQWNMDDYSNDTIPAYAVLESLQPHRRLKALEIVGYEGKXLPSWIGP

SEQ ID NO: 71344 - protein, 169 aa, Setaria italica
  misc_feature (30)..(30): Xaa can be any naturally occurring amino acid
  Transcript Sequence Number=SeqID_5370
  Gene Ontology: Mol. function=nucleoside-triphosphatase activity; Cellular component=myosin complex
  Homolog annotation: Hit_ID=Q948A2; Match level="QueryCoverage=97%, HitCoverage=10%, E-value=6e-52, Identity=70%"; Hit description =Putative myosin heavy chain
  Pfam annotation: Domain name=DUF593; Domain location=63-134; Score= -35.5; E_value=0.04; Accession=PF04576.7; Description=Protein of unknown function, DUF593
SSEILKRDKIIESLSAECAAAKSDAQKNMXQNLLLQKKLDDSLREITMLQSKRIMTAEAEKENSNLKNLVESLSMKNSVLEKELNVARKSSDDTMEKLKDVEGKCNHLQQNLDKLQEKLTNLENENHVLRQKAFNMPPVNNLAVAPKTLSEKFSASIGLPNSESKTIIV

SEQ ID NO: 71345 - protein, 83 aa, Setaria italica
  Transcript Sequence Number=SeqID_5371
  Homolog annotation: Hit_ID=C3SAC6; Match level="QueryCoverage=84%, HitCoverage=17%, E-value=2e-24, Identity=81%"; Hit description=2 -phosphoglycerate kinase
ADAAASSAAQPQPLPSRNASSKYDFVKVKVWLGDNADHYYVLSRFLLSRMLTVTKIPNHVAIKIALELKKLLVDNSLLDVSQS

SEQ ID NO: 71346 - protein, 94 aa, Setaria italica
  Transcript Sequence Number=SeqID_5372
  Gene Ontology: Mol. function=protein serine/threonine kinase activity; Cellular component=plasma membrane; Biological process =protein amino acid phosphorylation
  Homolog annotation: Hit_ID=B6SVN5; Match level="QueryCoverage=70%, HitCoverage=12%, E-value=2e-27, Identity=90%"; Hit description =BRASSINOSTEROID INSENSITIVE 1-associated receptor kinase 1
  Subcellular localization annotation: CTP_CleavageSite=21; ConfidenceScore=5.23e-01
PQHRAQVPVPPARKTPGSGMSATTSGGSERDGATPRSTGSAAGAPEVSHLGWGHWFTLRELEEATDGLAEENVIGEGGYGIVYRGTLHDSTMIA

SEQ ID NO: 71347 - protein, 367 aa, Setaria italica
  Transcript Sequence Number=SeqID_5373
  Gene Ontology: Mol. function=protein serine/threonine kinase activity; Cellular component=plasma membrane; Biological process =protein amino acid phosphorylation
  Homolog annotation: Hit_ID=B6SVN5; Match level="QueryCoverage=95%, HitCoverage=69%, E-value=0.0, Identity=90%"; Hit description =BRASSINOSTEROID INSENSITIVE 1-associated receptor kinase 1
  Pfam annotation: Domain name=Pkinase; Domain location=58-329; Score =133.0; E_value=9.7e-37; Accession=PF00069.17; Description=Protein kinase domain
  Pfam annotation: Domain name=Pkinase_Tyr; Domain location=58-329; Score=124.1; E_value=4.5e-34; Accession=PF07714.9; Description =Protein tyrosine kinase
  Pfam module annotation: Pfam domain module=Pkinase::Pkinase_Tyr; Domain location=58-329::58-329
  Subcellular localization annotation: CTP_CleavageSite=22; ConfidenceScore=5.14e-01
PPQHRAQVPVPPARKTPGSGMSATPRSTGSAAGALEVSAIGWGHWFTLRELEEATDGLAEENVIGEGGYGIVYRGTLHDSTMIAVKNLLNNRGQAEKEFKVEVEAIGRVRHKNLVRLLGYCVEGAYRMLVYEYVDNGNLDQWLHGDVGEVSPLTWDIRMNIMLATAKGLAYLHEGLEPKVVHRDIKASNILLDQQWNAKVSDFGLAKLLCSEKSYVTTRVMGTFGYVAPEYASTGMLNERSDVYSFGVLIMEIITGRSPVDYTRPAGEVNLVEWLKTMVAERKAEEVVDPKMAEKPSPKTLKRALLVALRCVDPDANKRPKMGHVIHMLEMDDLLFRDDKKAGREGSDRYSSKEDGSFSKREHHRYR

SEQ ID NO: 71348 - protein, 99 aa, Setaria italica
  Transcript Sequence Number=SeqID_5374
YLLRYNISVDSVRINAATGTTESKAQAKENIEPAGIRVSADRGAGRKPAWNKATVIYRSSVCVSLAGQLGRSSKIARPHACTRSAQVKDQDQLAATASA

SEQ ID NO: 71349 - protein, 85 aa, Setaria italica
  Transcript Sequence Number=SeqID_5375
  Gene Ontology: Mol. function=protein serine/threonine kinase activity; Biological process=protein amino acid phosphorylation
  Homolog annotation: Hit_ID=B6SUF3; Match level="QueryCoverage=100%, HitCoverage=19%, E-value=1e-25, Identity=63%"; Hit description =Serine/threonine-protein kinase Cx32
FSLVVVLLEMISGLRALDPSRQNEKVNLVNWAKPLLADRRKLSQVMDSGLEGQYSSKGALLAAQLTLKCLNGDPKSRPSMKEVVE

SEQ ID NO: 71350 - protein, 279 aa, Setaria italica
  Transcript Sequence Number=SeqID_5376
  Gene Ontology: Mol. function=protein binding
  Homolog annotation: Hit_ID=B9S8S6; Match level="QueryCoverage=100%, HitCoverage=51%, E-value=6e-63, Identity=48%"; Hit description =Protein binding protein, putative
  Pfam annotation: Domain name=BTB; Domain location=98-209; Score= -10.6; E_value=0.1; Accession=PF00651.23; Description=BTBPOZ domain
  Subcellular localization annotation: CTP_CleavageSite=63; ConfidenceScore=5.81e-01
PSQAALQKTAKSPNQQGRPRGGASPAPSKASSVQRAPTVSSEKRAQSAPTRSRTNSDEQLCPPADAVAAPDPPKVVPAPAPAPAPEKRPKQHKISVGFGQLGTSDLKVVLYGKEGVAVKMIVHKNILAENSTFFANRISRQSPVSCIEVPDCEDVEIYVETVGLMYCKDVKQRLIRQNVPRVLRILKVAESLGFRACIMSCLDYLEAVPWVGDEEENVVSSIRQLHDEDHRVNPLLRRVTSDILANPPNDTLAHIIDLVLKSTEDRGRREMKSLVLKLF

SEQ ID NO: 71351 - protein, 95 aa, Setaria italica
  misc_feature (26)..(26): Xaa can be any naturally occurring amino acid
  Transcript Sequence Number=SeqID_5377
  Gene Ontology: Mol. function=aspartic-type endopeptidase activity; Cellular component=lysosome; Biological process=sphingolipid metabolic process
  Homolog annotation: Hit_ID=P42211; Match level="QueryCoverage=100%, HitCoverage=19%, E-value=4e-41, Identity=88%"; Hit description =Aspartic proteinase
CEGLVCNGECKLCHQISKMPKLAFTXIANKTFTLTPEQYIVKLEQGGQTVCISGFMAFDIPPPRGPLWILGDVFMGAYHTVFDFGKDRIGFAKSA

SEQ ID NO: 71352 - protein, 224 aa, Setaria italica
  misc_feature (55)..(55): Xaa can be any naturally occurring amino acid
  misc_feature (218)..(218): Xaa can be any naturally occurring amino acid
  Transcript Sequence Number=SeqID_5378
  Gene Ontology: Mol. function=aspartic-type endopeptidase activity; Cellular component=lysosome; Biological process=sphingolipid metabolic process
  Homolog annotation: Hit_ID=P42211; Match level="QueryCoverage=77%, HitCoverage=35%, E-value=6e-87, Identity=85%"; Hit description =Aspartic proteinase
  Pfam annotation: Domain name=Asp; Domain location=51-224; Score=78.7; E_value=2.1e-20; Accession=PF00026.15; Description=Eukaryotic aspartyl protease
HLEEGTREVGAPGVEDDGEVLRRLSCCLASFAAARASPSSRFLLRLTLSSQYFGXVGIGTPPQNFTVIFDTGSSNLWVPSSRCYFSIACYFHHRYYSRKSSTYKADGETCKITYGSGAIAGFFSKDNVLVGDLVVKSQFIETTRETSVSFILGKFDGILGLGYPQISVGKAPPIWQSMQEQKLLADNVFSFWLNRNPEASSGGELVFGGVDPKHFKGXHTYVPV

SEQ ID NO: 71353 - protein, 146 aa, Setaria italica
  Transcript Sequence Number=SeqID_5379
  Gene Ontology: Mol. function=serine-type endopeptidase activity; Cellular component=extracellular region; Biological process=negative regulation of catalytic activity
  Homolog annotation: Hit_ID=B9SC84; Match level="QueryCoverage=95%, HitCoverage=35%, E-value=3e-26, Identity=45%"; Hit description =Cucumisin, putative
KLMCAMNFTAEQIRTVAQTSSSYAVDCAGASLDLNYPSFIALFNPDGSGAGERTFTFTRTVTNVGGVPASYSAKVVGLKGLTVAVTPDRLVFNGKNEKQKYTLVIRGQMNSNTGDVLQGSLTWVDDAGKYTVRSPIVATTARSQLL

SEQ ID NO: 71354 - protein, 186 aa, Setaria italica
  misc_feature (121)..(121): Xaa can be any naturally occurring amino acid
  Transcript Sequence Number=SeqID_5380
  Gene Ontology: Mol. function=ATP binding; Cellular component =chloroplast; Biological process=apoptosis
  Homolog annotation: Hit_ID=B9SLI9; Match level="QueryCoverage=93%, HitCoverage=46%, E-value=3e-14, Identity=26%"; Hit description =Protein binding protein, putative
TGNYNCRVAELTRLDKLKKLSVYIGSKVTVIEDELIELENIKGLRVLKITWAVSLSKKERVHQTYDSTSLLTSLSLPLYLEKLDLRCFPGEKIPDWLSPSKLLRLKRLYFTGGMLNTFGEXNMSEVWNIEVLRLKFLNDLSVQWIQVLDIFPKLTFLEVFRCMKLKSFPCDKDGVWMNYDMQEVNK

SEQ ID NO: 71355 - protein, 90 aa, Setaria italica
  Transcript Sequence Number=SeqID_5381
  Pfam annotation: Domain name=GRP; Domain location=3-79; Score=-20.8; E_value=0.011; Accession=PF07172.3; Description=Glycine rich protein family
MAMAVHVRKPICALLLIAFLCLSCSVSAHSHFDDDYGPGGYGHGPKGYGHGPRFGRGPFGRDCRFGRCRGGGGGFGGGGGAGGRLPRPKP

SEQ ID NO: 71356 - protein, 162 aa, Setaria italica
  Transcript Sequence Number=SeqID_5382
  Gene Ontology: Mol. function=sucrose synthase activity; Biological process=sucrose metabolic process
  Homolog annotation: Hit_ID=B9SJX1; Match level="QueryCoverage=96%, HitCoverage=18%, E-value=2e-48, Identity=56%"; Hit description =Sucrose synthase, putative
SNNLSFKRTDSIADGMPDALRQSRYQMKRCFQRYLSKGKRLLKNQQLLEELEKALDDKVEKEKLVEGFLGYIICSTPEAVVLPPYVAFAVRMNPGIWEYVKVHSDDLSVEGITPSEYLKFKETLYDENWAKDDNSLEVDFGALDLSTPHLTLPSSIGNGLQF

SEQ ID NO: 71357 - protein, 102 aa, Setaria italica
  Transcript Sequence Number=SeqID_5383
PPPDREGNRDRSEEGSAERGTDRWRYARRRRGRGWRREPPSLPMEVGLLGGTCTLQGGGHGVTHTASSTSGVRRRRRGTGNWEGLLGAGGSAYFRARSGSNR

SEQ ID NO: 71358 - protein, 79 aa, Setaria italica
  Transcript Sequence Number=SeqID_5384
SRYQTVHGKKGLLVLIAMNMWHVFVCYIFAHELLLLASLLINYRQLGTGTTVLYCDFFRICHQAFTLLFYITSSIIISS

SEQ ID NO: 71359 - protein, 187 aa, Setaria italica
  Transcript Sequence Number=SeqID_5385
  Gene Ontology: Mol. function=DNA binding; Biological process =regulation of transcription
  Homolog annotation: Hit_ID=B6TAB0; Match level="QueryCoverage=100%, HitCoverage=70%, E-value=4e-85, Identity=85%"; Hit description=Myb family transcription factor-related protein
  Pfam annotation: Domain name=Myb_DNA-binding; Domain location=43-94; Score=49.2; E_value=1.6e-11; Accession=PF00249.23; Description=Myb -like DNA-binding domain
MFPPGLIHHRPDGPAPGDGAPRSGPGGGPGGPSLVLTADPKPRLRWTADLHERFVDAVAQLGGPEKATPKTILRTMGVKGLTLFHLKSHLQKYRLGKQSGKEGSEQSKDASYLLDAQSGMSVSPRVAAQDVKESQEVKEALRAQMEVQRRLHEQVEVQKRVQIRMEALQKYIDSILESACKMVTEQF

SEQ ID NO: 71360 - protein, 197 aa, Setaria italica
  Transcript Sequence Number=SeqID_5386
  Gene Ontology: Mol. function=DNA binding; Biological process =regulation of transcription
  Homolog annotation: Hit_ID=B6TBR6; Match level="QueryCoverage=76%, HitCoverage=58%, E-value=1e-54, Identity=76%"; Hit description=Myb family transcription factor-related protein
MYILCEMVCNCLPYVLVLSVFLRQKVKLVLLLTSDLCFWIIFPQIAASYLLDAQSGMSVSPRVAAQDVKESQEVKEALRAQMEVQRRLHEQVEVQKRVQIRMEALQKYIDSILESACKMVTEQFASSGFSISDPDLPEISPGGVMCGPTDTLSSSVFNQLSVSSIDSHSPGGKPSPSGIEGPPMLLQKSPELKRRSS

SEQ ID NO: 71361 - protein, 80 aa, Setaria italica
  Transcript Sequence Number=SeqID_5387
AAANSQSMDWGFQLELYFTLPGGTPRPLRGSARASEEQERRGGRGLIDLIRIALRGCGLRLPDTDSSTARSETFLLAAAV

SEQ ID NO: 71362 - protein, 81 aa, Setaria italica
  misc_feature (19)..(19): Xaa can be any naturally occurring amino acid
  Transcript Sequence Number=SeqID_5388
  Subcellular localization annotation: CTP_CleavageSite=75; ConfidenceScore=5.71e-01
TPAAAPVPAPTPTPTPAPXPAPTPAPTPAPTPAPTSAPTPAPTPAPTPAPVPTPAPAPSQGPCPSGFPNLAALVLAEAGVP

SEQ ID NO: 71363 - protein, 87 aa, Setaria italica
  Transcript Sequence Number=SeqID_5389
  Gene Ontology: Mol. function=catalytic activity; Biological process =metabolic process
  Homolog annotation: Hit_ID=Q7F1X5; Match level="QueryCoverage=88%, HitCoverage=14%, E-value=1e-25, Identity=79%"; Hit description=4 -coumarate--CoA ligase-like 5
  Subcellular localization annotation: CTP_CleavageSite=61; ConfidenceScore=5.59e-01
MAEQPPPGGIDPRSGFCAATRTFHSLRPSSTLPPDSLPATATAYAFSTLRSPLPDRPALVDAATGIAVSYPSFLAAVRSLAGGLWSA

SEQ ID NO: 71364 - protein, 54 aa, Setaria italica
  Transcript Sequence Number=SeqID_5390
EVTAGHNIHSCSTNNLTMQYHRCVGTIILTVNTSTTNKVTISFLCFYQIPICTI

SEQ ID NO: 71365 - protein, 64 aa, Setaria italica
  misc_feature (11)..(11): Xaa can be any naturally occurring amino acid
  misc_feature (36)..(36): Xaa can be any naturally occurring amino acid
  Transcript Sequence Number=SeqID_5391
  Gene Ontology: Mol. function=UDP-3-O-[3-hydroxymyristoyl] N -acetylglucosamine deacetylase activity; Biological process=lipid A biosynthetic process
EDEPCRHKILXLIGDFSLLAQNGNQGFPIAHIIAYXAGHALHTDFLRHLCGRITVDQEEVARQC

SEQ ID NO: 71366 - protein, 229 aa, Setaria italica
  Transcript Sequence Number=SeqID_5392
  Gene Ontology: Mol. function=hydrolase activity, acting on ester bonds; Cellular component=plasma membrane; Biological process =metabolic process
  Homolog annotation: Hit_ID=Q7F2F1; Match level="QueryCoverage=92%, HitCoverage=36%, E-value=2e-88, Identity=73%"; Hit description =P0402A09.15 protein
  Pfam annotation: Domain name=Phosphoesterase; Domain location=1-99; Score=-84.0; E_value=7.1e-05; Accession=PF04185.6; Description =Phosphoesterase family
APASPQWNQTLLIVTYDEHGGFYDHVATPTAGVPSPDGIRGPPPFFFKFDRLGVRVPTIMISPWIKKGTVVGRPAGPTDTSEFEHSSIPATLKKIFNLSSDFLTKRDAWAGTFEHIFTELDQPRTDCPETLPEVPFERPTPPNEHGWLSDFQRELVELASFLNGDYMLTSLAQETRRKKMTVKQADAYVRRAITGFLQASKQAVRLGANESAIVTMRSSLTSKTTTRSP

SEQ ID NO: 71367 - protein, 153 aa, Setaria italica
  misc_feature (116)..(116): Xaa can be any naturally occurring amino acid
  misc_feature (134)..(134): Xaa can be any naturally occurring amino acid
  Transcript Sequence Number=SeqID_5393
  Gene Ontology: Mol. function=zinc ion binding; Cellular component =nucleus; Biological process=regulation of transcription, DNA -dependent
  Homolog annotation: Hit_ID=Q53M07; Match level="QueryCoverage=84%, HitCoverage=20%, E-value=4e-14, Identity=34%"; Hit description =Transposon protein, putative, unclassified
  Pfam annotation: Domain name=SWIM; Domain location=77-113; Score =28.7; E_value=2.3e-05; Accession=PF04434.9; Description=SWIM zinc finger
KELEEDTRCLQKPPACIIKHSDILNHAAKVYTHRIYKLFETDFLDGCGATKFKELPCEDNNTHQFEMTMQGRGSRVCTVRLNMSTMELSCSCSKFETMGLLCPHALKALSIKNICXIPESYILKRWTKDAKKWXFNPKRIIESSYQDSMDDDD

SEQ ID NO: 71368 - protein, 88 aa, Setaria italica
  Transcript Sequence Number=SeqID_5394
  Gene Ontology: Mol. function=nucleic acid binding; Cellular component= ribonucleoprotein complex
  Homolog annotation: Hit_ID=B9S9X4; Match level="QueryCoverage=100%, HitCoverage=26%, E-value=3e-30, Identity=70%"; Hit description =Heterogeneous nuclear ribonucleoprotein A1, putative
  Pfam annotation: Domain name=RRM_1; Domain location=16-84; Score =78.5; E_value=2.5e-20; Accession=PF00076.14; Description=RNA recognition motif. (a.k.a. RRM, RBD, o
MAGKTKEFDGASPAKIFIGGLSKDTSMGTFKEHFGKYGDITDAVIMKDRYTQKPRGFGFITFADPAVVDRVIEDEHVINGKPVEIKRT

SEQ ID NO: 71369 - protein, 149 aa, Setaria italica
  Transcript Sequence Number=SeqID_5395
  Homolog annotation: Hit_ID=Q7XTT5; Match level="QueryCoverage=90%, HitCoverage=17%, E-value=5e-66, Identity=91%"; Hit description =OSJNBa0058K23.19 protein
  Pfam annotation: Domain name=SAPS; Domain location=1-149; Score= -153.3; E_value=8.7e-06; Accession=PF04499.7; Description=SIT4 phosphatase-associated protein
EVLIRLIGADETMYSSYADSMQWLDDIKVLEMIVDKFSTSDSPEVHANAAEILCAVTRYAPPALAAKISSPSFVGRLFQHAFEDSRPKSVLVHSLSVCISLLDPKRLVSASYQAFRSQLSHGTLVTASPETVNGMLDSLGDLLKLLDVS

SEQ ID NO: 71370 - protein, 187 aa, Setaria italica
  Transcript Sequence Number=SeqID_5396
  Homolog annotation: Hit_ID=B6T6D7; Match level="QueryCoverage=100%, HitCoverage=100%, E-value=2e-73, Identity=80%"; Hit description=MIR -interacting saposin-like protein
MEPRAAIHRSVALILLAAIFAAAASSASAIGDKCAACKAVAAELEIGISSEKPRNHLDLRNRLNSKGQREGKVIDYRVSELRVVELLDDLCDKMQDYTLQKLESGGKGWVKVTDWNSFQTEKKAAARAHSKNLSTFCGRLLEETEDELSEWIKTSSSESESVSKALCEDISKHCRSTSATIQIDDEL

SEQ ID NO: 71371 - protein, 108 aa, Setaria italica
  misc_feature (7)..(7): Xaa can be any naturally occurring amino acid
  Transcript Sequence Number=SeqID_5397
PECVEWXEEEAEPGGVVEKDTTAPDFEVENEKQLHSMDDVMPCEAKLGEVKESDNSSGSSAPETTAEAVLPVSSDSDSIKHPEPVGESTVSEYPLGGQNQEEDENKRE

SEQ ID NO: 71372 - protein, 744 aa, Setaria italica
  Transcript Sequence Number=SeqID_5398
  Gene Ontology: Mol. function=protein phosphatase binding; Cellular component=cytoplasm; Biological process=regulation of phosphoprotein phosphatase activity
  Homolog annotation: Hit_ID=Q7XTT5; Match level="QueryCoverage=99%, HitCoverage=93%, E-value=0.0, Identity=72%"; Hit description =OSJNBa0058K23.19 protein
  Pfam annotation: Domain name=SAPS; Domain location=80-440; Score =441.9; E_value=9.5e-130; Accession=PF04499.7; Description=SIT4 phosphatase-associated protein
RDKVQVEQLLRYIVEEAPEDAEKKRIFRFPFIACEIFTCEVDVIMKTLVEDEDLMNLLFSFLQSDHPHGTLSAGYFAKVVICLMMRKTLPLVSYVQGHPEIVSQLVDLIGITSIMEVLIRLIGADETMYSSYADSMQWLDDIKVLEMIVDKFSTSVSPEVHANAAEILCAVTRYAPPALAAKISSPSFVGRLFQHAFEDSRPKSVLVHSLSVCISLLDPKRLVSASYQAFRSQLSHGTLVTASPETVNGMLDSLGDLLKLLDVSSAENVLPTTYGSLQPPLGKHRLKIVEFISVLLSIGSEAAEARLIHLGAIKRAIDLFFEYPFNNFLHHHVENIIGSCLESKQDQLIGHVLDECKLVTRILEAEKNSALSTDLTKHTLSAEGKSPPRIGIVGHMTRIANKLLQLANTNTMVQSHLQQNSGWIEWHASILTKRNVLENVYQWACGRPTSLQDRGRDSDDEDFRDRDYDVAALASNLSQAFKYGIYSNEDIDEAQASLERDDEDVYFDDESAEVVISSLRLGDEQDSSSLFTNSNWFAFDEDKALNDGSVSSEASPSPNSEISAPKLDDETDEVILGEVIDDTKGSESSLPDTKGSEPPLAVSNKDINEEFGHTVLANGTIDKLEDDIRPPTPDVKESQPECVEWREEEAEPGGVVEKDTTAPDFEVENEKQLHSMDDVMPCEAKLGEVKESDNSSGSSAPETTAEAVLPVSSDSDSIKHPEPVGESTVSEYPLGGQNQEEDET

SEQ ID NO: 71373 - protein, 147 aa, Setaria italica
  misc_feature (27)..(27): Xaa can be any naturally occurring amino acid
  misc_feature (61)..(61): Xaa can be any naturally occurring amino acid
  Transcript Sequence Number=SeqID_5399
  Gene Ontology: Mol. function=glycerol-3-phosphate O-acyltransferase activity; Cellular component=chloroplast; Biological process =metabolic process
  Homolog annotation: Hit_ID=B6U8X9; Match level="QueryCoverage=100%, HitCoverage=31%, E-value=1e-72, Identity=89%"; Hit description =Glycerol-3-phosphate acyltransferase
  Pfam annotation: Domain name=Acyltransferase; Domain location=1-118; Score=17.1; E_value=2.7e-05; Accession=PF01553.13; Description =Acyltransferase
AGDRVVTDPLCKPFSMGRNLICVYSKXHMDDYPELIEMKRRSNTRSLKEMALLLRYLPLQXIGGSQLIWIAPSGGRDRPDHSTGEWYPAPFDSSSVDNMRRLLEHAGVPGHIYPLSLLCYEIMPPPQQVEKEIGEQRVISFHGVGLS

SEQ ID NO: 71374 - protein, 48 aa, Setaria italica
  Transcript Sequence Number=SeqID_5400
  Gene Ontology: Mol. function=glycerol-3-phosphate O-acyltransferase activity; Cellular component=chloroplast; Biological process =phospholipid biosynthetic process
  Homolog annotation: Hit_ID=B6U8X9; Match level="QueryCoverage=97%, HitCoverage=10%, E-value=1e-16, Identity=87%"; Hit description =Glycerol-3-phosphate acyltransferase
GFAPSGGRDRPDHSTGECYPAPFDSSSVDNMRRLLEHAGVPGHIYPLS

SEQ ID NO: 71375 - protein, 143 aa, Setaria italica
  misc_feature (69)..(69): Xaa can be any naturally occurring amino acid
  Transcript Sequence Number=SeqID_5401
  Gene Ontology: Mol. function=acyltransferase activity; Cellular component=chloroplast; Biological process=metabolic process
  Homolog annotation: Hit_ID=B6U8X9; Match level="QueryCoverage=92%, HitCoverage=29%, E-value=4e-70, Identity=93%"; Hit description =Glycerol-3-phosphate acyltransferase
  Pfam annotation: Domain name=Acyltransferase; Domain location=1-140; Score=122.2; E_value=1.7e-33; Accession=PF01553.13; Description =Acyltransferase
SASLQGHNVVLMSNHQTEADPAIIALLLEKTNPWISENIVYVAGDRVVTDPLCKPFSMGRNLICVYSKXHMDDYPELIEMKRRSNTRSLKEMALLLRGGSQLIWIAPSGGRDRPDHSTGEWYPAPFDSSSVDNMRRHNLIAQQ

SEQ ID NO: 71376 - protein, 390 aa, Setaria italica
  misc_feature (6)..(6): Xaa can be any naturally occurring amino acid
  Transcript Sequence Number=SeqID_5402
  Gene Ontology: Mol. function=glycerol-3-phosphate O-acyltransferase activity; Cellular component=chloroplast; Biological process =metabolic process
  Homolog annotation: Hit_ID=B6U8X9; Match level="QueryCoverage=95%, HitCoverage=83%, E-value=0.0, Identity=89%"; Hit description =Glycerol-3-phosphate acyltransferase
  Pfam annotation: Domain name=Acyltransferase; Domain location=139 -298; Score=165.4; E_value=1.6e-46; Accession=PF01553.13; Description= Acyltransferase
AAGGGXGPRVPAKGAVLASYTGAEEVVGPSPLVDEEELSLHIRKEVEEGNLPADVASALEELYYNYKNAVLQNGDPNAHDIMLSNMTALFDRVLLDVQNPFTFPPYHKAIREPFDYYMFGQNYIRPLVDFRNSYVGNISIFHDMEEKLRQGHNVVLMSNHQTEADPAIIALLLEKTNPWISENIVYVAGDRVVTDPLCKPFSMGRNLICVYSKKHMDDYPELIEMKRRSNTRSLKEMALLLRGGSQLIWIAPSGGRDRPDHSTGEWYPAPFDSSSVDNMRRLLEHAGVPGHIYPLSLLCYEIMPPPQQVEKEIGEQRVISFHGVGLSVTEEIKYGDITAHTKNADEGRELFANTLYNSVVNQYNILKSAIFRDHVGAASNTAISLSQPWR

SEQ ID NO: 71377 - protein, 81 aa, Setaria italica
  Transcript Sequence Number=SeqID_5403
NMLILSYGRIAGEELNRIAPAPTGAPPPWRPIILLRIRAVGQHGGRSEPARKGGGEGDAAEREEDRPARLSREPQPVSRIP

SEQ ID NO: 71378 - protein, 72 aa, Setaria italica
  Transcript Sequence Number=SeqID_5404
  Gene Ontology: Mol. function=protein binding
  Homolog annotation: Hit_ID=A2CIR7; Match level="QueryCoverage=88%, HitCoverage=12%, E-value=1e-29, Identity=100%"; Hit description =Ankyrin-repeat protein
RIWWLLRLQKQLAGMVEKASIEDVMKVLMASRKQDLHQLWTTCSHLVAKSGLPPEVLAKHLPIDVVAKIDEL

SEQ ID NO: 71379 - protein, 340 aa, Setaria italica
  Transcript Sequence Number=SeqID_5405
  Gene Ontology: Mol. function=protein binding
  Homolog annotation: Hit_ID=A2CIR7; Match level="QueryCoverage=93%, HitCoverage=63%, E-value=1e-155, Identity=89%"; Hit description =Ankyrin-repeat protein
  Pfam annotation: Domain name=Ank; Domain location=145-178; Score =18.7; E_value=0.024; Accession=PF00023.22; Description=Ankyrin repeat
  Pfam annotation: Domain name=Ank; Domain location=180-212; Score =36.3; E_value=1.2e-07; Accession=PF00023.22; Description=Ankyrin repeat
  Pfam module annotation: Pfam domain module=Ank::Ank; Domain location =145-178::180-212
LAAARSFGVEELALLTQKQLAGMVEKASIEDVMKVLMASRKQDLHQLWTTCSHLVAKSGLPPEVLAKHLPIDVVAKIDELRLKTSMSRRSPFLAHHHPHHAAGIEASSAGELDDHHKIRRMRRALDSSDVELVKLMVMGEGLNLDEALALHYAVENCSREVVKALLELGAADVNHPAGPAGKTPLHVAAEMVCPDMVAVLLDHHADPNVRTVEGVTPLDILRTLTSDFLFKGAVPGLAHIEPNKLRLCLELVQSAAMVMSREDAHTATAAVNAAPMYGEPSGGAGGAVYNASGTNSSMVNLSLDNRMVYLNLGMDAQFGKMGDGGDGDDGGSRGQGGPSS

SEQ ID NO: 71380 - protein, 162 aa, Setaria italica
  misc_feature (152)..(152): Xaa can be any naturally occurring amino acid
  Transcript Sequence Number=SeqID_5406
  Gene Ontology: Mol. function=aminoacyl-tRNA ligase activity; Cellular component=cytoplasm; Biological process=tRNA aminoacylation for protein translation
  Homolog annotation: Hit_ID=B9RP10; Match level="QueryCoverage=57%, HitCoverage=16%, E-value=1e-21, Identity=55%"; Hit description =Cysteinyl-tRNA synthetase, putative
  Pfam annotation: Domain name=tRNA-synt_1e; Domain location=85-162; Score=-195.3; E_value=0.0014; Accession=PF01406.11; Description=tRNA synthetases class I (C)
  Subcellular localization annotation: CTP_CleavageSite=59; ConfidenceScore=5.82e-01
MAAAAARRAAGLLPLLSSPSGARIPLRRALSLISPPRSNRLFSHPARPFSTSPFSASASASNGAAAERTRELHLYNTKSRKKEHFRPRAPDREVGMYVCGVTPYDDSHIGHARAYVAFDVLYRYLRYLDYEVRYVRNFTDIDDKIIARANQXGEDPFSLSKS

SEQ ID NO: 71381 - protein, 78 aa, Setaria italica
  Transcript Sequence Number=SeqID_5407
MGRRPSASNAAAVASAEPLLPSALKRGVMERCASRPDDELHWFRSCLRWVCMDHSGPCQSALSWLLFLALSVVVPAAA

SEQ ID NO: 71382 - protein, 62 aa, Setaria italica
  Transcript Sequence Number=SeqID_5408
RVAKLRQRALKHLTFGGRMLEFYGGELELGGKEFGPHDSLRFVKSDVTIDWHFLTDSDKYAI

SEQ ID NO: 71383 - protein, 64 aa, Setaria italica
  Transcript Sequence Number=SeqID_5409
AGHLKTVAGFKMGEAGEIQLQIAGIRGQEAEDDQGQRAGNGGACPATAAPRPALSKRLAWWAWF

SEQ ID NO: 71384 - protein, 52 aa, Setaria italica
  Transcript Sequence Number=SeqID_5410
QFTESVENHFSSKNHFRESIHRISRESLLSKNYLVELLLDSAENQLRSFERT

SEQ ID NO: 71385 - protein, 87 aa, Setaria italica
  Transcript Sequence Number=SeqID_5411
MQHGSGDYASSDPAGHYYPHQYAPPDSNPYPAATDASAAGAGGYVSASAPPYSVGGGYSDQPPSAPAYSQPPPPQPQYGAVGYPPYH

SEQ ID NO: 71386 - protein, 108 aa, Setaria italica
  Transcript Sequence Number=SeqID_5412
QYPEFLGVNLDNWIIPRHNVVEHLKSVGGLGDPVEMKHYVRFSRRRFYNMFVKPYPECERIFGGLVREKEEMVRRQHPTGFWKLFTPAKHEKTQEEVMNMKLLVGSLR

SEQ ID NO: 71387 - protein, 140 aa, Setaria italica
  Transcript Sequence Number=SeqID_5413
  Gene Ontology: Mol. function=structural constituent of ribosome; Cellular component=ribonucleoprotein complex; Biological process =translation
  Homolog annotation: Hit_ID=P49690; Match level="QueryCoverage=100%, HitCoverage=100%, E-value=6e-74, Identity=97%"; Hit description=60S ribosomal protein L23
  Pfam annotation: Domain name=Ribosomal_L14; Domain location=19-140; Score=193.9; E_value=4.6e-55; Accession=PF00238.11; Description =Ribosomal protein L14pL23e
MSKRGRGGTAGNKFRMSLGLPVAATVNCADNTGAKNLYIISVKGIKGRLNRLPSACVGDMVMATVKKGKPDLRKKVMPAVIVRQRKPWRRKDGVYMYFEDNAGVIVNPKGEMKGSAITGPIGKECADLWPRIASAANAIV

SEQ ID NO: 71388 - protein, 100 aa, Setaria italica
  Transcript Sequence Number=SeqID_5414
LENWFVLRCVCLILIKLGHLLLSLRACGMLIRRRSATVHTAPLTSYAQLARPITACFGSTRPPLRSAAARSSRLWQPAIASPHSSNKLLYRPLTLNAHAP

SEQ ID NO: 71389 - protein, 223 aa, Setaria italica
  misc_feature (13)..(13): Xaa can be any naturally occurring amino acid
  misc_feature (137)..(137): Xaa can be any naturally occurring amino acid
  Transcript Sequence Number=SeqID_5415
  Gene Ontology: Mol. function=two-component response regulator activity; Cellular component=nucleus; Biological process=two -component signal transduction system (phosphorelay)
  Homolog annotation: Hit_ID=Q9FRY8; Match level="QueryCoverage=98%, HitCoverage=95%, E-value=1e-51, Identity=51%"; Hit description =Response regulator 7
  Pfam annotation: Domain name=Response_reg; Domain location=7-127; Score=73.6; E_value=7.4e-19; Accession=PF00072.16; Description =Response regulator receiver domain
EEGVMRVLLVDDXPVDRRVAQLLLSSDSCAGSFHVIAVDSAKKAMEFLGLKDGKEQAIDMVLTDYCMPEMTGYDLLKAVKALNPLKPIPVIVMSSEDEPQRISRCLNAGAEDFIVKPLQSKDVQRLRNCSTARPGKXTPPCEAVAKRKPLVLPPSAIAAASPSGRRAKFVGVAMVLHSSSVELSQYFPLLLKLVVVVYAVLCVGELLHRWSSGGGCSLALWCA

SEQ ID NO: 71390 - protein, 372 aa, Setaria italica
  Transcript Sequence Number=SeqID_5416
  Pfam annotation: Domain name=DUF295; Domain location=293-347; Score =26.0; E_value=0.00016; Accession=PF03478.10; Description=Protein of unknown function (DUF295)
  Subcellular localization annotation: CTP_CleavageSite=23; ConfidenceScore=5.17e-01
MAPADRRRSRSPPSNRRRSSSPPATATSPYFPPELIPEVAKRLTSLQDFFALRAACRAYRAALPLTASNLASQAPLLLLVPHRISKPAALFHISHRRLLRFRLPRTRPDNRSGFFPLGCRVAISDSSRDSSCRELRIVHLLTGEQTRLPRPKDAFSRILLSGDLVVTWRFLGRTVQYCRHEAAGWRVASISEPYLLEGMASVRGTLYAVVTPGSPLRIPVYRLARVELSDHRNLAELVFIGGALDARILHLPDETELYLYPAECRGELIIVIAVEFDPRVYHVFQWKSGEAKWVRITSLGGCTLFFANRNFAGCLGRDHPGIRKDCMYFNDEGLWREYSLVDGSFPLSDVVYPGETLDKDFTPAGWIFPSMC

SEQ ID NO: 71391 - protein, 287 aa, Setaria italica
  Transcript Sequence Number=SeqID_5417
  Gene Ontology: Mol. function=calcium ion binding
  Homolog annotation: Hit_ID=A7ASW0; Match level="QueryCoverage=40%, HitCoverage=10%, E-value=8e-09, Identity=34%"; Hit description =Asparagine rich protein, putative
  Subcellular localization annotation: CTP_CleavageSite=21; ConfidenceScore=5.80e-01
MGNSQASPASASSSRFATASRAFSKQELDSLRTLFSSLAAQSQTSGRAISRPVFLEYYGVRGSLGERLFRLVAKESGGSDGVTFEDLIISKATYGRGTRDEVDEFIYQLCDVTGDGVLTRSDLESVLASIHETIFEENKEVGEGSNNRPFEAFLNSAVFSKDAEAVSEKSMSLSDFRNWCTLLPSLRKFLGNLLMPPDSGRPGFEVPLLHYPENISTDLLLLNKEYAWHIGGGFSQHEVQEWKLLYHSSLHGQSFNTFLGKVTNGDAQTVLIVKDTEGSVYGGYAET

SEQ ID NO: 71392 - protein, 511 aa, Setaria italica
  Transcript Sequence Number=SeqID_5418
  Gene Ontology: Cellular component=nucleolus
  Homolog annotation: Hit_ID=Q761Y3; Match level="QueryCoverage=35%, HitCoverage=59%, E-value=5e-64, Identity=71%"; Hit description=BRI1 -KD interacting protein 132 (Fragment)
  Pfam annotation: Domain name=SRP40_C; Domain location=406-505; Score =144.5; E_value=3.2e-40; Accession=PF05022.4; Description=SRP40, C -terminal domain
  Subcellular localization annotation: CTP_CleavageSite=58; ConfidenceScore=5.25e-01
MLFVPRQVALAAASSSSSSQARAAAAMAKEEPKKEKKSKSKSKAAAKENTAAAAPGPRAAVVASVAAFLEAGGFPRTLAALQSEADLEAGAWRSSPVNLEELVAKFLDSSNPTPMAVVMGSDEQGKATDGVAEDGGKKKKGKKTGAEAGESENKVSPSAHEKPSENAGGEAKEKKQKKKKDETSAANAGGDKATETVRKDDHKPDGKKKKSKKQEKEDDVEARLDKVELAIKTKFEAAENLNGDGDMSREEEPKVQDDDADKNNGAVEKEKKKKKKKDKSATETSVKTDAGAVPADADGAKGKSGVVEPVKDDNEKKAKKKRKKSDPEENVQVEGKEVAGKDSVPKPEDENKSGMEIEEGDDGKPSNENAVAGKKRKLEEVEGSNPPATVKEDNTANQSLTNGFAEDKINQDSNIKPSKRQKHSSEPKTVNPFQRVKLEDVKFADERLQDNSYWAKGGADTGYGAKAQEILGQVRGRGFRHEKTKKKRGTYRGGQIDLQTHSIKFENSDEE

SEQ ID NO: 71393 - protein, 60 aa, Setaria italica
  Transcript Sequence Number=SeqID_5419
  Gene Ontology: Cellular component=mitochondrion
  Pfam annotation: Domain name=DUF2053; Domain location=1-60; Score= -36.3; E_value=0.00036; Accession=PF09767.1; Description=Predicted membrane protein (DUF2053)
TTLLKVPENDSFDPYQELMKVFIGFIDVAGLYFALTQLTHRNISQNHKFQAVGLGWAFAD

SEQ ID NO: 71394 - protein, 258 aa, Setaria italica
  Transcript Sequence Number=SeqID_5420
  Gene Ontology: Cellular component=mitochondrion; Biological process =positive regulation of growth rate
  Homolog annotation: Hit_ID=A8NMB8; Match level="QueryCoverage=65%, HitCoverage=71%, E-value=4e-23, Identity=38%"; Hit description=Seven transmembrane domain protein, putative
  Pfam annotation: Domain name=DUF2053; Domain location=33-193; Score =344.4; E_value=2.2e-100; Accession=PF09767.1; Description=Predicted membrane protein (DUF2053)
HSASPPIVSHVRSQAPRPRRCTDAGDDGGGEMTVFHFLNCAFLTFGPHVVYYSATPLSEYDTIGTSVKAAVVYLGTALVKLVCLATLLKVPENDSFDPYQELMKVFIGFIDVAGLYFALTQLTHRNISQNHKFQAVGLGWAFADSVLHRLAPLWIGARGLEFTWEFIFQGIEANANLVMTLSLAALGSLMWLRKNKPRTLVPIIYACALLLATMPSITSYLRRSLEWQTPKVVGFELFSSLVMAFISWQLFSACQRPL

SEQ ID NO: 71395 - protein, 79 aa, Setaria italica
  misc_feature (42)..(42): Xaa can be any naturally occurring amino acid
  Transcript Sequence Number=SeqID_5421
  Gene Ontology: Mol. function=binding
TDNLASEHEQLQFDFHRAIYNLGTVLYGLAEDTMRSGKPDVXSPNELYSQSAIYVAAAHALKPNYSVYRSALRLVRSMV

SEQ ID NO: 71396 - protein, 342 aa, Setaria italica
  Transcript Sequence Number=SeqID_5422
  Gene Ontology: Mol. function=binding
  Homolog annotation: Hit_ID=C1FGK4; Match level="QueryCoverage=72%, HitCoverage=55%, E-value=9e-41, Identity=36%"; Hit description=Ph -domain-containing protein
YVNAIERNPDDPDAYYNWALVLQESADNVDPNSSSSKDALLEEACKKYAEATRLCPTLYDAYYNWAIAIADRAKMRGRTKEAEELWKQAILNYEKAVQLNWNSPQALNNWGLGLQELSAIVPARDKQTIIKTAISKFRAAIQLQFDFHRAIYNLGTVLYGLAEDTMRSGKPDVSPNELYSQSAIYVAAAHALKPNYSVYRSALRLVRSMLPLPYLKVGYLTAPPANNAIAPHKDWERSQFILNHEGLQQADASDQPPSQSPGHMDRGRKPVRINVSDIVSVSACADLTLPSGAGLCIETIHGPTFLVADSWEALDGWLDAIRLVYTIFARGKSDVLAGIITG

SEQ ID NO: 71397 - protein, 197 aa, Setaria italica
  Transcript Sequence Number=SeqID_5423
  Gene Ontology: Mol. function=binding
  Homolog annotation: Hit_ID=C1MS59; Match level="QueryCoverage=55%, HitCoverage=21%, E-value=2e-16, Identity=41%"; Hit description=Ph -domain-containing protein
RPFTMRDSLGELKEDGEAAAVGSGGGSARSAFGDGNGIGSADAEGSSYSQDSTQQFSSHHDVAMDLINSVTGVDEEGRSRQRILSFAAKRYVNAIERNPDDPDAYYNWALVLQESADNVDPNSSSSKDALLEEACKKYAEATRLCPTLYDAYYNWAIAIADRAKMRGRTKEAEELWKQAILNYEKAVQLNWNSTGQR

SEQ ID NO: 71398 - protein, 64 aa, Setaria italica
  Transcript Sequence Number=SeqID_5424
  Subcellular localization annotation: CTP_CleavageSite=45; ConfidenceScore=5.72e-01
LPPVATPSASPKSPKTPSPAAATSPSPALSPAGTTPNEDSGAGARAAGFATLVALAGAGLAVLL

SEQ ID NO: 71399 - protein, 111 aa, Setaria italica
  Transcript Sequence Number=SeqID_5425
  Gene Ontology: Mol. function=electron carrier activity; Biological process=oxidation reduction
  Homolog annotation: Hit_ID=Q6DV71; Match level="QueryCoverage=87%, HitCoverage=18%, E-value=7e-36, Identity=64%"; Hit description =Cytochrome P450 CYP709C1
  Subcellular localization annotation: CTP_CleavageSite=33; ConfidenceScore=5.22e-01
LLSAAAAAAWSSCVFDALVRLVWRPRAVARRLRAQGVRGPGYSFFDGNLSDIRRLRAAGAGVKLDVADHDFTPIAQPQFREWIPLYGRVFLYWFGSTPDICVADYAMAKQV

SEQ ID NO: 71400 - protein, 40 aa, Setaria italica
  Transcript Sequence Number=SeqID_5426
GHCKLGTWTTLNLYIAETACPTSNDNLMMHIITTKGYCLY

SEQ ID NO: 71401 - protein, 89 aa, Setaria italica
  Transcript Sequence Number=SeqID_5427
IKSMFIITTARTEKIHQCEDGKEAGSKTTARGRSIKKHIRRGVSGPLGHLEGVDGRGDGDGGEGEGGAEAGGAVGGGGGRRGLGGGAGG

SEQ ID NO: 71402 - protein, 170 aa, Setaria italica
  Transcript Sequence Number=SeqID_5428
  Gene Ontology: Cellular component=vacuole
  Homolog annotation: Hit_ID=Q9SRX5; Match level="QueryCoverage=70%, HitCoverage=71%, E-value=4e-15, Identity=34%"; Hit description =F22D16.19 protein
  Pfam annotation: Domain name=DUF538; Domain location=30-141; Score =186.5; E_value=7.4e-53; Accession=PF04398.4; Description=Protein of unknown function, DUF538
MSPLPRRLLLLLLAVSAAATAAGGASLKGAANDLLPKYGLPKGLIPDSVASYTFDKATGAFEIHLASTCYVHFGSHLVYYERTITGKLSKGAISDLSGVQAKKLFLWVYVTGMVAHPDKGTIEFQAGFVSESLSASMFDEVPTCGSGVGAQLRGAAGVIGELGLLPVAQA

SEQ ID NO: 71403 - protein, 211 aa, Setaria italica
  misc_feature (27)..(27): Xaa can be any naturally occurring amino acid
  Transcript Sequence Number=SeqID_5429
  Gene Ontology: Mol. function=oxidoreductase activity; Cellular component=cytoplasm; Biological process=oxidation reduction
  Homolog annotation: Hit_ID=Q9SA98; Match level="QueryCoverage=92%, HitCoverage=57%, E-value=4e-73, Identity=66%"; Hit description =Alkylated DNA repair protein alkB homolog
  Pfam annotation: Domain name=2OG-FeII_Oxy; Domain location=91-211; Score=12.6; E_value=0.0099; Accession=PF03171.12; Description=2OG -Fe(II) oxygenase superfamily
ERNERNNGGGKTQSKIFKFVEASDVQXGEECRSTTATALVRKLRWSTLGLQFDWSKRNYDVSLPHNKISDPLASLAKNMAIPAMPSGEEFKPEAAIVNYYGPSDMLGGHVDDMEADWTKPIVSISLGCKCIFLLGGKTRDEVPTAMFLRSGDIVLMAGEARERFHGVPRIFTESDQQEISAVVSQLSGEEDCFILDYIKDSRININIRQVY

SEQ ID NO: 71404 - protein, 219 aa, Setaria italica
  misc_feature (164)..(164): Xaa can be any naturally occurring amino acid
  misc_feature (180)..(180): Xaa can be any naturally occurring amino acid
  Transcript Sequence Number=SeqID_5430
  Gene Ontology: Mol. function=oxidoreductase activity; Biological process=oxidation reduction
  Homolog annotation: Hit_ID=B9RME3; Match level="QueryCoverage=86%, HitCoverage=55%, E-value=2e-41, Identity=51%"; Hit description =Alkylated DNA repair protein alkB, putative
MYGASDPAAAERTAFRRAEKQYKLYKPPNLKGRSRSRSKPAGVEGGGRGDLSAVVDFHALLAADGELPAGIGRRDCAGFDRPVFCFLDRPGFYFIPGALSTEEQCYWIRESLKTFPQPPNRTNLTAIYGSISDLFIAAKNQKILVQVENPDVQERNERNNGGGXTQSKIFKFVEASDVQXGEECRSTTATALVRKLRWSTLGLQFDWSKVCIHLLPWWC

SEQ ID NO: 71405 - protein, 611 aa, Setaria italica
  misc_feature (60)..(60): Xaa can be any naturally occurring amino acid
  Transcript Sequence Number=SeqID_5431
  Gene Ontology: Mol. function=RNA binding; Cellular component=vacuole; Biological process=metal ion transport
  Homolog annotation: Hit_ID=B9ST04; Match level="QueryCoverage=70%, HitCoverage=69%, E-value=9e-89, Identity=38%"; Hit description=DNA binding protein, putative
  Pfam annotation: Domain name=Agenet; Domain location=315-396; Score =67.0; E_value=7.2e-17; Accession=PF05641.4; Description=Agenet domain
  Pfam annotation: Domain name=BAH; Domain location=128-246; Score =26.6; E_value=5.3e-05; Accession=PF01426.10; Description=BAH domain
  Pfam module annotation: Pfam domain module=Agenet::BAH; Domain location=315-396::128-246
  Subcellular localization annotation: CTP_CleavageSite=28; ConfidenceScore=5.35e-01
AVQGRFLRALAAAAGAVAVAPSPSRSPSAAGAGADGGAPRRWRSRREVVDWLSSLHECKXQSGCNYGYSSANRWNGNSYDDNDINCTQVTYSKDVSSREISKDFTWLGSAWHCQQHLKHYKSFCRRGITISVHSFVYIMSEEMKRLIAYVEDLYEDTNSYNMVKVQWFDKADEVGVPLPMDVDDREIFFSLGRQDLNVECIDGLAAVLSAQHYEKFKSGTRYSLWQPYFCRRQIDDDEVKPFDVTQLQGYWSQGVLRTMFNATSSLKVRFKVPKFGPSSDGGLKRKRDAFNDDANPQKFLGSGASASSFLGDKYLYPGCQVEVLSQDSGIRGCWFRCSILKRHNDKIKVRYLELQDADETGNLEEWVMLTRVAKPDQLGIRFLGRPMVRPQHVGESKASCFNVGAIVDAWWHGGWWEGIVLRQGDSGHLQVYFPGEKRVAEFLEDELRHSLEWVGNKWNPLKERKDIANKLTSATGTGSEDLNRKQIPLDVNMSPKPEPQLEEGLRFDERRDEKSSVSKISRDNKRVFADLTNVLKLDNLRWRPRKRSRRSGSRRQSDTSSGSSSGDMGSSSPSGSSGQLNSVPDEEACKSSGEQCFMGVPVQVPNLVMSR

SEQ ID NO: 71406 - protein, 97 aa, Setaria italica
  misc_feature (13)..(13): Xaa can be any naturally occurring amino acid
  Transcript Sequence Number=SeqID_5432
  Gene Ontology: Mol. function=protein serine/threonine kinase activity; Biological process=protein amino acid phosphorylation
  Homolog annotation: Hit_ID=Q7XKV8; Match level="QueryCoverage=91%, HitCoverage=12%, E-value=3e-36, Identity=77%"; Hit description =OSJNBa0073E02.11 protein
AEDSFLTSHSWAXPRPIIHGDVKSSNILIDCDYTAKVSDFGASILAPTDESQFVTLVQGTCGYLDPEYMQTCQLTDKSDVYSFGVVLLELLTRRKPL

SEQ ID NO: 71407 - protein, 87 aa, Setaria italica
  Transcript Sequence Number=SeqID_5433
  Gene Ontology: Mol. function=hydrolase activity, hydrolyzing O -glycosyl compounds; Biological process=carbohydrate metabolic process
  Homolog annotation: Hit_ID=Q5NBJ1; Match level="QueryCoverage=100%, HitCoverage=8%, E-value=5e-22, Identity=65%"; Hit description=Alpha -glucosidase-like
AHNRYPELWARVNREFADEWRANNAAATAAEEKDGGGDDSEDDGLVFFVRSGFRESSRWAMLFWEGDQMVSWQANDGIKSSVVGLLS

SEQ ID NO: 71408 - protein, 732 aa, Setaria italica
  Transcript Sequence Number=SeqID_5434
  Gene Ontology: Cellular component=plasma membrane
  Homolog annotation: Hit_ID=Q337P5; Match level="QueryCoverage=99%, HitCoverage=99%, E-value=0.0, Identity=84%"; Hit description =Pleckstriny domain-containing protein, putative, expressed
  Pfam annotation: Domain name=DUF1336; Domain location=517-721; Score =414.7; E_value=1.5e-121; Accession=PF07059.4; Description=Protein of unknown function (DUF1336)
  Pfam annotation: Domain name=PH; Domain location=7-119; Score=32.0; E_ value=2.4e-06; Accession=PF00169.21; Description=PH domain
  Pfam annotation: Domain name=START; Domain location=199-409; Score =32.5; E_value=1.4e-06; Accession=PF01852.11; Description=START domain
  Pfam module annotation: Pfam domain module=DUF1336::PH::START; Domain location=517-721::7-119::199-409
MSSSSSVVYEGWMVRYGRRKIGRSFVHTRYFVLEPRMLSYYKRKPQHKADKVGGKLPIKSLPIDGNCRVEDRGLKMHHGHMLYVLCVYNKREKHNRITMAAFNIQEALIWKEKIEMVIDQQQGAAQSDGNRAFSSSQQKASLENGRKSSSSDHESQYSHEEEEEEEEENQRSLLRRTTIGNGPPESLYDWTRENDLGISNQGSPDQVFSRGHWRLVRCQNGLRIFEELQDVDYLARSCSRAMKAVGVVEASCEAIFQLVMSMDTTRFEWDCSFQYGSLVEEVDGHTAILYHRLQLDWFPMFVWPRDLCYVRYWRRNDDGSYVVLFQSREHPNCGPQPGFVRADIESGGFNISPLKSRNGRTRTQVQHLMQIDLKGWGVGYVPSFQQHCLLHMLNSVAGLREWFSQSDESQVLPRIPVMVNMTPSVSSKKGKKAQENTTQTSLPMDPSRHSTVLEEESDEDDEFLIPESEQEPSTRENAADVRQPEPGRDEEDSDQIDLSGFSGNLRRDDRDNSRDCWRISDGNNFRVRSKNFVYDKSKVPAGKPLMELVAVDWFKDTKRMDHVARRKGCVVQVAAEKGLFALAINLQVPGTTNYSMVFYFVTKKLIPNSLLQRFVDGDDEFRNSRFKLIPSVPKGSWIVRQSVGSTPCLLGKAVDITYIRGANYLEIDVDIGSSTVANGVLGLVCGVITTLVVDMAFLVQGNTYEELPERLIGAVRMSHIELSSAVVPVLED

SEQ ID NO: 71409 - protein, 112 aa, Setaria italica
  Transcript Sequence Number=SeqID_5435
  Gene Ontology: Mol. function=hydrolase activity
  Homolog annotation: Hit_ID=Q9FIZ7; Match level="QueryCoverage=100%, HitCoverage=8%, E-value=5e-40, Identity=73%"; Hit description=5 -oxoprolinase
PVDVETLKPLLKGLLDKGIRCLAVVLMHSYTYPNHELLVEKLALEMGFKHVSLSSSLTPMVRAVPRGLTASVDAYLTPVIKEYLSGFMSRFEGGSEQVNVLFMQSDGGLAPE

SEQ ID NO: 71410 - protein, 409 aa, Setaria italica
  misc_feature (92)..(92): Xaa can be any naturally occurring amino acid
  misc_feature (335)..(335): Xaa can be any naturally occurring amino acid
  Transcript Sequence Number=SeqID_5436
  Gene Ontology: Mol. function=aminopeptidase activity; Cellular component=chloroplast; Biological process=cellular process
  Homolog annotation: Hit_ID=B9RF64; Match level="QueryCoverage=100%, HitCoverage=57%, E-value=1e-151, Identity=63%"; Hit description=Xaa -pro aminopeptidase, putative
  Pfam annotation: Domain name=Creatinase_N; Domain location=9-123; Score=-16.7; E_value=0.00014; Accession=PF01321.10; Description =Creatinase
VPSQDAHQSEFIAECFMRRAYLTGFTGSAGTAVVTKDKAALWTDGRYFLQAEKELSHEWTLMRSGNHGVPTTSEWLNDVLPSGCRVGIDPDXFLFSFDAAEELKDSISNKNHELVLVQGMNLIDEIWGDARPKPPKEPTRVHNIKYAGIDVPSKLSFIRSHLAENGCDAVVISMLDEVAWLLNMRGSDVPHSPVFYSYLIVEVSTATLFVDSNKVCEDVLVHLEKAGVKLKPYEAIVSEVERLAEKGAKLWLDSSSMNAAIVTAFISSCDRHMKKKGKSGKKVGEKEASSDKPTTRGPVVENGALNVVYNVSPVTLAKSVKNEAEIEGMKNSHLXEFWCWLEEEVGKSVPLTEVEVAEKLLEFRQKQDGFIETSFDTISGYGANGAIIHYRPTPEDCSSVGTDNLFLLD

SEQ ID NO: 71411 - protein, 63 aa, Setaria italica
  Transcript Sequence Number=SeqID_5437
  Gene Ontology: Mol. function=DNA binding
  Homolog annotation: Hit_ID=B4FRR8; Match level="QueryCoverage=100%, HitCoverage=18%, E-value=2e-18, Identity=85%"; Hit description=6b -interacting protein 1
RQRIEFLKQLEVKRMENFVEAHVKLARAKRPKKTKVGTTDGAGAMELVATVASLPFVSTSTLL

SEQ ID NO: 71412 - protein, 101 aa, Setaria italica
  Transcript Sequence Number=SeqID_5438
IELCCVKNLESGLVAICAMCYPQVPLVLVFCAIRCLFTVRGACNFSVVDLVTKIQANSWGYYFQVLSKPFCLDALAVIRQQISVRYLSNTYENHVLLFFEI

SEQ ID NO: 71413 - protein, 343 aa, Setaria italica
  Transcript Sequence Number=SeqID_5439
  Gene Ontology: Mol. function=DNA binding; Cellular component =nucleolus; Biological process=amino acid biosynthetic process
  Homolog annotation: Hit_ID=B4FRR8; Match level="QueryCoverage=90%, HitCoverage=90%, E-value=7e-92, Identity=64%"; Hit description=6b -interacting protein 1
  Pfam annotation: Domain name=MADF_DNA_bdg; Domain location=46-125; Score=5.4; E_value=0.058; Accession=PF10545.1; Description=Alcohol dehydrogenase transcription f
MEVREMAMAAAAAAAAAGGGGGKLPPPNPNLPYREDCWSDGETAALVSAWGSRYVELNRGNLRQKQWQEVADAVNSRRGASARRRPPRTDVQCKNRVDTLKKKYKAERARNAPSGWSFFHELDRLVGPTLSASASKRPPSSSPATQFAMPMPLHPPAVRNHASPSPSPPPPMALPLPNYHHRRSPLPAAALIQKEAAAAAAPVSDSEDSDDVGGNNNHNSQRSPSHSVSSLSGNNKKRSRDEAGSGGDKGCKELARAIEAFAEMYERVESAKQKHALQMERQRIEFLKQLEVKRMENFVEAHVKLARAKRPKKTKVGTTDGAGAMELVATVASLPFVSTSTLL

SEQ ID NO: 71414 - protein, 514 aa, Setaria italica
  Transcript Sequence Number=SeqID_5440
  Gene Ontology: Cellular component=chloroplast
  Homolog annotation: Hit_ID=Q75KA9; Match level="QueryCoverage=99%, HitCoverage=90%, E-value=0.0, Identity=83%"; Hit description =Cytochrome c biogenesis protein CCS1, chloroplastic
  Pfam annotation: Domain name=ResB; Domain location=73-491; Score =642.5; E_value=4e-190; Accession=PF05140.6; Description=ResB-like family
GRRETIPAGASKAKKQIVFFDAAPPVSQPQPQQGGSVVEKGESEKPTKEGSGNAALSLLRRATKKTLAALSNLPLAISEMFTIAALMALGTVIDQGEAPSYYFEKFPEDNPVFGFITWRWILTPGFDHMFSSPVFLGLLALLAASLMACTYTTQLPMVKVARRWSFTHSGERIRKQEFADSLPRASIQDLGVILMGAGYEVFTKGPSLYAFKGLAGRYAPIGVHLAMLFIMAGATLSATGSFKGSVDVPQGLNFVIGDVMKPRGVLSVAPDVFNTEVHVNRFYMEYYDSGEVSQFYSDLSLFNLDGKEVMRKTIKVNDPLRYGGITIYQTDWGFSALQVKKNGEGPFNLAMAQLKLNGDKKLFGTFLPLEDSNASNPSVKGISMLARDLQSIVLYDQDGKFVGVRRPSSKLPIEINGNEILIEDAIGSTGLDLKTDPGVPIVYAGFGALMLTTCISYLSHSQIWALQDGSTVVVGGKTNRAKLEFSEEMNRLLDKVPELIGANENVVDSKSTAT

SEQ ID NO: 71415 - protein, 92 aa, Setaria italica
  Transcript Sequence Number=SeqID_5441
RIRAAVPAVSDRLRRAREAFVAAEVAGTADVEAFLEELKGVALEANRLRRGVLSELAAAAGGYQAALYLEALSRFVLSMQDPEVLRRFDQCR

SEQ ID NO: 71416 - protein, 99 aa, Setaria italica
  Transcript Sequence Number=SeqID_5442
MREEIIKMELSLREQQRQKEQVELLRSEIERLKEQNAALQKAAEENKALKAELAGKDEEKREVIRQLASSMDMMREENLTLREHLRGSKHSTTSRAFDL

SEQ ID NO: 71417 - protein, 58 aa, Setaria italica
  Transcript Sequence Number=SeqID_5443
SNCWLVKDSAELSRSREAVDVHTTEVARGPAVAVAASGQRATWWNCCGLFDAFSGSGR

SEQ ID NO: 71418 - protein, 267 aa, Setaria italica
  Transcript Sequence Number=SeqID_5444
MPKGAKKRAKLKKQQQEGHPDDGGNNANASNGNGNGSDDNNAFSRRDGDHHLRIPPKASRVDASEDSMESSEEMVTPRAAASEAEEEERKAAAAEVLVERAVPPETVGQEREGKVDAAVEVHPVAAQEPEVKDVMVAEESVVQEPESVEASAVEVPEVKREVAKVHPVHEPEPKVDEVVVVETPVAPEVQEPEVKGDGANVVVQEPETRGGNVVVKDSAELSRSREAVDVHTTEVARGPAVAVAASGQRATWWNCCGLFDAFSGSGR

SEQ ID NO: 71419 - protein, 164 aa, Setaria italica
  Transcript Sequence Number=SeqID_5445
RLCKEHLKLFEQIYSLQVTTLRERGMADDTYPRKISIKAETTKFLYGRPTSTLMLQDQDLDDTLDKGGKRGVRDAKDIKNINHNQEGVTLHRRRNAGKGGSRNISSMLFEILLPHRSCDYSTKSSYKLPISFEPNNVAFSVFLTSKFQPCVQERTRVLKQILEY

SEQ ID NO: 71420 - protein, 321 aa, Setaria italica
  misc_feature (12)..(12): Xaa can be any naturally occurring amino acid
  Transcript Sequence Number=SeqID_5446
  Gene Ontology: Mol. function=aspartyl esterase activity; Cellular component=cell wall; Biological process=cell wall modification
  Pfam annotation: Domain name=Pectinesterase; Domain location=13-315; Score=477.2; E_value=2.2e-140; Accession=PF01095.11; Description =Pectinesterase
TTDVDPRGLPPXNATVCAAGCDYKTVREAVAAAPDYGDGWFVVRVKEGVYKETVSVPWEKTNVVLVGDGMGKTVITGDLNADTPGVSTFNTATVGVLADGFMARDLTISNTAGPDAHQAVAFRSTGDRTVLDTVELLGHQDTLYAHAMRHLYTRCRVSGTVDFVFGNSAAVLHDTALVVLPRQLRPEKGENDAVTAQGRTDPAQPTGIVLSRCAVNGSDEYMALYRQKPDVHRVYLGRPWKEYSRTVYLGCTLAEIVQPQGWMAWNGDFALRTLYYGEFDSAGPGGAASRRVAWSSQVPREHVDAYSVDNFIQGHEWIPKA

SEQ ID NO: 71421 - protein, 115 aa, Setaria italica
  misc_feature (104)..(104): Xaa can be any naturally occurring amino acid
  Transcript Sequence Number=SeqID_5447
  Homolog annotation: Hit_ID=B6TMX5; Match level="QueryCoverage=62%, HitCoverage=27%, E-value=2e-14, Identity=61%"; Hit description =Polyphosphoinositide binding protein
  Subcellular localization annotation: CTP_CleavageSite=69; ConfidenceScore=5.74e-01
TLALRGYASPSSVDPLAGLPLCPKSPAIRRRSAGSKNSESRGKMAASCSFRSVVRAPPLSRRFARSAVRCRSAAPPDAGGTAPTSKLVVEVKERLAREHPGLPXGRNGRDDDDMI

SEQ ID NO: 71422 - protein, 159 aa, Setaria italica
  Transcript Sequence Number=SeqID_5448
QAGARTSKALECTPSNSSDAMPVEASTTQQFAALPVKYDQQDYLSMLALQHHQQGNLQGLGFSLYSSGVNLDFANSHGTASSMANCYANGASHEQHQHHQQLQDHQQDQAQQSSNSCSSPPFAMPIAFSGSYESSMTPGPFGYSYPNVAAFQTPIYGME

SEQ ID NO: 71423 - protein, 353 aa, Setaria italica
  Transcript Sequence Number=SeqID_5449
  Gene Ontology: Mol. function=protein serine/threonine kinase activity; Cellular component=integral to membrane; Biological process=protein amino acid phosphorylation
  Homolog annotation: Hit_ID=C0LGJ1; Match level="QueryCoverage=100%, HitCoverage=54%, E-value=1e-117, Identity=34%"; Hit description =Leucine-rich repeat receptor-like protein kinase (Fragment)
  Pfam annotation: Domain name=LRR_1; Domain location=115-137; Score =13.0; E_value=0.98; Accession=PF00560.25; Description=Leucine Rich Repeat
  Pfam annotation: Domain name=LRR_1; Domain location=139-158; Score =11.2; E_value=2.2; Accession=PF00560.25; Description=Leucine Rich Repeat
  Pfam annotation: Domain name=LRR_1; Domain location=18-41; Score=7.0; E_value=14; Accession=PF00560.25; Description=Leucine Rich Repeat
  Pfam annotation: Domain name=LRR_1; Domain location=264-286; Score =14.3; E_value=0.51; Accession=PF00560.25; Description=Leucine Rich Repeat
  Pfam annotation: Domain name=LRR_1; Domain location=287-309; Score =7.2; E_value=13; Accession=PF00560.25; Description=Leucine Rich Repeat
  Pfam annotation: Domain name=LRR_1; Domain location=311-333; Score =12.8; E_value=1.1; Accession=PF00560.25; Description=Leucine Rich Repeat
  Pfam annotation: Domain name=LRR_1; Domain location=43-65; Score =11.2; E_value=2.2; Accession=PF00560.25; Description=Leucine Rich Repeat
  Pfam annotation: Domain name=LRR_1; Domain location=67-89; Score =13.0; E_value=0.97; Accession=PF00560.25; Description=Leucine Rich Repeat
  Pfam annotation: Domain name=LRR_1; Domain location=91-113; Score =13.8; E_value=0.71; Accession=PF00560.25; Description=Leucine Rich Repeat
  Pfam module annotation: Pfam domain module=LRR_1::LRR_1::LRR_1::LRR _1::LRR_1::LRR_1::LRR_1::LRR_1::LRR_1; Domain location=115-137::139 -158::18-41::264-286::287-309::311-333::43-65::67-89::91-113
SKNMFGGNVQDTFGRFASLRYLVLHHNNYTGGIVTSGVLRLPLLARLDLSFNEFSGELPPELADMKSLKYLMLAYNQFSGSIPPAYGRLAELQALDLSYNQLSSGIPETVGNLTSLLWLMLAGNRLSGQIPPEIGKCTSLLWLNLADNELTGKIPPEMAAIGTNPGPTFAKNRKDTAVLAGSGECQAMKRWIPASYPPFSFVYSIMTRENCRSIWDRILKGYGIVPICTNSSSPVRSNTISGYVQLSGNRLSGEIPPEIGAMRNLSLLHLDNNRLTGRLPTEISRLPLVVLNVSRNIISGAIPSEIGRIRCLEMMDLSYNNFSGELPGSLSQLTELNRFNVSYNPLLYGNVPT

SEQ ID NO: 71424 - protein, 93 aa, Setaria italica
  Transcript Sequence Number=SeqID_5450
  Subcellular localization annotation: CTP_CleavageSite=34; ConfidenceScore=5.21e-01
RSVPVPAVAPRVRGQLGRLFLEETRARNSSTSSTASTASSSSSAATDDDRADGLEGAAPESYCVWRPGSASSASPASSPRPPRKSGSTGSMAR

SEQ ID NO: 71425 - protein, 82 aa, Setaria italica
  Transcript Sequence Number=SeqID_5451
TGGGCHKGTTTTTCTTYKIRGSYGGGQEAQSMVNGNGGRQQENERHLVQGTWQQYCSTPARLRDKNGGWSPVTTRDPASIPA

SEQ ID NO: 71426 - protein, 114 aa, Setaria italica
  misc_feature (42)..(42): Xaa can be any naturally occurring amino acid
  misc_feature (86)..(86): Xaa can be any naturally occurring amino acid
  misc_feature (95)..(95): Xaa can be any naturally occurring amino acid
  Transcript Sequence Number=SeqID_5452
  Gene Ontology: Mol. function=zinc ion binding
  Homolog annotation: Hit_ID=Q7XGU8; Match level="QueryCoverage=99%, HitCoverage=12%, E-value=2e-26, Identity=51%"; Hit description =Transposon protein, putative, Mutator sub-class
YNCQKECILRRCTSRWLFSKYTDLFRANEKMSITRFVKTVQXDLNLTISKSKLARAIRLILSSIHGDEVQRYNYLWDYAEELRRSXSGAHSNLNXTKNLFSTCYMSLNACKRGF

SEQ ID NO: 71427 - protein, 237 aa, Setaria italica
  Transcript Sequence Number=SeqID_5453
  Homolog annotation: Hit_ID=B9RTB5; Match level="QueryCoverage=43%, HitCoverage=18%, E-value=1e-17, Identity=45%"; Hit description =Nucleotide binding protein, putative
  Pfam annotation: Domain name=NUC189; Domain location=96-181; Score =48.6; E_value=2.4e-11; Accession=PF08162.3; Description=NUC189 domain
QGKRKRKHGVTKPSGDIEPAIHSDITTARSIQKRVPVQRIEDDGICIEDMMRECGVLDTGVDQSIEGHPGIPTNIFSEFFGDGSIKADANLPSKKIRVHLRSLKPEDACKLLENLVSAWKMRSGSTKLVLRWIYCLLVVHGRFIHSEKSTKLISNLEKMCSERYSATEDLLKLSGRLRLIKAQVDKVANNASEQPSEEIQDAAAAIQSEEEEEEEEVDEMVFGQDSDSSQNSDEDAE

SEQ ID NO: 71428 - protein, 305 aa, Setaria italica
  misc_feature (273)..(273): Xaa can be any naturally occurring amino acid
  Transcript Sequence Number=SeqID_5454
  Homolog annotation: Hit_ID=B9RTB5; Match level="QueryCoverage=97%, HitCoverage=48%, E-value=2e-52, Identity=41%"; Hit description =Nucleotide binding protein, putative
MPKMPSFLCQYVLSSGIGERYIAIWKLGSDKTQSSNCILSMEHPAIFVDCKCSDEGEIHVLAISEIGVCYFWSASNIDDLRNKKPTKISVSESSLSRAQAFSIFAAKLQGVDGPTSAHVLLAYGSVVKPSFEKLLVCYGTDINLGISQDGVLLPNIQTTMTKKDQTVKKQETVTALDRANAEDAILPLPKLHTQEKKRKHGVTKPSGDIEPAIHSDITTARSIQKRVPVQRIEDDGICIEDMMRECGVLDTGVDQSIEGHPGIPTNIFLSFWXGSIKADANLPSKKIRVHLRSLKPEDACKLLEI

SEQ ID NO: 71429 - protein, 83 aa, Setaria italica
  misc_feature (62)..(62): Xaa can be any naturally occurring amino acid
  Transcript Sequence Number=SeqID_5455
  Gene Ontology: Mol. function=nucleic acid binding
  Homolog annotation: Hit_ID=Q1G1I8; Match level="QueryCoverage=100%, HitCoverage=9%, E-value=3e-44, Identity=95%"; Hit description =Pentatricopeptide repeat protein
  Pfam annotation: Domain name=PPR; Domain location=10-44; Score=37.4; E_value=5.6e-08; Accession=PF01535.12; Description=PPR repeat
  Pfam annotation: Domain name=PPR; Domain location=45-79; Score=21.0; E_value=0.005; Accession=PF01535.12; Description=PPR repeat
  Pfam module annotation: Pfam domain module=PPR::PPR; Domain location =10-44::45-79
KTKLDNLNGIIYSNIIHAHCQSGNMDRAEELVREMEEDGIDAPIDVYHSMMHGYTIIQDEKXCLIVFERLKECGFKPSIISYG

SEQ ID NO: 71430 - protein, 56 aa, Setaria italica
  Transcript Sequence Number=SeqID_5456
MEYCYQYNSVSSSNLAKEKRPAPKRGHVKMQIVRTISNIVAPSSGNNSFRRERSYN

SEQ ID NO: 71431 - protein, 106 aa, Setaria italica
  misc_feature (83)..(83): Xaa can be any naturally occurring amino acid
  Transcript Sequence Number=SeqID_5457
  Gene Ontology: Mol. function=hydrolase activity; Cellular component =chloroplast
  Homolog annotation: Hit_ID=B6THU7; Match level="QueryCoverage=100%, HitCoverage=28%, E-value=3e-48, Identity=79%"; Hit description =Histone deacetylase 10
FEIQNFNPASLDDVARVHSKSYITGLEKAMSKAADEGLILIEGTGPTYATETTFQESLLSAGAGITLVDSVVAASKLGPNPPXGFCVFGNIAVAARYAQHQYGLKR

SEQ ID NO: 71432 - protein, 148 aa, Setaria italica
  Transcript Sequence Number=SeqID_5458
  Gene Ontology: Mol. function=hydrolase activity; Cellular component =chloroplast; Biological process=histone deacetylation
  Homolog annotation: Hit_ID=B6THU7; Match level="QueryCoverage=100%, HitCoverage=34%, E-value=9e-80, Identity=95%"; Hit description =Histone deacetylase 10
  Pfam annotation: Domain name=Hist_deacetyl; Domain location=1-146; Score=75.4; E_value=2.1e-19; Accession=PF00850.11; Description =Histone deacetylase family
GFALVRPPGHHAVPRGPMGFCVFGNIAVAARYAQHQYGLKRVMIIDFDVHHGNGTSDAFYDDPDIFFLSTHQLGSYPGTGKIDEVGQGDGEGTTLNLPLPGGAGDYAMRCAFDEAIAPSAQRFKPDIILVSAGYDAHALDPLAGLQFT

SEQ ID NO: 71433 - protein, 142 aa, Setaria italica
  misc_feature (115)..(115): Xaa can be any naturally occurring amino acid
  Transcript Sequence Number=SeqID_5459
  Gene Ontology: Mol. function=hydrolase activity; Cellular component =chloroplast; Biological process=histone deacetylation
  Homolog annotation: Hit_ID=B6THU7; Match level="QueryCoverage=100%, HitCoverage=33%, E-value=1e-74, Identity=92%"; Hit description =Histone deacetylase 10
  Pfam annotation: Domain name=Hist_deacetyl; Domain location=1-142; Score=35.1; E_value=3e-11; Accession=PF00850.11; Description=Histone deacetylase family
VAASKLGPNPPLGFALVRPPGHHAVPRGPMGFCVFGNIAVAARYAQHQYGLKRVMIIDFDVHHGNGTSDAFYDDPDIFFLSTHQLGSYPGTGKIDEVGQGDGEGTTLNLPLPGGXGDYAMRCAFDEAIAPSAQRFKPDILVL

SEQ ID NO: 71434 - protein, 75 aa, Setaria italica
  Transcript Sequence Number=SeqID_5460
  Subcellular localization annotation: CTP_CleavageSite=34; ConfidenceScore=5.56e-01
MPRLVLPPAKTPFLSPFPAFPPPPPPRPLGIRISAAVAGRGSAGEDAAAASGTTARERRLVKVREERRRREYDRE

SEQ ID NO: 71435 - protein, 278 aa, Setaria italica
  Transcript Sequence Number=SeqID_5461
  Gene Ontology: Mol. function=hydrolase activity, acting on ester bonds; Biological process=DNA catabolic process
  Homolog annotation: Hit_ID=B6T329; Match level="QueryCoverage=91%, HitCoverage=87%, E-value=1e-138, Identity=89%"; Hit description =Nuclease PA3
  Pfam annotation: Domain name=S1-P1_nuclease; Domain location=24-278; Score=523.5; E_value=2.6e-154; Accession=PF02265.8; Description=S1P1 Nuclease
MALLLLLHVLLVTVVARPPAAHAWGKDGHYMVCKIAESFLTEEASTAVKDLLPGWAGGDLAETCAWADRQRFRYRWSSPLHFADNPGDCKFSYARDCHNTKGEKDMCVVGAINNYTAALEDSSSPFDPTESLMFLAHFVGDVHQPLHCGHAEDLGGNTIIVHWYRRKSNLHHVWDVNVIETAMKEFYDNDLSTMTQAIQRNITEEWANEEKQWETCRSRTKTCADKYAEESSKLACKAYEGVEQDSTLEDDYFFAALPVVQKRIAQGGVRLAAILNKI

SEQ ID NO: 71436 - protein, 173 aa, Setaria italica
  Transcript Sequence Number=SeqID_5462
  Gene Ontology: Mol. function=oxidoreductase activity, acting on NADH or NADPH; Cellular component=mitochondrial inner membrane; Biological process=respiratory electron transport chain
  Homolog annotation: Hit_ID=B6TZR1; Match level="QueryCoverage=100%, HitCoverage=100%, E-value=3e-70, Identity=79%"; Hit description=NADH- ubiquinone oxidoreductase 13 kDa-B subunit
  Pfam annotation: Domain name=ETC_C1_NDUFA5; Domain location=35-91; Score=107.6; E_value=4.2e-29; Accession=PF04716.6; Description=ETC complex I subunit conserved region
MFLRRILTGGGSLAALRAARAVKETTGIVGLDVVPNAREVLIGLYTRTLKEIEAVPKDEGYRKAVESFTNHRLQICQEEDDWKRIEDRIGCGQVEELIEEAEDELKLIAKMIEWDPWGVPEDYECEVIEDDTPIPKHVPQHRPVALPEEFFKTLDAVKSDPALQGDAPPQVKA

SEQ ID NO: 71437 - protein, 37 aa, Setaria italica
  Transcript Sequence Number=SeqID_5463
  Gene Ontology: Mol. function=protein serine/threonine kinase activity; Biological process=protein amino acid phosphorylation
  Homolog annotation: Hit_ID=Q2QMH1; Match level="QueryCoverage=100%, HitCoverage=6%, E-value=1e-13, Identity=100%"; Hit description =Serine/threonine-protein kinase Nek2
QERYEELGILLKPFGPEKASPRETAIWLTKSFKETAS

SEQ ID NO: 71438 - protein, 67 aa, Setaria italica
  Transcript Sequence Number=SeqID_5464
AARLKAKYFSMEKGDMFEEIVIQSETIRLSRWPFTRLFADPAKFCREKSYTEKEISPSLAGTAMSNN

SEQ ID NO: 71439 - protein, 160 aa, Setaria italica
  Transcript Sequence Number=SeqID_5465
  Gene Ontology: Mol. function=binding
VGSRVGRYLRLALTVLAGLARVPEVAADEGVVSTVPLVAEVVSKSADPAITEECFELLSLIAIASEDGAYKFCEPGVIDMIFLQISSLPDGSKCIELAINLMRLLVHKLKVDNMSVEKLQGMASMVTCLARLFAVLHTAVKFDALHMLTTLLSQKESPLH

SEQ ID NO: 71440 - protein, 195 aa, Setaria italica
  Transcript Sequence Number=SeqID_5466
  Gene Ontology: Mol. function=metallopeptidase activity; Cellular component=vacuole; Biological process=proteolysis
  Homolog annotation: Hit_ID=B9SG76; Match level="QueryCoverage=99%, HitCoverage=36%, E-value=2e-89, Identity=78%"; Hit description =Aspartyl aminopeptidase, putative
  Pfam annotation: Domain name=Peptidase_M18; Domain location=1-181; Score=-85.9; E_value=3.6e-12; Accession=PF02127.7; Description =Aminopeptidase I zinc metalloprotease (M18)
LSSEKAIRMVAMFDNEEVGSDSMQGAGAPTMFQAMRRIIDSLMHQSMGEGALERAIHSSFLVSADMAHALHPNYPDKHEECHRPELQKGLVIKHNANQRYATSAVTAFLFKEIARIHNLPVQEFVVRNDMGCGSTIGPILASGVGIRTVDCGIPQLSMHSIREMCGKEDVDTTYRHFKAFFEMFSDIDRKLNVDF

SEQ ID NO: 71441 - protein, 101 aa, Setaria italica
  Transcript Sequence Number=SeqID_5467
  Gene Ontology: Mol. function=ribose-5-phosphate isomerase activity; Cellular component=chloroplast; Biological process=pentose-phosphate shunt, non-oxidative branch
  Homolog annotation: Hit_ID=B6U2Y8; Match level="QueryCoverage=98%, HitCoverage=33%, E-value=5e-45, Identity=90%"; Hit description =Ribose-5-phosphate isomerase
  Pfam annotation: Domain name=Rib_5-P_isom_A; Domain location=2-90; Score=-106.4; E_value=0.021; Accession=PF06026.6; Description=Ribose 5-phosphate isomerase A (phosphoriboisomerase A)
RIDTAEEIDDLFLEDAEVWRRPSFGTAGPLGGDHPLVTKEGHHVLDVIFTTPIPDLGQVAEKLDKVAGVVDHGIICSNQSYAVIASKGEVQVIEEKPSVIP

SEQ ID NO: 71442 - protein, 314 aa, Setaria italica
  Transcript Sequence Number=SeqID_5468
  Gene Ontology: Mol. function=zinc ion binding; Cellular component =COPII vesicle coat; Biological process=ER to Golgi vesicle-mediated transport
  Homolog annotation: Hit_ID=Q013K2; Match level="QueryCoverage=100%, HitCoverage=44%, E-value=4e-13, Identity=25%"; Hit description =Vesicle coat complex COPII, subunit SEC24/subunit SFB2 (ISS)
  Pfam annotation: Domain name=Sec23_trunk; Domain location=33-289; Score=16.9; E_value=1.3e-10; Accession=PF04811.7; Description =Sec23Sec24 trunk domain
GFSAPTACPELNASFVDLEIPVDEAEGGGDGVQARPVYVAAVDLACSEEFLELIKSSLLAALEALIPGSLFGLMTFSHKIGVYDLQGPIPVVKNVFIPPDLEEDGLPVALEDAMPLLSFLAPVDTCKDRIAAALEILRPTSSWERGAASGQEEDTVLLGGRGFGTAMSALIDYLSSEYGSTFALARVFAFLSGAPDYGAGLLDTRRYGEQYASKGVDADLALLPEQIPFYRDLAAVAVQAGVCIDIFAVTDEYTDLASLKFLSIESGGSLFLYANTDDSTLPQDIYRLLSRPYAFGCVLRLRTSSDFEPGNSYG

SEQ ID NO: 71443 - protein, 157 aa, Setaria italica
  misc_feature (23)..(23): Xaa can be any naturally occurring amino acid
  misc_feature (111)..(111): Xaa can be any naturally occurring amino acid
  Transcript Sequence Number=SeqID_5469
  Gene Ontology: Mol. function=zinc ion binding; Cellular component =COPII vesicle coat; Biological process=ER to Golgi vesicle-mediated transport
  Pfam annotation: Domain name=Sec23_helical; Domain location=71-156; Score=-5.2; E_value=0.01; Accession=PF04815.7; Description =Sec23Sec24 helical domain
LTKDNNKNTRLVSNKNTLFKYSXIEPVEETSGNESRSSPSYKFCLKRRLRIRTLQYCPARNISEIYDSVDPEVVLHILVHKVILESLDKGVREGRQQVHAWLALLAARYKXVPQLVFALLRSPLLRLHEEGVHPDYRIYLQCLFSALEPSSLAKAIY

SEQ ID NO: 71444 - protein, 476 aa, Setaria italica
  misc_feature (124)..(124): Xaa can be any naturally occurring amino acid
  Transcript Sequence Number=SeqID_5470
  Gene Ontology: Mol. function=zinc ion binding; Cellular component =COPII vesicle coat; Biological process=ER to Golgi vesicle-mediated transport
  Homolog annotation: Hit_ID=A8IZS6; Match level="QueryCoverage=80%, HitCoverage=45%, E-value=2e-48, Identity=34%"; Hit description=COP -II coat subunit
  Pfam annotation: Domain name=Sec23_helical; Domain location=231-341; Score=14.0; E_value=0.00016; Accession=PF04815.7; Description =Sec23Sec24 helical domain
SYSWLSSLYLLVVLVLVLDTRRYGEQYASKGVDADLALLPEQIPFYRDLAAVAVQAGVCIDIFAVTDEYTDLASLKFLSIESGGSLFLYANTDDSTLPQDIYRLLSRPYAFGCVLRLRTSSDFXEPGNSYGHFFPDPQYENVQHIICCDSFATYAYDFDFAHNDGFSRHTDPAVVQIAFQYSVIEPVEETSGNESRSSPSYKFCLKRRLRIRTLQYCPARNISEIYDSVDPEVVLHILVHKVILESLDKGVREGRQQVHAWLALLAARYNQALSSDSRTPLSSVDIDFSQCPQLQMVPQLVFALLRSPLLRLHEEGVHPDYRIYLQCLFSALEPSSLAKAIYPVLISYSSPDKQAFPRHTLSRAALIMSESPIFLLDAFTNLIVYYSSTADPSIPFPPPRDCLLRTTINKLKQDRCITPKLTFIHGAKDDSTLFESYLIEEQDVDGSGFTTGSGFVAFRESVRNVAAEIVQEEIGS

SEQ ID NO: 71445 - protein, 292 aa, Setaria italica
  misc_feature (283)..(283): Xaa can be any naturally occurring amino acid
  Transcript Sequence Number=SeqID_5471
  Gene Ontology: Mol. function=transferase activity, transferring glycosyl groups; Cellular component=1,3-beta-glucan synthase complex; Biological process=cell wall organization and biogenesis
  Homolog annotation: Hit_ID=Q9LXT9; Match level="QueryCoverage=97%, HitCoverage=14%, E-value=1e-125, Identity=76%"; Hit description =Callose synthase 3
  Subcellular localization annotation: CTP_CleavageSite=24; ConfidenceScore=5.06e-01
MTSLSRTLSRAGPMQQPGSRRILRTQTAVNLGEPMFDSEVVPSSLVEIAPILRVANEVEGANPRVAYLCRFYAFEKAHRLDPTSSGRGVRQFKTALLQRLERENEPTLMERGQKSDAREIQTFYQQYYKKYIQALQNASDQVDRAQLTKAYQTAAVLFEVLKAVTQQHAVEVDHEILEAADKVKEKTKIYLPFNILPLDPDSGNQAVMKFPEIQAAASALRNTRGLPWPKNYEHKVNEDLLDWLQAMFGFQTDSVSNQREHLILLLANIHIRRNPKTDQQSKXDDNALNDVI

SEQ ID NO: 71446 - protein, 161 aa, Setaria italica
  Transcript Sequence Number=SeqID_5472
  Gene Ontology: Mol. function=transferase activity, transferring glycosyl groups; Cellular component=integral to membrane; Biological process=cell wall organization and biogenesis
  Homolog annotation: Hit_ID=Q6L538; Match level="QueryCoverage=98%, HitCoverage=23%, E-value=2e-65, Identity=77%"; Hit description =Probable xyloglucan glycosyltransferase 7
TTARFYGCIRVFLVLSLLLLAVEVAAWLQGWHLEVDAGLLAVDGLFAAAYAGWMRARLDYLAPPLQFLTNACVVLFLIQSVDRLVLCLGCFWIRLKGIKPVPLAADKEDVEAGAEDFPMVLVQMPMCNEREVYQQSIGAVCSLDWPRSNFLVQVLDDSDDA

SEQ ID NO: 71447 - protein, 177 aa, Setaria italica
  Transcript Sequence Number=SeqID_5473
  Gene Ontology: Mol. function=peptidase activity; Cellular component =voltage-gated potassium channel complex; Biological process=lipid transport
  Homolog annotation: Hit_ID=B6UDW9; Match level="QueryCoverage=45%, HitCoverage=43%, E-value=1e-26, Identity=77%"; Hit description=Lipid transfer protein
  Pfam annotation: Domain name=Tryp_alpha_amyl; Domain location=29-107; Score=54.0; E_value=5.8e-13; Accession=PF00234.14; Description =Protease inhibitorseed storageLTP f
  Subcellular localization annotation: CTP_CleavageSite=69; ConfidenceScore=5.56e-01
MAARAGALLLVAAVAAALVASSSAQSSGCTTTLISLYPCLNYISGNVSAPPSSCCSQLASVVQSNPQCLCAALSGDSSSLGGVTIDKTRALALPQACNVKTPPASKCNSAGGGNSPGAATPTTPSSGGVPASAAGAGTGGGSKATPTSPYLTTSGGASIRGAVSLALAFAAVAIYAV

SEQ ID NO: 71448 - protein, 45 aa, Setaria italica
  Transcript Sequence Number=SeqID_5474
RAARRVKAMELGRKMRAAMAEVGSSQTDVMDMVRHVTEVAKKSRG

SEQ ID NO: 71449 - protein, 174 aa, Setaria italica
  misc_feature (57)..(57): Xaa can be any naturally occurring amino acid
  Transcript Sequence Number=SeqID_5475
YSKSHQVEEFQHEALSSYDVEHMISGHPIYCYHHHCYKQALNVQVEPTEPVSSQSLXYYEHFSKYCDQSDVHILETPAHACNIQSYTPTFDVPLEPFKPSWSQIWGLYDAYMQGDALENDSHSVVSGEYGGIGNLFISPFYPRETEIFDQAPGDELASFQHNRHNLSYRNVYID

SEQ ID NO: 71450 - protein, 304 aa, Setaria italica
  misc_feature (83)..(83): Xaa can be any naturally occurring amino acid
  Transcript Sequence Number=SeqID_5476
  Gene Ontology: Mol. function=metal ion binding; Cellular component =cytoplasm; Biological process=ubiquitin-dependent protein catabolic process
  Homolog annotation: Hit_ID=B6TB98; Match level="QueryCoverage=72%, HitCoverage=100%, E-value=1e-109, Identity=86%"; Hit description =Protein binding protein
  Pfam annotation: Domain name=zf-C3HC4; Domain location=254-294; Score= 24.1; E_value=0.00018; Accession=PF00097.17; Description=Zinc finger, C3HC4 type (RING finger)
  Subcellular localization annotation: CTP_CleavageSite=37; ConfidenceScore=5.74e-01
PSFPRGSGGFRKPVVRRRAPPSSFSKVSTTNSFIPTSLSTAATKLGFLGAFGLCISLLPLSIWYLVGWTRGVLLKELLCEVSXWIMGAFCSCLQPDYSDDHGNHTSSAFRNCVCLRCFTQQLINAYTVLFRAGAVHSVSQAIEATPVDSAESSFDTYRSPPRPLPYDDPRFSPPARNWLRHETPSHSPEESEPLRANDDEEEMETPSRIDKASKTNYDTKMKICSSAYGDKVPPKEHGSYFSYFSPTAEDEDVCPTCLDDYTSENPRIVMQCSHHFHLGCIYEWMERSEACPVCGKKMEFDETT

SEQ ID NO: 71451 - protein, 511 aa, Setaria italica
  misc_feature (232)..(232): Xaa can be any naturally occurring amino acid
  misc_feature (265)..(265): Xaa can be any naturally occurring amino acid
  Transcript Sequence Number=SeqID_5477
  Gene Ontology: Mol. function=transcription factor activity; Cellular component=chloroplast; Biological process=regulation of transcription, DNA-dependent
  Homolog annotation: Hit_ID=Q6L565; Match level="QueryCoverage=85%, HitCoverage=49%, E-value=1e-162, Identity=66%"; Hit description =Putative RNA polymerase sigma factor
  Pfam annotation: Domain name=Sigma70_r2; Domain location=333-403; Score=41.4; E_value=3.5e-09; Accession=PF04542.6; Description=Sigma -70 region 2
  Pfam annotation: Domain name=Sigma70_r3; Domain location=407-489; Score=60.2; E_value=7.7e-15; Accession=PF04539.8; Description=Sigma -70 region 3
  Pfam module annotation: Pfam domain module=Sigma70_r2::Sigma70_r3; Domain location=333-403::407-489
  Subcellular localization annotation: CTP_CleavageSite=69; ConfidenceScore=5.63e-01
MGLQMMHGRPCASSSSSSSSWSWMVQVQPPKQSHHPLSGGRSISSGSLAALALHLLLKRRKYHGRDIATAFASSSSVLQITESKSSSLTKPKAERKVLDDALGRNVQNDWMDEETLFWMDRNYTDRDLQYGLLMQNLHELETSLAYKDLKMLEKGILVRIEQLGALRSFDASMSRTTLDTLPQTSHEQDCSLLDKIIEFDPETPLKEEQDTEVIVRSGKSQERKLKRMRASXEKGSRISVKVNQRRSKKSRKSSSSQFISEWKNXPVRRRTIIREQSSLLVTIKECANLEKIRENMVKDGQEVSYQRWAEAAGVDEAELKSRLQAGYCCRERLIVTTEWLVRYIARTYTGMGTAFDDLLQAGKMGVLDGAEKFDSRKGCKFSTYVKYWIRKGMLALLAENSGVTILPARMESIIRKVKEARRAIRYSQGRNPSDSEIAAMVGVSVANVRLARKCSRRVVSLYSEVGIGQNAKFTEVIPDASLEAADEAMFREQLRERLLVVLDRLPAREGH

SEQ ID NO: 71452 - protein, 156 aa, Setaria italica
  Transcript Sequence Number=SeqID_5478
  Gene Ontology: Mol. function=hydrolase activity, hydrolyzing O -glycosyl compounds; Cellular component=cell wall; Biological process= carbohydrate metabolic process
  Homolog annotation: Hit_ID=B6T9E1; Match level="QueryCoverage=100%, HitCoverage=52%, E-value=2e-74, Identity=86%"; Hit description =Xyloglucan endotransglucosylase/hydrolase
  Pfam annotation: Domain name=XET_C; Domain location=100-150; Score =91.2; E_value=3.8e-24; Accession=PF06955.4; Description=Xyloglucan endo-transglycosylase (XET)
LWFDPTQGLPLPTPSSWNLYMIAFFVDDVPIRVFKNSSGDLGVRYPFSQPMKLYSSLWNADDWATRGGREKTDWSNAPFVASYRGFHVDGCEASAEARFCATQGARWWDQPEFRDLDGAQYRKLREVRQRYTIYNYCTDRDRNAAMPPECAKDRDV

SEQ ID NO: 71453 - protein, 273 aa, Setaria italica
  Transcript Sequence Number=SeqID_5479
  Gene Ontology: Mol. function=hydrolase activity, hydrolyzing O -glycosyl compounds; Cellular component=cell wall; Biological process= carbohydrate metabolic process
  Homolog annotation: Hit_ID=B6T9E1; Match level="QueryCoverage=85%, HitCoverage=78%, E-value=1e-134, Identity=96%"; Hit description =Xyloglucan endotransglucosylase/hydrolase
  Pfam annotation: Domain name=Glyco_hydro_16; Domain location=34-216; Score=332.1; E_value=1.1e-96; Accession=PF00722.13; Description =Glycosyl hydrolases family 16
MATARWLLAAAAAALMLANCAWAAAPRKPVDVPFQKNYVPTWAEDHIHYVDGGREVQLYLDRSTGTGFQTRGSYLFGHFSMHMKLVGGDSAGTVTAFYLSSQNSEHDEIDFEFLGNRTGQPYILQTNVFTGGKGDREQRIYLWFDPTKDYHSYSVLWNLYMIAFFVDDVPIRVFKNSSGDLGVRYPFSQPMKLYSSLWNADDWATRGGREKTDWSNAPFVASYRGFHVDGCEASAEARFCATQGARWWDQPEFRDLDGVLVTSVRTWVVTFVL

SEQ ID NO: 71454 - protein, 138 aa, Setaria italica
  Transcript Sequence Number=SeqID_5480
  Gene Ontology: Mol. function=electron carrier activity; Cellular component=integral to membrane; Biological process=oxidation reduction
  Homolog annotation: Hit_ID=B6UET7; Match level="QueryCoverage=80%, HitCoverage=21%, E-value=3e-53, Identity=83%"; Hit description =Cytochrome P450 CYP94D27
MELSPTSSLGLQLVLLLPMLPLLYLLLRQDPKKQPRAHGLKAYPLLGTLPHFVKNQDRILEWTAGVMKRDPAHTMSVKALGLTGVAITANPANVEHIVKTNFANYPKGELAVSMLEDFLGHGIFNSDGDQWLWQRKAA

SEQ ID NO: 71455 - protein, 81 aa, Setaria italica
  misc_feature (58)..(58): Xaa can be any naturally occurring amino acid
  Transcript Sequence Number=SeqID_5481
  Gene Ontology: Cellular component=endoplasmic reticulum
  Homolog annotation: Hit_ID=B6SQ11; Match level="QueryCoverage=88%, HitCoverage=28%, E-value=3e-13, Identity=45%"; Hit description=Seed maturation protein
TTMHGHSAPRIFGRERTLHAALGGRRAADIILWRDKKESAAILAAATAAWGLFEVAEXYHFLTLVCYAAMIGMLVFFIWTN

SEQ ID NO: 71456 - protein, 119 aa, Setaria italica
  Transcript Sequence Number=SeqID_5482
VGCGTNFHCILYIDIIKSYSTSPQKKRRMDLKRNSLIISALSSLSQLQYFAINITNSVIQILRNLMCGKSLGRLLKRTIISLAVLLGIVSQFYILVFWLALCAMLVICKKSMLMHSLTY

SEQ ID NO: 71457 - protein, 177 aa, Setaria italica
  misc_feature (51)..(51): Xaa can be any naturally occurring amino acid
  Transcript Sequence Number=SeqID_5483
  Gene Ontology: Mol. function=binding; Cellular component=plasma membrane
  Homolog annotation: Hit_ID=B6U8U8; Match level="QueryCoverage=99%, HitCoverage=33%, E-value=1e-55, Identity=54%"; Hit description =Nodulin-like protein
AHIFVSLVSIWNFLGRVGGGYFSEIIVRERGYPRHTALAIAQILIAAAHFXFAMAWPGTMYIGTFLVGLGYGAHWAIVPAAVSELFGVKHFGAMYNFLAMGNPTGSFIFSGLITSTLYDYEAEKQAHQHQIKCEGPVCFFVSSLIMSVLCIVGAGLSLIVVHRTRRVYADLYRSVHT

SEQ ID NO: 71458 - protein, 381 aa, Setaria italica
  Transcript Sequence Number=SeqID_5484
  Gene Ontology: Mol. function=amino acid transmembrane transporter activity; Cellular component=integral to membrane; Biological process=amino acid transport
  Homolog annotation: Hit_ID=Q2QXH2; Match level="QueryCoverage=94%, HitCoverage=67%, E-value=1e-153, Identity=78%"; Hit description =Amino acid permease family protein, expressed
  Pfam annotation: Domain name=AA_permease; Domain location=4-381; Score=-91.5; E_value=0.0031; Accession=PF00324.13; Description=Amino acid permease
SYLRVTFGELAAFLTGANLIMEYVFSNAAVARSFTAYLGTAVGVDAPSKWRIPVPGLPEGFNQVDLVAVGVILLITVCICYSTKESSVVNMVLTAVHVAFILFIIVIGFVHGDARNLTRPADPSRNPGGFFPHGAMGVFNGAAMVYLSYIGYDAVSTMAEEVERPARDIPIGVSGSVVVVTVLYCLMAASMSMLLPYDAIDPEAPFSGPFRGRKGMAWVSNVIGAGASLGILTSLMVAMLGQARYLCVIGRSGVMPAWLARVNPRTATPVNASAFLGLFTAALALFTELDILLNLVCIGTLFVFYMVANAVVYRRYVGDAELGRTRRAWPTLAFLAAFSLLALAFALVWKLAPPERGVRTGLLAACAALAVATVAAFQALV

SEQ ID NO: 71459 - protein, 52 aa, Setaria italica
  Transcript Sequence Number=SeqID_5485
  Gene Ontology: Mol. function=nucleotide binding; Cellular component =intracellular; Biological process=small GTPase mediated signal transduction
  Homolog annotation: Hit_ID=Q10CA9; Match level="QueryCoverage=100%, HitCoverage=26%, E-value=5e-21, Identity=98%"; Hit description=ADP -ribosylation factor, putative, expressed
  Pfam annotation: Domain name=Arf; Domain location=5-52; Score=-77.8; E_value=0.0014; Accession=PF00025.13; Description=ADP-ribosylation factor family
MGLTFTKLFSRLFSKKEMRILMVGLDAAGKTTILYKLKLGEIVTTIPTIGFN

SEQ ID NO: 71460 - protein, 54 aa, Setaria italica
  Transcript Sequence Number=SeqID_5486
GASTRFGCVFLHKHPHYLFVDCIIFITCKKDSNKLFRHIPLPGALPKSFKPCWR

SEQ ID NO: 71461 - protein, 48 aa, Setaria italica
  Transcript Sequence Number=SeqID_5487
  Gene Ontology: Mol. function=nucleotide binding; Cellular component =intracellular; Biological process=small GTPase mediated signal transduction
  Homolog annotation: Hit_ID=Q9LQC8; Match level="QueryCoverage=72%, HitCoverage=14%, E-value=4e-13, Identity=100%"; Hit description =F28C11.12
SELCQDASSLVGNVVEARDELHRMLNEDELRDAVLLVFANKQDLPNAM

SEQ ID NO: 71462 - protein, 89 aa, Setaria italica
  Transcript Sequence Number=SeqID_5488
  Gene Ontology: Mol. function=nucleotide binding; Cellular component =intracellular; Biological process=small GTPase mediated signal transduction
  Homolog annotation: Hit_ID=C0NKH9; Match level="QueryCoverage=84%, HitCoverage=8%, E-value=2e-23, Identity=68%"; Hit description=ADP -ribosylation factor
  Pfam annotation: Domain name=Arf; Domain location=1-88; Score=-36.6; E_value=1.1e-06; Accession=PF00025.13; Description=ADP-ribosylation factor family
VWDVGGQDKIRPLWRHYFQNTQGLIFVVDSNDRDRVVEARDELHRMLNEVNPIEKAAFMFLIICCMVNHMQPSQIFLDNGGEILLECSL

SEQ ID NO: 71463 - protein, 77 aa, Setaria italica
  Transcript Sequence Number=SeqID_5489
ELRMYHGNLGQNRFCNLLGVFCRHDIFLFGICNDVTVECLFYPTSTVGCSLDLFILHKDWSSSIMLLWKAVTYIRST

SEQ ID NO: 71464 - protein, 132 aa, Setaria italica
  Transcript Sequence Number=SeqID_5490
  Gene Ontology: Mol. function=nucleotide binding; Cellular component =intracellular; Biological process=retrograde vesicle-mediated transport, Golgi to ER
  Homolog annotation: Hit_ID=P36397; Match level="QueryCoverage=96%, HitCoverage=70%, E-value=3e-70, Identity=97%"; Hit description=ADP -ribosylation factor 1
  Pfam annotation: Domain name=Arf; Domain location=1-128; Score=236.8; E_value=5.2e-68; Accession=PF00025.13; Description=ADP-ribosylation factor family
PPTSQTVEYKNISFTVWDVGGQDKIRPLWRHYFQNTQGLIFVVDSNDRERVVEARDELHRMLNEDELRDAVLLVFANKQDLPNAMNAAEITDKLGLHSLRQRHWYIQSTCATSGEGLYEGLDWLSNNIANKA

SEQ ID NO: 71465 - protein, 181 aa, Setaria italica
  Transcript Sequence Number=SeqID_5491
  Gene Ontology: Mol. function=nucleotide binding; Cellular component =intracellular; Biological process=small GTPase mediated signal transduction
  Homolog annotation: Hit_ID=Q677H6; Match level="QueryCoverage=100%, HitCoverage=90%, E-value=1e-101, Identity=97%"; Hit description=ADP -ribosylation factor (Fragment)
  Pfam annotation: Domain name=Arf; Domain location=5-177; Score=434.0; E_value=2.3e-127; Accession=PF00025.13; Description=ADP-ribosylation factor family
  Pfam annotation: Domain name=MMR_HSR1; Domain location=18-129; Score =5.0; E_value=0.00034; Accession=PF01926.15; Description=GTPase of unknown function
  Pfam annotation: Domain name=Miro; Domain location=19-129; Score =20.3; E_value=0.00014; Accession=PF08477.5; Description=Miro-like protein
  Pfam annotation: Domain name=Ras; Domain location=19-179; Score= -44.9; E_value=6.1e-06; Accession=PF00071.14; Description=Ras family
  Pfam annotation: Domain name=SRPRB; Domain location=15-177; Score= -26.5; E_value=1.3e-05; Accession=PF09439.2; Description=Signal recognition particle receptor beta su
  Pfam module annotation: Pfam domain module=Arf::MMR_HSR1::Miro::Ras::S RPRB; Domain location=5-177::18-129::19-129::19-179::15-177
MGLTFTKLFSRLFSKKEMRILMVGLDAAGKTTILYKLKLGEIVTTIPTIGFNVETVEYKNISFTVWDVGGQDKIRPLWRHYFQNTQGLIFVVDSNDRDRVVEARDELHRMLNEDELRDAVLLVFANKQDLPNAMNAAEITDKLGLHSLRQRHWYIQSTCATTGEGLYEGLDWLSNNIANKA

SEQ ID NO: 71466 - protein, 190 aa, Setaria italica
  misc_feature (76)..(76): Xaa can be any naturally occurring amino acid
  misc_feature (88)..(88): Xaa can be any naturally occurring amino acid
  misc_feature (135)..(135): Xaa can be any naturally occurring amino acid
  Transcript Sequence Number=SeqID_5492
  Gene Ontology: Mol. function=nucleotide binding; Cellular component =intracellular; Biological process=small GTPase mediated signal transduction
  Homolog annotation: Hit_ID=P36397; Match level="QueryCoverage=96%, HitCoverage=100%, E-value=4e-98, Identity=96%"; Hit description=ADP -ribosylation factor 1
  Pfam annotation: Domain name=Arf; Domain location=12-186; Score =400.3; E_value=3.2e-117; Accession=PF00025.13; Description=ADP -ribosylation factor family
  Pfam annotation: Domain name=MMR_HSR1; Domain location=25-138; Score=- 17.6; E_value=0.042; Accession=PF01926.15; Description=GTPase of unknown function
  Pfam annotation: Domain name=Miro; Domain location=26-138; Score=5.4; E_value=0.0034; Accession=PF08477.5; Description=Miro-like protein
  Pfam annotation: Domain name=Ras; Domain location=26-188; Score= -71.3; E_value=0.00061; Accession=PF00071.14; Description=Ras family
  Pfam annotation: Domain name=SRPRB; Domain location=22-186; Score= -42.8; E_value=0.00021; Accession=PF09439.2; Description=Signal recognition particle receptor beta su
  Pfam module annotation: Pfam domain module=Arf::MMR_HSR1::Miro::Ras::S RPRB; Domain location=12-186::25-138::26-138::26-188::22-186
RGVEKGKMGLAFGKLFSRLFAKKEMRILMVGLDAAGKTTILYKLKLGEIVTTIPTIGFNVETVEYKNISFTVWDVXGGQDKIRPLWRXHYFQNTQGLIFVVDSNDRDRVVEARDELHRMLNEDELRDAVLLVFAXKQDLPNAMNAAEITDKLGLHSLRQRHWYIQSTCATTGEGLYEGLDWLSSNIASKA

SEQ ID NO: 71467 - protein, 46 aa, Setaria italica
  Transcript Sequence Number=SeqID_5493
  Gene Ontology: Mol. function=DNA binding
  Homolog annotation: Hit_ID=B6TTX4; Match level="QueryCoverage=100%, HitCoverage=10%, E-value=9e-16, Identity=89%"; Hit description=DNA methyltransferase 1-associated protein 1
FDLRFIVIADRFPTTRSVEDLKSRYYSVSRSLLIHRSRSFDDVSGN

SEQ ID NO: 71468 - protein, 134 aa, Setaria italica
  Transcript Sequence Number=SeqID_5494
  Gene Ontology: Mol. function=DNA binding
  Homolog annotation: Hit_ID=B6TTX4; Match level="QueryCoverage=100%, HitCoverage=30%, E-value=9e-57, Identity=82%"; Hit description=DNA methyltransferase 1-associated protein 1
AASASAGLRVIKRVDQTLQDLGVNLKPKVPTKAVCVEHLELRNEILTLLNLQKQLQNKEAEVSANRESSFTEAPSTPKRSNRDIDRTFIPDTVGFSGSERAGKRDHKRKTTGRFIDAPPSPTQSKRPRKLKGSD

SEQ ID NO: 71469 - protein, 155 aa, Setaria italica
  Transcript Sequence Number=SeqID_5495
  Gene Ontology: Mol. function=DNA binding
  Homolog annotation: Hit_ID=B6TTX4; Match level="QueryCoverage=95%, HitCoverage=33%, E-value=1e-67, Identity=84%"; Hit description=DNA methyltransferase 1-associated protein 1
LVCFHFQLRVYLRTHALDQMVQAASASAGLRVIKRVDQTLQDLGVNLKPKVPTKAVCVEHLELRNEILTLLNLQKQLQNKEAEVSANRESSFTEAPSTPKRSNRDIDRTFIPDTVGFSGERAGKRDHKRKTTGRFIDAPPSPTQSKRPRKLKGSD

SEQ ID NO: 71470 - protein, 159 aa, Setaria italica
  misc_feature (91)..(91): Xaa can be any naturally occurring amino acid
  Transcript Sequence Number=SeqID_5496
  Gene Ontology: Mol. function=DNA binding; Cellular component=nucleus; Biological process=negative regulation of transcription
  Homolog annotation: Hit_ID=B6TTX4; Match level="QueryCoverage=89%, HitCoverage=32%, E-value=8e-75, Identity=91%"; Hit description=DNA methyltransferase 1-associated protein 1
  Pfam annotation: Domain name=Myb_DNA-binding; Domain location=90-136; Score=32.2; E_value=2.1e-06; Accession=PF00249.23; Description=Myb -like DNA-binding domain
LTGGVGMAPLMPTIEASHLKRRPAAEKEKVAWQWLPFTSSARSDNLQLYHWVRVVNGVPPTGDYQFAKYNKKVDVLKYTDEEYEKYLIDPXAWSREETDQLFELCERFDLRFIVIADRFPTTRSVEDLKSRYYSVSRSLLIHSYPSQGDSQLAWAETFL

SEQ ID NO: 71471 - protein, 144 aa, Setaria italica
  Transcript Sequence Number=SeqID_5497
  Gene Ontology: Mol. function=DNA binding; Cellular component=nucleus; Biological process=negative regulation of transcription
  Homolog annotation: Hit_ID=B6TTX4; Match level="QueryCoverage=99%, HitCoverage=32%, E-value=5e-76, Identity=90%"; Hit description=DNA methyltransferase 1-associated protein 1
  Pfam annotation: Domain name=Myb_DNA-binding; Domain location=62-108; Score=33.1; E_value=1.1e-06; Accession=PF00249.23; Description=Myb -like DNA-binding domain
MQVAWQWLPFTSSARSDNLQLYHWVRVVNGVPPTGDYQFAKYNKKVDVLKYTDEEYEKYLIDPAWSREETDQLFELCERFDLRFIVIADRFPTTRSVEDLKSRYYSVSRSLLIHRSRSFDDVSGNPLVKDSYDAAHETERKRAL

SEQ ID NO: 71472 - protein, 283 aa, Setaria italica
  misc_feature (39)..(39): Xaa can be any naturally occurring amino acid
  Transcript Sequence Number=SeqID_5498
  Gene Ontology: Mol. function=DNA binding
  Homolog annotation: Hit_ID=B6TTX4; Match level="QueryCoverage=94%, HitCoverage=60%, E-value=1e-128, Identity=85%"; Hit description=DNA methyltransferase 1-associated protein 1
LLFGLVSLKRLFIGNSSLSRSLLIHRARSFDDVSGNPLXKDSYDAAHETERKRALSALLSQTKQQERKDAETLAEAKRIMESRAASKNLDEAGMPSSSDNAMVPVDGVSPLSGTHPPLTHPNTAANSSIPNSLRTLRVYLRTHALDQMVQAASASAGLRVIKRVDQTLQDLGVNLKPKVPTKAVCVEHLELRNEILTLLNLQKQLQNKEAEVSANRESSFTEAPSTPKRSNRDIDRTFIPDTVGFSGERAGKRDHKRKTTGRFIDAPPSPTQSKRPRKLKGSD

SEQ ID NO: 71473 - protein, 450 aa, Setaria italica
  misc_feature (138)..(138): Xaa can be any naturally occurring amino acid
  Transcript Sequence Number=SeqID_5499
  Gene Ontology: Mol. function=DNA binding; Cellular component=nucleus; Biological process=negative regulation of transcription
  Homolog annotation: Hit_ID=B6TTX4; Match level="QueryCoverage=100%, HitCoverage=100%, E-value=0.0, Identity=87%"; Hit description=DNA methyltransferase 1-associated protein 1
  Pfam annotation: Domain name=Myb_DNA-binding; Domain location=140 -186; Score=32.2; E_value=2.1e-06; Accession=PF00249.23; Description =Myb-like DNA-binding domain
MDAKDILGLPKTPFSSSLEKKSRPPKEPQRKPDGVSREVYALTGGVGMAPLMPTIEASHLKRRPAAEKEKVAWQWLPFTSSARSDNLQLYHWVRVVNGVPPTGDYQFAKYNKKVDVLKYTDEEYEKYLIDPEWPYPCXLVEAWSREETDQLFELCERFDLRFIVIADRFPTTRSVEDLKSRYYSVSRSLLIHRARSFDDVSGNPLVKDSYDAAHETERKRALSALLSQTKQQERKDAETLAEAKRIMESRAASKNLDEAGMPSSSDNAMVPVDGVSPLSSTHPPLTHPNTAANSSIPNSLRTLRVYLRTHALDQMVQAASASAGLRVIKRVDQTLQDLGVNLKPKVPTKAVCVEHLELRNEILTLLNLQKQLQNKEAEVSANRESSFTEAPSTPKRSNRDIDRTFIPDTVGFSGERAGKRDHKRKTTGRFIDAPPSPTQSKRPRKLKGSD

SEQ ID NO: 71474 - protein, 42 aa, Setaria italica
  Transcript Sequence Number=SeqID_5500
  Gene Ontology: Mol. function=6-phosphogluconolactonase activity; Cellular component=chloroplast; Biological process=carbohydrate metabolic process
  Homolog annotation: Hit_ID=B6UAK0; Match level="QueryCoverage=100%, HitCoverage=12%, E-value=6e-15, Identity=97%"; Hit description=6 -phosphogluconolactonase
VPIPPGQVYAINDALSAEGAADDYEACLKQLVKNGVIAMSAA

SEQ ID NO: 71475 - protein, 102 aa, Setaria italica
  Transcript Sequence Number=SeqID_5501
  Gene Ontology: Mol. function=6-phosphogluconolactonase activity; Cellular component=chloroplast; Biological process=carbohydrate metabolic process
  Homolog annotation: Hit_ID=Q69NG5; Match level="QueryCoverage=92%, HitCoverage=29%, E-value=8e-47, Identity=94%"; Hit description =Probable 6-phosphogluconolactonase 4, chloroplastic
HSKKLEIEPGHPLVNEKERWVTYIKDSPKPPPERITFTFPVINSSAYIAMVVTGAGKAGPVQKALSDKQTSSDLLPVEMAVLQDGEFTWFTDKPAVSMLQNK

SEQ ID NO: 71476 - protein, 285 aa, Setaria italica
  Transcript Sequence Number=SeqID_5502
  Gene Ontology: Mol. function=6-phosphogluconolactonase activity; Cellular component=chloroplast; Biological process=carbohydrate metabolic process
  Homolog annotation: Hit_ID=B6UAK0; Match level="QueryCoverage=100%, HitCoverage=89%, E-value=1e-138, Identity=85%"; Hit description=6 -phosphogluconolactonase
  Pfam annotation: Domain name=Glucosamine_iso; Domain location=49-285; Score=-52.1; E_value=9e-05; Accession=PF01182.12; Description =Glucosamine-6-phosphate isomerases6-phosphogluconolactonase
RIGPRPRLFSSCSLPFPIRPAAAMATDGAAPAKQKLLIFDTKEDLAVSLAKYTADLSKKFAAERGAFTVVLSGGSLIDALSKLTEPPYLESVDWSKWHVFWVDERVVPKDHEDSNYKLAFDGFLSKVPIPPGQVYAINDALSAEGAADDYEACLKQLVKNGVIAMSAATGFPRFDLQLLGMGPDGHIASLFPGHPLVNEKERWVTYIKDSPKPPPERITFTFPVINSSAYIAMVVTGAGKAGPVQKALSDKQTSSDLLPVEMAVLQDGEFTWFTDKPAVSMLQNK

SEQ ID NO: 71477 - protein, 266 aa, Setaria italica
  Transcript Sequence Number=SeqID_5503
  Gene Ontology: Mol. function=sugar binding
  Homolog annotation: Hit_ID=B6TM11; Match level="QueryCoverage=100%, HitCoverage=100%, E-value=1e-126, Identity=84%"; Hit description =ATPP2-B12
MEDIRLPADVLLSVISRAAAGPRDACIVATVSPAFRAAADSDTVWSRFLPADFAPLVYPAPPPRSKKELFLRLSGNHALLEDGLTSAWLDRETGAKCYMVAARAMRIIWVDTPDYWRWIPREDSRFPTCAELLAVCWLDISGTITCRMLSGDTRYAAYLVFKMTDDCYGLDSPLQQASVSVGEGTSTHSVCLQGYVGDEENDISEEGLPPRLPHERPDGWMEVELGDWYNHGGDDIEVRASVKETRFGGNWKKGLIVQGLEFRPKN

SEQ ID NO: 71478 - protein, 81 aa, Setaria italica
  Transcript Sequence Number=SeqID_5504
  Gene Ontology: Mol. function=adenylosuccinate synthase activity; Cellular component=chloroplast; Biological process=purine nucleotide biosynthetic process
  Homolog annotation: Hit_ID=O24578; Match level="QueryCoverage=81%, HitCoverage=13%, E-value=6e-29, Identity=92%"; Hit description =Adenylosuccinate synthetase, chloroplastic
  Pfam annotation: Domain name=Adenylsucc_synt; Domain location=1-81; Score=-381.5; E_value=0.011; Accession=PF00709.13; Description =Adenylosuccinate synthetase
HLIVDLYLLQGVSYNQADGQKLQSFPGDLDTLEQVQVNYEVLPGWQSDISSIRSYNELPQAARLYVERIEELVGVPGPTPM

SEQ ID NO: 71479 - protein, 50 aa, Setaria italica
  Transcript Sequence Number=SeqID_5505
KAGTSRVSDIDSYHTLHHQAWFTISAKYMMGHQTIGGVEHSAKLILIHLS

SEQ ID NO: 71480 - protein, 491 aa, Setaria italica
  Transcript Sequence Number=SeqID_5506
  Gene Ontology: Mol. function=adenylosuccinate synthase activity; Cellular component=chloroplast; Biological process=purine nucleotide biosynthetic process
  Homolog annotation: Hit_ID=O24578; Match level="QueryCoverage=100%, HitCoverage=100%, E-value=0.0, Identity=89%"; Hit description =Adenylosuccinate synthetase, chloroplastic
  Pfam annotation: Domain name=Adenylsucc_synt; Domain location=69-490; Score=875.4; E_value=3.2e-260; Accession=PF00709.13; Description =Adenylosuccinate synthetase
  Subcellular localization annotation: CTP_CleavageSite=47; ConfidenceScore=5.58e-01
MSLSTLSHPAAAAAAAAGSGKSLSPAFPAAQSARLPKTRPHAPAAVSAAAAAAVHADSAEDRVSALSQVSGVLGSQWGDEGKGKLVDVLAPRFDIVARCQGGANAGHTIYNAEGKKFALHLVPSGILHEGTLCVVGNGAVIHVPGFFGEIDGLESNGVRCDGRILVSDRAHLLFDLHQVVDGLREAELENSFIGTTKRGIGPCYSSKVTRNGLRVCDLRHMDTFGDKLDVLFKDAASRFQGFEYSKSMLKEEVERYKRFAERLEPFIADTVHVLNESIQQKKKILVEGGQATMLDIDFGTYPFVTSSSPSAGGICTGLGIAPRVVGDLIGVVKAYTSRVGSGPFPTELFGEEGDRLRKAGMEFGTTTGRPRRCGWLDIVALKYCCQINGFSSLNLTKLDVLSGLSEIKVGVSYNQADGQKLQSFPGDLDTLEQVQVNYEVLPGWQSDISSIRSYNELPQAARLYVERIEELVGVPVHYIGVGPGRDALIYK

SEQ ID NO: 71481 - protein, 315 aa, Setaria italica
  Transcript Sequence Number=SeqID_5507
  Gene Ontology: Mol. function=acyltransferase activity; Cellular component=cytoplasm
  Homolog annotation: Hit_ID=C5FDS1; Match level="QueryCoverage=79%, HitCoverage=82%, E-value=3e-29, Identity=32%"; Hit description =Dolichol-phosphate mannosyltransferase
  Pfam annotation: Domain name=DUF1749; Domain location=32-303; Score =218.5; E_value=1.8e-62; Accession=PF08538.2; Description=Protein of unknown function (DUF1749)
  Subcellular localization annotation: CTP_CleavageSite=34; ConfidenceScore=5.23e-01
ASLPDAPAPAAASRSVVAAGVGAGAGVVKRKQLRGALFKYGPKSAQVAFRTGDFNHQVIFIGGLTDGLLATDYLEPLSLALEVEKWSLVQPLLSSSYTGYGISSLEQDALELDQLISYLINKENSEGVILLGHSTGCQDIVHYMRTNFACSKAVSGVILQAPVSDREYRATLPETAEMIDLAAKMISEGRGMDLMPREANPDAPITAYRYHSLCSYMGDDDMFSSDLSEDQLRQRLGHMSTTQCQVIFSMGDEYVPEYVDKEALVDRLCRALGGAEKVEIEWGNHALSNRVQEAVRAIVDFVKREGPKGWDDPWS

SEQ ID NO: 71482 - protein, 414 aa, Setaria italica
  Transcript Sequence Number=SeqID_5508
  Gene Ontology: Mol. function=binding; Cellular component=nucleus
  Homolog annotation: Hit_ID=Q2L357; Match level="QueryCoverage=97%, HitCoverage=45%, E-value=1e-70, Identity=42%"; Hit description =Putative cyclin-related protein (Fragment)
SSTSLKHSQNSLTESTNDTESTVLRLSSHQATLLLSSIWAQAISPKNTPQNYEAIAHTYSLLLLFLGSKASIFEALSPSFQIAFSLLSYSLGTDSLPPSCRRSLFTLATSMIVFASRTFDVAPLLPICKSMLNDGTMDPFLRLVHENKLQVVKDYLEDPSKSYGSTEDNENALRSISAVELTERNSRESMVSAIVNSIAYIPDAELEDIRSQLLTDFSPDDMCPTSAHFFESPGKNSESRPGDDADYQEAELIDVTNDNYTFAEVSATKPTATDIPAITTNLLSIDELLETVVNDTSSETQRCSAPAAPDIPFQEMTSHCEALSMGKHHKMSVLMSFKNNKQAPIVPNNQINHVEAGHTSNNQNTNPFLQQSLDGYPQSMAAGELQDAAGVQQQHFLRLPASSPYDNFLKAAGC

SEQ ID NO: 71483 - protein, 85 aa, Setaria italica
  Transcript Sequence Number=SeqID_5509
  Gene Ontology: Mol. function=catalytic activity; Cellular component =membrane; Biological process=plant-type hypersensitive response
  Homolog annotation: Hit_ID=Q2LGJ8; Match level="QueryCoverage=80%, HitCoverage=37%, E-value=1e-19, Identity=67%"; Hit description =Putative phosphaticid acid phosphatase (Fragment)
  Pfam annotation: Domain name=PAP2; Domain location=1-85; Score=7.6; E_ value=0.0013; Accession=PF01569.13; Description=PAP2 superfamily
VEGHKSFPSGHTSWSFAGLGFLSWYLAGKITVFDRRGHVAKLCVVLLPLVLAAMVAISRVDDYWHHWQDVCAGGVLGLVVASVCY

SEQ ID NO: 71484 - protein, 58 aa, Setaria italica
  Transcript Sequence Number=SeqID_5510
VAHGNNMWRALGLRHVSSSSLLDGRHFGMYVEKSFTCITVFGNHNGPGLQSNLHTEVE

SEQ ID NO: 71485 - protein, 89 aa, Setaria italica
  Transcript Sequence Number=SeqID_5511
MPVAGRGRSSAVLRALLAAPRTRPPARAIHEGPDTIEELLDRHLVKKPAAVLDDDAAEAEARRRLTSTRREALGLYRDILRATRLFAWP

SEQ ID NO: 71486 - protein, 85 aa, Setaria italica
  Transcript Sequence Number=SeqID_5512
MEESPMYAMEKSRGYLRPLRLLFVLFIAFAFVARCGGARMLRPEELLRHHHSSSDPYYSTPVMPPYGDVFGGTPNPPPPPALPTA

SEQ ID NO: 71487 - protein, 171 aa, Setaria italica
  Transcript Sequence Number=SeqID_5513
  Gene Ontology: Mol. function=acyltransferase activity; Cellular component=integral to membrane; Biological process=metabolic process
  Homolog annotation: Hit_ID=B6SYA0; Match level="QueryCoverage=100%, HitCoverage=31%, E-value=9e-51, Identity=62%"; Hit description =Glycerol-3-phosphate acyltransferase 1
MEEMRSKGDGAVGLVRAASWMHHVISRYCKETYVLSEADKKAWQLLPRDKYPKKLVFHDGRLAFRPTFFAAVAMYTYLPWGIFLAVFRSLAFAVLPYRVSVPLAAATGMRSRLVAAPSLNATEKHQAGGRLYVCNHRTLLDPITVAAGLNKPVTAVTYSVSLVSELIAPIR

SEQ ID NO: 71488 - protein, 161 aa, Setaria italica
  Transcript Sequence Number=SeqID_5514
  Homolog annotation: Hit_ID=B6SQM6; Match level="QueryCoverage=100%, HitCoverage=100%, E-value=6e-44, Identity=54%"; Hit description =Pathogenesis-related protein 10
  Pfam annotation: Domain name=Bet_v_I; Domain location=1-156; Score =47.8; E_value=4.2e-11; Accession=PF00407.11; Description =Pathogenesis-related protein Bet v I family
MVACSVTEECPVAVSAELLWKVFLAGDASIMTKACVGMIDAVEVEGDGGPGSVTTMKLNPSVGDAKVFKTRLLARDAAALVVRSEMVVEGGEVAAKLKSQVSELKVVPAGEGACVCKVTVEYERLDGTPLAPEDQAKLVHGYLGLIKKVEEYIVAHPGEFA

SEQ ID NO: 71489 - protein, 51 aa, Setaria italica
  Transcript Sequence Number=SeqID_5515
RTSESDTQIARLYSILCSSYNSLIYIFTLFQHLFKIVCTYGPKKKKKKKKK

SEQ ID NO: 71490 - protein, 221 aa, Setaria italica
  Transcript Sequence Number=SeqID_5516
  Gene Ontology: Mol. function=transferase activity, transferring glycosyl groups; Cellular component=integral to membrane; Biological process=cell wall organization and biogenesis
  Homolog annotation: Hit_ID=Q6Z2T9; Match level="QueryCoverage=99%, HitCoverage=37%, E-value=1e-100, Identity=80%"; Hit description =Probable mannan synthase 6
VRGCEFVAMFDADFQPAPDFLVKTVPFLVHNPSVALVQTRWKFVNANDCLLTRMQEMSMDYHFKVEQEAGSSLCNFFGYNGTAGVWRTQAIVESGGWEERTTAEDMDLALRAGLLGWEFVYDGSIKVKSELPSTLKAYRSQQHRWSCGPALLFKKMFWEILSAKKVSVWKKLYMIYDFFIARRIVGTFFTLFFFSILIPLIILFPEAQIPVWEVRILIIPQ

SEQ ID NO: 71491 - protein, 107 aa, Setaria italica
  Transcript Sequence Number=SeqID_5517
  Gene Ontology: Mol. function=transferase activity, transferring glycosyl groups; Cellular component=integral to membrane; Biological process=cell wall organization and biogenesis
  Homolog annotation: Hit_ID=Q6Z2T9; Match level="QueryCoverage=94%, HitCoverage=17%, E-value=3e-46, Identity=82%"; Hit description =Probable mannan synthase 6
YIGRLDRLIVQVLDDSTDAVIKELVKSECERWAAEGINIKYETRKDRAGYKAGNLKEGMRHAYVRGCEFVAMFDADFQPAPDFLVKTVPFLVHNPSVALVQTRWNFD

SEQ ID NO: 71492 - protein, 74 aa, Setaria italica
  Transcript Sequence Number=SeqID_5518
  Gene Ontology: Mol. function=protein dimerization activity; Cellular component=nucleus; Biological process=regulation of transcription, DNA-dependent
  Homolog annotation: Hit_ID=B6TN24; Match level="QueryCoverage=100%, HitCoverage=22%, E-value=2e-20, Identity=64%"; Hit description=BZIP transcription factor
FPDGLEHDGGTTSQYEQTSGLLRQGSITMPPELSKKTVDEVWKGIQDAPKRNVTTGGRRRRERQPTLGEMTLED

SEQ ID NO: 71493 - protein, 118 aa, Setaria italica
  misc_feature (40)..(40): Xaa can be any naturally occurring amino acid
  misc_feature (106)..(106): Xaa can be any naturally occurring amino acid
  Transcript Sequence Number=SeqID_5519
GCMSVASYLIWRHEGTGADRRPGGRVPVLGGGRRTGSTAXKRSRPGVLYDDEAWRPCLRDIHPAWLLAYRLISFFVLLSLLVVIVISDGRNIFYYYTQWTFILVTXIYFGLGTALSIY

SEQ ID NO: 71494 - protein, 315 aa, Setaria italica
  Transcript Sequence Number=SeqID_5520
  Gene Ontology: Cellular component=plasma membrane
  Homolog annotation: Hit_ID=B6UCN7; Match level="QueryCoverage=100%, HitCoverage=48%, E-value=0.0, Identity=97%"; Hit description=Protein CYPRO4
LMSPATDGKPHAKGVHQLDIETGKVVSEWKFEKDGADINMRDITNDSKGAQMDPSESTFLGLDDNRLCRWDMRDRRGIVQNLASATESPVLQWTQGHQFSRGTNFQCFASTGDGSIVVGSLDGKIRLYSKSSMRMAKTAFPGLGSPITHVDVTYDGKWILGTTDTYLILICTIFIDKDGKEKTGFNGRMGNRIAAPRLLKLNPLDSHLAGANNRFREGRFSWVTENGKQERHLVATVGKYSVVWNFLQVKNSHHECYQYQEGLKSCYCYKVIPKDESIVASRFMHDKYAISDSPEAPLVVATPMKVTSFSISSRH

SEQ ID NO: 71495 - protein, 93 aa, Setaria italica
  misc_feature (44)..(44): Xaa can be any naturally occurring amino acid
  misc_feature (80)..(80): Xaa can be any naturally occurring amino acid
  Transcript Sequence Number=SeqID_5521
  Subcellular localization annotation: CTP_CleavageSite=6; ConfidenceScore=5.09e-01
VNRTSRRDREQDNGSSPPTPTPTPPLATRHLPTSVAPCPGPPLXPATHPPRAAHCPADRPVRPPSVPYAPLPHPTKPNPXPPPPPKPVGMANS

SEQ ID NO: 71496 - protein, 68 aa, Setaria italica
  Transcript Sequence Number=SeqID_5522
EEEASKKKKNKEDRQQGIAAAGVESHIPSSAGIGSEKRKKEKHSNKEIIVHVKQEPDLVDEELLSEKK

SEQ ID NO: 71497 - protein, 142 aa, Setaria italica
  Transcript Sequence Number=SeqID_5523
  Gene Ontology: Mol. function=nucleic acid binding; Cellular component= ribonucleoprotein complex
  Homolog annotation: Hit_ID=Q7EY44; Match level="QueryCoverage=95%, HitCoverage=29%, E-value=9e-57, Identity=79%"; Hit description=Water- stress protein-like protein
  Pfam annotation: Domain name=RRM_1; Domain location=64-134; Score =45.6; E_value=2e-10; Accession=PF00076.14; Description=RNA recognition motif. (a.k.a. RRM, RBD, o
LSTQKKGKNRGYAFLDFRTHVDAVAAFLKLQERDLYLGTDFRAHISFSNTLSQDDEIMEKVKSVFLDGLPPHWDEDKVREMFGKFGEIDNIQLARNMFTAKRKDFGFIGFTTRKSALDCIKMVNKEGVGEGSGKVFILWYHF

SEQ ID NO: 71498 - protein, 189 aa, Setaria italica
  Transcript Sequence Number=SeqID_5524
FAESRYSSKYPRYRQEMHEEHMERDAYHRSKYGHSYHDRVHGASCPECNLSGQNCDYPNGEEFSATSGCEQAYYKTDRDRTPSTSQVASHCEDSCCKGNQLMPKSSSVMCDCDDCFVEQESTPSPSDHARTRSNLHRRSVKSSREHRRLAPDEQSAFEVEYTVRESRSRYSSSRDASSTHSRKHHRPAR

SEQ ID NO: 71499 - protein, 532 aa, Setaria italica
  misc_feature (448)..(448): Xaa can be any naturally occurring amino acid
  Transcript Sequence Number=SeqID_5525
  Gene Ontology: Mol. function=nucleic acid binding; Cellular component= ribonucleoprotein complex
  Homolog annotation: Hit_ID=Q7EY44; Match level="QueryCoverage=57%, HitCoverage=71%, E-value=1e-109, Identity=61%"; Hit description =Water-stress protein-like protein
  Pfam annotation: Domain name=RRM_1; Domain location=159-229; Score =45.6; E_value=2e-10; Accession=PF00076.14; Description=RNA recognition motif. (a.k.a. RRM, RBD, o
  Pfam annotation: Domain name=RRM_1; Domain location=63-137; Score =17.7; E_value=0.0045; Accession=PF00076.14; Description=RNA recognition motif. (a.k.a. RRM, RBD, o
  Pfam module annotation: Pfam domain module=RRM_1::RRM_1; Domain location=159-229::63-137
ADAGDVEEVPLVRDPADQRLNKGFAFVRFAAAWQARWAANDLREATIKGKACGICKNSENETLHVRNICFDWSRDDLAEKLKPFELENLDRINLIEHPEKRGKNRGYAFLDFRTHVDAVAAFLKLQERDLYLGTDFRAHISFSNTLSQDDEIMEKVKSVFLDGLPPHWDEDKVREMFGKFGEIDNIQLARNMFTAKRKDFGFIGFTTRKSALDCIKMVNKEGVGEGSGKVLIKACLQRPRQNSKKHSWQGSNSMLGVRRGFVDKSSSSRHHSDRYRHFERRDYSDNNAHRHRSMDVDERPISVRGYRDYYRRDYAAYAPSPKYGRTHSGTRFREAYAESRYSSKYPRYRQEMHEEHMERDAYHRSKYGHSYHDRVHGASCPECNLSGQNCDYPNGEEFSATSGCEQAYYKTDRDRTPSTSQVASHCEDSCCKGNQLMPKSFFLTLIKXSSVMCDCDDCFVEQESTPSPSDHARTRSNLHRRSVKSSREHRRLAPDEQSAFEVEYTVRESRSRYSSSRDASSTHSRKHHRPAR

SEQ ID NO: 71500 - protein, 229 aa, Setaria italica
  misc_feature (200)..(200): Xaa can be any naturally occurring amino acid
  misc_feature (209)..(209): Xaa can be any naturally occurring amino acid
  Transcript Sequence Number=SeqID_5526
  Gene Ontology: Mol. function=nucleic acid binding
  Homolog annotation: Hit_ID=Q2QYQ5; Match level="QueryCoverage=78%, HitCoverage=12%, E-value=5e-55, Identity=55%"; Hit description =Retrotransposon protein, putative, unclassified, expressed
  Pfam annotation: Domain name=PLAC8; Domain location=19-153; Score =133.1; E_value=8.8e-37; Accession=PF04749.9; Description=PLAC8 family
KLLSTKSSETRTVVSNPAWAGGLFDCSEDPTACYLSFLFTFCVFGWNMERLGFGNMYVHTFTFLLLCVTPFWLFNITAMNIHSYILGDFIGAAGIILCFFGLLYGGFWRIQMRKTFGLPRSRWFCGSASLTDYVQWLFCWPCALAQEVRTGNLYDAKDGKFYKKLMDGVDVESGPEFIFVTESPVSMGVEEGNGINVKTXADGEMIPPXQPVIECGEREGTDSEVVANG

SEQ ID NO: 71501 - protein, 107 aa, Setaria italica
  Transcript Sequence Number=SeqID_5527
  Gene Ontology: Mol. function=hydrolase activity, hydrolyzing O -glycosyl compounds; Cellular component=anchored to membrane; Biological process=carbohydrate metabolic process
  Homolog annotation: Hit_ID=B6U0V2; Match level="QueryCoverage=99%, HitCoverage=30%, E-value=2e-36, Identity=70%"; Hit description =Hydrolase, hydrolyzing O-glycosyl compounds
  Pfam annotation: Domain name=X8; Domain location=19-103; Score=148.3; E_value=2.4e-41; Accession=PF07983.5; Description=X8 domain
AGAASVVYQEPSMCSAKASWCVANAAVGDGRLQEALNWACSNGADCSDTQPGAACFEPNTKVAHASHAFNSYYQRKHRASGTCDFAGAASVVYEEPRIGNCALPSRA

SEQ ID NO: 71502 - protein, 177 aa, Setaria italica
  Transcript Sequence Number=SeqID_5528
  Subcellular localization annotation: CTP_CleavageSite=29; ConfidenceScore=5.12e-01
LGCSTSWRDAARASGCRRRSGALGKAPVVAAARGGGSPLSPFGAVVVGPLGVHFGHEALTRGVAAPVARAGVGDRPRHACELVARERHGHGPRQEATVRRRSIAQPEEPTTWEGPSGARLVARRCPGGGARDGGTSGQDEERDQLDPLPGGEEVQTPEEDQGARSEAGVMAGHLKPE

SEQ ID NO: 71503 - protein, 87 aa, Setaria italica
  Transcript Sequence Number=SeqID_5529
FFFRLGWIRARFKDPKQLQELGSVQLVLAPTDGLAASSTRAPGPLVMLLETYRALGVSMSGRKVGAANQQWHGSLSRHRYKLGIRAF

SEQ ID NO: 71504 - protein, 119 aa, Setaria italica
  Transcript Sequence Number=SeqID_5530
  Gene Ontology: Mol. function=electron carrier activity; Cellular component=plasma membrane; Biological process=oxidation reduction
  Homolog annotation: Hit_ID=Q8W2K4; Match level="QueryCoverage=100%, HitCoverage=42%, E-value=1e-47, Identity=78%"; Hit description =Cytochrome b5 reductase isoform II
  Pfam annotation: Domain name=FAD_binding_6; Domain location=47-119; Score=49.8; E_value=1.1e-11; Accession=PF00970.16; Description =Oxidoreductase FAD-binding domain
MEFLQGQRLETTVAVAVAVVAVAAGAAYLFLRSRKPMGCLDPETFREFKLVEKRQLSHNVAKFKFALPTPTSVLGLPIGQHISCRGQDAAGEEVIKPYTPTTLDSDLGHFELVIRCTPK

SEQ ID NO: 71505 - protein, 248 aa, Setaria italica
  Transcript Sequence Number=SeqID_5531
  Gene Ontology: Mol. function=electron carrier activity; Cellular component=plasma membrane; Biological process=oxidation reduction
  Homolog annotation: Hit_ID=Q8W2K4; Match level="QueryCoverage=98%, HitCoverage=87%, E-value=1e-135, Identity=93%"; Hit description =Cytochrome b5 reductase isoform II
  Pfam annotation: Domain name=FAD_binding_6; Domain location=16-115; Score=172.6; E_value=1.1e-48; Accession=PF00970.16; Description =Oxidoreductase FAD-binding domain
  Pfam annotation: Domain name=NAD_binding_1; Domain location=125-233; Score=136.2; E_value=1e-37; Accession=PF00175.13; Description =Oxidoreductase NAD-binding domain
  Pfam module annotation: Pfam domain module=FAD_binding_6::NAD_binding_ 1; Domain location=16-115::125-233
MISPPVGCLDPETFREFKLVEKRQLSHNVAKFKFALPTPTSVLGLPIGQHISCRGQDAAGEEVIKPYTPTTLDSDLGHFELVIKMYPQGRMSHHFREMKVGDYLSVKGPKGRFKYQPGQVRAFGMIAGGSGITPMFQVTRAILENPEDNTKVHLIYANVTYDDILLKEELDSMAKNYPDRFKIYYVLNQPPEIWDGGVGFVSKEMIQAHCPAPAADIQVLRCGPPPMNKAMAAHLDDLGYTKEMQFQF

SEQ ID NO: 71506 - protein, 149 aa, Setaria italica
  misc_feature (90)..(90): Xaa can be any naturally occurring amino acid
  Transcript Sequence Number=SeqID_5532
  Gene Ontology: Mol. function=binding; Cellular component=chloroplast; Biological process=mitochondrial fission
  Homolog annotation: Hit_ID=B6T224; Match level="QueryCoverage=89%, HitCoverage=80%, E-value=4e-51, Identity=78%"; Hit description =Mitochondria fission 1 protein
  Pfam annotation: Domain name=TPR_2; Domain location=71-105; Score =17.4; E_value=0.059; Accession=PF07719.9; Description=Tetratricopepti de repeat
TIPLGRRTDEQYNTRECERELADASTEGQRNDSLMRLSWALVHSRQTDDVNRGISMLEASLDNSGSPLQTREKLYLLAVGHYRNGDYSKXSRQLVERCLEIQPDWRQAISLKKAIEDKIAKDGLIGIGIATTAVGLLVGGIAAAVARKK

SEQ ID NO: 71507 - protein, 360 aa, Setaria italica
  Transcript Sequence Number=SeqID_5533
  Gene Ontology: Mol. function=calcium-dependent phospholipid binding; Cellular component=cytoplasm
  Homolog annotation: Hit_ID=B6SUM2; Match level="QueryCoverage=67%, HitCoverage=100%, E-value=5e-99, Identity=74%"; Hit description =Annexin-like protein RJ4
  Pfam annotation: Domain name=Annexin; Domain location=129-197; Score =32.6; E_value=1.6e-06; Accession=PF00191.12; Description=Annexin
  Pfam annotation: Domain name=Annexin; Domain location=216-281; Score =18.3; E_value=0.00024; Accession=PF00191.12; Description=Annexin
  Pfam annotation: Domain name=Annexin; Domain location=291-356; Score =75.0; E_value=2.7e-19; Accession=PF00191.12; Description=Annexin
  Pfam annotation: Domain name=Annexin; Domain location=57-122; Score =95.0; E_value=2.6e-25; Accession=PF00191.12; Description=Annexin
  Pfam module annotation: Pfam domain module=Annexin::Annexin::Annexin:: Annexin; Domain location=129-197::216-281::291-356::57-122
MCCWCSCLECIHNIPPLNLLFLHFSDPALPGGGGGAASGPVSMASISVPNPVPSATEDAENIRKAVQGWGTDEKALIEILGHRTAAQRAEIAVAYEGLYNETLLDRLHSELSGDFRSAMMLWTMDPAARDAKLAHKALKKKGDRHVWVLIEVACASSPDHLVAVRKAYCAAYSASLEEDVAACPLYKDPLKQFLVRLVTSYRYSGELIDDELARAEAAALHDAVVAGKEPLRGDVVRIVGSRSKPQLKATFERFRQEHGKAIDDVLEERRSDQLAAVLKTAVWCLASPEKHFAEVIRSSIVGLGTDEESLTRAIVSRAEVDMRKVKEEYKARYRKTVTSDVNGDTSGYYNGILITLVGPE

SEQ ID NO: 71508 - protein, 351 aa, Setaria italica
  misc_feature (276)..(276): Xaa can be any naturally occurring amino acid
  Transcript Sequence Number=SeqID_5534
  Gene Ontology: Mol. function=protein binding; Cellular component =integral to membrane; Biological process=protein processing
  Homolog annotation: Hit_ID=B9T119; Match level="QueryCoverage=90%, HitCoverage=48%, E-value=1e-107, Identity=59%"; Hit description =Nicastrin, putative
  Pfam annotation: Domain name=Nicastrin; Domain location=249-351; Score=16.7; E_value=2e-10; Accession=PF05450.7; Description=Nicastrin
MAAGSALSLVAAAVCLALAVLAPAVSGDGATLESVPDLVKAMYRNIESFPCVRLLNLSGEIGCSNPGSEKIIAPIVRFKKGSDHLVQPSTVLLPLDQMSDFFLRVSNNPEFHQKVSGVLIESNGANNNLQELSPDRKFPQDAFAPYSNRSHDWNPAGSGIMWNRYDFPVFLLSEESTQTLREVSEKNEKTDNGYKANVAEFDLIMQTTKAQTHDSASCLKEHSCLPLGGHSVWASLPPIKNGSAEHQKPIILAITSQDSASFFRDRSIGSDSPISXGLIALLTAVDALSHIPDLSNLKKQLVFAVFNGEAWGYLGSRRFLHELDEGADSVNGINSLMIDQVLEIGSVGQAV

SEQ ID NO: 71509 - protein, 49 aa, Setaria italica
  Transcript Sequence Number=SeqID_5535
WRTCYCTYTNCKKTKDKFNLTLHAVPDGLLLMFFFLEMGTNHQVESLKT

SEQ ID NO: 71510 - protein, 38 aa, Setaria italica
  Transcript Sequence Number=SeqID_5536
AAKAARFGSLVPITGSDFVREVSQAPSDIWVIQTEYGI

SEQ ID NO: 71511 - protein, 250 aa, Setaria italica
  Transcript Sequence Number=SeqID_5537
  Gene Ontology: Mol. function=protein binding; Cellular component =cytoplasm; Biological process=apoptosis
  Homolog annotation: Hit_ID=B4FF90; Match level="QueryCoverage=100%, HitCoverage=100%, E-value=1e-100, Identity=73%"; Hit description =Phosducin-like protein 3
  Pfam annotation: Domain name=Phosducin; Domain location=1-227; Score=- 78.4; E_value=6.7e-05; Accession=PF02114.8; Description=Phosducin
MADYHFVYKDVEGTSTQWDDIQRRLGNLPPKPEPFKPPAFAPKVAADEQPKSKEWLDAREPEELEELEDDLDDDRFLEQYRKMRLAELREAAKAARFGSIVPITGSDFVREVSQAPSDIWVVVFLFKDGIPECGLLQNCLEELATRYPATKFVKIISTDCIPNYPDRNVPTILVYNNSAVKGTYVGLQKFGGKRCTPESVALALCQSDPVLNDGHGGGDSSRDNVIEGVRRKFIEKVVAQHEEREEEDSD

SEQ ID NO: 71512 - protein, 121 aa, Setaria italica
  Transcript Sequence Number=SeqID_5538
  Gene Ontology: Mol. function=translation release factor activity, codon specific; Cellular component=cytoplasm; Biological process =translational termination
  Homolog annotation: Hit_ID=B6SSD2; Match level="QueryCoverage=88%, HitCoverage=40%, E-value=3e-34, Identity=68%"; Hit description =Peptide chain release factor 2
  Pfam annotation: Domain name=PCRF; Domain location=4-94; Score=-37.1; E_value=0.0056; Accession=PF03462.10; Description=PCRF domain
WGVGDGWIDRSLLPKLLGIRTGGEEGACIMVTAVSDGVASELWAAKVFCMYTSWARKQGCKVGLIEKVPSKNGHVRSAAMEIESEYMFGILSGEKGMHRMTYFSLENSDTCQVIVLSVFVC

SEQ ID NO: 71513 - protein, 67 aa, Setaria italica
  Transcript Sequence Number=SeqID_5539
HQVYKTPSAPSTTKFVVVGPARSKIWWEKSQDGWPGPSASAQRHVFRAECKETQVKYCELMDEHWLY

SEQ ID NO: 71514 - protein, 310 aa, Setaria italica
  misc_feature (12)..(12): Xaa can be any naturally occurring amino acid
  Transcript Sequence Number=SeqID_5540
  Gene Ontology: Mol. function=translation release factor activity; Cellular component=cytoplasm; Biological process=translational termination
  Homolog annotation: Hit_ID=B6SSD2; Match level="QueryCoverage=51%, HitCoverage=60%, E-value=3e-75, Identity=86%"; Hit description =Peptide chain release factor 2
  Pfam annotation: Domain name=PCRF; Domain location=30-141; Score =36.0; E_value=6.8e-09; Accession=PF03462.10; Description=PCRF domain
  Pfam annotation: Domain name=RF-1; Domain location=178-282; Score= -13.3; E_value=0.00078; Accession=PF00472.12; Description=Peptidyl -tRNA hydrolase domain
  Pfam module annotation: Pfam domain module=PCRF::RF-1; Domain location=30-141::178-282
TLSALADAIRVXDHLKDLCFKAEEAKLISQLSEMDAINGELFKQAYKSSVDASEYLDRYQMHKLLKGPYDKEGACIMVTAVSDGVASELWAAKVFCMYTSWARKQGCKVGLIEKVPSKNGHVRSAAMEIESEYMFGILSGEKGMHRMTYSSLENSDTCQALSARVDVIPLFLDRPINLHLDDNDIEIAPTPCEYKKRDSRNCAAVRVVHKPSGVTAESSGERSYFANKLKATSRLKAKLLLIARELGVLDMKMITKQAIEDKCKRETRRYTFGPQKLVHDLNTGIQLSDLNLVLEGDIEQFIRGRIIARQ

SEQ ID NO: 71515 - protein, 48 aa, Setaria italica
  Transcript Sequence Number=SeqID_5541
  Subcellular localization annotation: CTP_CleavageSite=23; ConfidenceScore=5.04e-01
MATFLGSSPAFLARPVAKPHSISCAQPPRPPSVQNQPPPGEQPQQQSV

SEQ ID NO: 71516 - protein, 49 aa, Setaria italica
  misc_feature (15)..(15): Xaa can be any naturally occurring amino acid
  Transcript Sequence Number=SeqID_5542
  Homolog annotation: Hit_ID=B4FKL9; Match level="QueryCoverage=100%, HitCoverage=76%, E-value=2e-17, Identity=91%"; Hit description=Fiber protein Fb11
VVAASCLIAGFGLFXPAVVRPILDSWETAEKVPPPPLNDVVAGVTGKKK

SEQ ID NO: 71517 - protein, 123 aa, Setaria italica
  Transcript Sequence Number=SeqID_5543
DLLLFCAAVLAASPEYPALHWVPAGLSGAAATAVGEMAAVGGWGRASGRMVVAVMPEVVPPLKAVVKDSCVDADNDEIGAVKPPKEQAVVAAHQFRWLVSQVCYPKLGDLCWLVIPCALTTLD

SEQ ID NO: 71518 - protein, 114 aa, Setaria italica
  misc_feature (4)..(4): Xaa can be any naturally occurring amino acid
  misc_feature (14)..(14): Xaa can be any naturally occurring amino acid
  misc_feature (18)..(18): Xaa can be any naturally occurring amino acid
  Transcript Sequence Number=SeqID_5544
  Gene Ontology: Mol. function=transcription regulator activity; Cellular component=nucleus; Biological process=regulation of transcription
  Homolog annotation: Hit_ID=Q7XXQ5; Match level="QueryCoverage=45%, HitCoverage=20%, E-value=3e-16, Identity=82%"; Hit description=BHLH transcription factor
MGAXLEPGKTPKMXKSAXLNDAIRVVGELRSEAQKLKDSNESLQEKIKELKVCPVSYGQVIYGADQMGDGLLCDAMCCLGTSYCFIFLLYDPLFHLVKLLSRFNSSSQITTEYF

SEQ ID NO: 71519 - protein, 63 aa, Setaria italica
  Transcript Sequence Number=SeqID_5545
  Gene Ontology: Mol. function=calcium ion binding
  Homolog annotation: Hit_ID=B9SSH4; Match level="QueryCoverage=98%, HitCoverage=44%, E-value=3e-10, Identity=46%"; Hit description =Calcium ion binding protein, putative
LFARFDRDGDGAVGPDEFRAEMRELMLAVASGLGALPVQMVVEEGSLLRRAVDREMAAAATAA

SEQ ID NO: 71520 - protein, 161 aa, Setaria italica
  Transcript Sequence Number=SeqID_5546
  Subcellular localization annotation: CTP_CleavageSite=63; ConfidenceScore=5.24e-01
NCAIGSRGGGLDPALYPSPPALSAGHASAFLTQASFHSTTALPLLLQSYYPRRRPRGPLDLARSERPSGLDWLLLRCLAGLGEKIRRLLLAEKCRKITAHIYLEGAGGRKGSGQGQITSMDKTASVVLDIEGLPQPPDKCCSGSSLKLYLVVPCSSLRVSK

SEQ ID NO: 71521 - protein, 180 aa, Setaria italica
  misc_feature (151)..(151): Xaa can be any naturally occurring amino acid
  Transcript Sequence Number=SeqID_5547
LLVWGKIRRLLLAEKCRKITAHIYLEGAGGRKGSGQGQITSMDKTASVVLDIEGLPQPPDKCCSGSPKMIRALSRKGSNRMERRGGEEQEQEDLAKKLIIKVVPSQLDQPLVQNKALVAPHYTPCTPVLIDSGEGRSKRFNRFTSINPRKXILLFFATLSSMGTTILIYFTLGINSKAEA

SEQ ID NO: 71522 - protein, 87 aa, Setaria italica
  misc_feature (78)..(78): Xaa can be any naturally occurring amino acid
  Transcript Sequence Number=SeqID_5548
  Gene Ontology: Mol. function=protein disulfide oxidoreductase activity; Cellular component=cytoplasm; Biological process=electron transport chain
  Homolog annotation: Hit_ID=Q5QLR2; Match level="QueryCoverage=81%, HitCoverage=49%, E-value=7e-18, Identity=72%"; Hit description =Monothiol glutaredoxin-S5
  Pfam annotation: Domain name=Glutaredoxin; Domain location=19-76; Score=27.2; E_value=6.7e-05; Accession=PF00462.16; Description =Glutaredoxin
QQPAVAREEVRRAVAESPVLVVGRRGCCLSHVVKRLLQGLGVNPAVHEVAGEAELAGIVAAGDVALPAVFVGGRLLGXLDRLMAVHI

SEQ ID NO: 71523 - protein, 189 aa, Setaria italica
  Transcript Sequence Number=SeqID_5549
  Gene Ontology: Mol. function=phospholipase D activity; Cellular component=membrane; Biological process=phosphatidylcholine metabolic process
  Homolog annotation: Hit_ID=Q75KP6; Match level="QueryCoverage=95%, HitCoverage=22%, E-value=9e-66, Identity=68%"; Hit description =Phospholipase D alpha 1, putative, expressed
  Pfam annotation: Domain name=PLDc; Domain location=31-58; Score=39.0; E_value=1.9e-08; Accession=PF00614.14; Description=Phospholipase D. Active site motif
PPRRRAPAEYVPPERPDPDTDYERAQQARRFMIYVHAKTMIVDDEYIIVGSANINQRSMDGGRDTEIAMGAYQPSHLATRNRPARGEVHGFRVALWQEHLGQAEAAAAGELLLRPSSLACVRRVNQVAQQHWDMFASDTFQGDLPGHLMAYPIVVGDEGKITGMTTQFPDTKAKVLGSKSNVLPPILTT

SEQ ID NO: 71524 - protein, 124 aa, Setaria italica
  misc_feature (47)..(47): Xaa can be any naturally occurring amino acid
  Transcript Sequence Number=SeqID_5550
  Gene Ontology: Mol. function=serine-type peptidase activity; Biological process=proteolysis
  Homolog annotation: Hit_ID=O49540; Match level="QueryCoverage=58%, HitCoverage=17%, E-value=3e-24, Identity=63%"; Hit description =Lysosomal Pro-X carboxypeptidase - like protein
  Subcellular localization annotation: CTP_CleavageSite=66; ConfidenceScore=5.16e-01
SFVRSWVGVSVVFAALVVFAEAIIPPPPPVSYSSSASCSFFFSERVXFACVLQHRYYGESMPFGSKAKAYNNSKSLAYLTAEQAIADFAVLLTDLKRNLSAEGSPVVLFGGSYGGMLAAWMRLK

SEQ ID NO: 71525 - protein, 81 aa, Setaria italica
  Transcript Sequence Number=SeqID_5551
  Gene Ontology: Mol. function=serine-type peptidase activity; Cellular component=lysosome; Biological process=proteolysis
  Homolog annotation: Hit_ID=Q9FLH1; Match level="QueryCoverage=80%, HitCoverage=12%, E-value=4e-19, Identity=60%"; Hit description =Lysosomal Pro-X carboxypeptidase
MLRYYIVLLMVHSLLKQACTEMVMPMSYSEDRSMYPPYKFDYASYAENCIKSYGVRPRPRWITTNFGGHNITTVLEKFGSN

SEQ ID NO: 71526 - protein, 422 aa, Setaria italica
  Transcript Sequence Number=SeqID_5552
  Gene Ontology: Mol. function=serine-type peptidase activity; Cellular component=lysosome; Biological process=proteolysis
  Homolog annotation: Hit_ID=Q9FLH1; Match level="QueryCoverage=87%, HitCoverage=72%, E-value=1e-153, Identity=64%"; Hit description =Lysosomal Pro-X carboxypeptidase
  Pfam annotation: Domain name=Abhydrolase_1; Domain location=30-280; Score=-11.3; E_value=0.048; Accession=PF00561.12; Description =alphabeta hydrolase fold
  Pfam annotation: Domain name=Peptidase_S28; Domain location=3-392; Score=100.7; E_value=5e-27; Accession=PF05577.4; Description=Serine carboxypeptidase S28
  Pfam module annotation: Pfam domain module=Abhydrolase_1::Peptidase _S28; Domain location=30-280::3-392
LTTRRQSSPRRLPSRIRLLLPVLFFFRACRLACVLEHRYYGESMPFGSKAKAYNNSKSLAYLTAEQAIADFAVLLTDLKRNLSAEGSPVVLFGGSYGGMLAAWMRLKYPHIAVGALASSAPILQFEDIVPSTIFYDLVSDDFRRESLSCFQTIKDSWKVLDDQGNGQDGLLKLSKTFHLCQTLKTSGDLSDWLSSAYSYLAMVDYPIPSEFLMPLPANPIKEVCRNIDSQPEGTSILERIYAGVNVYYNYTGTVGCFDLNDDPHGMGGWDWQACTEMVMPMSYSEDRSMYPPYKFDYASYAENCIKSYGVRPRPRWITTNFGGHNITTVLEKFGSNIIFFNGLLDPWSGGGVLKNISESVIAIVAPLGAHHIDLRPATSDDPDWLVSLRESELKIISGWLSDYYGARGALFQPVAVKGSSAS

SEQ ID NO: 71527 - protein, 50 aa, Setaria italica
  Transcript Sequence Number=SeqID_5553
  Homolog annotation: Hit_ID=B6TS99; Match level="QueryCoverage=96%, HitCoverage=10%, E-value=1e-17, Identity=77%"; Hit description =Mov34/MPN/PAD-1 family protein
PDCFFSSWWLQIMLPEAIAIVMAPTDTTRKHGIFHLTDPCGLGVIHDCDA

SEQ ID NO: 71528 - protein, 482 aa, Setaria italica
  misc_feature (325)..(325): Xaa can be any naturally occurring amino acid
  Transcript Sequence Number=SeqID_5554
  Gene Ontology: Mol. function=RNA binding; Cellular component=endosome
  Homolog annotation: Hit_ID=B6TS99; Match level="QueryCoverage=100%, HitCoverage=93%, E-value=0.0, Identity=80%"; Hit description =Mov34/MPN/PAD-1 family protein
  Pfam annotation: Domain name=Mov34; Domain location=301-410; Score =74.5; E_value=3.9e-19; Accession=PF01398.13; Description=Mov34MPNPAD- 1 family
FRIADNLLRQADVYREENNLLDLYIILLRYSSLLLETIPKHHDYNAFKAREKEFLKKGPHNSQKLRSVLNELESLKPVVQQQFSNRNCGGAEEPNGVNGTYAASSGMEQYIPSPYMPKSLAGGPTGLLQKSFSSSKHQTTSLQNVQPERQLIKPYSTLPYPKEETLSRHSILGPNGLHGQWAGPVTGIRIEYPRNPELTQTDISSLVPSILNQDSLHGPITVSQDKNDDMLSVLSLDDGRWSLPVEEPASVSPGLEAEFSQLNIRQPSPFPVLAQVHSERGPIPPSRVADPRPGLAISDTGCYQNLHVPVALMECFLRVAEANTXKNLETCGILAGSLKKRTFYVTTLIIPKQKSTSDSCQATNEEEIFEVQDKGSLLSLGWIHTHPTQTCFLSSIDLHNHYAYQIMLPEAIAIVMAPTDTTRKHGIFHLTDPCGLGVIHDCDATGFHPHEEPQDGTPIYEHCSHVYMNPNVKFEMVDLREV

SEQ ID NO: 71529 - protein, 356 aa, Setaria italica
  Transcript Sequence Number=SeqID_5555
  Gene Ontology: Mol. function=oxidoreductase activity; Cellular component=intrinsic to endoplasmic reticulum membrane; Biological process=metabolic process
  Homolog annotation: Hit_ID=B9RLT7; Match level="QueryCoverage=86%, HitCoverage=65%, E-value=3e-82, Identity=47%"; Hit description =Dimethylaniline monooxygenase, putative
  Pfam annotation: Domain name=FMO-like; Domain location=12-353; Score=- 324.0; E_value=2.6e-10; Accession=PF00743.11; Description=Flavin -binding monooxygenase-like
  Pfam annotation: Domain name=Pyr_redox; Domain location=96-178; Score= 8.6; E_value=0.0009; Accession=PF00070.19; Description=Pyridine nucleotide-disulphide oxidore
  Pfam module annotation: Pfam domain module=FMO-like::Pyr_redox; Domain location=12-353::96-178
ADAVRLNTRVVRVAMAAPAPREASGGDVKWLVRSVHVQPDGSEDGVAAEEVFDAVVVANGHYSQPRLPKIQGMGEWSRRQLHSHSYRVPDPYRDETVVIVGCADSGLDIALDLSGVAKEVHLSARTVGDATTPAVSNILANHSDMHLHPQVHRLCEDGRVVFADGSSVVADTVIYCTGYLYSFPFLDTGGVVTVDDNRVGPLFEHTFPPALAPSLSFVGIPMRVFVPWFLEAQARWIARVLSGTAALPPEQDMLQAVQEDYRAREMAGLPARYSHDIGMFKTSEILEFVNRYTDLPNMEDWKMELLLTTLGNMNDNRETFQDRDDYSENVNQGFQRWLSLAGAQYEAAIAAAGGGG

SEQ ID NO: 71530 - protein, 82 aa, Setaria italica
  Transcript Sequence Number=SeqID_5556
VLHFYIGYNIVQVHDQEACIAPHKPLNHHSLFRPTKGKSRIDHQPITISTSCMRGIARSTQIANSNSSFGGEGLIKNTTKVH

SEQ ID NO: 71531 - protein, 243 aa, Setaria italica
  Transcript Sequence Number=SeqID_5557
  Gene Ontology: Mol. function=magnesium ion binding; Cellular component=chloroplast; Biological process=photosynthesis, light harvesting
  Homolog annotation: Hit_ID=B6T892; Match level="QueryCoverage=86%, HitCoverage=77%, E-value=1e-107, Identity=92%"; Hit description =Chlorophyll a-b binding protein
  Pfam annotation: Domain name=Chloroa_b-bind; Domain location=46-214; Score=301.9; E_value=1.4e-87; Accession=PF00504.13; Description =Chlorophyll A-B binding protein
FVFFLFLFSLLCSGLGSLLFFEAARPSFAVRAAADPDRPIWFPGSTPPPWLDGSLPGDFGFDPWGLGSDPESLRWNVQAELVHCRWAMLGAAGIFIPEFLTKIGILNTPFWYTAGEQQYFTDTTTLFIIELILIGWAEGRRWADIIKPGSVNTDPIFPSNKLTGTDVGYPGGLWFDPLGWGSGSPEKIKELRTKEIKNGRLAMLAVMGAWFQAEYTGTGPIDNLFAHLADPGHATIFQAFTPK

SEQ ID NO: 71532 - protein, 470 aa, Setaria italica
  misc_feature (13)..(13): Xaa can be any naturally occurring amino acid
  Transcript Sequence Number=SeqID_5558
  Gene Ontology: Mol. function=molecular_function; Cellular component =nucleus
  Homolog annotation: Hit_ID=B6SJW5; Match level="QueryCoverage=100%, HitCoverage=84%, E-value=0.0, Identity=73%"; Hit description =Nucleotide binding protein
  Pfam annotation: Domain name=WD40; Domain location=132-171; Score =12.6; E_value=1.3; Accession=PF00400.24; Description=WD domain, G -beta repeat
  Pfam annotation: Domain name=WD40; Domain location=201-239; Score =33.8; E_value=6.7e-07; Accession=PF00400.24; Description=WD domain, G-beta repeat
  Pfam annotation: Domain name=WD40; Domain location=243-281; Score =24.1; E_value=0.00059; Accession=PF00400.24; Description=WD domain, G-beta repeat
  Pfam annotation: Domain name=WD40; Domain location=285-335; Score =21.5; E_value=0.0035; Accession=PF00400.24; Description=WD domain, G- beta repeat
  Pfam annotation: Domain name=WD40; Domain location=386-422; Score =7.5; E_value=5.2; Accession=PF00400.24; Description=WD domain, G -beta repeat
  Pfam annotation: Domain name=eIF2A; Domain location=141-287; Score= -114.9; E_value=0.097; Accession=PF08662.3; Description=Eukaryotic translation initiation factor eIF
  Pfam module annotation: Pfam domain module=WD40::WD40::WD40::WD40::WD4 0::eIF2A; Domain location=132-171::201-239::243-281::285-335::386 -422::141-287
  Subcellular localization annotation: CTP_CleavageSite=20; ConfidenceScore=5.22e-01
LGTGNGSKALNFXGGNGASRAVAGSSRIGGGLGTSTSLGGSQGVANYDGKGTYIVFNAADTLFISDLNSLEKDPIKSIHFSNSNPLCHAFDPEAKEGHDLIIGMGSGDVYSMSLRQQLQDPGRKHVAAQHYNKGDKDGSSNGSRCTSVAWVPEREGIFVVSHTDGNLYVYDKNKDGNTDCTFPAVKDQSQFMVAHAKSSKSNPVARWHICQGSINAISFSPDGAYLATVGRDGYLRVFDFSKEQLIFGGRSYYGALLCCTWSSDGKYLLTGGEDDLVQVWSMDDRKIVAWGEGHNSWVSGVAFDSYWSPPSSDGNGENVYRFGSVGQDTQLLLWDLALDEIVVPLRHPSCASPTFSVGSPSAHWDNACPPTGVLQPSPRMRDVPKLSPLVAHRVHADPLSGLVFTNESILTICREGLIKIWARPDQSENNQQSNSSEFVLGSPVPKDRAITSSNKASGSSFKKPSSVLVT

SEQ ID NO: 71533 - protein, 47 aa, Setaria italica
  Transcript Sequence Number=SeqID_5559
DEHIVKCQALLKMYQSELSPIKSIIHLNWVLGSEIELHKVSGLSCIQ

SEQ ID NO: 71534 - protein, 351 aa, Setaria italica
  Transcript Sequence Number=SeqID_5560
  Gene Ontology: Mol. function=hydrolase activity; Cellular component =integral to membrane; Biological process=G-protein coupled receptor protein signaling pathway
  Homolog annotation: Hit_ID=B9RYU6; Match level="QueryCoverage=90%, HitCoverage=65%, E-value=5e-83, Identity=45%"; Hit description =Valacyclovir hydrolase, putative
  Pfam annotation: Domain name=Abhydrolase_1; Domain location=93-332; Score=93.4; E_value=7.7e-25; Accession=PF00561.12; Description =alphabeta hydrolase fold
  Pfam annotation: Domain name=DUF1234; Domain location=67-231; Score= -68.6; E_value=0.0027; Accession=PF06821.5; Description=AlphaBeta hydrolase family of unknown
  Pfam annotation: Domain name=DUF2305; Domain location=89-318; Score= -117.1; E_value=0.056; Accession=PF10230.1; Description =Uncharacterised conserved protein (DUF2
  Pfam annotation: Domain name=PGAP1; Domain location=61-235; Score= -84.2; E_value=0.035; Accession=PF07819.5; Description=PGAP1-like protein
  Pfam module annotation: Pfam domain module=Abhydrolase_1::DUF1234::DUF 2305::PGAP1; Domain location=93-332::67-231::89-318::61-235
VVRKSRAPEKGPAAAPCKWRSPRWSDCGCKSCVAWRGGGGRLHVAVKEPEAKDEAGTDSEEISAENAIFVHGFTSSSSFWAETVFRESSTLNSRLFAVDLLGFGQSPKPANCKYRLKDHVEAIERSLVEHHNLSSFHLVAHSMGCVIALALAAKHPTRVKSITLVAPPYFLPSEQKASQVALSRLAEKKLWPPLLFGSAVMSWYEHIGRTVCFLFCKNHLAWEWLFRLLTRKRDVDFRVRDLTRHTHHSAWHTMHNVICGGARLQDRNLEAVEAAGIPVMIIHGVRDPVVPVDCSRHLKAKLPHAELRLMAGCDHATVVSGRERGFAEELAAFWSGSRAQGARRRVYAGCC

SEQ ID NO: 71535 - protein, 74 aa, Setaria italica
  Transcript Sequence Number=SeqID_5561
  Gene Ontology: Mol. function=catalytic activity; Biological process =metabolic process
  Homolog annotation: Hit_ID=B6U7M4; Match level="QueryCoverage=100%, HitCoverage=9%, E-value=8e-28, Identity=78%"; Hit description =Cycloartenol synthase
DGGTPEEHAEVERLRQDFTDHRFQRRESADLLMRLQCAKQSSHRRDLPRIKLQKDEQVTEEIALNSLRRALDQF

SEQ ID NO: 71536 - protein, 118 aa, Setaria italica
  Transcript Sequence Number=SeqID_5562
  Gene Ontology: Mol. function=oxidoreductase activity, acting on single donors with incorporation of molecular oxygen, incorporation of two atoms of oxygen; Cellular component=chloroplast; Biological process=fatty acid biosynthetic process
  Homolog annotation: Hit_ID=B1PYN9; Match level="QueryCoverage=100%, HitCoverage=17%, E-value=1e-48, Identity=77%"; Hit description =Lipoxygenase
AQARASLISADGIIESTFSPGKYCMLLSSAVYDTFWRFDKEALPADLIRRGMAFRGADGELELTIKDYPYANDGLLVWDAIKEWVSAYVNHYYATASDIAGDVELQAFWTEVRTKGHA

SEQ ID NO: 71537 - protein, 125 aa, Setaria italica
  Transcript Sequence Number=SeqID_5563
  Gene Ontology: Mol. function=substrate-specific transmembrane transporter activity; Cellular component=integral to membrane; Biological process=transmembrane transport
  Homolog annotation: Hit_ID=Q2R0P9; Match level="QueryCoverage=65%, HitCoverage=17%, E-value=8e-28, Identity=71%"; Hit description=Sugar transporter family protein
  Subcellular localization annotation: CTP_CleavageSite=55; ConfidenceScore=5.51e-01
TASLALTLSVGTRAAPAAAPAMCLASVLAVVATFSVGYALVVNTYSAEILPTRLRAQGLSMGVAVNRLASGLVTMTFISLADAITMPGCFFLFAGLTVAAFVFVYTRLPETKGRSLEDMDELFDK

SEQ ID NO: 71538 - protein, 92 aa, Setaria italica
  Transcript Sequence Number=SeqID_5564
  Subcellular localization annotation: CTP_CleavageSite=14; ConfidenceScore=5.23e-01
TYGAPPSPPQSHLRLAHAPPRLVNGRPRRCHASPGLLHGRWWQTLSRKHSLRRGDLAMAGEDATVAGTAAVKRPRKEEEDEEDDDELDNVPI

SEQ ID NO: 71539 - protein, 72 aa, Setaria italica
  Transcript Sequence Number=SeqID_5565
  Gene Ontology: Mol. function=transferase activity, transferring glycosyl groups; Cellular component=integral to membrane; Biological process=cellulose biosynthetic process
  Homolog annotation: Hit_ID=Q651X6; Match level="QueryCoverage=98%, HitCoverage=9%, E-value=6e-30, Identity=77%"; Hit description =Cellulose synthase-like protein E6
LFLNVDCDMYSNNSDAIRDAMCFFLDEEMGHKIAFVQHPQNYNNMTKNNIYGNSFTVLSHVELRGFDGVDGP

SEQ ID NO: 71540 - protein, 156 aa, Setaria italica
  Transcript Sequence Number=SeqID_5566
PPAQNGSLLQQQGSDKAAAPAATSPVVQNGALPQQQGLDNVEAALAPAQNGAPPRHGHNKVDEPVAPAAVSPVACNGTLQGTLPESGLEKAGEDGDKVGNGEAQLLGDAGVPPLDGLEGNGVVKVVASAVAVPDSCGVVGSAQNDGERVVCWWQRE

SEQ ID NO: 71541 - protein, 128 aa, Setaria italica
  Transcript Sequence Number=SeqID_5567
  Gene Ontology: Mol. function=protein serine/threonine kinase activity; Biological process=protein amino acid phosphorylation
  Homolog annotation: Hit_ID=Q3E9E7; Match level="QueryCoverage=46%, HitCoverage=11%, E-value=1e-20, Identity=73%"; Hit description =Protein kinase family protein
  Pfam annotation: Domain name=Pkinase_Tyr; Domain location=1-123; Score=-162.9; E_value=0.0067; Accession=PF07714.9; Description =Protein tyrosine kinase
AVKQLAQDGVQGRNEFLVEVLMLTVLNHPNLVSLVGFCAQGDERLLVYEYMPFGSLESHLLVTCSHQTFCFLSGANVQCSSTKKKCMQCASGVGMFGGLYVLCQLKWLAYFFHWLFVITSLHLIPCMF

SEQ ID NO: 71542 - protein, 303 aa, Setaria italica
  Transcript Sequence Number=SeqID_5568
  Gene Ontology: Mol. function=protein serine/threonine kinase activity; Cellular component=plasma membrane; Biological process =protein amino acid phosphorylation
  Homolog annotation: Hit_ID=Q9LDZ5; Match level="QueryCoverage=92%, HitCoverage=73%, E-value=1e-102, Identity=61%"; Hit description =F2D10.13
  Pfam annotation: Domain name=Pkinase; Domain location=2-256; Score =79.8; E_value=1e-20; Accession=PF00069.17; Description=Protein kinase domain
  Pfam annotation: Domain name=Pkinase_Tyr; Domain location=4-258; Score=25.7; E_value=2e-15; Accession=PF07714.9; Description=Protein tyrosine kinase
  Pfam module annotation: Pfam domain module=Pkinase::Pkinase_Tyr; Domain location=2-256::4-258
RVQRINGQMVAVKQLAQDGVQGRNEFLVEVLMLTVLNHPNLVSLVGFCAQGDERLLVYEYMPFGSLESHLFDVPLGKKPLDWNTRVRIAVGVAEGLSYLHNVADPPVIYRDMKAANILLGEDFSPKLSDFGLAKVGPVGDRTHVSTRVMGTYGYCAPDYVVSGKLTMKSDIYSFGVLLLELITGRRIYDASRPKPEQSLLTWSRPFLHDKRKFYRLADPALLGCYPSSALNQLVVISIMCLQDQPHVRPIIADVVIGLNHVASQPYAPERPPVAMSSPANSGSPQFVGTPSRRRGGRRMAQYA

SEQ ID NO: 71543 - protein, 96 aa, Setaria italica
  Transcript Sequence Number=SeqID_5569
  Gene Ontology: Mol. function=peptidase activity; Cellular component =plasma membrane; Biological process=lipid transport
  Homolog annotation: Hit_ID=B6T2C9; Match level="QueryCoverage=73%, HitCoverage=36%, E-value=4e-35, Identity=98%"; Hit description=Non -specific lipid-transfer protein
  Pfam annotation: Domain name=Tryp_alpha_amyl; Domain location=34-93; Score=21.2; E_value=0.0034; Accession=PF00234.14; Description =Protease inhibitorseed storageLTP f
MTTMAAVRWWALVVAVAAAATVAGGDMNADRTECADQLVGLAPCLQYVQGQARAPPPDCCGGLRQVLGKSPKCLCVLVKDKDDPNLGIKINATLPS

SEQ ID NO: 71544 - protein, 188 aa, Setaria italica
  Transcript Sequence Number=SeqID_5570
  Gene Ontology: Mol. function=peptidase activity; Cellular component =plasma membrane; Biological process=lipid transport
  Homolog annotation: Hit_ID=B6T2C9; Match level="QueryCoverage=69%, HitCoverage=67%, E-value=2e-64, Identity=93%"; Hit description=Non -specific lipid-transfer protein
  Pfam annotation: Domain name=Tryp_alpha_amyl; Domain location=28-106; Score=50.6; E_value=6e-12; Accession=PF00234.14; Description=Protease inhibitorseed storageLTP f
TIITYRGRGGSGGGDGPGGEGNADRTECADQLVGLAPCLQYVQGQARAPPPDCCGGLRQVLGKSPKCLCVLVKDKDDPNLGIKINATLALALPSACGATRANASHCAQLLHIPPGSKDAAIFSPGGDKGSSAAPAKDNSTATTDSHALQSTNGGGGGVSTAATAGVALTAVLAGYLLLLVPELSPSSF

SEQ ID NO: 71545 - protein, 98 aa, Setaria italica
  Transcript Sequence Number=SeqID_5571
  Subcellular localization annotation: CTP_CleavageSite=10; ConfidenceScore=5.18e-01
MAASSSSAPTAAAAAAAAEATDGPVLSVVSKRLRALRKKYNRITQMEESLAAGKKLNPEQEEVLRSKTVVVAQIEELERLRAPLASALAEELSSRPAP

SEQ ID NO: 71546 - protein, 58 aa, Setaria italica
  Transcript Sequence Number=SeqID_5572
  Homolog annotation: Hit_ID=B6SUT0; Match level="QueryCoverage=55%, HitCoverage=10%, E-value=5e-09, Identity=84%"; Hit description =Carbonic anhydrase
MTTSIGNAAFLLLLLTACCATTLACDPNGAKFGYTGSVGPDHWGTLSPNFTQCARGTN

SEQ ID NO: 71547 - protein, 71 aa, Setaria italica
  Transcript Sequence Number=SeqID_5573
FGIKWLQSCSCILFIFHCIVLSSYLFFYLVYQDFQRRKMCSLAQTRYLQHPNEKVTSASHSVMVSFLSSGS

SEQ ID NO: 71548 - protein, 247 aa, Setaria italica
  misc_feature (11)..(11): Xaa can be any naturally occurring amino acid
  misc_feature (26)..(26): Xaa can be any naturally occurring amino acid
  misc_feature (46)..(46): Xaa can be any naturally occurring amino acid
  misc_feature (58)..(58): Xaa can be any naturally occurring amino acid
  misc_feature (168)..(168): Xaa can be any naturally occurring amino acid
  Transcript Sequence Number=SeqID_5574
LFKEAGPVTGXLCNQYSCANDKAKKXVETCVWEYAQEIYCHLRAAXVRLDNRGKDKEXKASFLMVVVFAAEVTKHRLNAKSSESFQPEVAARILVAFSSVEHLRRLRLPEYTEAVRRAVLVNQENAAAIALFIESMPSYAELTNQPDFQRRKMCSLAQTRYLQHPNEXKVTSASHSVMVSFLSSGSGTDQDDRTALKEQLIFYYIKRSLEAYPGVTPFDGLASGVAALVRHLPAGSPAILFCIPIRP

SEQ ID NO: 71549 - protein, 700 aa, Setaria italica
  Transcript Sequence Number=SeqID_5575
  Subcellular localization annotation: CTP_CleavageSite=33; ConfidenceScore=5.24e-01
DSLPISPRLLLLGARAFAMSAKDLPSNSSSGNSASTAKNLGRGESANGHDDNDPVVAVGRMLEDVEQGGQSIDDLDHLALAGIGYALASADEVQFRRILVSLLRICGRIGSLAVGVRVLKLVEWLVIGFVESRKMRKVQVLFEIILPEKCETEGYVLFPVVMAACGGLRALRVASARYRLDFDPRLKEVPERTIRFAAERVVLEGRRADDQRILVQCIALGLTRCGQVMFHESVLQCICMGLLKELLPLPDMLRMSVEIAEGKSAEFVKAQVNQHLDSVLFKEAGPVTGVLCNQYSCANDKAKNFVETCVWEYAQEIYCHLRAALLLHRGKQDDLITEIDKIAEASFLMVVVFAAEVTKHRLNAKSSESFQPEVAARILVAFSSVEHLRRLRLPEYTEAVRRAVLVNQENAAAIALFIESMPSYAELTNQPDLPSLAGTKYIWHRDEVQTSRILFYLRVVPTCVGLIPAHMIRDKVASIMFLYLQHPNEKVTSASHSVMVSFLSSGSGTDQDDRTALKEQLIFYYIKRSLEAYPGVTPFDGLASGVAALVRHLPAGSPAILFCIHSLVVKAKDLCDTAMIQDKSLWRSWEESTEPCKKTLDLLLRLIFLVDIQSFPYLLKELAEFVTLLPKEAQDVLLDDMHAHVAESDDVTRKPVLVSWLQSLSYISSQSSRSESRSKATSASSVGSDELTLNRTMARL

SEQ ID NO: 71550 - protein, 59 aa, Setaria italica
  Transcript Sequence Number=SeqID_5576
GMSTWLTVGEGPLERDVNVHGVLHGDTLQDQGFTHHESQGSLGTPGWRQPACCVHTKMV

SEQ ID NO: 71551 - protein, 87 aa, Setaria italica
  Transcript Sequence Number=SeqID_5577
VFVPVLKAAVVHCVALGDDNTKEMELVHRWRGDGFRLRHVCWSSCLQRNVVVGPGLQRLMRCGTTSEDGACNNNNVPATHLAATCGG

SEQ ID NO: 71552 - protein, 78 aa, Setaria italica
  misc_feature (41)..(41): Xaa can be any naturally occurring amino acid
  Transcript Sequence Number=SeqID_5578
  Gene Ontology: Mol. function=acyltransferase activity; Cellular component=plasma membrane; Biological process=metabolic process
  Homolog annotation: Hit_ID=A6N1N6; Match level="QueryCoverage=97%, HitCoverage=63%, E-value=8e-34, Identity=89%"; Hit description=1 -acyl-sn-glycerol-3-phosphate acyltransferase zeta (Fragment)
NNQWAVVCDVWYLPPQYLREGETAIAFAERVRDMIAARAGXKKVPWDGYLKHNRPSPKHTEEKQRIFAESVLMRLEEK

SEQ ID NO: 71553 - protein, 66 aa, Setaria italica
  Transcript Sequence Number=SeqID_5579
RFCMPFLVIKLNRHFQTIALAAKIYFPPIPLFIVVSTTAISMNHLPCTQLLIIIISRSPRVSHRTA

SEQ ID NO: 71554 - protein, 596 aa, Setaria italica
  Transcript Sequence Number=SeqID_5580
  Gene Ontology: Mol. function=aminoacyl-tRNA ligase activity; Cellular component=cytoplasm; Biological process=tRNA aminoacylation for protein translation
  Homolog annotation: Hit_ID=Q7XLG5; Match level="QueryCoverage=97%, HitCoverage=86%, E-value=0.0, Identity=93%"; Hit description =OSJNBa0039C07.11 protein
  Pfam annotation: Domain name=HGTP_anticodon; Domain location=479-567; Score=87.1; E_value=6.4e-23; Accession=PF03129.12; Description =Anticodon binding domain
  Pfam annotation: Domain name=tRNA-synt_2b; Domain location=15-312; Score=296.1; E_value=7.6e-86; Accession=PF00587.17; Description=tRNA synthetase class II core domain (G, H, P, S and T)
  Pfam module annotation: Pfam domain module=HGTP_anticodon::tRNA-synt _2b; Domain location=479-567::15-312
RRGLYDLPAPPGGAVKANVLAFWRQHFVLEEGMLEVDCPCVTPEVVLKASGHVDKFTDLMVKDEKTGNCYRADHLLKDFCKDKLEKDHTLSPEQTEEYNKILAILDDLSAEQLGAKIREYGIVAPDTKNPLSDPYPFNLMFQTSIGPSGLSSGYMRPETAQGIFVNFKDLYYYNGNKLPFAAAQIGQAFRNEISPRQGLLRVREFTLAEIEHFVDPEDKSHPKFGDVSDLEFLMFPREDQMAGRSAKRLKIGNAVSEGTVNNETLGYFIGRVYLFLTQLGIDKDRLRFRQHLPNEMAHYAADCWDAEIECSYGWIECVGIADRSAYDLRAHSDKSGEKLEAHEKFAEPREVEKLVITPSKKELGLAFKGNQRMVLEALEAMGEIEALDMKAVLESKGEVEFKVCTLGKDVTIKKSMVSINIEKKKEHQRKFTPSVIEPSFGIGRIIYCLFEHCFYQRPGKTEDEQLNVFGFPPLVAPIKCTVFPLVKLEKFEVVAKKISKALTAAGISHIIDMTGNTIGKRYARTDEIGVPLAITVDNTTSVTVRDRDSKDQIRVEVDEVASVVKEVTDGQSTWADIMWRYPAHTASAVDDEEAEP

SEQ ID NO: 71555 - protein, 145 aa, Setaria italica
  Transcript Sequence Number=SeqID_5581
  Gene Ontology: Mol. function=oxidoreductase activity; Biological process=oxidation reduction
  Homolog annotation: Hit_ID=B6TBV5; Match level="QueryCoverage=97%, HitCoverage=39%, E-value=1e-47, Identity=72%"; Hit description =Leucoanthocyanidin dioxygenase
  Pfam annotation: Domain name=2OG-FeII_Oxy; Domain location=25-125; Score=109.3; E_value=1.3e-29; Accession=PF03171.12; Description=2OG -Fe(II) oxygenase superfamily
RQLLGSMAADLGVGEAALLGAFSGKRQSMAIHHYPPCRHPEKVIGNTAHTDGLALTALLHVDDTPGLQMLQGGRWFPVRPRPGAMVVNVGDILHILTNGAYRSAEHRVVVNAERGRTTAVIFQDASVGGMVAPLPELLVDGGEAR

SEQ ID NO: 71556 - protein, 90 aa, Setaria italica
  misc_feature (47)..(47): Xaa can be any naturally occurring amino acid
  Transcript Sequence Number=SeqID_5582
  Pfam annotation: Domain name=DUF1298; Domain location=17-86; Score= -47.9; E_value=9.2e-06; Accession=PF06974.5; Description=Protein of unknown function (DUF1298)
MLSALLVSDSIATCQSKQAAGAIFHRMISHTTISFSNMIGPVEQVEXFCGHPVVFIAPSGYWFLPSKLSYFVVTFYFPTLIAHKLAKCPV

SEQ ID NO: 71557 - protein, 169 aa, Setaria italica
  Transcript Sequence Number=SeqID_5583
  Pfam annotation: Domain name=DUF1298; Domain location=1-104; Score= -16.6; E_value=3.5e-08; Accession=PF06974.5; Description=Protein of unknown function (DUF1298)
LSIFERCTRMLSALLVSDSIATCQSKQAAGAIFHRMISHTTISFSNMIGPVEQVEFCGHPVVFIAPSGYGPPEVSTRELYSHVMHIIAKCPECYSSSSKSIRKSVRFSDSSMASFSDISPFFDFSFGFSTCPVDFRTLQFWLTFSSTSSASSPSSSSSSSDSGCAAALS

SEQ ID NO: 71558 - protein, 95 aa, Setaria italica
  Transcript Sequence Number=SeqID_5584
  Subcellular localization annotation: CTP_CleavageSite=70; ConfidenceScore=5.85e-01
LSVPARDVRRPGKGRGKPSAARSPSASRRHLSSSSSSWGRARRPSRGTAAPYSWSSFSSTATDDEVAPFSSSSDGEGRGGEEAETRTLFSSLSFS

SEQ ID NO: 71559 - protein, 68 aa, Setaria italica
  misc_feature (54)..(54): Xaa can be any naturally occurring amino acid
  Transcript Sequence Number=SeqID_5585
MASRDFLGRFGRDGGAPAAGGGSAATVDSDDIELSLGLSLGGCFGADPAHERRXPRLVRSTSIPSICS

SEQ ID NO: 71560 - protein, 142 aa, Setaria italica
  Transcript Sequence Number=SeqID_5586
  Gene Ontology: Mol. function=protein binding; Cellular component =intracellular; Biological process=transport
  Homolog annotation: Hit_ID=B1B5D4; Match level="QueryCoverage=63%, HitCoverage=28%, E-value=2e-38, Identity=82%"; Hit description =UPF0737 protein 2
  Pfam annotation: Domain name=DUF1675; Domain location=7-140; Score =2.3; E_value=2.6e-07; Accession=PF07897.3; Description=Protein of unknown function (DUF1675)
  Subcellular localization annotation: CTP_CleavageSite=84; ConfidenceScore=5.15e-01
MQVISFESESLCLSVLVASAGSGAEAKSPPAMNTAETSGGQSSSRPPTASGTGRPSNGTTGREQPPLRTLRSLTMRTASTGDLRNSMVEDMPMVSYKVEGPSGRKTDGFLYKYRKGEEVRIVCVCHGNFLTPAEFVRHAGGG

SEQ ID NO: 71561 - protein, 318 aa, Setaria italica
  Transcript Sequence Number=SeqID_5587
  Gene Ontology: Mol. function=protein binding; Cellular component =intracellular; Biological process=transport
  Homolog annotation: Hit_ID=B6SM63; Match level="QueryCoverage=91%, HitCoverage=90%, E-value=8e-69, Identity=52%"; Hit description =UPF0737 protein 5
  Pfam annotation: Domain name=DUF1675; Domain location=31-309; Score =288.8; E_value=1.2e-83; Accession=PF07897.3; Description=Protein of unknown function (DUF1675)
MASRDFLGRFGRDGGAPAAGGGSAATVDSDDIELSLGLSLGGCFGADPAHEAKKPRLVRSTSIPSICSLPGGFPSGEEPAAVTAPPSDLLRTSSLPTEYMEDRLRRRAMQSQRRLEAKRKRLERRNSMNSGRSGTNASAAVCRDEALEQTVPSGFQFRRTVALQGTTSSSVPEQASAGSGAEAKSPPAMNTAETSGGQSSSRPPTASGTGRPSNGTTGREQPPLRTLRSLTMRTASTGDLRNSMVEDMPMVSYKVEGPSGRKTDGFLYKYRKGEEVRIVCVCHGNFLTPAEFVRHAGGGDVTNPLRHIVVNPQQSVFL

SEQ ID NO: 71562 - protein, 172 aa, Setaria italica
  misc_feature (159)..(159): Xaa can be any naturally occurring amino acid
  Transcript Sequence Number=SeqID_5588
  Gene Ontology: Mol. function=acid-amino acid ligase activity; Cellular component=intracellular; Biological process=ubiquitin -dependent protein catabolic process
  Homolog annotation: Hit_ID=Q6YU89; Match level="QueryCoverage=98%, HitCoverage=9%, E-value=8e-60, Identity=73%"; Hit description =Putative HECT ubiquitin-protein ligase 3
LGISGILKDVLSGSGLVAGTTVTPTLTRPADQIIEIVKLADELLPPLPVGTISLPMYSDVHMKGSSVKKSTCSKQGEPGSIENELSGREKLLRDQPELLHQFGMDLLPIMTQVYGSSVSGSVRHKCLSVIGKLMYYSSAEMIQSLLSTTNISSFLAGIXGWKDPQVLNPCSS

SEQ ID NO: 71563 - protein, 246 aa, Setaria italica
  Transcript Sequence Number=SeqID_5589
  Gene Ontology: Mol. function=acid-amino acid ligase activity; Cellular component=intracellular; Biological process=ubiquitin -dependent protein catabolic process
  Homolog annotation: Hit_ID=Q6YU89; Match level="QueryCoverage=94%, HitCoverage=13%, E-value=2e-76, Identity=63%"; Hit description =Putative HECT ubiquitin-protein ligase 3
IIILGSGSKFICRCILDQPELLHQFGMDLLPIMTQVYGSSVSGSVRHKCLSVIGKLMYYSSAEMIQSLLSTTNISSFLAGILGWKDPQVLIPALQIAEVLMEKLPEIFLKMFVREGVVHAVELLICPEFSGQVTPQMSQLDNHVDSITSSCSRRNRCRNNAVNTENNLPDEPKRSHSVIANALLSTTEVQNNDLCALVSNLAKSFKDKYFPSEPGSTDISVTDDLLKLRVLCAKLNTTADTIKTKD

SEQ ID NO: 71564 - protein, 88 aa, Setaria italica
  Transcript Sequence Number=SeqID_5590
  Subcellular localization annotation: CTP_CleavageSite=57; ConfidenceScore=5.80e-01
MAKEFPVPPVVFTPSTPTHRRHPAPGMGASPPPAFAPPRPSTSSAANPLPFMSFDVSAAAASSSSAPPLFAGPMGVGGSGASFEDEPP

SEQ ID NO: 71565 - protein, 90 aa, Setaria italica
  Transcript Sequence Number=SeqID_5591
  Gene Ontology: Mol. function=transcription factor activity; Cellular component=nucleus; Biological process=regulation of transcription, DNA-dependent
  Homolog annotation: Hit_ID=B9T3F1; Match level="QueryCoverage=75%, HitCoverage=18%, E-value=1e-16, Identity=60%"; Hit description=DNA binding protein, putative
  Pfam annotation: Domain name=AP2; Domain location=19-70; Score=82.1; E_value=1.9e-21; Accession=PF00847.12; Description=AP2 domain
AAITGGVGKLRRRQRGRVSKYRGVRRRPWGKWAAEIRDPHRAVRKWLGTFDTAEDAARAYDIAAIEFRGRRAKLNFPADVTPAPAPSWAP

SEQ ID NO: 71566 - protein, 716 aa, Setaria italica
  misc_feature (25)..(25): Xaa can be any naturally occurring amino acid
  misc_feature (38)..(38): Xaa can be any naturally occurring amino acid
  Transcript Sequence Number=SeqID_5592
  Gene Ontology: Mol. function=inositol or phosphatidylinositol kinase activity; Biological process=phosphoinositide-mediated signaling
  Homolog annotation: Hit_ID=B9V0S2; Match level="QueryCoverage=97%, HitCoverage=56%, E-value=0.0, Identity=78%"; Hit description =Phosphatidylinositol kinase
  Pfam annotation: Domain name=Integrin_alpha; Domain location=100-114; Score=7.2; E_value=1.7; Accession=PF00357.12; Description=Integrin alpha cytoplasmic region
  Pfam annotation: Domain name=Integrin_alpha; Domain location=123-137; Score=4.1; E_value=5.9; Accession=PF00357.12; Description=Integrin alpha cytoplasmic region
  Pfam annotation: Domain name=Integrin_alpha; Domain location=166-180; Score=9.8; E_value=0.59; Accession=PF00357.12; Description=Integrin alpha cytoplasmic region
  Pfam annotation: Domain name=Integrin_alpha; Domain location=79-93; Score=3.1; E_value=8.7; Accession=PF00357.12; Description=Integrin alpha cytoplasmic region
  Pfam module annotation: Pfam domain module=Integrin_alpha::Integrin _alpha::Integrin_alpha::Integrin_alpha; Domain location=100-114::123 -137::166-180::79-93
KQRLLSLRVVSVAGLSPPRRVGGGXNVAAAEDAVGSGXKQPATPSSEDNKLLKRLSIGPKMRDALLFRRSGEKDEEQDRDGFFKRLLRDSRDKEEEDGDREGFFKRLLKDSREKEHEEDEGDRDGFFRRLLRDSKEEDIELTPSSEGLLKRFFRDKEDRHGEDDEKEGFFRRIFKDKNEERRDSINARHGDEERVGKSLEDDDREGFFRKIFKEKNEERKDGAHSKQDEREKAGANIEEDKRDGFFRQLFKEKNDERKEGSTPGKKEEDEKGHKNTDDDNFFRRLFKDKNEEKKGATHDRNEDDKSEEADKENFFRKLFKDKHEERRTEGLEKNDDDGRSTSGIEEEDNPEFLSFRRLFRVHPEDAKGGNIETSQPNNLTEGSPGSESFFKRLFRDRDRSLEDSELFGSKKHPGSTGTNEKQSGKPPLPNNTIAELRKGSYYASLELVQSLCDTSYGLVDIFPVEDRKIALRESLAEINSQIASAEKNGGVCFPMGKGIYRVVHIPEDESVLLNSREKAPYLICVEVLKAEAPSHSKGPSDAHKLSKGGIPLANGDVQLPKPPPWAYPLWSRHETQNYETDRMLKSTSQVIDQAMAQLWETKVKFVNVSFSVEKLGRSRSLAISDTDRPRHAKTDSHDASEDFQAIDDQPIEWVKVTLSAVPGVSMDDVDENEPTRKKDHRRVPSTIAIEEVKAAALKGEAPPGLPLKGVGQSTLK

SEQ ID NO: 71567 - protein, 146 aa, Setaria italica
  misc_feature (7)..(7): Xaa can be any naturally occurring amino acid
  misc_feature (40)..(40): Xaa can be any naturally occurring amino acid
  Transcript Sequence Number=SeqID_5593
  Gene Ontology: Mol. function=binding; Cellular component=integral to membrane; Biological process=transport
  Homolog annotation: Hit_ID=Q5ZF44; Match level="QueryCoverage=90%, HitCoverage=34%, E-value=4e-53, Identity=80%"; Hit description =Mitochondrial phosphate translocator
  Pfam annotation: Domain name=Mito_carr; Domain location=16-107; Score= 60.1; E_value=8.4e-15; Accession=PF00153.19; Description =Mitochondrial carrier protein
RAPSEPXGRIEMYSPAFYAACTAGGVASCGLTHMTVTTDXRTYVKCNMQIDPAKYKSISSGFGVLLKEQGAKGFFRGWVPTLLGYSAQGACKFGFYEFFKKYYSDIAGPEYAAKYKTLIYLAGSASAEVIADVRPYQVGGLVGTVR

SEQ ID NO: 71568 - protein, 188 aa, Setaria italica
  misc_feature (138)..(138): Xaa can be any naturally occurring amino acid
  misc_feature (151)..(151): Xaa can be any naturally occurring amino acid
  Transcript Sequence Number=SeqID_5594
  Gene Ontology: Cellular component=chloroplast envelope
MGRKRKELLSSAPWRTGEAAEDEEAARLSREGKVSVTNNPGETATMNVPRSRRQDLDLTVDDFDEEEIDPELRYSFQRNSRFLKRVFSVDTLVKPLPPVMAYSVSRNVNFFFRIFTQFWDEEGIANAQKSLGLGSDDXPAGCADCSQTMFXVLSSELGCPRHWRSVICMLQKQCVCVCVCVVFLKFGL

SEQ ID NO: 71569 - protein, 29 aa, Setaria italica
  Transcript Sequence Number=SeqID_5595
YSTRSDDLSSLCGPVLDDVAVVSVRAKRG

SEQ ID NO: 71570 - protein, 116 aa, Setaria italica
  Transcript Sequence Number=SeqID_5596
  Gene Ontology: Mol. function=nutrient reservoir activity; Cellular component=cell wall
  Homolog annotation: Hit_ID=Q43557; Match level="QueryCoverage=81%, HitCoverage=25%, E-value=3e-31, Identity=63%"; Hit description =Unidentified
  Pfam annotation: Domain name=DUF642; Domain location=1-112; Score= -91.5; E_value=7e-06; Accession=PF04862.4; Description=Protein of unknown function, DUF642
QRGADVRAGGAPEHLGVRTVPGRRYALSFTVGDAGNACRGSLVVEAYAGRESVKVAYESEGKGGARRAVLPFRAAAARTRIVFFSSFYSTRSDDLSSLCGPVLDDVAVVSVRAKRG

SEQ ID NO: 71571 - protein, 225 aa, Setaria italica
  misc_feature (156)..(156): Xaa can be any naturally occurring amino acid
  Transcript Sequence Number=SeqID_5597
  Gene Ontology: Cellular component=cell wall
  Homolog annotation: Hit_ID=Q43557; Match level="QueryCoverage=100%, HitCoverage=58%, E-value=3e-77, Identity=62%"; Hit description =Unidentified
  Pfam annotation: Domain name=DUF642; Domain location=1-225; Score =306.1; E_value=7.2e-89; Accession=PF04862.4; Description=Protein of unknown function, DUF642
LRGTRVLGSSSIPSWQTSGFVEYIPSGQKQGDMLLVVPEGAYAVRLGNEASIRPSVGRAAPGARYSLTFSAARTCAQAERLNISASGQSGLLAIQTTYSSNGWDSYAWAWVAAVDSSGEVEVSIHNPGVADDPACGPLIDSVAVKALNPPRRTNRXTLVKNGDFEEGPYILPGTKWGVLIPSRVVDDHSPLPGWMVESLKAVRYVDGGSFAVPRGRRAVELLAGR

SEQ ID NO: 71572 - protein, 346 aa, Setaria italica
  Transcript Sequence Number=SeqID_5598
  Gene Ontology: Mol. function=catalytic activity; Biological process =cellular metabolic process
  Homolog annotation: Hit_ID=B6TR31; Match level="QueryCoverage=97%, HitCoverage=99%, E-value=1e-123, Identity=63%"; Hit description =Dihydroflavonol-4-reductase
  Pfam annotation: Domain name=3Beta_HSD; Domain location=17-262; Score= -53.1; E_value=1.3e-06; Accession=PF01073.11; Description=3-beta hydroxysteroid dehydrogenaseisomerase family
  Pfam annotation: Domain name=Epimerase; Domain location=16-260; Score= 84.1; E_value=4.9e-22; Accession=PF01370.13; Description=NAD dependent epimerasedehydratase family
  Pfam annotation: Domain name=KR; Domain location=15-141; Score=-87.9; E_value=0.055; Accession=PF08659.2; Description=KR domain
  Pfam annotation: Domain name=NAD_binding_4; Domain location=18-244; Score=-43.3; E_value=2.4e-06; Accession=PF07993.4; Description=Male sterility protein
  Pfam annotation: Domain name=NmrA; Domain location=16-279; Score= -102.0; E_value=0.025; Accession=PF05368.5; Description=NmrA-like family
  Pfam annotation: Domain name=Polysacc_synt_2; Domain location=16-262; Score=-166.5; E_value=0.002; Accession=PF02719.7; Description =Polysaccharide biosynthesis protein
  Pfam annotation: Domain name=adh_short; Domain location=14-140; Score= -24.9; E_value=0.0006; Accession=PF00106.17; Description=short chain dehydrogenase
  Pfam module annotation: Pfam domain module=3Beta_HSD::Epimerase::KR::N AD_binding_4::NmrA::Polysacc_synt_2::adh_short; Domain location=17 -262::16-260::15-141::18-244::16-279::16-262::14-140
MVGRTEDGAAGSGETVCVTGAGGYIASWLVKLLLARGYTVHGTVRDLGEKKTAHLRQLEKASENLKLFKADLLDYDAMAAAIVGCQGVFHVATPVPSGKITDPEREMLGPAVNGTTNVLKAASAANVRRVVVVSSMVAVEIDPKDWPKDKIKDEGCWSDKEACRNNEDWYSVAKITSEQAALEYGKQTGLDVVTVNPAVVFGPLLQSTLNTSCQFLVYFLKGGPDQMRNKLWHIVDVRDTADALLLVYEAPEASGRHICAPHFISARDLLDLLKSMYTEYPFMSKESICDMDHPAPMTSDKLKKLGWKVRSLKETIADTIEFCKKAGFLEDVAGNPCRFPDIYNKI

SEQ ID NO: 71573 - protein, 134 aa, Setaria italica
  Transcript Sequence Number=SeqID_5599
  Gene Ontology: Mol. function=transferase activity
  Homolog annotation: Hit_ID=B9SDG1; Match level="QueryCoverage=90%, HitCoverage=58%, E-value=2e-27, Identity=35%"; Hit description =Pentatricopeptide repeat-containing protein, putative
  Pfam annotation: Domain name=PPR; Domain location=23-57; Score=47.1; E_value=6.6e-11; Accession=PF01535.12; Description=PPR repeat
  Pfam annotation: Domain name=PPR; Domain location=58-92; Score=38.5; E_value=2.7e-08; Accession=PF01535.12; Description=PPR repeat
  Pfam annotation: Domain name=PPR; Domain location=93-127; Score=23.7; E_value=0.00075; Accession=PF01535.12; Description=PPR repeat
  Pfam module annotation: Pfam domain module=PPR::PPR::PPR; Domain location=23-57::58-92::93-127
PIPCVPCLSSVACLRDNLTPNCVTYTVLIDAHCRTGNVDGAEQVLLQMEEKSVSPNVVTFSSILNGLVKRGCLNKAADYMRKMKDSGIAPNVVTYGILIDGFFKFQGQEAALDVYQDMLHEGVEANNFVVDSLV

SEQ ID NO: 71574 - protein, 106 aa, Setaria italica
  Transcript Sequence Number=SeqID_5600
  Gene Ontology: Mol. function=GTP binding; Cellular component =intracellular
  Homolog annotation: Hit_ID=B6SV10; Match level="QueryCoverage=78%, HitCoverage=16%, E-value=5e-21, Identity=65%"; Hit description=Small GTP-binding protein domain
  Subcellular localization annotation: CTP_CleavageSite=48; ConfidenceScore=5.11e-01
MALLLHPRLPSHPLRAATQHHHAISDSSCLVPLPGLARKRTPFAVTCRAARVKEAAPTTRAAAPPTPASLAKEAHKYFDHAVVTVRAGDGGHGAVLAMPPAPSTDA

SEQ ID NO: 71575 - protein, 416 aa, Setaria italica
  misc_feature (270)..(270): Xaa can be any naturally occurring amino acid
  Transcript Sequence Number=SeqID_5601
  Gene Ontology: Mol. function=protein serine/threonine kinase activity; Biological process=protein amino acid phosphorylation
  Homolog annotation: Hit_ID=Q7F9F9; Match level="QueryCoverage=92%, HitCoverage=78%, E-value=3e-14, Identity=26%"; Hit description =OSJNBa0023J03.13 protein
  Pfam annotation: Domain name=DUF1618; Domain location=211-341; Score=- 36.1; E_value=0.028; Accession=PF07762.6; Description=Protein of unknown function (DUF1618)
MATATPVPASCALEEVLLDGYAYIGHKPNHTTAVSLTRKMEIIVASFWSERPPLPSRLYVHCPELESSAFSQLPRILRVVEGLILFRVAIRCREPILYEECDYFIYHVDSASLNGIPNPSPFFIRDDEIGLLPRGNHYTVAALVPTSDDEVFTLHLLQSEIGRWTSKDVSLEAPQSEFPMEIPRDTDACRLLSHTTNTVITLGGEDGTMGWVDLWRGILLCDVLLPAPKLRGVPLPLPRAMYLPNGESRINVASGLLIWIPPTNAFLLQXKERGIPTYRFEGWEITKWSNCNLTNSFEDWQADYPPIHANDIKLNEQMQKQMLEYQLLWPKAPSQGNSVAADPGRNLENVTVFLPTPSMDDSNVVFLIAKAEFRQPKAYVLEVDMGNRQLKGVTEFGTEREPCASVIRCHGSVSRV

SEQ ID NO: 71576 - protein, 290 aa, Setaria italica
  misc_feature (12)..(12): Xaa can be any naturally occurring amino acid
  Transcript Sequence Number=SeqID_5602
  Gene Ontology: Mol. function=oxidoreductase activity; Cellular component=peroxisome; Biological process=purine base metabolic process
  Homolog annotation: Hit_ID=A2SXR8; Match level="QueryCoverage=97%, HitCoverage=92%, E-value=1e-158, Identity=95%"; Hit description =Uricase
  Pfam annotation: Domain name=Uricase; Domain location=1-123; Score =136.4; E_value=9e-38; Accession=PF01014.10; Description=Uricase
  Pfam annotation: Domain name=Uricase; Domain location=129-281; Score =180.0; E_value=6.9e-51; Accession=PF01014.10; Description=Uricase
  Pfam module annotation: Pfam domain module=Uricase::Uricase; Domain location=1-123::129-281
RVSRVWRRPAAXGGDIIVEWNVAVSVVSDCLPSYTSSDNSAIVATDSIKNTVYVKAKECTEVVSMEEFAVILGRHFTSLYPQVSEATVTIVERPWERVVVDGKPHSHGFKVGVEKHSTEVIVKKSGSLLINSGIQGYSLLKTTQSGFEGFVTDRYRLLPDTRERIVATEVTAWWRYPFEHVSQLPSKPFCFTQRYQDVKKVLSDTFFGPPDVGVYSPSVQNTLYLMAKEVLTRFPDISSIQLRMPNLHFLPVNLGSKENPLVKFADDVYLPTDEPHGTIEATLSRPMSKL

SEQ ID NO: 71577 - protein, 263 aa, Setaria italica
  Transcript Sequence Number=SeqID_5603
  Gene Ontology: Cellular component=integral to membrane
  Homolog annotation: Hit_ID=Q9LPF6; Match level="QueryCoverage=83%, HitCoverage=58%, E-value=3e-42, Identity=45%"; Hit description =Probable purine permease 11
  Pfam annotation: Domain name=DUF6; Domain location=56-185; Score=3.0; E_value=0.052; Accession=PF00892.12; Description=Integral membrane protein DUF6
MAHAQEIQLQIRGTPDEESVHDAGREGPKAATRRPTTRGGLRWWMTVAVDMLMVLCGTTVATLLGRLYYNSGGNSKWMATLTQSGGSPLLLVPLLMTPAPPAEERQPAASKMLPIYVGIGVLIGFDNLMYSYALQYLPVSTFSLVAATQLAFNAVTSRLINAQRFTALIANSVVLLTFSAALLGVGSASDGTSSGVPRGKYPVGFVLVLAASALFALIMSLFEATFEKVIRARTLRWVLSLQMYTNLVAAAVSVAGLMASGTG

SEQ ID NO: 71578 - protein, 166 aa, Setaria italica
  Transcript Sequence Number=SeqID_5604
ITYFFNSGACHSCYVNFHVLQGICEDRTPEFYLVAYDDIGGVTCRRFSDTRGQNSGYSPVFWTADTTFLEPPFSEQELDNYSNRYHIQGVTSNHACSENRVISRILCINSSHDVVDPHLSTPLDDARSVEGRIWLYEDGTFGFGFIGSNSVIDLRHVSSAGCILDT

SEQ ID NO: 71579 - protein, 77 aa, Setaria italica
  Transcript Sequence Number=SeqID_5605
LVRTYRKDSGKDPATDPATVSTSSAGKPAEPVNVPRKELPPIPQDEQRHLYKWMLEEKGLLLVEFLLLCSIAWLDLY

SEQ ID NO: 71580 - protein, 136 aa, Setaria italica
  misc_feature (9)..(9): Xaa can be any naturally occurring amino acid
  misc_feature (24)..(24): Xaa can be any naturally occurring amino acid
  misc_feature (33)..(33): Xaa can be any naturally occurring amino acid
  Transcript Sequence Number=SeqID_5606
  Gene Ontology: Mol. function=binding
  Homolog annotation: Hit_ID=Q10D20; Match level="QueryCoverage=100%, HitCoverage=3%, E-value=2e-65, Identity=89%"; Hit description=WD-40 repeat family protein, putative, expressed
FLMSMLQLXNKDGRIEDAVPPGKXGILSIARGXRQLDPYIHAILKNTNRMIMYCFLPTFLKSMGEDDLLANLAFLTETGRSLASKPHQEDFSVDICTVLQLLIANKRLVLCPSNVDTDLMCCFCINLMALLQDKRL

SEQ ID NO: 71581 - protein, 98 aa, Setaria italica
  Transcript Sequence Number=SeqID_5607
MAAPKPIWVRQAEEAKLKSEAETAAAAKAAFDATFKALAAAGSGDDDQDPDPAPPSPDEPASPGSDDDAPAPPGPVDPSKCSAAGPGIAGGSADTPAT

SEQ ID NO: 71582 - protein, 66 aa, Setaria italica
  Transcript Sequence Number=SeqID_5608
DDDVFVRCCISVAGDGELRSASPATEIQHLTNTSSSSSPSSFHHGYAMSSVPPASISNLQASTPDS

SEQ ID NO: 71583 - protein, 114 aa, Setaria italica
  Transcript Sequence Number=SeqID_5609
  Subcellular localization annotation: CTP_CleavageSite=37; ConfidenceScore=5.11e-01
TKVKNSYKLPSARAPAADKPKPKPKAKPAAKPAAKPKAVAAKPKPAAKPAAKPKPAAKPKAKPAAKPKPKGAAAKPKPAAKTKAAAPRKRTNPTHPPYAEMISEAITSLKERTV

SEQ ID NO: 71584 - protein, 295 aa, Setaria italica
  misc_feature (283)..(283): Xaa can be any naturally occurring amino acid
  Transcript Sequence Number=SeqID_5610
  Gene Ontology: Mol. function=DNA binding; Cellular component =chromosome; Biological process=nucleosome assembly
  Homolog annotation: Hit_ID=B6TGH8; Match level="QueryCoverage=23%, HitCoverage=25%, E-value=8e-22, Identity=75%"; Hit description =Histone H1
  Pfam annotation: Domain name=Linker_histone; Domain location=49-119; Score=127.8; E_value=3.5e-35; Accession=PF00538.11; Description =linker histone H1 and H5 family
MATEVADAPVPLAEAAPDAAAEAPAAAAADAKPAKAKKAAAPRKRTNPTHPPYAEMISEAITSLKERTGSSQYAIAKFVEDKHKDKLPPNFRKLLLVQLKKLVAGGKLTKVKNSYKLPSARAPAADKPKPKPKAKPAAAKPKAKPKAGAKKPKAAAKPKAKAPAKVKPAAKPKPAAKPAAKPKAVAAKPKPAAKPAAKPKPAAKPKAKPAAKPKPKGAAAKPKPAAKTKAAPAPSRTTRPAKAAKTSAKDTPGKKAAPAAKKPAAAAKKSPAKKPAPAKKAAXPARKVPARKAKK

SEQ ID NO: 71585 - protein, 79 aa, Setaria italica
  Transcript Sequence Number=SeqID_5611
  Gene Ontology: Mol. function=receptor activity
  Homolog annotation: Hit_ID=Q9SA91; Match level="QueryCoverage=100%, HitCoverage=16%, E-value=5e-14, Identity=53%"; Hit description =T5I8.21 protein
HELHALDRFEQDFRRKFHEEESVPAARRESIMILHSELKRQRKIVKNLKKKSLWSKTLEENANNEFSRLQIVEEIVEIV

SEQ ID NO: 71586 - protein, 614 aa, Setaria italica
  Transcript Sequence Number=SeqID_5612
  Gene Ontology: Mol. function=receptor activity; Cellular component =plasma membrane
  Homolog annotation: Hit_ID=Q9SA91; Match level="QueryCoverage=61%, HitCoverage=86%, E-value=1e-102, Identity=53%"; Hit description =T5I8.21 protein
  Pfam annotation: Domain name=DUF668; Domain location=329-414; Score =182.2; E_value=1.4e-51; Accession=PF05003.4; Description=Protein of unknown function (DUF668)
MGCVCSRRFPEEPAPPRTLAGAYTARRGRYGPGDFDSGELAIPPPKPPPSHKVSETGTFLGRASIAGLEKAVEVLDTLGSSMTSLNHGSGFLSGGTNRGNKVCILAFEVANTIAKASGLWRSCSDESIKELKGEILHSDGVRILVSSNTSELLHIAAIDKREELAVFSREVIRFGDLCKDPIWHNLGRYFNKYAPEKLTTDNTHQDHSKESMEATVQYLINLAQNTSELYHELHALDRFEQDFRRKFHEEESVPAARRESIMILHSELKRQRKIVKNLKKKSLWSKTLEEIVEKLVDIVIFLHKQIRDSFNEAVPAGTDFDSKNTQNKRLGSCGLALHYANIINQIENIVSRPLSLPPSSRDNLYHGLPITVKSALRSRLQSYNTEEERTVAQIKAEMQKTLRWLLPIAENTLRAHQGFGWVGEWANLGSDMGKKSGSQHSITRIQTLHHADKATTEHYILELVVLLHHLVVQVKNRGYGNSKSTKYERSRSKGGPTDLRPPETRHNTSPVSAASVASSPLSDCERAALARLSFRRASYGRSQSCEPPPDRARGSSKAHRSWDSCRSQGSSPARERGRDMAVDRDAARDLDVIDGLDLDRLTSSYSHPSSPTFC

SEQ ID NO: 71587 - protein, 160 aa, Setaria italica
  Transcript Sequence Number=SeqID_5613
  Gene Ontology: Mol. function=electron carrier activity; Cellular component=anchored to membrane; Biological process=electron transport chain
  Homolog annotation: Hit_ID=B6UHQ8; Match level="QueryCoverage=48%, HitCoverage=39%, E-value=5e-35, Identity=88%"; Hit description=Blue copper protein
  Pfam annotation: Domain name=Copper-bind; Domain location=65-142; Score=-18.4; E_value=0.07; Accession=PF00127.12; Description=Copper binding proteins, plastocyaninaz
  Pfam annotation: Domain name=Cu_bind_like; Domain location=55-135; Score=147.0; E_value=6e-41; Accession=PF02298.9; Description =Plastocyanin-like domain
  Pfam module annotation: Pfam domain module=Copper-bind::Cu_bind_like; Domain location=65-142::55-135
ASCNSVLICLDCRPTLVLEAVIMAGTLVIAGLVLLAVAAAPAHATDYVVGGSSGWTSGVDYTTWAKGKTFSVGDNLVFQYSAMHTVAEVSSADYSACSASNSLQSYSDQNTKIALTAPGTRYFICGTPGHCSGGMKVAVTVAAADATAPAASSPPATTPA

SEQ ID NO: 71588 - protein, 98 aa, Setaria italica
  Transcript Sequence Number=SeqID_5614
FMKSPKAAGCGSHKMESGQTTVNISCSEDLSSEDHVQQELISLSVTPLVGLLQRLRLQELIPSSLTLQAASDQLDYYIITTNFDQELTHSQKIRPKKV

SEQ ID NO: 71589 - protein, 409 aa, Setaria italica
  Transcript Sequence Number=SeqID_5615
  Gene Ontology: Mol. function=DNA ligase (ATP) activity; Cellular component=intracellular; Biological process=response to DNA damage stimulus
  Homolog annotation: Hit_ID=Q01KE4; Match level="QueryCoverage=100%, HitCoverage=37%, E-value=3e-82, Identity=45%"; Hit description=DNA ligase
APLVNVDYNLISDIALKRVKQDLTMHGGQVCSSIAAATHLVVVSVLQNYNFDILYKSFPPAERRYLHDKRLHVVSNKWLEDSVEKQMKLSETAYNLKPDTLEELEIERSEENIRPLDHKFEEHKEVERAHVKHAPRKRSRAASISRVAKAVPRPARRMRARRGNQQAKIDDDVESEESAPGECQDDQNMDTDYNSKEIGKGISNKDQGPPRAAFRPVPRTRARREYQQANIDDGGSEESGPSGTDKEDQKLDVDYISKTVGDNSDKDLHGPPPGAQFVTLGEQEPKGVESNAMEEKPGSPFQRTSAAEVTSSVPGEKIEQMVDPLHAMLLDMIPTLSQTRTEGASRVPPPTIVEKAPPGVGSNTSKSSDILVPDAGTSGVPAPDPNAAPPPKKKKVSYKDVASELLKDW

SEQ ID NO: 71590 - protein, 89 aa, Setaria italica
  Transcript Sequence Number=SeqID_5616
  Subcellular localization annotation: CTP_CleavageSite=44; ConfidenceScore=5.24e-01
GCLSSSSFLSPSPPRRRAAGSCVTSSSSWEAESHAAAGSKRPCTCAVEQPAQGKRTFLQQSHDHGAEEADADADAEAEDGSSSEIDLNR

SEQ ID NO: 71591 - protein, 142 aa, Setaria italica
  misc_feature (103)..(103): Xaa can be any naturally occurring amino acid
  Transcript Sequence Number=SeqID_5617
  Gene Ontology: Mol. function=aspartic-type endopeptidase activity; Cellular component=chromatin; Biological process=DNA integration
  Homolog annotation: Hit_ID=Q2QW16; Match level="QueryCoverage=100%, HitCoverage=7%, E-value=2e-66, Identity=86%"; Hit description =Retrotransposon protein, putative, unclassified
  Pfam annotation: Domain name=RVT_2; Domain location=36-142; Score =33.6; E_value=3.9e-20; Accession=PF07727.6; Description=Reverse transcriptase (RNA-dependent DNA pol
PGLVPRDLEAQLHLACDDGEPRSFAEAERHAAWRAAMQSEMDAVEKNRTWELADLPRGHRAITLKWVFKLKRDEAGAIVKHKARLVARGFVQQEGIDFDDAFXPVARMESMRLLLALAAQEGWRVHHMDVKSAFLNGDLKEE

SEQ ID NO: 71592 - protein, 105 aa, Setaria italica
  misc_feature (88)..(88): Xaa can be any naturally occurring amino acid
  Transcript Sequence Number=SeqID_5618
  Gene Ontology: Mol. function=hydrolase activity; Biological process =metabolic process
  Homolog annotation: Hit_ID=B6UI33; Match level="QueryCoverage=83%, HitCoverage=23%, E-value=3e-12, Identity=50%"; Hit description =Gibberellin receptor GID1L2
MSSAVPASSAAAPHVVEDCLGLVQLLSDGTVRRSTDYSVFPLVGGVPPPDLPVEWKDVVYDGAHGLRLRMYRLSTAGAGGRVEEKKLXPVLVYFHGGGFCVASFE

SEQ ID NO: 71593 - protein, 75 aa, Setaria italica
  Transcript Sequence Number=SeqID_5619
  Homolog annotation: Hit_ID=B6U290; Match level="QueryCoverage=70%, HitCoverage=7%, E-value=1e-22, Identity=92%"; Hit description =Transcriptional corepressor LEUNIG
  Pfam annotation: Domain name=WD40; Domain location=8-46; Score=37.6; E_value=4.9e-08; Accession=PF00400.24; Description=WD domain, G-beta repeat
FLWNMDNFKMDTKIEDHTNFITDIRFKTNSTQLATSSSDGTVRLWNAADVSNSYCHISARSVTTIFYLIVRWMPI

SEQ ID NO: 71594 - protein, 128 aa, Setaria italica
  Transcript Sequence Number=SeqID_5620
  Gene Ontology: Mol. function=protein binding; Cellular component =nucleus; Biological process=regulation of transcription, DNA -dependent
  Homolog annotation: Hit_ID=B6U290; Match level="QueryCoverage=100%, HitCoverage=17%, E-value=7e-62, Identity=89%"; Hit description =Transcriptional corepressor LEUNIG
  Pfam annotation: Domain name=WD40; Domain location=52-91; Score=31.4; E_value=3.6e-06; Accession=PF00400.24; Description=WD domain, G-beta repeat
  Pfam annotation: Domain name=WD40; Domain location=9-47; Score=37.6; E_value=4.9e-08; Accession=PF00400.24; Description=WD domain, G-beta repeat
  Pfam module annotation: Pfam domain module=WD40::WD40; Domain location=52-91::9-47
VFLWNMDNFKMDTKIEDHTNFITDIRFKTNSTQLATSSSDGTVRLWNAADESGTLQTFHGHTSHVTSVDFHPRLTEVLCSCDDNGEIRFWKVGQTTWTHVLRAKQGGTGRVRFQPRSGQLLAVAGGSM

SEQ ID NO: 71595 - protein, 530 aa, Setaria italica
  misc_feature (409)..(409): Xaa can be any naturally occurring amino acid
  misc_feature (419)..(419): Xaa can be any naturally occurring amino acid
  misc_feature (501)..(501): Xaa can be any naturally occurring amino acid
  Transcript Sequence Number=SeqID_5621
  Gene Ontology: Mol. function=protein binding; Cellular component =nucleus; Biological process=regulation of transcription, DNA -dependent
  Homolog annotation: Hit_ID=B6U290; Match level="QueryCoverage=100%, HitCoverage=79%, E-value=0.0, Identity=67%"; Hit description =Transcriptional corepressor LEUNIG
  Pfam annotation: Domain name=WD40; Domain location=310-347; Score =18.3; E_value=0.033; Accession=PF00400.24; Description=WD domain, G -beta repeat
  Pfam annotation: Domain name=WD40; Domain location=351-389; Score =37.6; E_value=4.9e-08; Accession=PF00400.24; Description=WD domain, G-beta repeat
  Pfam annotation: Domain name=WD40; Domain location=409-446; Score =28.1; E_value=3.6e-05; Accession=PF00400.24; Description=WD domain, G-beta repeat
  Pfam annotation: Domain name=WD40; Domain location=450-488; Score =19.1; E_value=0.019; Accession=PF00400.24; Description=WD domain, G -beta repeat
  Pfam annotation: Domain name=WD40; Domain location=492-530; Score =18.7; E_value=0.024; Accession=PF00400.24; Description=WD domain, G -beta repeat
  Pfam module annotation: Pfam domain module=WD40::WD40::WD40::WD40::WD4 0; Domain location=310-347::351-389::409-446::450-488::492-530
DRIRNPNPADSDASQHLLDANRIALLKSPPNQTGPPPMQQQQIHPRNQQLDIKPDVAMPQRTVPADHSSLYASGMMHPKPPLLATGLNQAGGSVPLKGWPLTVTGIDQLRSNFGAQKQLVPSSNQFQLLSPQQQLIAQAQTPNDLTRMSSPAPSASPNVRSDDPDYLMKLKMAQMQQPSGYRPMELQQPQQQNTRKRKPTSSGAANSTGTGNTVGPSPPSTPSTHTPGGGVPVTSNANILQKSSMICGTDGTSGLASSSNQMDTLDSFVDFDENVDSFLSNDDGDGRDMFAALKKGSSEHNSESLKGLSLSEVGNKTSNNKVVCCHFSTDGKLLASAGHEKKVFLWNMDNFKMDTKIEDHTNFITDIRFKTNSTQLATSSSDGTVRLWNAADESGTLQTFHGHPNFYPXLPSLKGSTNXSEVNCVCWDESGEYLASVSQDTVKVWSVSSGACIHELRSHGNQYQSCVFHPRYPKVLIVGGYQTLELWSLSDNQRNPIQAHXEGLVAALAHSPITGMIASASHDRYVKLWK

SEQ ID NO: 71596 - protein, 215 aa, Setaria italica
  Transcript Sequence Number=SeqID_5622
  Gene Ontology: Mol. function=DNA binding; Cellular component=nucleus; Biological process=regulation of transcription, DNA-dependent
  Homolog annotation: Hit_ID=B6U290; Match level="QueryCoverage=81%, HitCoverage=27%, E-value=3e-59, Identity=61%"; Hit description =Transcriptional corepressor LEUNIG
  Pfam annotation: Domain name=LisH; Domain location=10-36; Score=35.5; E_value=2.1e-07; Accession=PF08513.3; Description=LisH
MARTNWEADKMLDVYIYDYLVKRNLQATAKAFIAEGKVATDPVAIDAPGGFLFEWWSIFWDIFHSSTAKPASSSASGPPLHDINKSREHQMRLQLLHQHNAAQLHTRGPDVSAVLASKMMEDRIRNPNPADSDASQHLLDANRIALLKSPPNQTGPPPMQQQQIHPRNQQLVTYPFHLLSNLLSLQANLFNTPYTLSINLQGHQARCCYATENSA

SEQ ID NO: 71597 - protein, 339 aa, Setaria italica
  Transcript Sequence Number=SeqID_5623
  Gene Ontology: Mol. function=protein binding; Cellular component =nucleus; Biological process=regulation of transcription, DNA -dependent
  Homolog annotation: Hit_ID=B6U290; Match level="QueryCoverage=99%, HitCoverage=45%, E-value=1e-179, Identity=89%"; Hit description =Transcriptional corepressor LEUNIG
  Pfam annotation: Domain name=WD40; Domain location=133-172; Score =31.4; E_value=3.6e-06; Accession=PF00400.24; Description=WD domain, G-beta repeat
  Pfam annotation: Domain name=WD40; Domain location=176-214; Score =4.4; E_value=12; Accession=PF00400.24; Description=WD domain, G-beta repeat
  Pfam annotation: Domain name=WD40; Domain location=219-256; Score =33.5; E_value=8.7e-07; Accession=PF00400.24; Description=WD domain, G-beta repeat
  Pfam annotation: Domain name=WD40; Domain location=260-298; Score =19.1; E_value=0.019; Accession=PF00400.24; Description=WD domain, G -beta repeat
  Pfam annotation: Domain name=WD40; Domain location=301-339; Score =25.7; E_value=0.00018; Accession=PF00400.24; Description=WD domain, G-beta repeat
  Pfam annotation: Domain name=WD40; Domain location=49-86; Score=18.3; E_value=0.033; Accession=PF00400.24; Description=WD domain, G-beta repeat
  Pfam annotation: Domain name=WD40; Domain location=90-128; Score =37.6; E_value=4.9e-08; Accession=PF00400.24; Description=WD domain, G-beta repeat
  Pfam module annotation: Pfam domain module=WD40::WD40::WD40::WD40::WD4 0::WD40::WD40; Domain location=133-172::176-214::219-256::260 -298::301-339::49-86::90-128
QDTLDSFVDFDENVDSFLSNDDGDGRDMFAALKKGSSEHNSESLKGLSLSEVGNKTSNNKVVCCHFSTDGKLLASAGHEKKVFLWNMDNFKMDTKIEDHTNFITDIRFKTNSTQLATSSSDGTVRLWNAADESGTLQTFHGHTSHVTSVDFHPRLTEVLCSCDDNGEIRFWKVGQTTWTHVLRAKQGGTGRVRFQPRSGQLLAVAGGSMVNIFDVEKQANLPSPAKGHNSEVNCVCWDESGEYLASVSQDTVKVWSVSSGACIHELRSHGNQYQSCVFHPRYPKVLIVGGYQTLELWSLSDNQRNPIQAHEGLVAALAHSPITGMIASASHDRYVKLWK

SEQ ID NO: 71598 - protein, 78 aa, Setaria italica
  Transcript Sequence Number=SeqID_5624
  Gene Ontology: Mol. function=ribonuclease activity; Cellular component=exosome (RNase complex); Biological process=rRNA processing
  Homolog annotation: Hit_ID=B9S6W9; Match level="QueryCoverage=100%, HitCoverage=8%, E-value=1e-17, Identity=60%"; Hit description =Mitotic control protein dis3, putative
MLQSKSFVKKTKQGRIQKVVREHYLRDDIYCGFVPCSACDAAAERKLVADAAAILVVDTNVVLHQIDLLENPAIEDVV

SEQ ID NO: 71599 - protein, 282 aa, Setaria italica
  Transcript Sequence Number=SeqID_5625
  Gene Ontology: Mol. function=oxidoreductase activity; Cellular component=plasma membrane; Biological process=oxidation reduction
  Homolog annotation: Hit_ID=B9SJ62; Match level="QueryCoverage=92%, HitCoverage=73%, E-value=1e-107, Identity=70%"; Hit description =Phytanoyl-CoA dioxygenase domain containing, putative
  Pfam annotation: Domain name=PhyH; Domain location=13-251; Score =283.4; E_value=5.2e-82; Accession=PF05721.5; Description=Phytanoyl -CoA dioxygenase (PhyH)
MPPAGSLTADQLSFFETNGYLVMDSFSSEEEVREMRDRMAELVAGFDGANTSVFSTKDHPQLKDDYFFKSAENISFFFEEKAYGDDGCLKQAKELSINKVGHALHELDPVFKKFCSSKSIASLFSSLGYKRPAVMQSMYIFKQPGIGGEVVPHQDSTFLYTEPRTCTGLWLALEDATINNGCLWAIPGSHKKGLVRRMIRDENGTHFDRPSPSYDQKEFVPLEVKSGALVVIHGDLIHQSFENLSPASRHAFSLHVVDTEGCEWSKDNWIQRKTAPEPLYVS

SEQ ID NO: 71600 - protein, 328 aa, Setaria italica
  Transcript Sequence Number=SeqID_5626
  Gene Ontology: Mol. function=transferase activity, transferring glycosyl groups; Cellular component=chloroplast; Biological process =tryptophan biosynthetic process
  Homolog annotation: Hit_ID=Q10SD5; Match level="QueryCoverage=99%, HitCoverage=81%, E-value=1e-135, Identity=78%"; Hit description =Anthranilate phosphoribosyltransferase, chloroplast, putative, expressed
  Pfam annotation: Domain name=Glycos_trans_3N; Domain location=1-58; Score=34.0; E_value=5.9e-07; Accession=PF02885.9; Description =Glycosyl transferase family, helical bundle domain
  Pfam annotation: Domain name=Glycos_transf_3; Domain location=63-314; Score=444.9; E_value=1.2e-130; Accession=PF00591.13; Description =Glycosyl transferase family, ab domain
  Pfam module annotation: Pfam domain module=Glycos_trans_3N::Glycos _transf_3; Domain location=1-58::63-314
ALIAGTDFSEEDAEATLRLLLEEKDEARIAAFLVLLRAKGETYEEIVGLANAMLSCCVRVDGLDDAVDIVGTGGDGADTVNISTGSTILAAAAGAKVAKQGSRASSSACGSADVLEALGVNIELGPEGIKRCINEVGVGFMMSANYHPAMKIVRPVRKNLKIKTVFNILGPLLNPARVPHAVIGVYHENIVTKMAKAAQKFGMKRALVVHSKGLDEISPLGPGYILDVTPGKIEKMLFDPLDFGIPRCTLEDLKGGDPAFNAKVLQDVLAGQKGSVADALVLNAAASLLVCGKVKNLHDGVALAQETQRSGKAINTLESWIKISNSSK

SEQ ID NO: 71601 - protein, 947 aa, Setaria italica
  misc_feature (397)..(397): Xaa can be any naturally occurring amino acid
  misc_feature (913)..(913): Xaa can be any naturally occurring amino acid
  misc_feature (940)..(940): Xaa can be any naturally occurring amino acid
  Transcript Sequence Number=SeqID_5627
  Gene Ontology: Mol. function=metallopeptidase activity; Cellular component=nucleus; Biological process=transcription initiation from RNA polymerase II promoter
  Homolog annotation: Hit_ID=Q6SJQ9; Match level="QueryCoverage=90%, HitCoverage=67%, E-value=0.0, Identity=49%"; Hit description=TFIID component TAF2 (Fragment)
ELYLAASFPLGLYKQIFLPPEMTVLPTSLGASTCIFSSDILHYEKVIDQIIGTRIKLAYALARQWFGIYTSAEEPNDEWLLDGLAGFLAELFIKRFLGSNEARYRRFKANCNVCESDVSGATALSSPAASSDLYGTQTIGSYGKVRLLKAVAVLQMLEKQMGPDSFRKILQVIVAPNRASRTLSTKEFRHLANKVGNLERPFLKEFFPRWVESCGCPVMRLGISYSKKRNMIELAVSRGCTAKATPDSDSHTNGDTREGDAGWPGMMSVRVHETDGAYDHPVLPMAGEALQVVEIQCHSKLAAKRVWKSKKSTKFDGSDDNIDVPTQENRTSVDSPLLWIRVDPEMEYLAEIHFHQPVQMWINQLEKDKDVISQSQAISVLEKLPQLSSAVINALNXFLNDTKAFWRVRIEAAYALAVTASEATGLAGLLHLVKFYKSRRFDADIGMPRPNDFHDIPEYFVLEAIPHAVALVRSSDKNSPKEAIEFIIQLLKYNDNNGNIYSDVYWLSAMVQAIGELELGQQGMGFLSSLLKRIDRLLQFDNFMPGYNGVLTVSCIRTLARIARRVSPSICLDRICELIAPFRNMDKPWKVRIEASRVLIDLELHHKGLDAALLLFLKYVDEEKSLRGATKLAVHVLRLCQASIVPHGNDQISLTTLIGLLHLLAGAKAYNNIFLRHHVFCILQVAAGRSPSLFGVPKVVTPSLVVQDICSDQHTKADSSIPQPSRPQEPSTSTPSVREVLPTSGPSKDADNISNCSERRNVVKIKVKLTASSSKASDADHRGHSHGGRNENEAGPCSSMSVDAPMVGAATEPLNVSNHNIEEQNSCHDRESRMSASVSNAKLMDRHEFSKELQCTADSRLDVLPKDQFSPAIIPLGVVDKPGSQLEVVSTSYDGNQAPESVNGLETKERKKXDKKDKKRKRDEKRDKKDDPEYLEKKRXLKKEKKG

SEQ ID NO: 71602 - protein, 224 aa, Setaria italica
  misc_feature (93)..(93): Xaa can be any naturally occurring amino acid
  Transcript Sequence Number=SeqID_5628
KEARNSCHDRESRMSASVSNAKLMDRHEFSKELQCTADSRLDVLPKDQFSPAIIPLGVVDKPGSQLEVVSTSYDGNQAPESVNGLETKERKKXDKKDKKRKRDEKRDKKDDPEYLEKKRLKKEKKRMEKETARKLLEGEGGATPSEQQKTVKTSGSQEVLLARPPAAPVRSAEPAPSQSAEPAPMRSSEPQVSSKETTVDTARTAAKPRIKIRVKPLIRKPEGS

SEQ ID NO: 71603 - protein, 98 aa, Setaria italica
  Transcript Sequence Number=SeqID_5629
  Subcellular localization annotation: CTP_CleavageSite=37; ConfidenceScore=5.22e-01
KDDVVSGPLSPIFSFHPHSHAAPICKVLPPCRRPFAPSQYADSVPWSILFVHMGFRRPCFWEARIHWQGSATMITDMDWSYFSQFSLSYLTCYFFPNE

SEQ ID NO: 71604 - protein, 135 aa, Setaria italica
  Transcript Sequence Number=SeqID_5630
  Subcellular localization annotation: CTP_CleavageSite=36; ConfidenceScore=5.78e-01
ATSQAFSLSNRFSSSFGHGATRYHPTSFSFSNSGPSALSGAAWPAAGGAGYLSYGSPAASLFNGRQNGGELPAVLHQQQQKASASGSSPPAGVLTDTIAKAITSDPGFHTALAAAITSYVGTQGGKSPAGGDGGS

SEQ ID NO: 71605 - protein, 297 aa, Setaria italica
  Transcript Sequence Number=SeqID_5631
  Gene Ontology: Mol. function=binding; Cellular component=integral to membrane; Biological process=transport
  Homolog annotation: Hit_ID=Q8VWY1; Match level="QueryCoverage=91%, HitCoverage=76%, E-value=1e-131, Identity=80%"; Hit description =Mitochondrial phosphate transporter
  Pfam annotation: Domain name=Mito_carr; Domain location=1-81; Score =68.0; E_value=3.6e-17; Accession=PF00153.19; Description =Mitochondrial carrier protein
  Pfam annotation: Domain name=Mito_carr; Domain location=191-274; Score=1.4; E_value=0.0024; Accession=PF00153.19; Description =Mitochondrial carrier protein
  Pfam annotation: Domain name=Mito_carr; Domain location=90-178; Score= 79.4; E_value=1.3e-20; Accession=PF00153.19; Description =Mitochondrial carrier protein
  Pfam module annotation: Pfam domain module=Mito_carr::Mito_carr::Mito_ carr; Domain location=1-81::191-274::90-178
GILSTGLTHLAVTPLDLVKCNMQVDPSKYRDIPSGFGVMLQEQGLGGFFKGWMATLVGYSCQGACKFGFYEFFKKCYSDIAGPDNAERLKTLIYLAASASAEVIADVALCPMEAVKIRVQTQPGFARCLTDGLPKIVQCEGAFGLYKGLLPLWGRQVPYTMMKFACFETIVEMVYKHAVPKPKDQCSKPLQLAVSFAGGYIAGVFCAAISHPADNLVSFLNNAQGATVADAVRTLGMWGLFTRGLPLRIIMVGTLTGAQWATYDAFKVFVGLPTSGGVSRSCAAASPLHRVAHEKQN

SEQ ID NO: 71606 - protein, 154 aa, Setaria italica
  misc_feature (36)..(36): Xaa can be any naturally occurring amino acid
  Transcript Sequence Number=SeqID_5632
  Gene Ontology: Mol. function=DNA topoisomerase type I activity; Cellular component=chromosome; Biological process=DNA unwinding during replication
  Homolog annotation: Hit_ID=Q5VMY4; Match level="QueryCoverage=92%, HitCoverage=15%, E-value=1e-56, Identity=78%"; Hit description=DNA topoisomerase
FFPFCFVCLYREAEIEQFKPQEYWTVQTDFKTNFGXRTFIRDGIFIPSRIKLLNSKKLDQLSICSQEEARAIEKRIHSSQFEVLGVKRSKIHKNPPMPYITSSLQQDAANKLHFTAGYTMKVAQKLYEGINLSSEEATGLITYMRTRIGLPIIY

SEQ ID NO: 71607 - protein, 190 aa, Setaria italica
  Transcript Sequence Number=SeqID_5633
  Gene Ontology: Mol. function=DNA topoisomerase type I activity; Cellular component=chromosome; Biological process=DNA unwinding during replication
  Homolog annotation: Hit_ID=Q5VMY4; Match level="QueryCoverage=92%, HitCoverage=19%, E-value=2e-88, Identity=88%"; Hit description=DNA topoisomerase
  Pfam annotation: Domain name=Topoisom_bac; Domain location=1-190; Score=-141.6; E_value=0.0005; Accession=PF01131.12; Description=DNA topoisomerase
NPLFYSSRFVLRTYGKLIHSSQFEVLGVKRSKIHKNPPMPYITSSLQQDAANKLHFTAGYTMKVAQKLYEGINLSSEEATGLITYMRTDGFHISNGAAEDIRSLVKERYGQEYASENIRKYLKKVKNAQEAHESIRPTSIRRLPSSLVGVLDDDSLKLYTLIWKRTMACQMEASRTDLIQVDIGTPGGDL

SEQ ID NO: 71608 - protein, 311 aa, Setaria italica
  Transcript Sequence Number=SeqID_5634
  Gene Ontology: Mol. function=oxidoreductase activity
  Homolog annotation: Hit_ID=B6TRN5; Match level="QueryCoverage=100%, HitCoverage=100%, E-value=1e-138, Identity=74%"; Hit description =Aldose reductase
  Pfam annotation: Domain name=Aldo_ket_red; Domain location=7-284; Score=453.8; E_value=2.5e-133; Accession=PF00248.13; Description =Aldoketo reductase family
MATHFVLNTGAKIPSVGLGTWQADPAVAGDAVYAAVKAGYRHIDCAQAYNNEKEVGLGLKRVLDEGVVKREDLFITSKLWNTNHAPEDVPVALDGTLKALQTDYVDLYLVHWPVRMKKGAGFGPQSVIPSDIPATWAAMEKLYDAGKARAIGVSNFSSKKLADLLAVARVPPAVDQVECHPVWQQGKLRAFCESKGIHLSAYSPLGSPGTASVKAGAVLEHPAVVSAAEKLGKTPAQVTLRWGIQMGHSVLPKSTNEERIRANLDVYDWSIPDDLLAKLSEIEQERLIRGDFFVHPEGVFKSIEEFWDGEI

SEQ ID NO: 71609 - protein, 89 aa, Setaria italica
  Transcript Sequence Number=SeqID_5635
  Gene Ontology: Mol. function=protein serine/threonine kinase activity; Biological process=protein amino acid phosphorylation
  Homolog annotation: Hit_ID=Q5ZC61; Match level="QueryCoverage=76%, HitCoverage=11%, E-value=6e-10, Identity=46%"; Hit description =Putative receptor serine/threonine kinase PR5K
FFAFVPILEVPNGNGDEYVVSLKKGFLLEWTTVPGHCPDCMESGGECVYSDTGLNFACKCSGTLLPEKCGEFRILKTHCDFLFVWEREN

SEQ ID NO: 71610 - protein, 408 aa, Setaria italica
  misc_feature (70)..(70): Xaa can be any naturally occurring amino acid
  misc_feature (238)..(238): Xaa can be any naturally occurring amino acid
  misc_feature (312)..(312): Xaa can be any naturally occurring amino acid
  Transcript Sequence Number=SeqID_5636
  Gene Ontology: Mol. function=protein serine/threonine kinase activity; Biological process=protein amino acid phosphorylation
  Homolog annotation: Hit_ID=Q5ZC61; Match level="QueryCoverage=93%, HitCoverage=64%, E-value=1e-155, Identity=70%"; Hit description =Putative receptor serine/threonine kinase PR5K
  Pfam annotation: Domain name=Pkinase; Domain location=177-408; Score =121.8; E_value=2.3e-33; Accession=PF00069.17; Description=Protein kinase domain
  Pfam annotation: Domain name=Pkinase_Tyr; Domain location=177-400; Score=42.5; E_value=1.5e-16; Accession=PF07714.9; Description =Protein tyrosine kinase
  Pfam module annotation: Pfam domain module=Pkinase::Pkinase_Tyr; Domain location=177-408::177-400
RFFPFVPASDDGRNFSRSHIQGGIPPGCFFAFVPILEVPKGNGDEYVVSLKKGFLLEWTTVPGHCPDCMXKRGECVYSDTGLNFACKCSGTLLPEKCGSRNGTGRKIILIVLMTVAASLLLPCIYVLVWHRKRGKLHFFLCEKTSRNTERNIEALIVLHGSLAPKRYKYSEVTKITSSFSNKLGEGGYGAVFKGRLDDGRQVAVKFLHDSKGEGEEFVNEVMSIGRTSHVNIVNLFGXCLEGSKRAIIYEYMPNGSLDKFIYSENPKAVLGWDKLYTIAIGIARGLEYLHHSCNTRIIHYDIKPQNILLDEXFHPKVADFGLAKLCHTKESKLSMTGARGTVGFIAPEVHSRTFGVVSTKSDVYSYGMMLLEMVGGRKIVNSIAQKSSEKYFPHWIYDHFGRGDGLQA

SEQ ID NO: 71611 - protein, 85 aa, Setaria italica
  misc_feature (62)..(62): Xaa can be any naturally occurring amino acid
  Transcript Sequence Number=SeqID_5637
  Gene Ontology: Mol. function=ATPase activity, coupled to transmembrane movement of substances; Cellular component=integral to membrane; Biological process=transport
  Homolog annotation: Hit_ID=Q8GU62; Match level="QueryCoverage=97%, HitCoverage=5%, E-value=2e-25, Identity=72%"; Hit description=MRP -like ABC transporter
MPAFKKIIDDVERRHGLSTSSIYRAMFLFMRRKAMINAGFAVLSASASYVGPSLINDLVKFXGGQRQYGLRRGYILAVAFLSAKV

SEQ ID NO: 71612 - protein, 88 aa, Setaria italica
  Transcript Sequence Number=SeqID_5638
  Gene Ontology: Mol. function=ATPase activity, coupled to transmembrane movement of substances; Cellular component=integral to membrane; Biological process=transport
  Homolog annotation: Hit_ID=Q8GU62; Match level="QueryCoverage=98%, HitCoverage=5%, E-value=7e-37, Identity=80%"; Hit description=MRP -like ABC transporter
AEAKRACPYGRASIVGLVTFSWMNPVFAIGYKKPLEKNDVPDVDGKDSAEFLSDSFKKIIDDVERRHGLSTSSIYRAKFLFMRRKAMI

SEQ ID NO: 71613 - protein, 86 aa, Setaria italica
  misc_feature (27)..(27): Xaa can be any naturally occurring amino acid
  Transcript Sequence Number=SeqID_5639
  Gene Ontology: Cellular component=ribonucleoprotein complex
  Homolog annotation: Hit_ID=Q2RAU6; Match level="QueryCoverage=100%, HitCoverage=16%, E-value=9e-10, Identity=48%"; Hit description=Mpp10 protein, expressed
MAMDVGEPLDGGAALQLLRDADPAQLXYSPSADLAAAARAASRHIYSSLAPLSPAQPPPLPGLLAGPAFDAEQIWSQIELLSRPLL

SEQ ID NO: 71614 - protein, 407 aa, Setaria italica
  Transcript Sequence Number=SeqID_5640
  Gene Ontology: Mol. function=nucleotide binding; Biological process =defense response
  Homolog annotation: Hit_ID=Q2R1W2; Match level="QueryCoverage=63%, HitCoverage=28%, E-value=1e-57, Identity=52%"; Hit description=NB -ARC domain containing protein, expressed
  Pfam annotation: Domain name=LRR_1; Domain location=25-48; Score=4.3; E_value=46; Accession=PF00560.25; Description=Leucine Rich Repeat
  Pfam annotation: Domain name=LRR_1; Domain location=50-71; Score=6.4; E_value=18; Accession=PF00560.25; Description=Leucine Rich Repeat
  Pfam annotation: Domain name=LRR_1; Domain location=73-94; Score=7.8; E_value=9.9; Accession=PF00560.25; Description=Leucine Rich Repeat
  Pfam annotation: Domain name=WRKY; Domain location=267-329; Score =85.5; E_value=1.9e-22; Accession=PF03106.7; Description=WRKY DNA -binding domain
  Pfam module annotation: Pfam domain module=LRR_1::LRR_1::LRR_1::WRKY; Domain location=25-48::50-71::73-94::267-329
MAKLRSFNAIKCPISMLSQLVSFQTLRVLVLEGCEIMEGYHLKHLGKLRQLRYLGLKDTRVAKLPREIGDLVHLLVLDVRDTGLEELPETVRELSKLMSLRVNDSMSYLWLLWVGNLTSLQELVLGNVVMSPWLIVELSKLTELRILEISFLESGEHMESLLEALRGLCRIRILMLRFWPDEVLVSSWEGWEPPRQLCQFVMEGVCLARLPGWVNSTCVPHLSYLRLKLLVMEAQDWEVLARMPELHSLCIYSTLRLSSAGSIESPIYDGYSWRMYGQKEIPGAKHPRGYYLCMHRQSQRCTATKQVQCRDEDSTLFDVIYHGTHTCVQRTSVEISACQNLVEENYMLVEQGPDWDVQSLASLFLEMPTSSSITDDTNRPFKRSKKRRSHMEMQKVKVRVVKVRVGR

SEQ ID NO: 71615 - protein, 127 aa, Setaria italica
  Transcript Sequence Number=SeqID_5641
  Gene Ontology: Mol. function=transporter activity; Cellular component= integral to membrane; Biological process=transport
  Homolog annotation: Hit_ID=O64964; Match level="QueryCoverage=99%, HitCoverage=50%, E-value=6e-49, Identity=80%"; Hit description =Aquaporin TIP1-1
  Pfam annotation: Domain name=MIP; Domain location=13-127; Score=10.6; E_value=1.8e-10; Accession=PF00230.12; Description=Major intrinsic protein
MPINRIAVGSHEEVYHPGALKAAFAEFISTLIFVFAGQGSGMAFSKLSPGGSTPTGLIAAAIAHAFALFVAVSVGANISGGHVNPAVTFGAFVGGNITLFRGILYWIAQLLGSTVACFLLRFSTGGL

SEQ ID NO: 71616 - protein, 286 aa, Setaria italica
  Transcript Sequence Number=SeqID_5642
  Gene Ontology: Mol. function=RNA-directed DNA polymerase activity; Cellular component=exocyst; Biological process=exocytosis
  Homolog annotation: Hit_ID=B6SVA0; Match level="QueryCoverage=99%, HitCoverage=44%, E-value=1e-147, Identity=90%"; Hit description =Protein binding protein
MAVAALPQTMDALSRRAAMLRDSLRRSQGNTDGMVAILGSFDHRLSALEAAMRPTQVRTHAIRTAHENIDRTIKAADGILSQFDLARRAEATILRGPHEDLESYLEAVDVLKGIVRFFSSNKNFKSSEVVLNHVNNLLAKSTLKIEEEFKQLMSTYSKPIEPDRLFDCLPKSLRPTKGDHETDGGSRSDHPSKGLETAIYRTPTLVPPRILPLMNDIAQQLVQAGNQQSCYKIYRDSRASALEVSLRKLGVEKLSKDDVQKMQWEALEAKIGNWIHFMRIAVKLTN

SEQ ID NO: 71617 - protein, 59 aa, Setaria italica
  Transcript Sequence Number=SeqID_5643
LSLRTLYDYIPLIVLFTPTLQYQFLPPMSKYSSYPDPESNGENYGKSNLLLLRFLPARV

SEQ ID NO: 71618 - protein, 74 aa, Setaria italica
  Transcript Sequence Number=SeqID_5644
LAGKDGELLRRPRRMIKAKNEELKMLRTKRVKNIKECYPQLVESKLNKHVYIWGRATNYMRNGSNSTFFSGMDQ

SEQ ID NO: 71619 - protein, 59 aa, Setaria italica
  Transcript Sequence Number=SeqID_5645
  Subcellular localization annotation: CTP_CleavageSite=37; ConfidenceScore=5.52e-01
RRLGSPPHPPAPRRARSTPSSPRRDPLPTIASSVAAVATAGGAGSSLARTGSCFAALVE

SEQ ID NO: 71620 - protein, 88 aa, Setaria italica
  Transcript Sequence Number=SeqID_5646
  Gene Ontology: Mol. function=nucleoside-triphosphatase activity; Biological process=cell division
  Homolog annotation: Hit_ID=B9RIQ4; Match level="QueryCoverage=59%, HitCoverage=6%, E-value=4e-16, Identity=67%"; Hit description=ATP binding protein, putative
GADKPRNGKEKPESSKAKKVESGEEGAKGETKETAALRPLTMEDLKKAKEEVATSFSSEGAVMNEIRQWNELYGKGGSRKKQDLSYFF

SEQ ID NO: 71621 - protein, 65 aa, Setaria italica
  Transcript Sequence Number=SeqID_5647
MTATPAVIGLSAGNRLLAASFGPAADLAPPDAHPSLQFAPAAPKLAVVVAHRASASSSYPAGRDN

SEQ ID NO: 71622 - protein, 294 aa, Setaria italica
  Transcript Sequence Number=SeqID_5648
  Homolog annotation: Hit_ID=Q9LF51; Match level="QueryCoverage=78%, HitCoverage=64%, E-value=1e-61, Identity=54%"; Hit description =Glutamine-rich protein
  Subcellular localization annotation: CTP_CleavageSite=55; ConfidenceScore=5.54e-01
PQQQQPQPQPSQPPHSQGPSQSPSQGAPQQASPHHQQHQHQQQQQAAAQAQAQAQAARVRSPEMEMALQDAMRVCNPDIKTPFQSIEDAVNRLLPYHVVADYEAEEDDRILDSDATGQIPSRLQQWDHNILVKIAEFTTTFEKQVLAYNIMTKKRAIGEFRSEERLMLEQALLQEEKQAMLGLRAEMESREKAGREAAEAKMRMAMEHARAEAQAHSEMMNHGPIRGSAVASQGEDGPSRGMEQEHAEDGWGNAQRDDEDPSEDFLNDENEPENGNSDGQEDWRRSGELDLNSR

SEQ ID NO: 71623 - protein, 153 aa, Setaria italica
  Transcript Sequence Number=SeqID_5649
  Gene Ontology: Mol. function=electron carrier activity; Cellular component=extracellular region; Biological process=hydrogen peroxide catabolic process
  Homolog annotation: Hit_ID=Q5U1R1; Match level="QueryCoverage=99%, HitCoverage=45%, E-value=1e-66, Identity=83%"; Hit description=Class III peroxidase 32
  Pfam annotation: Domain name=peroxidase; Domain location=1-153; Score= 104.2; E_value=4.4e-28; Accession=PF00141.15; Description=Peroxidase
VIDNAKAAVEALCPGVVSCADILALAARDAVALSGGPSWVVPVGRRDGRVSLASETSSALPGPRASFDQLKQAFHARGLSTKDLVVLSGGHTLGFAHCSSFQDRIRSPNGGGGADPALSPSFAASLRRACPANNTARAAGSGLDATEAAFDNT

SEQ ID NO: 71624 - protein, 41 aa, Setaria italica
  Transcript Sequence Number=SeqID_5650
MENKGDGNHPCIQKQHLINMKTYSIYEKQTVSSLEKGTEQT

SEQ ID NO: 71625 - protein, 271 aa, Setaria italica
  Transcript Sequence Number=SeqID_5651
  Gene Ontology: Mol. function=transcription factor activity; Cellular component=nucleus; Biological process=regulation of transcription, DNA-dependent
  Homolog annotation: Hit_ID=B6TAR1; Match level="QueryCoverage=98%, HitCoverage=99%, E-value=3e-97, Identity=72%"; Hit description =Nuclear transcription factor Y subunit A-1
  Pfam annotation: Domain name=CBFB_NFYA; Domain location=174-230; Score=142.1; E_value=1.8e-39; Accession=PF02045.7; Description=CCAAT- binding transcription factor (CBF-BNF-YA) subunit B
  Subcellular localization annotation: CTP_CleavageSite=62; ConfidenceScore=5.06e-01
APSSIMESRPGGTNLVEPRGQGAALPSVGAAMQPWWTTSGAGLGAVSPAVVAPRSGAGISLSSSPVGGSGGAGASKGAASDESSEDSRKSGEPKDGSAGQEKNHATSQMPALVSEYLAPYSQLELNQSIASAAYQYPDPYYTGMVPPYGTQAVAHFQLPGLAHSRMPLPLEVSEEPVYVNAKQYHGILRRRQSRAKAELEKKVVKTRKPYLHESRHQHAMRRARGNGGRFLNTKKIDNGSPNGNGDPEKGDQHSEHLHVPPDLLQLRQNEA

SEQ ID NO: 71626 - protein, 62 aa, Setaria italica
  Transcript Sequence Number=SeqID_5652
  Homolog annotation: Hit_ID=Q2QN60; Match level="QueryCoverage=100%, HitCoverage=12%, E-value=6e-22, Identity=79%"; Hit description =Pentatricopeptide, putative, expressed
KETGSQKTAGSSWIELDEAFHEFTVGDGKHPESEQISEMVGRLSSHVKRAGCIPAGHELLVK

SEQ ID NO: 71627 - protein, 83 aa, Setaria italica
  Transcript Sequence Number=SeqID_5653
SRARAVRPEDDPFLAAYLACTKSSGRRGGKDGGGGGAARGEAKGRRRFTWSGLGLSCKSSTGAVEQSMVKVTKRPEPDPTRDS

SEQ ID NO: 71628 - protein, 153 aa, Setaria italica
  Transcript Sequence Number=SeqID_5654
  Gene Ontology: Mol. function=nucleic acid binding; Cellular component= nuclear matrix; Biological process=positive regulation of transcription
  Homolog annotation: Hit_ID=Q7XQJ0; Match level="QueryCoverage=100%, HitCoverage=17%, E-value=2e-84, Identity=96%"; Hit description =OSJNBa0005N02.1 protein
  Pfam annotation: Domain name=SNF2_N; Domain location=1-153; Score= -98.7; E_value=0.0045; Accession=PF00176.15; Description=SNF2 family N-terminal domain
ILADEMGLGKTVQAVTYLTLLRHLYNDPGPHLIVCPASVLENWERELRKWCPSFSIIMFHGAGRTAYSKELSSLGKAGCPAPFNVLLVGYTLFERRSAQQKDDRKALKRWQWSCVLMDEAHVLKDKGSFRWRNLMAVAQHARQRLMLTGTPLQ

SEQ ID NO: 71629 - protein, 142 aa, Setaria italica
  Transcript Sequence Number=SeqID_5655
  Homolog annotation: Hit_ID=B6SZ54; Match level="QueryCoverage=100%, HitCoverage=30%, E-value=6e-49, Identity=71%"; Hit description=Kelch motif family protein
GMGEGWPARQAGTKLSAVVDGDLYALEPSTSSDSGKIKIYDPQGDTWKVAVSQVPVGDFAESESPYLLAGFLGKLHLIIKDVDNTIIMQTDLLKPTDSAAPSAGTTCQNPDVSFEKETDVWKAIASKNIAVAELISCQVLSI

SEQ ID NO: 71630 - protein, 77 aa, Setaria italica
  Transcript Sequence Number=SeqID_5656
  Gene Ontology: Mol. function=protein binding
  Homolog annotation: Hit_ID=Q2R0M3; Match level="QueryCoverage=96%, HitCoverage=6%, E-value=2e-22, Identity=70%"; Hit description =Leucine Rich Repeat family protein, expressed
  Pfam annotation: Domain name=LRR_1; Domain location=29-51; Score =10.4; E_value=3; Accession=PF00560.25; Description=Leucine Rich Repeat
  Pfam annotation: Domain name=LRR_1; Domain location=53-75; Score=9.7; E_value=4.3; Accession=PF00560.25; Description=Leucine Rich Repeat
  Pfam module annotation: Pfam domain module=LRR_1::LRR_1; Domain location=29-51::53-75
AKTLEHISISFGEELLAYSQCEGLRDLGKLTKLEICGCDELTCLPQGLQHLSSIRILRIDNCSKLKTLPDWLENPYL

SEQ ID NO: 71631 - protein, 76 aa, Setaria italica
  Transcript Sequence Number=SeqID_5657
  Homolog annotation: Hit_ID=Q7F9I0; Match level="QueryCoverage=56%, HitCoverage=8%, E-value=3e-14, Identity=88%"; Hit description =OSJNBa0039C07.6 protein
MAAEGGGGGGQEAFEARVKRLFGSRLFDAVPDSSFPAASWSVASGDVERHRWAKPSEARDAEEEAAGEAGRADTPC

SEQ ID NO: 71632 - protein, 49 aa, Setaria italica
  Transcript Sequence Number=SeqID_5658
TQKKPCCSKLSVGSKQRGEKMKISSTVLAILVLQAVLVSAAMAESNGRH

SEQ ID NO: 71633 - protein, 89 aa, Setaria italica
  Transcript Sequence Number=SeqID_5659
  Homolog annotation: Hit_ID=B4FPL1; Match level="QueryCoverage=68%, HitCoverage=70%, E-value=1e-16, Identity=69%"; Hit description =Bowman-Birk type wound-induced proteinase inhibitor WIP1
MKISSTVLAILVLQAVLVSAAMAESNGLGASAKKSCCNSCTSWSGVYTCDDLLTKCAATCQNCAAVPTDKGTRYRCRDFLPEGCPCKAN

SEQ ID NO: 71634 - protein, 84 aa, Setaria italica
  Transcript Sequence Number=SeqID_5660
  Gene Ontology: Mol. function=protein serine/threonine kinase activity; Cellular component=plasma membrane; Biological process =protein amino acid phosphorylation
  Homolog annotation: Hit_ID=B6T161; Match level="QueryCoverage=89%, HitCoverage=16%, E-value=9e-36, Identity=93%"; Hit description =Phytosulfokine receptor
GNHYIVYELMEKGSLDTQLHGPSHGSALSWHIRMKIALDMARGLEYLHEHCSPPVIHRDLKSSNILLDSDFNAKVHTASLFLKV

SEQ ID NO: 71635 - protein, 223 aa, Setaria italica
  misc_feature (195)..(195): Xaa can be any naturally occurring amino acid
  Transcript Sequence Number=SeqID_5661
  Gene Ontology: Mol. function=protein serine/threonine kinase activity; Cellular component=plasma membrane; Biological process =protein amino acid phosphorylation
  Homolog annotation: Hit_ID=B6T161; Match level="QueryCoverage=100%, HitCoverage=51%, E-value=1e-111, Identity=85%"; Hit description =Phytosulfokine receptor
  Pfam annotation: Domain name=Pkinase; Domain location=5-196; Score= -32.5; E_value=1.5e-06; Accession=PF00069.17; Description=Protein kinase domain
  Pfam annotation: Domain name=Pkinase_Tyr; Domain location=1-196; Score=-61.7; E_value=1.3e-09; Accession=PF07714.9; Description =Protein tyrosine kinase
  Pfam module annotation: Pfam domain module=Pkinase::Pkinase_Tyr; Domain location=5-196::1-196
GNHYIVYELMEKGSLDTQLHGPSHGSALSWHIRMKIALDMARGLEYLHEHCSPPVIHRDLKSSNILLDSDFNAKTSEYIDKGTMNLSGTLGYVAPEYLLDGKLTEKSDVYAFGVVLLELLMGRKPVEKMSQTQCQSIVTWAMPQLADRSKLPNIVDPVIRDTMDPKHLYQVAAVAVLCVQPEPSYRPLITDVLHXLVPLVPVELGGTLRVAEPPSPNLKHSPC

SEQ ID NO: 71636 - protein, 240 aa, Setaria italica
  Transcript Sequence Number=SeqID_5662
  Gene Ontology: Mol. function=protein serine/threonine kinase activity; Cellular component=plasma membrane; Biological process =protein amino acid phosphorylation
  Homolog annotation: Hit_ID=B6T161; Match level="QueryCoverage=99%, HitCoverage=53%, E-value=1e-133, Identity=96%"; Hit description =Phytosulfokine receptor
  Pfam annotation: Domain name=Pkinase; Domain location=1-213; Score =22.7; E_value=7.7e-10; Accession=PF00069.17; Description=Protein kinase domain
  Pfam annotation: Domain name=Pkinase_Tyr; Domain location=1-213; Score=4.0; E_value=5.4e-14; Accession=PF07714.9; Description=Protein tyrosine kinase
  Pfam module annotation: Pfam domain module=Pkinase::Pkinase_Tyr; Domain location=1-213::1-213
NNVGFCVHEGNHYIVYELMEKGSLDTQLHGPSHGSALSWHIRMKIALDMARGLEYLHEHCSPPVIHRDLKSSNILLDSDFNAKISDFGLAVTSGNIDKGTMNLSGTLGYVAPEYLLDGKLTEKSDVYAFGVVLLELLMGRKPVEKMSQTQCQSIVTWAMPQLTDRSKLPNIVDPVIRDTMDPKHLYQVAAVAVLCVQPEPSYRPLITDVLHSLVPLVPVELGGTLRVAEPPSPNLKHSPC

SEQ ID NO: 71637 - protein, 1088 aa, Setaria italica
  misc_feature (558)..(558): Xaa can be any naturally occurring amino acid
  Transcript Sequence Number=SeqID_5663
  Gene Ontology: Mol. function=protein serine/threonine kinase activity; Biological process=protein amino acid phosphorylation
  Homolog annotation: Hit_ID=B9SC34; Match level="QueryCoverage=99%, HitCoverage=85%, E-value=1e-152, Identity=50%"; Hit description =Serine/threonine protein kinase, putative
  Pfam annotation: Domain name=PB1; Domain location=17-106; Score=84.9; E_value=2.9e-22; Accession=PF00564.16; Description=PB1 domain
  Pfam annotation: Domain name=Pkinase; Domain location=814-1077; Score= 209.3; E_value=1e-59; Accession=PF00069.17; Description=Protein kinase domain
  Pfam annotation: Domain name=Pkinase_Tyr; Domain location=814-1077; Score=245.8; E_value=1.1e-70; Accession=PF07714.9; Description =Protein tyrosine kinase
  Pfam module annotation: Pfam domain module=PB1::Pkinase::Pkinase_Tyr; Domain location=17-106::814-1077::814-1077
ERMKLLCSLGGRILPRPGDGTLRYAGGDTRIVSVPRGVSLPDLLARLADAYGGGTGPHFAVKYQLPDEGLDALISVSSTEDLDNMVEEYDKLSGASPKLRVFIFPILDAAGGSGAAGEELEGGSFDAGLRYLEAVNGIVRKDSIASLSSTQYSDGGLPPPAPSGGGGPGSPAALSPTSTSSNDAARSNISGAGAAPPPLVDVFSNAAPPPVQAKPQEIAAEGRAPQANPHPHPEVATHPHPLPEVTRYRQPLSQLPPLPPVFMNDHRDAMQGLNQPPPGHGARFDDCHMCLKALPHAHSDPVMNEYGNEVHGGAVPDPGPVFMSLRPEDVARIMVPERSAQAPMGAYGYTHMHPVPQERVYVPKVEGVTNSVLIDPTGLHQHVYLQQQQVPSTYGFSHIPVIPSEKDRVVSPSSSHTDVSSSHYQFVQQPQQQLPSGHPMAQYPAKPPSPNNPLAGEGSLSGNARHREDGQLHRDNVSLVAPVAVPNYVANVDRMMDSLRVSPSEASGSTEQRKPAMSPDSGLPQNAIPEHSQGLPENSISTRPDTRAKEVHPSNTNXTFFDVNEPKVLIQTESMPPPSVASSYLHNVQHVNMSHMPHMMSIGGPYPSYVVATVGPGGVPQSTYGIDLVYPNATVNTVSEQRDVPPEAYHQEAPHEVVAPPSTAQVPTPALANHAPNVDQSATNAHALPPRPKRVASRENISPRDPHTHNSLLNCKGPDLNIPAEDVSLQLQSDHKGDDISNPDLLGMEDGFATSKAQPSDHQPPLLNEGAGAVANKVDGEVHPNEVAKNRPADWISGFPATDGRLQIIKNNDLEELQELGSGTFGTVYHGKWRGTDVAIKRINDRCFAGKPSEQEKMRSDFWNEASNLADLHHPNVVAFYGVVLDGPGGSIATVTEYMVNGSLRTALLKNAKTLDRRKRLIIAMDTAFGMEYLHSKNIVHFDLKSDNLLVNLRDPQRPICKVGDLGLSKVKCQTLISGGVRGTLPWMAPELLNGSSSLVSEKVDVFSFGIVLWELLTGEEPYADLHYGVIIGGIVSNTLRPQVPDSCDPEWRSLMEQCWSTEPSERPSFTEIANRLRSMATSQKVQH

SEQ ID NO: 71638 - protein, 73 aa, Setaria italica
  Transcript Sequence Number=SeqID_5664
  Gene Ontology: Mol. function=protein serine/threonine kinase activity; Cellular component=extracellular region; Biological process=protein amino acid phosphorylation
  Homolog annotation: Hit_ID=Q2XX98; Match level="QueryCoverage=64%, HitCoverage=26%, E-value=4e-16, Identity=89%"; Hit description =Pathogenesis-related protein 5
  Subcellular localization annotation: CTP_CleavageSite=57; ConfidenceScore=5.53e-01
MAATSVLFLLLATFAAGASAATFTVTNNCGFTVWPAATPVGGGRQLNPGQKWTFGVPAGTSSGRVWGRTGCSF

SEQ ID NO: 71639 - protein, 75 aa, Setaria italica
  Transcript Sequence Number=SeqID_5665
  Gene Ontology: Mol. function=protein dimerization activity; Cellular component=nucleus; Biological process=regulation of transcription, DNA-dependent
  Homolog annotation: Hit_ID=Q41735; Match level="QueryCoverage=100%, HitCoverage=22%, E-value=1e-14, Identity=54%"; Hit description=G-box binding factor 1
SAGSGNSKRTMSSSEDYSAEGSSDVNDQKVNKTSRKRSLVDGPGAETSEAAKLANTAILPHHCFPAPVIKPSATN

SEQ ID NO: 71640 - protein, 373 aa, Setaria italica
  Transcript Sequence Number=SeqID_5666
  Gene Ontology: Mol. function=protein dimerization activity; Cellular component=nucleus; Biological process=regulation of transcription, DNA-dependent
  Homolog annotation: Hit_ID=Q41735; Match level="QueryCoverage=100%, HitCoverage=100%, E-value=1e-139, Identity=67%"; Hit description=G -box binding factor 1
  Pfam annotation: Domain name=MFMR; Domain location=1-156; Score =233.4; E_value=5.5e-67; Accession=PF07777.3; Description=G-box binding protein MFMR
  Pfam annotation: Domain name=bZIP_1; Domain location=234-297; Score =92.8; E_value=1.2e-24; Accession=PF00170.13; Description=bZIP transcription factor
  Pfam annotation: Domain name=bZIP_2; Domain location=234-288; Score =39.6; E_value=1.3e-08; Accession=PF07716.7; Description=Basic region leucine zipper
  Pfam module annotation: Pfam domain module=MFMR::bZIP_1::bZIP_2; Domain location=1-156::234-297::234-288
MAHDEAVATQKTGNTASSPKDQPAPSPYPDWSTMQAYYGHGVLPPTYFAPAIAPGHPPPYMWGPQPLMPHPFGTPYAAMYPHGAAYPHPLVPMVSNPLSVEQTKSANSKEKSSSKKLKEIDRTAVSAGSGNSKRTMSSSEDYSAEGSSDVNDQKVNKTSRKRSLVDGPGAETSEAAKLANTAILPHHCFPAPVIKPSATNVANSRAMGATISPSPGVIVPPHTGGPTDLSIKDERELKREKRKQSNRESARRSRLRKQAETEELATQVESLTAENTSLRSEIGRLTESSDKLRFENSALMVKLKDTAAPTPAEPSPNKAATSSSSPGAAAAENFLSMIDSTNAPGVSRHTEHGEPKLRQLLDSNPSTDVAAVS

SEQ ID NO: 71641 - protein, 364 aa, Setaria italica
  misc_feature (22)..(22): Xaa can be any naturally occurring amino acid
  misc_feature (148)..(148): Xaa can be any naturally occurring amino acid
  Transcript Sequence Number=SeqID_5667
  Gene Ontology: Mol. function=nucleic acid binding; Cellular component= nucleus; Biological process=embryonic development ending in birth or egg hatching
  Homolog annotation: Hit_ID=B9SNT5; Match level="QueryCoverage=84%, HitCoverage=32%, E-value=8e-78, Identity=52%"; Hit description=RNA binding protein, putative
  Pfam annotation: Domain name=RRM_1; Domain location=166-238; Score =50.6; E_value=6e-12; Accession=PF00076.14; Description=RNA recognition motif. (a.k.a. RRM, RBD, o
  Pfam annotation: Domain name=RRM_1; Domain location=55-141; Score =15.1; E_value=0.0079; Accession=PF00076.14; Description=RNA recognition motif. (a.k.a. RRM, RBD, o
  Pfam module annotation: Pfam domain module=RRM_1::RRM_1; Domain location=166-238::55-141
EVEAGPGRRSGAGKEKLPGVGXKRKAPDDAAVAAAGAGEDDEEAFDDETKLLRTVFVGNLPLRTKRKVLTKEFAAFGEIESVRIRSVPLVDTKLTRKGAVIQGKVNELVDNVHAYIVFKDEQSARAALSHNMAQFGGNHIRVDMACPXRKKLRGEGPLYDRNRTGFVGNLPFDVKDEELYQLFCGSSGSEGDVEAIRVIRDPNSSLGKGIAYVLFKTREAANAIVRKKDLKIKDRSLRLTHAKPVDTTPKKTMEARKKERVPKHKEVSTPGSKSNEGSDKAKRKASALSYQGLRSSKSGVVKKVKVNQRPSNPVKQSKTNEAGASARKGKRPAVAARKVKELAKKRKLDASTPENTHKSKKARK

SEQ ID NO: 71642 - protein, 82 aa, Setaria italica
  Transcript Sequence Number=SeqID_5668
  Pfam annotation: Domain name=DUF1666; Domain location=1-82; Score= -105.5; E_value=9e-05; Accession=PF07891.4; Description=Protein of unknown function (DUF1666)
RSRSLLSKLLQVPTFQVADKKDNTEDQMEPSIFAPDLIKLLEESILTFRLFLKKDKKKNSAHMSAHGHTGSSIHQVQSSLDK

SEQ ID NO: 71643 - protein, 56 aa, Setaria italica
  Transcript Sequence Number=SeqID_5669
  Gene Ontology: Cellular component=anchored to membrane; Biological process=cell wall catabolic process
  Homolog annotation: Hit_ID=B6TNR1; Match level="QueryCoverage=91%, HitCoverage=12%, E-value=8e-19, Identity=90%"; Hit description =Erwinia induced protein 1
  Subcellular localization annotation: CTP_CleavageSite=50; ConfidenceScore=5.06e-01
GASRQACASTFPKSASDHGLIVANGTYMLTAGTCVQCSCGPGSLNLYCTPASLSGS

SEQ ID NO: 71644 - protein, 133 aa, Setaria italica
  misc_feature (48)..(48): Xaa can be any naturally occurring amino acid
  Transcript Sequence Number=SeqID_5670
  Gene Ontology: Cellular component=anchored to membrane; Biological process=cell wall catabolic process
  Homolog annotation: Hit_ID=B6TNR1; Match level="QueryCoverage=97%, HitCoverage=23%, E-value=2e-36, Identity=64%"; Hit description =Erwinia induced protein 1
  Subcellular localization annotation: CTP_CleavageSite=61; ConfidenceScore=5.33e-01
WWFISASACASTFPKSASDHGLIVANGTYMLTAGTCVQCSCGPGSLKXVGLVSSFFSDDLSCTAGFNFCIIMPVFCSISLYCTPASLSGSCPSMQCPNSNVMLSNVSTHPTCAGCNVSSCSYGGFVNGTITTS

SEQ ID NO: 71645 - protein, 164 aa, Setaria italica
  Transcript Sequence Number=SeqID_5671
  Subcellular localization annotation: CTP_CleavageSite=22; ConfidenceScore=5.17e-01
PKDGPSGAPAPPPSPFLEVTCRSSGKVRRFAAGTTARYALHAINRKLDPGAPPALHVEAVRDGEEPVSFGPSAALADYGRGWRLQTVTAQDAPGIHHATRDDTKRGETQAAEDAVARETTRSTSVYIAKIVLAFVFIFLLGGLFTYMLEVLPDMLQTSPTPESL

SEQ ID NO: 71646 - protein, 56 aa, Setaria italica
  Transcript Sequence Number=SeqID_5672
  Gene Ontology: Mol. function=calcium ion binding
  Homolog annotation: Hit_ID=C4P7Y7; Match level="QueryCoverage=100%, HitCoverage=31%, E-value=2e-15, Identity=77%"; Hit description =Calcineurin B-like protein 08
MGCASSRQFGARAAGCKELAALASGTSFTVNEVEALYELYKKMSFSIIKDGLIHKE

SEQ ID NO: 71647 - protein, 113 aa, Setaria italica
  Transcript Sequence Number=SeqID_5673
  Gene Ontology: Mol. function=zinc ion binding; Cellular component =intracellular
  Homolog annotation: Hit_ID=B6U4G4; Match level="QueryCoverage=42%, HitCoverage=25%, E-value=1e-17, Identity=87%"; Hit description=Zn -finger, RanBP-type, containing protein
  Pfam annotation: Domain name=zf-RanBP; Domain location=26-55; Score =33.7; E_value=7.5e-07; Accession=PF00641.10; Description=Zn-finger in Ran binding protein and others
KERTKERTGLRTYGTGRGPVGGGGGREGDWDCGGCGNRNYAFRSLCNRCKQPRLLVDPNTPRDSKWLPRAGDWICTERTAKSVACPRRKQQCQHCKWQGWQCQLMQLISQDYK

SEQ ID NO: 71648 - protein, 123 aa, Setaria italica
  Transcript Sequence Number=SeqID_5674
  Gene Ontology: Mol. function=zinc ion binding; Cellular component =intracellular
  Homolog annotation: Hit_ID=B6TEG2; Match level="QueryCoverage=80%, HitCoverage=28%, E-value=3e-48, Identity=91%"; Hit description=Zn -finger, RanBP-type, containing protein
  Pfam annotation: Domain name=zf-RanBP; Domain location=25-54; Score =33.7; E_value=7.5e-07; Accession=PF00641.10; Description=Zn-finger in Ran binding protein and others
  Pfam annotation: Domain name=zf-RanBP; Domain location=68-97; Score =10.3; E_value=0.067; Accession=PF00641.10; Description=Zn-finger in Ran binding protein and others
  Pfam module annotation: Pfam domain module=zf-RanBP::zf-RanBP; Domain location=25-54::68-97
MAGGGGAGAGSSSGGSGSGGGGGGREGDWDCGGCGNRNYAFRSLCNRCKQPRLLVDPNTPRDSKWLPRAGDWICTGCSNNHHAPLRYCKKCGLPKEEAAMPALQMAGMAMPAYATYIARLQSL

SEQ ID NO: 71649 - protein, 271 aa, Setaria italica
  Transcript Sequence Number=SeqID_5675
  Gene Ontology: Mol. function=zinc ion binding; Cellular component =intracellular
  Homolog annotation: Hit_ID=B6TEG2; Match level="QueryCoverage=100%, HitCoverage=78%, E-value=1e-141, Identity=91%"; Hit description=Zn -finger, RanBP-type, containing protein
  Pfam annotation: Domain name=zf-RanBP; Domain location=109-137; Score= 32.0; E_value=2.4e-06; Accession=PF00641.10; Description=Zn-finger in Ran binding protein and others
  Pfam annotation: Domain name=zf-RanBP; Domain location=235-264; Score= 32.5; E_value=1.7e-06; Accession=PF00641.10; Description=Zn-finger in Ran binding protein and others
  Pfam module annotation: Pfam domain module=zf-RanBP::zf-RanBP; Domain location=109-137::235-264
IGCSNNNYASRKNCKKCGLPKEEAAMPALQMAGMAMPAYATYIARLQSLAASAYKMNFGMAANSPLQQQLLANANWSYGLAGRYGMQSSGWPFGNNTTNQFPGVPKDWRNGDWLCSCGFHNYSSRTQCKECGAPVPSGIPSTTMKTTSDASSTLGTKRLASEELANDWDNKRLNPGNDNYPLSTAGTNNLFLGIEQGAGSSNGQAAFSKFDNGSSIALPSGQAMSGLMGKGAKWRDGDWMCSNCNNHNYASRAFCNRCKTQKESAVHPGVL

SEQ ID NO: 71650 - protein, 76 aa, Setaria italica
  misc_feature (43)..(43): Xaa can be any naturally occurring amino acid
  Transcript Sequence Number=SeqID_5676
MAGWISSKLKAAETLLHQIDQQAAESLGKSPSASDLAALHPSXTPYRRNDLTYDVTPPRRPPQAGPPPSLGLRLAA

SEQ ID NO: 71651 - protein, 249 aa, Setaria italica
  misc_feature (240)..(240): Xaa can be any naturally occurring amino acid
  Transcript Sequence Number=SeqID_5677
  Gene Ontology: Mol. function=protein binding; Cellular component =nuclear chromosome; Biological process=chromosome segregation
  Homolog annotation: Hit_ID=Q6WG80; Match level="QueryCoverage=100%, HitCoverage=23%, E-value=1e-122, Identity=87%"; Hit description =Rad21/Rec8-like protein
  Pfam annotation: Domain name=Rad21_Rec8_N; Domain location=1-111; Score=231.0; E_value=3.1e-66; Accession=PF04825.5; Description=N terminus of Rad21  Rec8 like protein
MFYSQFILAKKGPLGTIWIAAHLERKLRKNQVADTDIGVSVDSIIFPDVPIALRLSSHLMLGVVRIYSRKVNYLFHDCSEALLKIKQAFRSTAVDLPPEESTAPYHSITLPETFHLDDFELPEAAFQGDTDHHVSTKEQITLQDNPEKTGYSTSQFGLDERFGDGSSSHIGLDLEEELMLNKDHSIHLESDDGIIIQGRPSVPSTDMDIDDNQSKDETAERCNNMDDGPSSQGKTKYQLXNADDLGGNS

SEQ ID NO: 71652 - protein, 250 aa, Setaria italica
  Transcript Sequence Number=SeqID_5678
  Gene Ontology: Cellular component=nuclear chromosome
  Homolog annotation: Hit_ID=Q6WG80; Match level="QueryCoverage=94%, HitCoverage=20%, E-value=2e-83, Identity=69%"; Hit description =Rad21/Rec8-like protein
ELIIFICYQELMLNKDHSIHLESDDGIIIQGRPSVPSTDMDIDDNQSKDETAERCNNMDDGPSSQGKLSPLNADDLGGNSIPNWTGYNAQTPDLNDMLLHNEGIAGPSASYYQPSPFPCDEPASPEFISAQAPATPGLIGETVPSRVHESPVLSPQRKASPSSNDETVKASTPAAPGSDSLHSATANATDVVGAEATELGLAKPVQVESSAVVQDDVVLMQQGTTWEDLPSHAQTSNLEAAGDKLICLMT

SEQ ID NO: 71653 - protein, 139 aa, Setaria italica
  Transcript Sequence Number=SeqID_5679
  Homolog annotation: Hit_ID=C1W9K9; Match level="QueryCoverage=89%, HitCoverage=49%, E-value=2e-11, Identity=33%"; Hit description =Uncharacterized conserved protein
  Pfam annotation: Domain name=DUF1365; Domain location=2-121; Score= -7.2; E_value=7.4e-11; Accession=PF07103.3; Description=Protein of unknown function (DUF1365)
NEVTNTPWGERVMFTFQPDSDLIAKPLHVSPFMDMLGNWSIRADAPGDSLYVVISVQHPTLGNYFTAALHAKLVGHTSNSLRLATFFWLMPHKVAAWIYWEALRLWLKNVKFLDHPRYLNMSYRDEALKRDLELRSSCS

SEQ ID NO: 71654 - protein, 101 aa, Setaria italica
  misc_feature (50)..(50): Xaa can be any naturally occurring amino acid
  Transcript Sequence Number=SeqID_5680
IIAAALGVADGHVQGGMTGDLSLMCPEFVQVPLYIIIQHYNHLVGICLIXTYCTVWYLESNLQSFFAGIAASGAITSALRFFTKAVFENSRDGLRKGASML

SEQ ID NO: 71655 - protein, 425 aa, Setaria italica
  Transcript Sequence Number=SeqID_5681
  Gene Ontology: Mol. function=nucleoside transmembrane transporter activity; Cellular component=membrane; Biological process=transport
  Homolog annotation: Hit_ID=B9INU8; Match level="QueryCoverage=88%, HitCoverage=93%, E-value=1e-146, Identity=66%"; Hit description =Equilibrative nucleoside transporter (Fragment)
  Pfam annotation: Domain name=Nucleoside_tran; Domain location=126 -421; Score=48.7; E_value=4.1e-14; Accession=PF01733.10; Description =Nucleoside transporter
GHQSELGMEYDDEDTEAAKNQGKSWGIFFCWLLGNGCLFGFNGMLTIEDYYTYLFPKYHPTRIITLTYQPFVLATTAIFTYHEAKVNTRVRNLAGYVLFFLSSFGVIILDVLSSGGGGIAPFIGVCIIAAALGVADGHVQGGMTGDLSLMCPEFVQSFFAGIAASGAITSALRFFTKAVFENSRDGLRKGAMLFSSISCFFELLCVLLYAFVFPKLPIVKFYRSRAASEGSLTVTADLAAGGIKSQPNSLAEEAPAHAERLSNKQLLHQNMDYALDIFLIYILTLSIFPGFLAEDTGSHSLGSWYVLVLIASFNVSDLIGRYLPLLEPIKLTSRKGLLIAVISRFLLIPAFYFTAKYGNQGWMIMLTSLLGLSNGHLTVCVLTEAPKGYKGPEQNALGNLLVLFLLAGIFVGAVSDWLWLIGKGW

SEQ ID NO: 71656 - protein, 398 aa, Setaria italica
  misc_feature (8)..(8): Xaa can be any naturally occurring amino acid
  Transcript Sequence Number=SeqID_5682
  Gene Ontology: Mol. function=aspartic-type endopeptidase activity; Cellular component=extracellular region; Biological process =proteolysis
  Homolog annotation: Hit_ID=B9T009; Match level="QueryCoverage=97%, HitCoverage=86%, E-value=1e-118, Identity=55%"; Hit description =Aspartic proteinase nepenthesin-1, putative
  Pfam annotation: Domain name=Asp; Domain location=24-385; Score= -138.0; E_value=2.1e-05; Accession=PF00026.15; Description=Eukaryotic aspartyl protease
  Subcellular localization annotation: CTP_CleavageSite=23; ConfidenceScore=5.26e-01
PAWALPRXPSKLRFHHNVSLTVSLAVGTPPQNVTMVLDTGSELSWLLCAPGRQGNASTAARGASFRPRASGTFAAVPCGSPQCSSRDLPAPPSCDGASRRCSVSLSYADGSSSDGALATDVFAVGDAPPLRSAFGCMSSAYDSSPDGVATAGLLGMNRGTLSFVSQASTRRFSYCISDRDDAGVLLLGHSDLPFLPLNYTPLYQPTLPLPYFDRVAYSVQLLGIRVGGKPLPIPASVLAPDHTGAGQTMVDSGTQFTFLLGDAYSALKAEFLKQTKPILPALDDPNFAFQEAFDTCFRVPAGRPPPSARLPAVSLLFKGAEMSVAGDRLLYKVPGERRGGDGVWCLTFGNADMVPLTAYVIGHHHQMNLWVEYDLERGRVGLAPVKCDVASERLGLML

SEQ ID NO: 71657 - protein, 253 aa, Setaria italica
  Transcript Sequence Number=SeqID_5683
  Gene Ontology: Cellular component=membrane
  Homolog annotation: Hit_ID=B6SKI7; Match level="QueryCoverage=99%, HitCoverage=51%, E-value=1e-120, Identity=83%"; Hit description=CrcB- like protein
  Pfam annotation: Domain name=CRCB; Domain location=124-243; Score =15.2; E_value=1.1e-05; Accession=PF02537.7; Description=CrcB-like protein
GITTGYMGSLTTFSGWNQKMVGLSSRGHWVYAIAGIVLGMFIVNESITIGAETGERLRSLILKYIRERSSIGHKYDWEQWRVDTRTKQSVLLSVMMILMSFLWILSIALAVVKVRSLADGAVLWMGCSVVPPGVWLRWYLARLNGQGIGKQGSFKWLPIGTLAANVLAAGVMAALAVTSKVVHTKQAMTILSGIQLGFLGCLSTVSTFAAEVYTMRRSGQIARAFVYAASTFLLSFVLGTLIYSVPVWEKHYG

SEQ ID NO: 71658 - protein, 130 aa, Setaria italica
  misc_feature (65)..(65): Xaa can be any naturally occurring amino acid
  Transcript Sequence Number=SeqID_5684
  Gene Ontology: Mol. function=oxidoreductase activity; Cellular component=peroxisome; Biological process=oxidation reduction
  Homolog annotation: Hit_ID=Q2I692; Match level="QueryCoverage=90%, HitCoverage=47%, E-value=3e-40, Identity=76%"; Hit description =Betaine aldehyde dehydrogenase (Fragment)
  Pfam annotation: Domain name=Aldedh; Domain location=1-129; Score= -258.9; E_value=1.7e-05; Accession=PF00171.14; Description=Aldehyde dehydrogenase family
ETNTDYLMATWKVAPALAAGCTAVLKPSELSSVTCLELGDVCKEVGLPSGVLNIVTGLGPDAGAXPLAAHPDVDKVSFTGSFETGKKIMAAAAPMVKPVTLELGGKSPIVVFDDVDIEKRLLEIGTTSLG

SEQ ID NO: 71659 - protein, 153 aa, Setaria italica
  Transcript Sequence Number=SeqID_5685
  Gene Ontology: Mol. function=oxidoreductase activity; Cellular component=mitochondrion; Biological process=oxidation reduction
  Homolog annotation: Hit_ID=B3VMC1; Match level="QueryCoverage=100%, HitCoverage=60%, E-value=5e-60, Identity=75%"; Hit description =Putative betaine-aldehyde dehydrogenase
  Pfam annotation: Domain name=Aldedh; Domain location=1-153; Score= -259.4; E_value=1.8e-05; Accession=PF00171.14; Description=Aldehyde dehydrogenase family
NPATEAQIGEIPAGTAEDVEAAVAAARAALRRNRGRDWARAPGAVRAKYLRAIAAKIIERKPELAKLEALDCGKPYDEAAWDMDDVAGCFEYFADQAEALDKRQNSPVTLPMETFKCHLRREPIGVVGLITPWNYPLLMATWKVAPALAAGCT

SEQ ID NO: 71660 - protein, 106 aa, Setaria italica
  Transcript Sequence Number=SeqID_5686
PMQYAHITSQVQAYSKTELGHLILFLRCNTSQCHMFHLLHGFIRRIASFIPDFQWDRQKLSVPALHLGGGRVPSPRLIREVLRDLLDVQVVIDAPVAKKQHKQGVS

SEQ ID NO: 71661 - protein, 239 aa, Setaria italica
  misc_feature (28)..(28): Xaa can be any naturally occurring amino acid
  misc_feature (213)..(213): Xaa can be any naturally occurring amino acid
  misc_feature (221)..(221): Xaa can be any naturally occurring amino acid
  Transcript Sequence Number=SeqID_5687
  Gene Ontology: Mol. function=nucleotide binding; Biological process =defense response
  Homolog annotation: Hit_ID=Q84KC8; Match level="QueryCoverage=61%, HitCoverage=9%, E-value=3e-22, Identity=48%"; Hit description=NBS -LRR disease resistance protein homologue
MGHQAMATPGPSSPGHKVGQQQDPRAEXEIVALAAEGLLLLPRQLQELLICNYLELSLHSNPLNDNKEDGRTGGGGGLQDLSSLRRLDISTCPKLLSSYHSSCFPLPTSLEYLELEGVVGLETIVPLSNLSSLTHLSICECDGLRVKGLLSLLAQGHLTTLRVTETPNFFVDSEPSRVHEQVLPSRSSTLQELSMDDVAGVTAAPICSSLFSXLTTLGIFXGCKVEHFTEEQEALLFIN

SEQ ID NO: 71662 - protein, 108 aa, Setaria italica
  Transcript Sequence Number=SeqID_5688
  Gene Ontology: Mol. function=structural molecule activity; Cellular component=viral capsid; Biological process=oxidation reduction
  Homolog annotation: Hit_ID=A5X8Y8; Match level="QueryCoverage=62%, HitCoverage=11%, E-value=2e-17, Identity=63%"; Hit description=Low -phosphate root 1
MGERRSACLLAVAMVLLQAAAAAVLGGGERSGGGALLDPRRLEKFVDELPDMPRLRGYGVTEGGALVAGNLTIGMYDTTWKFHRDLPATRVFAYGASREAATVPGPTI

SEQ ID NO: 71663 - protein, 52 aa, Setaria italica
  Transcript Sequence Number=SeqID_5689
SRTHLERPHKGNCYVLLLPTSTTIFPKNIFRIMIRVFFPLDIYTSYWLLQGN

SEQ ID NO: 71664 - protein, 184 aa, Setaria italica
  misc_feature (47)..(47): Xaa can be any naturally occurring amino acid
  Transcript Sequence Number=SeqID_5690
  Gene Ontology: Mol. function=single-stranded DNA binding; Cellular component=mitochondrion
  Homolog annotation: Hit_ID=B9STF2; Match level="QueryCoverage=98%, HitCoverage=86%, E-value=1e-59, Identity=62%"; Hit description =Single-stranded DNA-binding protein, mitochondrial, putative
  Pfam annotation: Domain name=SSB; Domain location=54-165; Score=94.1; E_value=4.7e-25; Accession=PF00436.17; Description=Single-strand binding protein family
VFCRQSRAWSSTVSFSDLDEKGDMDIDDDYTDSKRELQPHSVDPKKXGWAFRGVHRAIICGKVGQVPVQKILRNGRTVTVFTVGTGGMFDQRVIGPEDLPKPAQWHRIAVHNDRLGAYVVQKLVKNSAVYVEGDIETRVYNDSINDQVRNIPEICVRRDGKIRLVKSGDSAANISLDGLREGLF

SEQ ID NO: 71665 - protein, 417 aa, Setaria italica
  misc_feature (4)..(4): Xaa can be any naturally occurring amino acid
  Transcript Sequence Number=SeqID_5691
  Homolog annotation: Hit_ID=B6U651; Match level="QueryCoverage=99%, HitCoverage=93%, E-value=0.0, Identity=87%"; Hit description=F-box domain containing protein
  Pfam annotation: Domain name=F-box; Domain location=66-113; Score =33.4; E_value=9.2e-07; Accession=PF00646.25; Description=F-box domain
MFYXWYLLDFEHGSIKDDYCGGRTGYNSELLKIMGTNQSPPRKRLRRDRNREKAPCSNATEVMQHEIWKEFPEDLFETVIARLPVAAIFRFRTVCRKWSSLLGSDSFSRQYSEAPHGLPWFYTITHENANNNVAMYDPSLKKWHHPSVPLAPTKIVIPVASVGGLVCLLDLSHRNFYICNPLTQSLKEIPPRSVQGWSRVAVGMVLNGRSSNDGYKVMWLGNDGTYEVYDSTKNTWSCPGVFPPSIKLPLALNFRSQPVAVGSTLYFMCAEPDGVLSYDVSNGIWRQFAIPLPLHLADHTLAEFQGKVMLVGLLCKNAATCVCIWELQKMTLLWKEVDRMPNIWCLEFYGKHMKMTCLGNSGLLMLSLKAKRMNRLVTYNLLKKEWQKVPDCMLPCSRKKQWIACGTAFDPCPSALA

SEQ ID NO: 71666 - protein, 420 aa, Setaria italica
  misc_feature (9)..(9): Xaa can be any naturally occurring amino acid
  Transcript Sequence Number=SeqID_5692
  Gene Ontology: Mol. function=nucleoside-triphosphatase activity; Cellular component=nuclear origin of replication recognition complex; Biological process=DNA replication initiation
  Homolog annotation: Hit_ID=Q945C8; Match level="QueryCoverage=100%, HitCoverage=52%, E-value=0.0, Identity=85%"; Hit description=Origin recognition complex subunit 1
  Pfam annotation: Domain name=AAA; Domain location=66-275; Score=49.9; E_value=9.7e-12; Accession=PF00004.21; Description=ATPase family associated with various cellular activities (AAA)
IYGLQKLGXKIPEHVRCHQKTELEKAKATLLLATLPKSLPCRDKEMEEISTFVKDAICKDQCLGRCLYIHGVPGTGKTMSVLAVMRKLRSEFDSGTLKPYCFIEINGLKLASPENIYKVIYEQLSGHRVGWKKALHYLTEHFSGVSKIGKQANQPIILLIDELDLLLTRNQSVLYNILDWPTKPNSNLVVIGIANTMDLPEKLLPRISSRMGIQRLCFGPYNFRQLQEIITSRLKGIDAFEEQAIEFASRKVAAMSGDARRALEICRRAAEFADYRVKQSQQSGKTSANKGDGVVCMGDIEAAIQEVFQAPHIQVMKNCPKFGKVILVAMVHELYKSGLGEVTFDKLATTVLSWCQVNRELLPGYDTLMKICCKLGESKVILCEEGSKHKLQKLQLNYPSDDITFALKESPDLPWLSKYL

SEQ ID NO: 71667 - protein, 123 aa, Setaria italica
  Transcript Sequence Number=SeqID_5693
  Gene Ontology: Cellular component=integral to membrane
  Homolog annotation: Hit_ID=B9RM88; Match level="QueryCoverage=51%, HitCoverage=7%, E-value=5e-23, Identity=87%"; Hit description =Pentatricopeptide repeat-containing protein, putative
  Pfam annotation: Domain name=UPF0016; Domain location=70-122; Score =47.3; E_value=5.8e-11; Accession=PF01169.11; Description =Uncharacterized protein family UPF0016
  Subcellular localization annotation: CTP_CleavageSite=53; ConfidenceScore=5.03e-01
ALLVALALSVSISASAAAGADQVADGAAANGTGAGAARLDRRTKMFLHTARARGAAAGAQEPGLGLFDAFFASLSMIVVSEIGDETFIIAALMAMRHPKSTVLSGALSALFVMTVLSTGLGRI

SEQ ID NO: 71668 - protein, 55 aa, Setaria italica
  Transcript Sequence Number=SeqID_5694
RRDFCCITKELAAPQGLLSCSTLDVSDNSTLFRLRHDQAIRILFTAMDHDMGEEG

SEQ ID NO: 71669 - protein, 47 aa, Setaria italica
  Transcript Sequence Number=SeqID_5695
  Gene Ontology: Mol. function=protein serine/threonine kinase activity; Biological process=protein amino acid phosphorylation
  Homolog annotation: Hit_ID=C4P7T5; Match level="QueryCoverage=91%, HitCoverage=9%, E-value=4e-16, Identity=88%"; Hit description=CBL -interacting protein kinase 30
PFHHLVEMKQTSGDSLEYQKLFEEHIRPALKDIVWAWHGDDQQQKQE

SEQ ID NO: 71670 - protein, 67 aa, Setaria italica
  Transcript Sequence Number=SeqID_5696
NSFILSWLELIACMAEKFSSKHCLLNYFEHASSKRTQQSQSYIFLFLLKYGYLVSLHFPNILSYLMN

SEQ ID NO: 71671 - protein, 67 aa, Setaria italica
  Transcript Sequence Number=SeqID_5697
VVDSALEKGLDALLVNSSNYFIDMSVLYQINSTLAISRLKHFETNVVVERRTPFCPDFKQFSFNRVN

SEQ ID NO: 71672 - protein, 113 aa, Setaria italica
  misc_feature (97)..(97): Xaa can be any naturally occurring amino acid
  misc_feature (106)..(106): Xaa can be any naturally occurring amino acid
  Transcript Sequence Number=SeqID_5698
MRRDDAGGGTGLHDLFDSVRRSISFRPGAAAAGPEAPAGPFGAGGGGIGVRISSCIRKSRGMGLLGLITKNPSPPRRMLPPMPDEAGGGSGGGGGAXGGAGEENPXIRWREGG

SEQ ID NO: 71673 - protein, 89 aa, Setaria italica
  Transcript Sequence Number=SeqID_5699
  Gene Ontology: Mol. function=carbonate dehydratase activity; Cellular component=extracellular region; Biological process=one-carbon compound metabolic process
  Homolog annotation: Hit_ID=B6SUT0; Match level="QueryCoverage=98%, HitCoverage=29%, E-value=6e-34, Identity=83%"; Hit description =Carbonic anhydrase
RDYTVANGTLVDNIFNVGLRFDGGAGSVTVDGKQYRLKQMHWHSPSEHTINGQRFPVELHMVHASDDGNVTVVAMLYRFGRPDPFLWQE

SEQ ID NO: 71674 - protein, 58 aa, Setaria italica
  Transcript Sequence Number=SeqID_5700
  Gene Ontology: Mol. function=transferase activity, transferring glycosyl groups; Biological process=metabolic process
MATPALVLLPEWGSGHLMSMLESCKRVLLSGGGGGKAFSITLLVVRPPTDEATSEVEA

SEQ ID NO: 71675 - protein, 65 aa, Setaria italica
  Transcript Sequence Number=SeqID_5701
  Gene Ontology: Mol. function=electron carrier activity; Biological process=oxidation reduction
  Homolog annotation: Hit_ID=Q6K6E3; Match level="QueryCoverage=96%, HitCoverage=14%, E-value=2e-15, Identity=61%"; Hit description =Putative cytochrome P450
GRRQCLGLPLAYRMVHLVLGSLLYHFDWRLPNDVKDNGIDMSEKSGAIMVSMATPLKAIAKECDE

SEQ ID NO: 71676 - protein, 319 aa, Setaria italica
  Transcript Sequence Number=SeqID_5702
  Gene Ontology: Mol. function=pectate lyase activity
  Homolog annotation: Hit_ID=B6TSP4; Match level="QueryCoverage=99%, HitCoverage=70%, E-value=1e-160, Identity=85%"; Hit description =Pectate lyase
  Pfam annotation: Domain name=Pec_lyase_C; Domain location=49-236; Score=291.9; E_value=1.4e-84; Accession=PF00544.11; Description =Pectate lyase
RGLAGKFYVVTDGTDDDVVNPRPGTLRWAVIQIEPLWITFAKTMIITLKEELIIRGDKTIDGRGVQVRIANGAQLTVQFANNVIIHNIHINDIISSNKNGGNIRDSPDHFGWRTVSDGDGITVFGSTNVWLDHLSLSNCQDGLIDVIAKSTGVTISNCHMTNHNDVMLFSSSDKHPEDQIMQITVAFNHFGRGLVQRMPRCRWGFFHVVNNDYTHWLMYAIGGSKAPTIISQGNRYIAPPNLAAKQVTKQHDAPESEWKNWVWHSEDDLFMEGAYFTVTGGQINRQFNKKDLIKPKPGSYVTRLTRFAGSLDCKPGKPC

SEQ ID NO: 71677 - protein, 179 aa, Setaria italica
  Transcript Sequence Number=SeqID_5703
  Gene Ontology: Mol. function=structural constituent of ribosome; Cellular component=ribonucleoprotein complex; Biological process =translation
  Homolog annotation: Hit_ID=B6T3Y5; Match level="QueryCoverage=100%, HitCoverage=100%, E-value=3e-50, Identity=62%"; Hit description =Plastid-specific 30S ribosomal protein 3
  Pfam annotation: Domain name=PSRP-3_Ycf65; Domain location=126-174; Score=106.9; E_value=6.8e-29; Accession=PF04839.5; Description =Plastid and cyanobacterial ribosomal protein (PSRP-3  Ycf65)
  Subcellular localization annotation: CTP_CleavageSite=57; ConfidenceScore=5.82e-01
MLPMAVHPATTPALAPRARVAPPRPSTSLAAASSSSCSRIVGVKTRRLPLRSLRSVAAAAAADAVEEEEVQLGGAADALYEEEAEEYEVKVPERQDPMLVLKFIWMEKNIGIALDQLVPGYGSIPLSPYYFWPRKDAWEELRAKLEEKEWISQKQMIILLNQATDIINLWQQGGGSLST

SEQ ID NO: 71678 - protein, 159 aa, Setaria italica
  misc_feature (140)..(140): Xaa can be any naturally occurring amino acid
  Transcript Sequence Number=SeqID_5704
  Gene Ontology: Mol. function=RNA-directed DNA polymerase activity; Biological process=RNA-dependent DNA replication
  Homolog annotation: Hit_ID=Q2QT48; Match level="QueryCoverage=91%, HitCoverage=16%, E-value=7e-79, Identity=92%"; Hit description =Intron maturase, type II family protein, putative, expressed
KRKVLRKSRKKKVLNENEPKPDPYWLRLFFGFAPEQACHVPNYGHCGIISPLLANVCLNELDWWMEEKINEYFCPSKHDSIWKEAGDEGCHNPAWPEFVPSAGKEKTRKMDFLRFGSHVLIGIRGPREDAVEIRRQLMEXCERTFGLRPENSMVEIEHI

SEQ ID NO: 71679 - protein, 109 aa, Setaria italica
  Transcript Sequence Number=SeqID_5705
YKWNEIKQHARHLVPYQGPFPLFQFHTRGADRGRRGNTHGCAGAGGGGSHHTPRLSITNVQALDAALASLSSAGLDRVRVAAQASIPTVAEVAAHGLIFLDSRKGGGRR

SEQ ID NO: 71680 - protein, 240 aa, Setaria italica
  misc_feature (184)..(184): Xaa can be any naturally occurring amino acid
  Transcript Sequence Number=SeqID_5706
  Gene Ontology: Mol. function=methyltransferase activity; Biological process=menaquinone biosynthetic process
  Homolog annotation: Hit_ID=Q7X6S1; Match level="QueryCoverage=85%, HitCoverage=75%, E-value=1e-102, Identity=89%"; Hit description =OSJNBa0043L24.12 protein
  Pfam annotation: Domain name=Methyltransf_11; Domain location=85-187; Score=60.4; E_value=6.9e-15; Accession=PF08241.4; Description =Methyltransferase domain
  Pfam annotation: Domain name=Methyltransf_12; Domain location=85-185; Score=23.4; E_value=0.00091; Accession=PF08242.4; Description =Methyltransferase domain
  Pfam annotation: Domain name=Ubie_methyltran; Domain location=36-240; Score=57.1; E_value=1.2e-15; Accession=PF01209.10; Description =ubiECOQ5 methyltransferase family
  Pfam module annotation: Pfam domain module=Methyltransf _11::Methyltransf_12::Ubie_methyltran; Domain location=85-187::85 -185::36-240
  Subcellular localization annotation: CTP_CleavageSite=35; ConfidenceScore=5.45e-01
MGTVTASISISAAAAVMSRPAGRRRRRGPAVFRCSSSTAGERQALFSRIAPVYDHLNDVLSLGQHRTWKRICVSWSRAKMGDRVLDLCCGSGDLAFLLSQKVGLDGEVMAVDFSRQQLQTAADRQEQRWKLCYKNIKWIEGDALDLPFTDCYFDAVTIGYGLRNVVDKSRAMQEIFRVLKLGSXTGSRASILDFNKSSSLFTASLQSWAIDNVVVPLASGYGLTEEYKYLKSSISQYLTG

SEQ ID NO: 71681 - protein, 99 aa, Setaria italica
  Transcript Sequence Number=SeqID_5707
  Subcellular localization annotation: CTP_CleavageSite=32; ConfidenceScore=5.15e-01
SKQWPQVNPGFKLWPPLLKRAPGRPRERRYKSAAEGDSGKRTTSSPVHGFRETGNQPAPNPAGPVIPVPSAGWTLTRVDPDEASGVSWFAVLTRQTHRG

SEQ ID NO: 71682 - protein, 108 aa, Setaria italica
  Transcript Sequence Number=SeqID_5708
  Homolog annotation: Hit_ID=B6TEF8; Match level="QueryCoverage=100%, HitCoverage=50%, E-value=2e-49, Identity=87%"; Hit description=EREBP- 4 like protein
  Pfam annotation: Domain name=DUF862; Domain location=14-108; Score =103.5; E_value=7.3e-28; Accession=PF05903.6; Description=Eukaryotic protein of unknown function (DUF862)
MEAQNGGGGGGGGAPVVLNVYDLTPMNNYLYWFGLGIFHSGIEVHGMEYGFGAHEFPTSGVFEVEPKSCPGFVYRRSVWMGTTNMSRTEFRSFIENLAGKYNGNMYHL

SEQ ID NO: 71683 - protein, 167 aa, Setaria italica
  Transcript Sequence Number=SeqID_5709
  Homolog annotation: Hit_ID=B6TEF8; Match level="QueryCoverage=99%, HitCoverage=80%, E-value=3e-78, Identity=85%"; Hit description=EREBP- 4 like protein
  Pfam annotation: Domain name=DUF862; Domain location=1-109; Score =141.4; E_value=2.8e-39; Accession=PF05903.6; Description=Eukaryotic protein of unknown function (DUF862)
TVHGMEYGFGAHEFPTSGVFEVEPKSCPGFVYRRSVWMGTTNMSRTEFRSFIENLAGKYNGNMYHLISKNCNHFTDDVCKNLTRKSIPGWVNRLARVGSFFNCLLPESIQVSTVRHVPTHPAFSDDDMDSISSSVVGDSDLEELDQHLLPSDVHSIDVSPKLAKDLL

SEQ ID NO: 71684 - protein, 604 aa, Setaria italica
  Transcript Sequence Number=SeqID_5710
  Gene Ontology: Cellular component=plasma membrane
  Homolog annotation: Hit_ID=B6U1S0; Match level="QueryCoverage=99%, HitCoverage=99%, E-value=0.0, Identity=69%"; Hit description=ATMAP70- 3
  Pfam annotation: Domain name=Myosin_HC-like; Domain location=198-561; Score=704.3; E_value=1e-208; Accession=PF07058.3; Description=Myosin II heavy chain-like
DGGEDGNAAVPRASSRRRGPVRASLDADEFIALMHGSDPVRVELTRLENELRDKERELGEAQAEIRALRLSERAREKAVEELTDELEKMDEKLKLTESFLDSKNLEVKRINDEKKAAMAAQFAAEATLRRVHAAQKDDDMPPIEAILAPLEAELKLSRQEISKLQDDNRALDRLTKQKEAALLEAERTVQIAMAKAAMVDDLQNKNQELIKQIEICHEENKILDKLHRQKIAEVEKLSQTVGDLEEALLQGGRNANVVRDYERRFQEMSEEKRTLDRELARAKVTANRVATVVANEWKDSNDKVMPVKQWLEERRFLQGEMQQLRDKLAVAERTARSEAQLKEKYQLRLKVLEDGLRGLPSGSNRPPTEGKSFSNGPSRRLSLGGADNMSKLSPNGLLSRRSPSFHSRSSLLSSSSLVLKHAKGTSKSFDGGTRSLDRGKVRVNGAHLLNRSTDAVRDKESTDNWKGNVDERTSESADSNADEKSNETTNNNLAETVSGFLYDMLQKEVISLRKSCYEKDQILKDKDENIEILEKKIDTLNKAMEVEAKKMRRQVAAMEKDVAAMRASKEQETRAKRLGTKSPGSSQLLPGRNAPRSGLMRNFQ

SEQ ID NO: 71685 - protein, 51 aa, Setaria italica
  Transcript Sequence Number=SeqID_5711
  Homolog annotation: Hit_ID=B6SU92; Match level="QueryCoverage=96%, HitCoverage=23%, E-value=7e-15, Identity=82%"; Hit description=FIP1
FAVTLGPKLYETVKGKLSLGARILQAGGVEKVFRRWFSVEKGEKLLKASQC

SEQ ID NO: 71686 - protein, 75 aa, Setaria italica
  Transcript Sequence Number=SeqID_5712
  Homolog annotation: Hit_ID=B6TFD3; Match level="QueryCoverage=92%, HitCoverage=30%, E-value=1e-20, Identity=64%"; Hit description=FIP1
VSSPRGDRARVPYKVTIPLRKMKAVRPSENKHRPEQKYVQLVTNDGFEFWFMGFVSYNRSLQHLEQAVAYAQQAQ

SEQ ID NO: 71687 - protein, 180 aa, Setaria italica
  Transcript Sequence Number=SeqID_5713
  Homolog annotation: Hit_ID=B6SU92; Match level="QueryCoverage=96%, HitCoverage=61%, E-value=4e-33, Identity=47%"; Hit description=FIP1
MEGSTTEGHVVGIPVNNRVYGIEEPDEFPIPVSSRAYGIEEPDLAYGIEEPEFLAEETPDHGGFPSSFQSSYDANRSTTADRPTSKHGRKGDNIAQGIKEHVTLGPKLSDTVKGKLTLGAKILQAGGVEKMFRQWFSVDKNEKLLRSSQCYLSTTAGPIAGLLFVSTARVAFRKRTGPLG

SEQ ID NO: 71688 - protein, 214 aa, Setaria italica
  Transcript Sequence Number=SeqID_5714
  Homolog annotation: Hit_ID=B6SU92; Match level="QueryCoverage=99%, HitCoverage=98%, E-value=3e-80, Identity=75%"; Hit description=FIP1
  Pfam annotation: Domain name=GRAM; Domain location=93-171; Score =37.4; E_value=5.9e-08; Accession=PF02893.12; Description=GRAM domain
MEKARREHVIGIPVSNRAFGIEEPADFPSKGGAYHGDAKNPTNFGRAGKFGRTGDRVAQGLKEHVTLGPKLYETVKGKLSLGARILQAGGVEKVFRRWFSVEKGEKLLKASQCYLSTTAGPIAGMLFISTEKIAFRSDRSLALTSARGDTVRVPYKVAIPLRRVKTAKPSENKHRPEQKYVQVVTDDGFEFWFMGFVRYQVSLQELEKAIAQSQ

SEQ ID NO: 71689 - protein, 224 aa, Setaria italica
  misc_feature (26)..(26): Xaa can be any naturally occurring amino acid
  Transcript Sequence Number=SeqID_5715
  Gene Ontology: Mol. function=transcription regulator activity; Cellular component=nucleus; Biological process=regulation of transcription
  Homolog annotation: Hit_ID=A2Q5Q7; Match level="QueryCoverage=74%, HitCoverage=18%, E-value=8e-27, Identity=42%"; Hit description=Not CCR4-Not complex component, N-terminal; tRNA-binding arm
  Subcellular localization annotation: CTP_CleavageSite=41; ConfidenceScore=5.45e-01
VPIAISTGSVPVSALAETINSPRAAXVPTTAAAILSSATPRSAPESTPVVTSIPANLSGTLKDDDSMSFPPRRPSPAITEIGIGRGIARGVTSQTLGTAPISIGPVPGNGSVSALPAINDLSKRNLLNTDERINSGGLSQQLVSPLGNKVQPQQLPRTNDAISSDSASTNENPILGGRVFSPPVVSGVQWRPQTAAAFQNQSETSQFRGRPEISADQREKYLQR

SEQ ID NO: 71690 - protein, 835 aa, Setaria italica
  misc_feature (104)..(104): Xaa can be any naturally occurring amino acid
  misc_feature (115)..(115): Xaa can be any naturally occurring amino acid
  Transcript Sequence Number=SeqID_5716
  Gene Ontology: Mol. function=transcription regulator activity; Cellular component=nucleus; Biological process=regulation of transcription
  Homolog annotation: Hit_ID=Q9FK48; Match level="QueryCoverage=99%, HitCoverage=100%, E-value=0.0, Identity=49%"; Hit description =Similarity to transcription regulator
  Pfam annotation: Domain name=NOT2_3_5; Domain location=660-827; Score= 173.9; E_value=4.7e-49; Accession=PF04153.10; Description=NOT2  NOT3 NOT5 family
  Pfam annotation: Domain name=Not3; Domain location=2-246; Score =499.9; E_value=3.3e-147; Accession=PF04065.7; Description=Not1 N -terminal domain, CCR4-Not complex component
  Pfam module annotation: Pfam domain module=NOT2_3_5::Not3; Domain location=660-827::2-246
MGASRKLQGEIDRVLKKVQEGVDVFDSIWNKVYDTENANQKEKFEADLKKEIKKLQRYRDQIKTWIQSSEIKDKKVSASYEQALMDARKQIEREMERFKVVRRXTKTKAFSKEGXGQQPKTDPKEKAKAETRDWLNTVVSDLESQIDNFEAEVEGLSIKKGKQRPPRLVHLEKSITRHKAHIKKLESILRLLDNDELSPEQVNDVKDFLEDYVERNQEDFDEFSDVEDLYSTLPMEKVEALEDMVSLAPSSLVKGVASVSTSAVLSTKTSSVATSSTQPTVSTTTSQSTSQDQTEETASQESNPESMPQTPPSKGGNLGPSVPVVPIAISTGSVPVSVPAETINSPVRPTVPTTAAAILSSATPRSAPESTPVVTSIPANLSGTLKDDDSMSFPPRRPSPAITEIGIGRGIARGVTSQTLGTAPISIGPVPGNGSLVSPLGNKVQPQQLPRTNDAISSDSASTNENPILGGRVFSPPVVSGVQWRPQTAAAFQNQSETSQFRGRPEISADQREKYLQRLQQVQQQQGSLLNVPHIAGINQKQFPTQQPNPLLQQFNSQSSSISSQVNLGLGAQGSDAGHVKSEEQQQSLAEDVGVESAATTGANKQTSEDDTKIPYPNPSAPATENTQLPRDTDLSPGQPLQPGMSSSAVGVIGRRSVSDLGAIGDNLTGTSASSGHDQLYNLQMLEAAFHRLPQPKDSERAKNYVPRHPAVTPASYPQIQAPIVSNPTFWERIGSDTLATDMLFFAFYYQQNTYQQYLAARELKKQSWRFHRRYNTWFQRHVEPQVTTDEYERGSYVYFDFHVTEDGSGWCQRIKNDFTFEYNYLEDELSVQTN

SEQ ID NO: 71691 - protein, 191 aa, Setaria italica
  Transcript Sequence Number=SeqID_5717
QREERTKNAGQNRRIRTSMVEMDARTAGPLRGPGPIDRISDPGKATNGNSAVTEEKIRGLATSIDGWEKPKMKKKRSAIKADMSSAGVSRSVDVDRESKQGMPHKFSGDGRARMASSPSFRSGTVASGTSKADLLSPQNGLVGRPLNRNDQDSGFHPTNKRERQVVLDKEMPNPRTISKPNEDDSGGNITS

SEQ ID NO: 71692 - protein, 122 aa, Setaria italica
  Transcript Sequence Number=SeqID_5718
  Gene Ontology: Mol. function=electron carrier activity; Cellular component=membrane; Biological process=oxidation reduction
  Homolog annotation: Hit_ID=Q7X7X4; Match level="QueryCoverage=98%, HitCoverage=23%, E-value=4e-40, Identity=63%"; Hit description =Cytochrome P450 99A2
SLIRNIQVAGQGGEPVNLGRLLLSCSSMITAKAAFGHACSSELREQFLSGIEVSMRFSGGFTFGDLFPSLRFIDVITGQRLRMWRAHRQLDAVFDKIIAECEGLQGDSLVSVLLRIRDGGGA

SEQ ID NO: 71693 - protein, 71 aa, Setaria italica
  Transcript Sequence Number=SeqID_5719
IHIIFLLMRPKKKLTSTYFQENFNVTPYGKWYLNKHSFCITFFTIFLQYNSLQLDNNKTVKISWCIRISLL

SEQ ID NO: 71694 - protein, 187 aa, Setaria italica
  Transcript Sequence Number=SeqID_5720
  Gene Ontology: Cellular component=chloroplast
  Homolog annotation: Hit_ID=B6ST86; Match level="QueryCoverage=73%, HitCoverage=76%, E-value=4e-43, Identity=59%"; Hit description=SnRK1- interacting protein 1
AASVVPARGGCTAVGLCAARPRLRQGRWRGASVVAKMEGGLGKGVVPTTNYVVPLDKATGMTRPLVEILRDLNKRVPDKIIDPDTNTVHWYHANRMLSFYAPGWCGEVRDVIYSANGTVTVVYRVILKGTDGEAYRDATGTAQVHEGRREDAVAAAEEAAFCKACARFGFGLYLYHQDDTHHEDHFH

SEQ ID NO: 71695 - protein, 93 aa, Setaria italica
  Transcript Sequence Number=SeqID_5721
  Gene Ontology: Mol. function=oxidoreductase activity; Biological process=oxidation reduction
  Homolog annotation: Hit_ID=C0LZ70; Match level="QueryCoverage=70%, HitCoverage=21%, E-value=4e-19, Identity=69%"; Hit description=Short chain dehydrogenase/reductase
  Subcellular localization annotation: CTP_CleavageSite=27; ConfidenceScore=5.08e-01
QKASLQIFARAYKSKFTSQLCVDFVSRVAVVTGGNKGIGLEVCRHLASRGVMVILTARDEKRGSESVEMLHESGLPDVQFHRLDVSDPSSAAR

SEQ ID NO: 71696 - protein, 125 aa, Setaria italica
  Transcript Sequence Number=SeqID_5722
  Gene Ontology: Mol. function=oxidoreductase activity; Biological process=oxidation reduction
  Homolog annotation: Hit_ID=B4FSX7; Match level="QueryCoverage=97%, HitCoverage=40%, E-value=4e-37, Identity=60%"; Hit description =Carbonyl reductase 1
MKQLVGKSTMERLQWLLQRSTESYEEAEECLKINYFGTKYVTEALLPILLSSSDGRLINVSSNLGLLRHFSGEDLKQELSDVDNLTVERLDEMSELFLKDYKNGQLKSHGWPADSHYLAYKVSKA

SEQ ID NO: 71697 - protein, 88 aa, Setaria italica
  Transcript Sequence Number=SeqID_5723
TDQYWYHQYILVVVCHSSKQKIIQANLFLGYCMAFHIKFLNLEINKISRMEIDQASFKFWACSLHINVDEPSPHLTCPVINAEIFLLK

SEQ ID NO: 71698 - protein, 91 aa, Setaria italica
  Transcript Sequence Number=SeqID_5724
  Gene Ontology: Mol. function=protein serine/threonine kinase activity; Biological process=protein amino acid phosphorylation
  Homolog annotation: Hit_ID=B6SWU9; Match level="QueryCoverage=78%, HitCoverage=10%, E-value=1e-19, Identity=61%"; Hit description =Lectin-like receptor kinase 7
MKRRLDARRNELEWQREYGLPSFTYKDLLIATSGFKDKMLLGKGGFGSVFKGLLPHSNRTVAIKRVSPESKQGMKEFMAEIVNPWSISANR

SEQ ID NO: 71699 - protein, 82 aa, Setaria italica
  Transcript Sequence Number=SeqID_5725
  Homolog annotation: Hit_ID=B4F886; Match level="QueryCoverage=79%, HitCoverage=23%, E-value=2e-28, Identity=87%"; Hit description=Cupin, RmlC-type
  Pfam annotation: Domain name=DUF1637; Domain location=1-82; Score= -1.4; E_value=3.5e-11; Accession=PF07847.4; Description=Protein of unknown function (DUF1637)
MMSITLCDLFLVLTTGARLAKVNTDAVFDASAETVVLYPENGGNLHCFTALTPCAVLDVLGPPYDRDDGRDCSYYDESPFLS

SEQ ID NO: 71700 - protein, 44 aa, Setaria italica
  Transcript Sequence Number=SeqID_5726
RRVNPNPQEDYVLVSLMLLDHSGSIREAESSQPTRDCFVSTQTK

SEQ ID NO: 71701 - protein, 203 aa, Setaria italica
  misc_feature (61)..(61): Xaa can be any naturally occurring amino acid
  Transcript Sequence Number=SeqID_5727
  Homolog annotation: Hit_ID=Q656N0; Match level="QueryCoverage=86%, HitCoverage=5%, E-value=7e-65, Identity=68%"; Hit description =Putative STH1 protein
FLRAHPEGPLISSGRTIDKTKPSNPFTMAQIPNFPEGLASSGVPIELQKSIQGGANLFNAXFGWNQNSQVPIMKNSQGPNHNLVSSGVNVEGKVNVGAQGAFNSTSAPQMGFPPIPPYNSSSFGGSSQFLDKGKELASSSTGTELHSTPKVASQPGMPHGNPIQERQGIIRAPQRAEASFQEGRPSALPNRNTGPSPMSHPSS

SEQ ID NO: 71702 - protein, 229 aa, Setaria italica
  misc_feature (129)..(129): Xaa can be any naturally occurring amino acid
  Transcript Sequence Number=SeqID_5728
  Gene Ontology: Mol. function=nucleic acid binding
  Homolog annotation: Hit_ID=Q656N0; Match level="QueryCoverage=96%, HitCoverage=5%, E-value=6e-69, Identity=63%"; Hit description =Putative STH1 protein
DKCNSTLQGNPIQERQGIIRAPQRAEASFQEGRPSALPNRNTGPSPMSHPSSNIPFKEQQLKQLRAQCLVFLAFRNNLQPRKVHLEIALGRVPPAESDTAGQRGSESRAPDGLGKETGSSRENSGVFGXRQGDVSRLPSTSAGSIAEVDSFPKDPENATKKIKVAEQEKSLMEVENIQKASVMQGASSEMRSQETASPIPSGPQQSYFQGDTRRIAPDIHRNDAENLNS

SEQ ID NO: 71703 - protein, 313 aa, Setaria italica
  Transcript Sequence Number=SeqID_5729
  Gene Ontology: Mol. function=protein binding; Cellular component =cytoplasm; Biological process=proteolysis
  Homolog annotation: Hit_ID=B9R9Y2; Match level="QueryCoverage=99%, HitCoverage=65%, E-value=1e-124, Identity=71%"; Hit description=WD -repeat protein, putative
YINLLSCHSWEIMSVFAVDTVDLAGVEWSPDDSAIVVWDSLLEYKVLIYSPDGRCLFKYLAYESGLGVKSVSWSPCGQFLAVGSYDQAVRTLNHLTWKTFAEFTHAASIRSPCNAAIFKEVDDPWQLDMSELCLSDGFSRNMQDNGAENGTEGGGSRVKYAVMDVPITLPSTKPATDKPNPKQGIGMLSWSSDSHYFFTRNDNMPTALWIWDICRLELAAVLVQKDPIRAAAWDPTCTRLVLCTESPHLYMWTPSGACCVNIPLPNFRIVDLKWNSDGSCLLLKDRDSFCCAAIVSALPEEGPDQSDESSEDE

SEQ ID NO: 71704 - protein, 199 aa, Setaria italica
  Transcript Sequence Number=SeqID_5730
  Homolog annotation: Hit_ID=B6SI82; Match level="QueryCoverage=97%, HitCoverage=99%, E-value=9e-73, Identity=69%"; Hit description=Pre -rRNA-processing protein TSR2
  Pfam annotation: Domain name=WGG; Domain location=18-100; Score =131.8; E_value=2.2e-36; Accession=PF10273.1; Description=Pre-rRNA -processing protein TSR2
MAASNSGGGPISTQAAAALAEGINLVFGRWTALQMAVENQWGGRDSRAKADQFGESLHSWFCRSRGPHYFEDLVDMMYEKISDSFNADFEDNSVEEVAEQLLIMHEECLQSNYSSIEVLRNSHVQGSAVSQSRQISADGDDSDSSDDDDGDASMMEDEAAAAPEEMAVDRPRPSKPAPDADGWTVVPPRHGGRSRGGKN

SEQ ID NO: 71705 - protein, 135 aa, Setaria italica
  Transcript Sequence Number=SeqID_5731
  Gene Ontology: Cellular component=integral to membrane
  Pfam annotation: Domain name=UPF0187; Domain location=7-134; Score= -136.8; E_value=0.0045; Accession=PF05249.3; Description =Uncharacterised protein family (UPF0187)
RRLRDRRPLYDHATWREHRSSRRHLRHFLTSLSSRVILSLAPPVSAFTAFAAAIATYNTLLPDHALTASSLPYQLTAPALALLLVFRTEASYARFDEGRKAWMRVLAGAADLAGMVMHPSPPPAAAADDEPLRRA

SEQ ID NO: 71706 - protein, 87 aa, Setaria italica
  misc_feature (44)..(44): Xaa can be any naturally occurring amino acid
  Transcript Sequence Number=SeqID_5732
  Gene Ontology: Mol. function=transferase activity; Biological process= amino acid biosynthetic process
  Homolog annotation: Hit_ID=Q7XLY5; Match level="QueryCoverage=100%, HitCoverage=16%, E-value=2e-19, Identity=57%"; Hit description =OSJNBa0042I15.5 protein
NHHAERGKAAHHAKRTRERADEFSSDGGEYCSYINSGGSGGGGXKGRGGGGSSGASDYRKDREEWTDGAISSLLDAYTDRFEQLKPG

SEQ ID NO: 71707 - protein, 225 aa, Setaria italica
  misc_feature (115)..(115): Xaa can be any naturally occurring amino acid
  misc_feature (134)..(134): Xaa can be any naturally occurring amino acid
  misc_feature (163)..(163): Xaa can be any naturally occurring amino acid
  Transcript Sequence Number=SeqID_5733
  Gene Ontology: Mol. function=serine-type endopeptidase activity; Biological process=proteolysis
  Homolog annotation: Hit_ID=Q01MA7; Match level="QueryCoverage=97%, HitCoverage=29%, E-value=4e-51, Identity=48%"; Hit description =H0716A07.11 protein
EIAHRIESYVKSVEMPVVKISRTFSVVGNGVLSPRVAAFSSRGPSIDFPAIIKPDIAAPGASILAAVRGSYQLDSGTSMACPHVSAVVALLKSIHPHWSPAMIKSAIITTGTCLXHEFHKTDGVSSFHVLSVNXHAASVADRFGMPIQAEGVPRKLADPFDFXGQIDPDRAMDPGLVYDIDAGEYTKFFSCTLGPDDNCVTYMGQLYQLNLPSIAVPDLKETVNG

SEQ ID NO: 71708 - protein, 321 aa, Setaria italica
  Transcript Sequence Number=SeqID_5734
  Gene Ontology: Mol. function=serine-type endopeptidase activity; Biological process=proteolysis
  Homolog annotation: Hit_ID=Q6MW77; Match level="QueryCoverage=92%, HitCoverage=37%, E-value=3e-87, Identity=53%"; Hit description =B1248C03.20 protein
DLAQHNSNILEQYTKACSQYFMPCVLVDFEIAHRIESYVKSVEMPVVKISRTFSVVGNGVLSPRVAAFSSRGPSIDFPAIIKPDIAAPGASILAAVRGSYQLDSGTSMACPHVSAVVALLKSIHPHWSPAMIKSAIITTASVADRFGMPIQAEGVPRKLADPFDFGGGQIDPDRAMDPGLVYDIDAGEYTKFFSCTLGPDDNCVTYMGQLYQLNLPSIAVPDLKETVTVRRTVTNVGPAKAAYRAVVEAPPGVAVSVEPWVIKFGEGGSKEATFRVTFTARQRVQGGYTFGSLTWLDGNTHSVRIPIAVRTVIQDFIADTS

SEQ ID NO: 71709 - protein, 550 aa, Setaria italica
  Transcript Sequence Number=SeqID_5735
  Gene Ontology: Mol. function=serine-type endopeptidase activity; Biological process=negative regulation of catalytic activity
  Homolog annotation: Hit_ID=Q6MW77; Match level="QueryCoverage=92%, HitCoverage=69%, E-value=1e-126, Identity=45%"; Hit description =B1248C03.20 protein
  Pfam annotation: Domain name=Inhibitor_I9; Domain location=28-108; Score=87.2; E_value=5.8e-23; Accession=PF05922.8; Description =Peptidase inhibitor I9
  Pfam annotation: Domain name=PA; Domain location=359-460; Score=25.0; E_value=0.00031; Accession=PF02225.14; Description=PA domain
  Pfam annotation: Domain name=Peptidase_S8; Domain location=123-547; Score=-23.3; E_value=1.8e-05; Accession=PF00082.14; Description =Subtilase family
  Pfam module annotation: Pfam domain module=Inhibitor_I9::PA::Peptidase _S8; Domain location=28-108::359-460::123-547
MDLLSAACSALLLVLVLMLPLSANASSKLYIVYMGEKKQDDPSVVTASHHDVLASVLGSKDEAMKSILYSYKYGFSGFAAMLTKSQAETIKSLPGVVSVKPNTRYQTATTRSWDFLGLHYYQTSAPDLLRKAKYGEDIIVGVVDTGIWPESRSFDDSGYGPVPARWKGVCQIGAEFNATSCNRKIIGARWYTGGLDAEKLKVDYLSARDMDGHGTHVASIIAGSLVRNVSHGGLAAGVARGGAPRTRLAVYKACWLTAGCDVAAILAAIDDAINDGVDVLSLSVAAPETELPGTLHAVARGIPVVFGAGNNGPAAQTILNAVPWVLTVAATTIDRSFPTVVSLGNNEKLVGQSVNYNASLNSDDFHALLFAGSCDEQTLSFTNVTGNVLLCYAPWEASSKPPPQGFSSAVTGVSKAGAKGLIFAQHNSNILEQYTKACSQYFMPCVLVDFEIAHRIESYVKSVEMPVVKISRTFSVVGNGVLSPRVAAFSSRGPSIDFPAIIKPDIAAPGASILAAVRGSYQLDSGTSMACPTSLFVRSSSCLLSSYFYP

SEQ ID NO: 71710 - protein, 90 aa, Setaria italica
  misc_feature (81)..(82): Xaa can be any naturally occurring amino acid
  Transcript Sequence Number=SeqID_5736
  Gene Ontology: Mol. function=potassium ion transmembrane transporter activity; Cellular component=integral to membrane; Biological process=potassium ion transport
  Homolog annotation: Hit_ID=Q69RI8; Match level="QueryCoverage=91%, HitCoverage=8%, E-value=9e-09, Identity=54%"; Hit description =Probable potassium transporter 14
MESGSGGRRLRKTESAEMRWVVPGGACEEDEIESSDDGGGGADTPAAALGSRGGGCSDDDDDDDGYEEDEMLRQRLVRTGXXADSFDVEA

SEQ ID NO: 71711 - protein, 40 aa, Setaria italica
  Transcript Sequence Number=SeqID_5737
NPGALSSRSEETLSDSLVRGSGSKEPRGGPSALSLNSENC

SEQ ID NO: 71712 - protein, 193 aa, Setaria italica
  misc_feature (41)..(41): Xaa can be any naturally occurring amino acid
  Transcript Sequence Number=SeqID_5738
  Gene Ontology: Mol. function=protein dimerization activity; Cellular component=nucleus; Biological process=regulation of transcription, DNA-dependent
  Homolog annotation: Hit_ID=Q2QQX6; Match level="QueryCoverage=100%, HitCoverage=21%, E-value=3e-70, Identity=69%"; Hit description=Auxin response factor 24
  Pfam annotation: Domain name=AUX_IAA; Domain location=26-191; Score= -81.8; E_value=0.0015; Accession=PF02309.8; Description=AUXIAA family
IVDNQSSLINPRPLVIETDVQKTKGTSFKLFGFPLGSPEKXSEPLVSPPSVAYDGKLQTSPSQRNQLDIIEVDDYSDPSKTVKPLDGPQTDSVRENNHPCPEATQNVQNKVQSSSTRSCKKVHKQGSALGRSIDLTKFTCYSELIAELDQMFDFGGELSSPHKNWMVVFTDNEGDMMLVGDDPWNEFCSMVHK

SEQ ID NO: 71713 - protein, 185 aa, Setaria italica
  Transcript Sequence Number=SeqID_5739
PSTNYKLGTAGLYPEPYTRKHLQHHYKPHKLAVCLSGYGCGLFVSLCCHHERPRELDKLAVLGVERQSGWPTSGLLGTRSSHQRVRQSFFGPGAQGARVHPAHLLPCVDEHLVDHAAELVPGIDRQANHVLQNWGTAGLYPEPYTRKHLQHHYKPHKLAVCLSGYGCGLLSPSVATTKDLVNWTN

SEQ ID NO: 71714 - protein, 173 aa, Setaria italica
  misc_feature (72)..(72): Xaa can be any naturally occurring amino acid
  Transcript Sequence Number=SeqID_5740
  Gene Ontology: Mol. function=protein dimerization activity; Cellular component=nucleus; Biological process=regulation of transcription, DNA-dependent
  Homolog annotation: Hit_ID=Q2QQX6; Match level="QueryCoverage=93%, HitCoverage=19%, E-value=8e-67, Identity=73%"; Hit description=Auxin response factor 24
  Pfam annotation: Domain name=AUX_IAA; Domain location=1-152; Score= -84.3; E_value=0.0023; Accession=PF02309.8; Description=AUXIAA family
QTSPSQRNQLDIIEVDDYSDPSKTVKPLDGPQTDSVRENNHPCPEATQNVQNKVQSSSTRSCKKVHKQGSAXGRSIDLTKFTCYSELIAELDQMFDFGGELSSPHKNWMVVFTDNEGDMMLVGDDPWNEFCSMVHKMFIYTREEVERMNPGALSSRSEETLSDSLVRGFGFLR

SEQ ID NO: 71715 - protein, 183 aa, Setaria italica
  misc_feature (50)..(50): Xaa can be any naturally occurring amino acid
  misc_feature (88)..(88): Xaa can be any naturally occurring amino acid
  Transcript Sequence Number=SeqID_5741
  Gene Ontology: Mol. function=protein dimerization activity; Cellular component=nucleus
  Homolog annotation: Hit_ID=Q2QQX6; Match level="QueryCoverage=72%, HitCoverage=13%, E-value=7e-25, Identity=50%"; Hit description=Auxin response factor 24
KFSGKSAFTSLQGHGIDRCCSGWIGHNRASSSLINPRPLVIETDVQKTKXLNEVPLVFWTSVSITKGTSFKLFGFPLGSPEKSEPLVXPPSVAYDGKLQTSPSQRNQLDIIEVDDYSDPSKTVKPLDGPQTDFGLPRGNPNSLNEVPWFSGHQFQYQSRGLIKLDDARLWPIQPEQHRSMPWP

SEQ ID NO: 71716 - protein, 92 aa, Setaria italica
  Transcript Sequence Number=SeqID_5742
LVLGLAVSFLFKFWVCPVLGLTGEVIVAEHTQNLNKKLTARPSTNYKLGTAGLYPEPYTRKHLQHHYKPHKLAVCLSGYGCGLLLPLLPPRK

SEQ ID NO: 71717 - protein, 140 aa, Setaria italica
  Transcript Sequence Number=SeqID_5743
  Subcellular localization annotation: CTP_CleavageSite=12; ConfidenceScore=5.21e-01
SKSLVWLLQVPCQSRLVNSTLLRFRARLYLQGRKRGGPSKRDQGFCLPAFCCSATITSPVNPNTGHTQNLNKKLTARPSTNYKLGTAGLYPEPYTRKHLQHHYKPHKLAVCLSGYGCGLLSPSVATTKDLVNWTTSSSRS

SEQ ID NO: 71718 - protein, 183 aa, Setaria italica
  misc_feature (7)..(7): Xaa can be any naturally occurring amino acid
  misc_feature (52)..(52): Xaa can be any naturally occurring amino acid
  misc_feature (163)..(163): Xaa can be any naturally occurring amino acid
  Transcript Sequence Number=SeqID_5744
  Gene Ontology: Mol. function=protein dimerization activity; Cellular component=nucleus; Biological process=regulation of transcription, DNA-dependent
  Homolog annotation: Hit_ID=Q2QQX6; Match level="QueryCoverage=98%, HitCoverage=21%, E-value=2e-65, Identity=68%"; Hit description=Auxin response factor 24
  Pfam annotation: Domain name=AUX_IAA; Domain location=2-146; Score= -93.1; E_value=0.0096; Accession=PF02309.8; Description=AUXIAA family
RNQLDIXEVDDYSDPSKTVKPLDGPQTDSVRENNHPCPEATQNVQNKVQSSXTRSCKKVHKQGSALGRSIDLTKFTCYSELIAELDQMFDFGGELSSPHKNWMVVFTDNEGDMMLVGDDPWNEFCSMVHKMFIYTREEVERMNPGALSSRSYRTLSDSLVRGXGFPRSPRGGPSALSLNSENC

SEQ ID NO: 71719 - protein, 83 aa, Setaria italica
  Transcript Sequence Number=SeqID_5745
  Gene Ontology: Mol. function=protein dimerization activity; Cellular component=nucleus; Biological process=regulation of transcription, DNA-dependent
  Homolog annotation: Hit_ID=Q2QQX6; Match level="QueryCoverage=100%, HitCoverage=9%, E-value=3e-29, Identity=73%"; Hit description=Auxin response factor 24
KNWMVVFTDNEGDMMLVGDDPWNEFCSMVHKMFIYTREEVERMNPGALSSRSEETLSDSLVRGSGSKEPRGGPSALSLNSENC

SEQ ID NO: 71720 - protein, 46 aa, Setaria italica
  Transcript Sequence Number=SeqID_5746
DGPQTDSVRENNHPCPEATQNVQNKVQSSSTRSCKKVHHTLHLFPR

SEQ ID NO: 71721 - protein, 158 aa, Setaria italica
  misc_feature (69)..(69): Xaa can be any naturally occurring amino acid
  Transcript Sequence Number=SeqID_5747
  Gene Ontology: Mol. function=protein dimerization activity; Cellular component=nucleus
  Homolog annotation: Hit_ID=Q2QQX6; Match level="QueryCoverage=100%, HitCoverage=18%, E-value=2e-44, Identity=58%"; Hit description=Auxin response factor 24
WSLMPHNSGFMMNQQNYLSMPEAALPQRAEIAKFSGKSAFTSLQGHGIDRCCSGWIGHNRASSSLINPXPLVIETDVQKTKGTSFKLFGFPLGSPEKSEPLVSPPSVAYDGKLQTSPSQRNQLDIIEVDDYSDPSKTVKPLDGPQTDSVRENNHPCPE

SEQ ID NO: 71722 - protein, 156 aa, Setaria italica
  misc_feature (65)..(65): Xaa can be any naturally occurring amino acid
  misc_feature (94)..(94): Xaa can be any naturally occurring amino acid
  Transcript Sequence Number=SeqID_5748
  Gene Ontology: Mol. function=protein dimerization activity; Cellular component=nucleus
  Homolog annotation: Hit_ID=Q2QQX6; Match level="QueryCoverage=98%, HitCoverage=18%, E-value=5e-39, Identity=56%"; Hit description=Auxin response factor 24
PHNSGFMMNQQNYLSMPEAALLQRAEIAKFSGKSAFTSLQGHGIDRCCSGWIGHNRASSSLINPXPLVIETDVQKTKGTSFKLFGFPLGSPEKXSEPLVSPPSVAYDGKLQTSPSQRNQLDIIEVDDYSDPSKTVKPLDGPQTDSVRENNHPCPRR

SEQ ID NO: 71723 - protein, 146 aa, Setaria italica
  Transcript Sequence Number=SeqID_5749
  Gene Ontology: Mol. function=protein dimerization activity; Cellular component=nucleus
  Homolog annotation: Hit_ID=Q2QQX6; Match level="QueryCoverage=100%, HitCoverage=17%, E-value=8e-36, Identity=54%"; Hit description=Auxin response factor 24
MNQQNYLSMPEAALPQRAEIAKFSGKSAFTSLQGHGIDRCCSGWIGHNRASSSLINPRPLVIETDVQKTKGTSFKLFGFPLGSPEKSEPLVSPPSVAYDGKLQTSPSQRNQLDIIEVDDYSDPSKTVKPLDGPQTEELLVKGRNNP

SEQ ID NO: 71724 - protein, 200 aa, Setaria italica
  Transcript Sequence Number=SeqID_5750
  Gene Ontology: Mol. function=protein dimerization activity; Cellular component=nucleus; Biological process=regulation of transcription, DNA-dependent
  Homolog annotation: Hit_ID=Q2QQX6; Match level="QueryCoverage=100%, HitCoverage=22%, E-value=1e-75, Identity=69%"; Hit description=Auxin response factor 24
  Pfam annotation: Domain name=AUX_IAA; Domain location=4-164; Score= -84.5; E_value=0.0023; Accession=PF02309.8; Description=AUXIAA family
VSPPMVAYDGKLQTSPSQRNQLDIIEVDDYSDPSKTVKPLDGPQTDSVRENNHPCPEATQNVQNKVQSSSTRSCKKVHKQGSALGRSIDLTKFTCYSELIAELDQMFDFGGELSSPHKNWMVVFTDNEGDMMLVGDDPWNEFCSMVHKMFIYTREEVERMNPGALSSRSEETLSDSLVRGSGSKEPRGGPSALSLNSENC

SEQ ID NO: 71725 - protein, 751 aa, Setaria italica
  Transcript Sequence Number=SeqID_5751
  Gene Ontology: Mol. function=protein dimerization activity; Cellular component=nucleus; Biological process=regulation of transcription, DNA-dependent
  Homolog annotation: Hit_ID=Q2QQX6; Match level="QueryCoverage=96%, HitCoverage=86%, E-value=0.0, Identity=72%"; Hit description=Auxin response factor 24
  Pfam annotation: Domain name=Auxin_resp; Domain location=273-355; Score=169.4; E_value=1.1e-47; Accession=PF06507.5; Description=Auxin response factor
  Pfam annotation: Domain name=B3; Domain location=146-251; Score =114.3; E_value=4e-31; Accession=PF02362.13; Description=B3 DNA binding domain
  Pfam module annotation: Pfam domain module=Auxin_resp::B3; Domain location=273-355::146-251
MAAAAGGCGGGWGGPEAGGGGGGEKDALFVELWKACAGPVSSIPPLGEKVYYFPQGHIEQVEASTNQLAEQQGTPLYNLPWKIPCKLMNIELKAEPDTDEVYAQLTLLPDKKRDENTTTTVESDAAEDEVVPVAPPATNEQLLIHSFCKTLTASDTSTHGGFSVLRRHADECLPPLDMSQHPPNQELVAKDLHGVEWRFRHIFRGQPRRHLLQSGWSVFVSAKRLVAGDAFIFLRGENGELRVGVRRALRHQTTIPSSVISSHSMHLGVLATAWHAVNTGSMFTIYYKPRTSPAEFVVSRDRYYESLKQNYTIGMRFKMRFEGEEAAEQKFTGTIVGIGASDPSGWADSKWRSLKVRWDEASAVLRPERVSPWQIEPAAVSPSPVNPLPLRFKRSRSNVNASPSDMPTVTREVASKVMADSQQNSLPRALHSQGRAQLTSRFRDSSDLKSAQDLTMWSSGIEQERNNIAAQTKLSLEGWTQTRRPEGYNQLSSAFQPLKDAQNPLCSFPSQISGNHSNTWDTVDAHYPTQQANHNMLPGTWSLMPHNSGFMMNQQNYLSMPEAALPQRAEIAKFSGKSAFTSLQGHGIDRCCSGWIGHNRASSSLINPRPLVIETDVQKTKGTSFKLFGFPLGSPEKSEPLVSPPSVAYDGKLQTSPSQRNQLDIIEVDDYSDPSKTVKPLDGPQTDSVRENNHPCPEATQNVQNKVQSSSTRSCKKVHKQGSALGRSIDLTKFTCYSELIAELDQMFDFW

SEQ ID NO: 71726 - protein, 191 aa, Setaria italica
  Transcript Sequence Number=SeqID_5752
  Gene Ontology: Mol. function=rRNA (adenine-N6,N6-)-dimethyltransferase activity; Biological process=rRNA modification
  Homolog annotation: Hit_ID=B6TZW0; Match level="QueryCoverage=100%, HitCoverage=56%, E-value=2e-95, Identity=89%"; Hit description =Dimethyladenosine transferase
  Pfam annotation: Domain name=RrnaAD; Domain location=1-190; Score= -41.9; E_value=4.7e-05; Accession=PF00398.12; Description=Ribosomal RNA adenine dimethylase
DITKFHIRSHFLPFMKEEYHATKKHAKVVSNLPFNVSTEVVKLLLPMGDVFSIVVLMLQDETAVRLAGASIQTPEYRPINVFVNFYSEPEYKFRVDRENFFPRPKVDGAVISFKLKKAEEYPPVGSAKSFFSMVNSAFNGKRKMLRKSLQHLCSSSEIEAALHNLGLPVTARPSDLTLDDFVRLHNHLVEV

SEQ ID NO: 71727 - protein, 306 aa, Setaria italica
  Transcript Sequence Number=SeqID_5753
  Homolog annotation: Hit_ID=Q7XKU1; Match level="QueryCoverage=45%, HitCoverage=33%, E-value=8e-15, Identity=35%"; Hit description =OSJNBa0022H21.16 protein
  Pfam annotation: Domain name=DUF295; Domain location=204-254; Score =46.0; E_value=1.5e-10; Accession=PF03478.10; Description=Protein of unknown function (DUF295)
CVSQYVTAGARRWAVLGPVCLADGDHFTDLVYHGEGKVYCLTRCGNVHVLHLPERRRRQPATVNGSEFSLLQTPEHIRRWISAPGAPDPMKGMAIDLLQDVSDLFMRRSPECQGEDLNEGATIEPLLSAGNAGSNPVIAFATPYDIVSAVTGAKNLVMCEGNLYQVWRNTSCTVSLQLPGGGRRRTLENEIFVLRYYPQRQPCWDVVKDLRGYSFFIGRNNAMSMCAEGVPGIRANCVYWIGGNGEDQGMVFDMETGRSTSCITPVITVPGHQQRTVCWYLLNDMVTTTSSSSNRGRRNTPTAATE

SEQ ID NO: 71728 - protein, 153 aa, Setaria italica
  Transcript Sequence Number=SeqID_5754
  Gene Ontology: Mol. function=ATPase activity, coupled to transmembrane movement of substances; Cellular component=integral to membrane; Biological process=transport
  Homolog annotation: Hit_ID=Q8GU65; Match level="QueryCoverage=100%, HitCoverage=9%, E-value=6e-60, Identity=74%"; Hit description=MRP -like ABC transporter
RHGGEFTEGLQLVAVLLAGKTAETLASHHYEFQGQKLGMRIHAALLAAVYRKSLRLSTGARRVHGTGAIVNYMEVDAEQVSSVMHELHNLWLMPLQIAVALALLYAHLGPAVLTAVAAIVVVTVVVAFANKLNIGYQTKFLGKRDERMKAITD

SEQ ID NO: 71729 - protein, 238 aa, Setaria italica
  Transcript Sequence Number=SeqID_5755
  Gene Ontology: Mol. function=oxidoreductase activity; Cellular component=cell wall
  Homolog annotation: Hit_ID=B9S3D0; Match level="QueryCoverage=99%, HitCoverage=40%, E-value=7e-85, Identity=56%"; Hit description=D -lactate dehydrogenase, putative
  Pfam annotation: Domain name=ALO; Domain location=35-209; Score= -75.0; E_value=1.8e-05; Accession=PF04030.6; Description=D-arabinono -1,4-lactone oxidase
RHARCLAARLPAATFELQAYGFTNDGVFFTGYPVVGFQHRIQASGTCIDGRDDALLSACTWDSRIRGPFFYQSGFSVAVSKVPAFVADVQRLRDLNPRAFCGMDAKMGVLMRYVKASSAYLGKAEDSLDFDVTYYRSYAEGAPRAHADVYDELEQMALRKYGAMPHWGKNRNFAFDGAIAKYPKAAEFIKVKDRYDPDGIFSSEWSDQVLGINGSPNVVGARCAIEGLCVCSDDSHCA

SEQ ID NO: 71730 - protein, 158 aa, Setaria italica
  Transcript Sequence Number=SeqID_5756
  Homolog annotation: Hit_ID=B6TW94; Match level="QueryCoverage=89%, HitCoverage=38%, E-value=4e-12, Identity=36%"; Hit description=F-box domain containing protein
MESPDVMGPSLLAGDALYFTLDLLNNRTILRYDLGGGALSVMEPPPLVRRDTFLVTGEDGGLGVAAVEGYSLHLWSWKAAGGWAPPRVSIPFTIGDPITELKVIGFAEMSGTIFVSVNGVISSVQMRSGRVSKFSRTPDSNTIFPFEMFYTLAGMQGA

SEQ ID NO: 71731 - protein, 71 aa, Setaria italica
  Transcript Sequence Number=SeqID_5757
  Subcellular localization annotation: CTP_CleavageSite=39; ConfidenceScore=5.69e-01
MGYLLLSPSPPLAFQYPSSSFGGAACRRSRARRGAAFFVASSASTPDGGPSTSAADAYVLARRVVLLGASA

SEQ ID NO: 71732 - protein, 215 aa, Setaria italica
  misc_feature (99)..(99): Xaa can be any naturally occurring amino acid
  Transcript Sequence Number=SeqID_5758
LVAAPLFARSEEDLPVLAARREAMLRLHREAGGGMVRTPEVQGLLLEAKKKAAPSSPSDGGERIRLRRSLSAVAVAVRNGLRQMVTRSVSANSRTQYIXPKHLLLADFLHTGESVGLSIRGARMRLSTYRAWPSMHDNRFALYKLTVQPPVPGREYSGLWGGTFGWPPGRPEDECKPRKALFFLLLSYEEDSEGKPLLIATKVLEGTHYVVHPNG

SEQ ID NO: 71733 - protein, 99 aa, Setaria italica
  misc_feature (9)..(9): Xaa can be any naturally occurring amino acid
  Transcript Sequence Number=SeqID_5759
  Gene Ontology: Mol. function=ligase activity; Biological process =response to auxin stimulus
  Homolog annotation: Hit_ID=Q0D4Z6; Match level="QueryCoverage=100%, HitCoverage=15%, E-value=2e-33, Identity=71%"; Hit description =Probable indole-3-acetic acid-amido synthetase GH3.8
SGVLRAVRXFQQNWEQLAADIEAGELTDRVTDPSVREAVAGILRPDPELAQFVRAEGSGSNGDSGAGIIARIWPNTKYLDTVVTGSMAQYVPILNHYSG

SEQ ID NO: 71734 - protein, 59 aa, Setaria italica
  Transcript Sequence Number=SeqID_5760
  Gene Ontology: Mol. function=oxidoreductase activity; Biological process=oxidation reduction
  Homolog annotation: Hit_ID=B4FZ24; Match level="QueryCoverage=89%, HitCoverage=17%, E-value=3e-13, Identity=67%"; Hit description =Gibberellin 20 oxidase 2
MARTRMMSNYCTEVRELRFLESLGLEPSYMKEMMGEQEHHMAVNFYPSCPLPELPYGRP

SEQ ID NO: 71735 - protein, 180 aa, Setaria italica
  misc_feature (105)..(105): Xaa can be any naturally occurring amino acid
  Transcript Sequence Number=SeqID_5761
  Gene Ontology: Mol. function=NADH dehydrogenase (ubiquinone) activity; Cellular component=membrane
  Homolog annotation: Hit_ID=B6THZ4; Match level="QueryCoverage=100%, HitCoverage=100%, E-value=8e-70, Identity=75%"; Hit description =Oxidoreductase
  Pfam annotation: Domain name=NDUFA12; Domain location=16-109; Score =27.1; E_value=5.7e-07; Accession=PF05071.8; Description=NADH ubiquinone oxidoreductase subunit NDUFA
MSKRLVSRLLGMFQSRTQVGVDKTGNRYFTRVEEVDGAMKERRWVEFKGADQDSTTVPVEWICWLNGQRKKAPTPEELAELEARRERVKQNIELLKKKEEEERKXGLRPVKKIGKSESPNLQSFVKQQFPGTLDQQKGPEEVSRPKDATDTEDSTTDNERTSEPTGTGATFKPGTWQPPT

SEQ ID NO: 71736 - protein, 162 aa, Setaria italica
  Transcript Sequence Number=SeqID_5762
  Gene Ontology: Mol. function=calcium ion binding; Cellular component =plasma membrane; Biological process=abscisic acid mediated signaling
  Homolog annotation: Hit_ID=A9Q116; Match level="QueryCoverage=98%, HitCoverage=75%, E-value=2e-70, Identity=79%"; Hit description =Calcineurin B-like protein
  Pfam annotation: Domain name=efhand; Domain location=104-132; Score =28.2; E_value=3.3e-05; Accession=PF00036.24; Description=EF hand
  Pfam annotation: Domain name=efhand; Domain location=23-51; Score =25.0; E_value=0.0003; Accession=PF00036.24; Description=EF hand
  Pfam annotation: Domain name=efhand; Domain location=60-88; Score =22.9; E_value=0.0013; Accession=PF00036.24; Description=EF hand
  Pfam module annotation: Pfam domain module=efhand::efhand::efhand; Domain location=104-132::23-51::60-88
CFAVGQEEFQLALFRNSKKANLFADRVFDLFDLKRNGVIDFEEFVRSLSIFHPKAPTSEKTAFAFKLYDLRGTGYIEKEELREMVLALLDESDLCLSDSTVEAIVDNTFSQGDSNGDGKIDPEEWEEFVKKNPSALRSMSLPYLQDITMAFPSFIVRSEAND

SEQ ID NO: 71737 - protein, 120 aa, Setaria italica
  misc_feature (37)..(37): Xaa can be any naturally occurring amino acid
  Transcript Sequence Number=SeqID_5763
  Subcellular localization annotation: CTP_CleavageSite=53; ConfidenceScore=5.03e-01
FCAIYMIEHMQVSRYSSSESLESLGWNSKTSVSFLPXLSFHCTRRLDGLRPFRAMPPGGCRGRSALRSPAAASSLEPAPATDADRDTATGEEGGGFLPLPLHDALLRMRRSIAGWHQLGD

SEQ ID NO: 71738 - protein, 96 aa, Setaria italica
  Transcript Sequence Number=SeqID_5764
  Subcellular localization annotation: CTP_CleavageSite=59; ConfidenceScore=5.92e-01
QASVVVNVGSKANPPSSGQASAAVNGANRVANPQSSRQASVVVNGANRAANPQSSSQVSVAVNGSNSAANVPSSSQAGAAASGAANKSNPPGAPKQ

SEQ ID NO: 71739 - protein, 145 aa, Setaria italica
  Transcript Sequence Number=SeqID_5765
  Homolog annotation: Hit_ID=B6U221; Match level="QueryCoverage=99%, HitCoverage=46%, E-value=6e-23, Identity=46%"; Hit description=Myb -like DNA-binding domain containing protein
  Subcellular localization annotation: CTP_CleavageSite=81; ConfidenceScore=5.53e-01
PPLPPHCPFFMFDTSSVSPPSSLTSPVAQLAQHPFLTFAAASMDAPGYQLPPLVDGMGMGMAAMDCGLGEESRGNNSQAAAAMANGGGWQQQKQEEEQLGQDQWDEESAQHLLMWDDDQELTPSNLEAMESGAHSLLFMGPNDHE

SEQ ID NO: 71740 - protein, 59 aa, Setaria italica
  Transcript Sequence Number=SeqID_5766
  Gene Ontology: Mol. function=protein kinase activity; Biological process=protein amino acid phosphorylation
  Homolog annotation: Hit_ID=B6SWG2; Match level="QueryCoverage=67%, HitCoverage=5%, E-value=3e-15, Identity=92%"; Hit description =Protein kinase
RIGTYALAVAALALRCVAREPRARPAMDEVFVSLSAVYNSTLDWDPSDYGTSGSSMVGR

SEQ ID NO: 71741 - protein, 334 aa, Setaria italica
  Transcript Sequence Number=SeqID_5767
  Gene Ontology: Mol. function=nucleic acid binding
  Homolog annotation: Hit_ID=Q84SL2; Match level="QueryCoverage=100%, HitCoverage=48%, E-value=1e-125, Identity=72%"; Hit description=Zinc finger CCCH domain-containing protein 50
  Subcellular localization annotation: CTP_CleavageSite=43; ConfidenceScore=5.36e-01
HNSGAGLLSPRASSSIDMTAAAALGLLPGSPTRHFVPPPLSPSAANNGGGAAAHWLQGSRLRSSFNARDAQADDLGALLEWESQYLGALSLPQSSRSQPRLSTGLSIHPTAMAPSNLEEMYASDVAMSPRFTNDQAHSVYSPAHKSALLNKFHHQQKGLLSPVNTNRMFSPRGLDPSIIHSPFGGMSPRSPRTMEPTSPLSARVGATVTQPQRDMFDHFSSMNKHQLPSVGSPRNLNASWGNIGTPKSKVDWGVDNEELVRLRHPAQPGAAGEEPDVSWVQSLVNNAELNGKRGEMAGMASRPMSRPDLSSQGDLVDQTMIASWLEQQMHLEPK

SEQ ID NO: 71742 - protein, 100 aa, Setaria italica
  Transcript Sequence Number=SeqID_5768
  Gene Ontology: Mol. function=structural constituent of ribosome; Cellular component=ribonucleoprotein complex; Biological process =translation
  Homolog annotation: Hit_ID=B6SR22; Match level="QueryCoverage=71%, HitCoverage=38%, E-value=7e-29, Identity=95%"; Hit description=50S ribosomal protein L12-1
  Pfam annotation: Domain name=Ribosomal_L12; Domain location=32-100; Score=125.9; E_value=1.3e-34; Accession=PF00542.11; Description =Ribosomal protein L7L12 C-terminal domain
TAAAFAPAAVVAAPGAGGAGAAEEAAPVEQTEFDVVIDEVPSSARIATIKVVRALTSLALKEAKDLIEGLPKKLKEAVSKDEAEDAKKQLEEVGAKVSIV

SEQ ID NO: 71743 - protein, 282 aa, Setaria italica
  Transcript Sequence Number=SeqID_5769
  Gene Ontology: Cellular component=integral to membrane
  Homolog annotation: Hit_ID=B9S705; Match level="QueryCoverage=98%, HitCoverage=60%, E-value=8e-85, Identity=55%"; Hit description=Amino acid transporter, putative
  Pfam annotation: Domain name=Aa_trans; Domain location=1-281; Score =43.8; E_value=6.5e-10; Accession=PF01490.10; Description =Transmembrane amino acid transporter protein
NRTYMDVVRSCLGPRDVVVCGLAQYVILWGTMVGYTITTATSIMAIARTDCHHYRGHDAACVSSGTMYMVAFGLAEVVLSQFPSLEKLTLISVVAAVMSCTYSSVGLFLSAAKLASNHRAHGTLLGVKIGAAAGVSASTKTWHSLQALGNIALAYTYSMLLIEIQDTVKSPPSENVTMKRASFYGIGVTTIFYVSLGCIGYAAFGNAAPGNVLTGFDEPFWLVDIANVAVVIHLVGAYQVYAQPIFACYEKWLAARWPESSFFHHEYAVRLPFVSGGGGRAA

SEQ ID NO: 71744 - protein, 62 aa, Setaria italica
  Transcript Sequence Number=SeqID_5770
  Homolog annotation: Hit_ID=B6T2Z0; Match level="QueryCoverage=62%, HitCoverage=39%, E-value=2e-11, Identity=76%"; Hit description=B12D protein
  Pfam annotation: Domain name=B12D; Domain location=25-62; Score=27.5; E_value=4.9e-06; Accession=PF06522.3; Description=B12D protein
  Subcellular localization annotation: CTP_CleavageSite=19; ConfidenceScore=5.25e-01
LFLATGTPRGGSTASTTTPASASWSKRWIRPEVYPLFLATGAAVGICAMQLIRNITGNPEVR

SEQ ID NO: 71745 - protein, 95 aa, Setaria italica
  Transcript Sequence Number=SeqID_5771
  Homolog annotation: Hit_ID=B6T2Z0; Match level="QueryCoverage=96%, HitCoverage=93%, E-value=2e-35, Identity=72%"; Hit description=B12D protein
  Pfam annotation: Domain name=B12D; Domain location=9-95; Score=213.7; E_value=4.9e-61; Accession=PF06522.3; Description=B12D protein
MASASASWSKRWIRPEVYPLFLATGAAVGICAMQLIRNITGNPEVRVLKEKRAAGVLENHEEGRRYSQHGFRKYIDGKKPEIMQSLNSWMADPKE

SEQ ID NO: 71746 - protein, 126 aa, Setaria italica
  Transcript Sequence Number=SeqID_5772
  Gene Ontology: Mol. function=unfolded protein binding; Cellular component=prefoldin complex; Biological process=protein folding
  Homolog annotation: Hit_ID=Q9M4C4; Match level="QueryCoverage=100%, HitCoverage=100%, E-value=3e-50, Identity=79%"; Hit description =Probable prefoldin subunit 4
  Pfam annotation: Domain name=Prefoldin_2; Domain location=16-120; Score=111.8; E_value=2.3e-30; Accession=PF01920.12; Description =Prefoldin subunit
MQQGDGTEAQVTWEDQQNINRFGRLNNRLHELQDEIKLAKETNENLDDAGNELILSDEDVVRFQIGEVFVHMPRDDVETRLEQMKEDAAKKLERLEEEKESIVAQMAELKKILYGKFKDAINLEED

SEQ ID NO: 71747 - protein, 56 aa, Setaria italica
  misc_feature (16)..(16): Xaa can be any naturally occurring amino acid
  Transcript Sequence Number=SeqID_5773
KISVVMAEKSAPRAPXYGHGGGRGGGYGGGRRDSYRDGGGHGPNRNQGGGSRSRPY

SEQ ID NO: 71748 - protein, 75 aa, Setaria italica
  Transcript Sequence Number=SeqID_5774
  Subcellular localization annotation: CTP_CleavageSite=21; ConfidenceScore=5.15e-01
RWSSSLFYVFFSFFFFFFFTRAEPCKYVNQHPKRKRFCAIKILPRHTSHTTYTKSEVSRNLNLVHATFYFNPTSV

SEQ ID NO: 71749 - protein, 418 aa, Setaria italica
  misc_feature (94)..(94): Xaa can be any naturally occurring amino acid
  Transcript Sequence Number=SeqID_5775
  Gene Ontology: Mol. function=nucleic acid binding; Cellular component= intracellular
  Homolog annotation: Hit_ID=B9S5B9; Match level="QueryCoverage=28%, HitCoverage=27%, E-value=3e-54, Identity=80%"; Hit description=RNA binding protein, putative
  Pfam annotation: Domain name=RRM_1; Domain location=282-365; Score =22.9; E_value=0.0013; Accession=PF00076.14; Description=RNA recognition motif. (a.k.a. RRM, RBD, o
TDPTTTVEAEAAALVAEAEVEVEVAEAVVAAGEDARAIGCGNVNFARRTECNKCGAPCPSGGGGGGGSGGYNKSGGGGGSYNRGGGDYGSGGGXGFDRDGGGGGRGGYNRSGGSDRGFDDHRGGRGGSYGGRDQENQRGSEGGYGQAPPQGPPSYGGPVGDYVAPPSSYGGNNAYGSDSAVPPPNSYSGAPGSYPPSYGAPPPNQYGGGAPGGQGGLPPTYDGGYGGRPMPGGGGSGGAPPPYHGGGGGGGGGYTGSAASEPAAKVKQCDANCDETCDNARIYISNLPPDVTVEELQELFGGIGQVGRIKQKRGYKDQWPWNIKIYTDDSGKAKGDACLAYEDPSAAHSAGGFYNNYDMRGYKISVVMAEKSAPRAPSYGHGGGRGGGYGGGRRDSYRDGGGHGPNRNQGGGSRSRPY

SEQ ID NO: 71750 - protein, 72 aa, Setaria italica
  misc_feature (32)..(32): Xaa can be any naturally occurring amino acid
  misc_feature (48)..(48): Xaa can be any naturally occurring amino acid
  Transcript Sequence Number=SeqID_5776
VDARLRLHDVEWTQIDHYIVSWIYLTVSKTIXHGVLAPHHGALTLAQXVRGLFLNNTSQRAVYALQDFHNLH

SEQ ID NO: 71751 - protein, 59 aa, Setaria italica
  Transcript Sequence Number=SeqID_5777
LVAHNEEKTQLASSKTHLIIAQYFFVLIWKSSNYIITASSFPICGSAQYCARTHLQQVP

SEQ ID NO: 71752 - protein, 41 aa, Setaria italica
  Transcript Sequence Number=SeqID_5778
  Gene Ontology: Mol. function=translation initiation factor activity; Biological process=translational initiation
  Homolog annotation: Hit_ID=Q0D5W6; Match level="QueryCoverage=100%, HitCoverage=35%, E-value=5e-13, Identity=90%"; Hit description =Protein translation factor SUI1 homolog
VVQDPELGQVIQLQGDQRKNVATFLVQAGIAKKENIKIHGF

SEQ ID NO: 71753 - protein, 91 aa, Setaria italica
  Transcript Sequence Number=SeqID_5779
TNHTNHRGKLARIPETTIRDPFVRRANSRRDAIETLQIPKSHGLRTRRIESGRRGRGKGRWCSPFSCREEGESRRGAHAVGGERRIRLDQE

SEQ ID NO: 71754 - protein, 68 aa, Setaria italica
  Transcript Sequence Number=SeqID_5780
FFFFFNSQTESTFIKLAIITLHCCHTHTLVAHNEEKTQLASSKTHLIIAQYFFVLIWKSSNYIITAFP

SEQ ID NO: 71755 - protein, 72 aa, Setaria italica
  Transcript Sequence Number=SeqID_5781
CYCCQLNKSHTHTLVAHNEEKTQLASSKTHLIIAQYFFVLIWKSSNYIITASSFPICGSAQYCARTHLQQVP

SEQ ID NO: 71756 - protein, 60 aa, Setaria italica
  Transcript Sequence Number=SeqID_5782
  Gene Ontology: Mol. function=translation initiation factor activity; Cellular component=multi-eIF complex; Biological process =translational initiation
  Homolog annotation: Hit_ID=Q0D5W6; Match level="QueryCoverage=100%, HitCoverage=52%, E-value=2e-25, Identity=93%"; Hit description =Protein translation factor SUI1 homolog
  Pfam annotation: Domain name=SUI1; Domain location=1-53; Score=44.5; E_value=4.1e-10; Accession=PF01253.14; Description=Translation initiation factor SUI1
FSYNKILKDLKKEFCCNGTVVQDPELGQVIQLQGDQRKNVATFLVQAGIAKKENIKIHGF

SEQ ID NO: 71757 - protein, 87 aa, Setaria italica
  Transcript Sequence Number=SeqID_5783
FSVSILFSQTESTFIKLATITLHTSHTHTLVAHNEEKTQLASSKTHLIIAQYFFVLIWKSSNYIITASSFPICGSAQYCARTHLQQV

SEQ ID NO: 71758 - protein, 84 aa, Setaria italica
  Transcript Sequence Number=SeqID_5784
  Gene Ontology: Mol. function=translation initiation factor activity; Cellular component=multi-eIF complex; Biological process =translational initiation
  Homolog annotation: Hit_ID=Q0D5W6; Match level="QueryCoverage=86%, HitCoverage=63%, E-value=4e-33, Identity=93%"; Hit description =Protein translation factor SUI1 homolog
  Pfam annotation: Domain name=SUI1; Domain location=13-84; Score =113.3; E_value=7.9e-31; Accession=PF01253.14; Description =Translation initiation factor SUI1
RTILCTHAFTAGPGTKDYVHVRIQQRNGRKSLTTVQGLKKEFSYNKILKDLKKEFCCNGTVVQDPELGQVIQLQGDQRKNVATS

SEQ ID NO: 71759 - protein, 52 aa, Setaria italica
  Transcript Sequence Number=SeqID_5785
  Gene Ontology: Mol. function=translation initiation factor activity; Cellular component=cytoplasm; Biological process=translational initiation
  Homolog annotation: Hit_ID=Q0D5W6; Match level="QueryCoverage=100%, HitCoverage=45%, E-value=1e-20, Identity=92%"; Hit description =Protein translation factor SUI1 homolog
  Pfam annotation: Domain name=SUI1; Domain location=1-45; Score=23.9; E_value=2.4e-06; Accession=PF01253.14; Description=Translation initiation factor SUI1
DLKKEFCCNGTVVQDPELGQVIQLQGDQRKNVATFLVQAGIAKKENIKIHGF

SEQ ID NO: 71760 - protein, 92 aa, Setaria italica
  Transcript Sequence Number=SeqID_5786
  Gene Ontology: Mol. function=translation initiation factor activity; Cellular component=multi-eIF complex; Biological process =translational initiation
  Homolog annotation: Hit_ID=Q0D5W6; Match level="QueryCoverage=100%, HitCoverage=80%, E-value=5e-43, Identity=92%"; Hit description =Protein translation factor SUI1 homolog
  Pfam annotation: Domain name=SUI1; Domain location=4-85; Score=151.5; E_value=2.5e-42; Accession=PF01253.14; Description=Translation initiation factor SUI1
GAGPGTKDYVHVRIQQRNGRKSLTTVQGLKKEFSYNKILKDLKKEFCCNGTVVQDPELGQVIQLQGDQRKNVATFLVQAGIAKKENIKIHGF

SEQ ID NO: 71761 - protein, 88 aa, Setaria italica
  misc_feature (20)..(20): Xaa can be any naturally occurring amino acid
  Transcript Sequence Number=SeqID_5787
  Gene Ontology: Mol. function=translation initiation factor activity; Cellular component=multi-eIF complex; Biological process =translational initiation
  Homolog annotation: Hit_ID=Q0D5W6; Match level="QueryCoverage=100%, HitCoverage=74%, E-value=1e-37, Identity=89%"; Hit description =Protein translation factor SUI1 homolog
  Pfam annotation: Domain name=SUI1; Domain location=1-81; Score=119.0; E_value=1.5e-32; Accession=PF01253.14; Description=Translation initiation factor SUI1
KDYVHVRIQQRNGKKRSTRXTVQGLKKEFSYNKILKDLKKEFCCNGTVVQDPELGQVIQLQGDQRKNVATFLVQAGIAKKENIKIHGF

SEQ ID NO: 71762 - protein, 59 aa, Setaria italica
  Transcript Sequence Number=SeqID_5788
  Gene Ontology: Mol. function=translation initiation factor activity; Cellular component=cytoplasm; Biological process=translational initiation
  Homolog annotation: Hit_ID=Q0D5W6; Match level="QueryCoverage=86%, HitCoverage=44%, E-value=1e-19, Identity=90%"; Hit description =Protein translation factor SUI1 homolog
  Pfam annotation: Domain name=SUI1; Domain location=1-52; Score=27.5; E_value=9.9e-07; Accession=PF01253.14; Description=Translation initiation factor SUI1
LSIPSKVFFKKEFCCNGTVVQDPELGQVIQLQGDQRKNVATFLVQAGIAKKENIKIHGF

SEQ ID NO: 71763 - protein, 115 aa, Setaria italica
  Transcript Sequence Number=SeqID_5789
  Gene Ontology: Mol. function=translation initiation factor activity; Cellular component=cytoplasm; Biological process=translational initiation
  Homolog annotation: Hit_ID=Q0D5W6; Match level="QueryCoverage=100%, HitCoverage=100%, E-value=4e-56, Identity=90%"; Hit description =Protein translation factor SUI1 homolog
  Pfam annotation: Domain name=SUI1; Domain location=27-108; Score =151.5; E_value=2.5e-42; Accession=PF01253.14; Description =Translation initiation factor SUI1
MSDLDVQLPSAFDPFAEANAEDSGAGPGTKDYVHVRIQQRNGRKSLTTVQGLKKEFSYNKILKDLKKEFCCNGTVVQDPELGQVIQLQGDQRKNVATFLVQAGIAKKENIKIHGF

SEQ ID NO: 71764 - protein, 80 aa, Setaria italica
  Transcript Sequence Number=SeqID_5790
  Gene Ontology: Mol. function=translation initiation factor activity; Cellular component=multi-eIF complex; Biological process =translational initiation
  Homolog annotation: Hit_ID=Q0D5W6; Match level="QueryCoverage=91%, HitCoverage=63%, E-value=2e-33, Identity=93%"; Hit description =Protein translation factor SUI1 homolog
  Pfam annotation: Domain name=SUI1; Domain location=22-80; Score=67.2; E_value=6.2e-17; Accession=PF01253.14; Description=Translation initiation factor SUI1
SYVILLIDPFAEANAEDSGAGPGTKDYVHVRIQQRNGRKSLTTVQGLKKEFSYNKILKDLKKEFCCNGTVVQDPELGQVQ

SEQ ID NO: 71765 - protein, 115 aa, Setaria italica
  misc_feature (54)..(54): Xaa can be any naturally occurring amino acid
  Transcript Sequence Number=SeqID_5791
  Gene Ontology: Mol. function=translation initiation factor activity; Cellular component=cytoplasm; Biological process=translational initiation
  Homolog annotation: Hit_ID=Q0D5W6; Match level="QueryCoverage=100%, HitCoverage=100%, E-value=2e-55, Identity=89%"; Hit description =Protein translation factor SUI1 homolog
  Pfam annotation: Domain name=SUI1; Domain location=27-108; Score =149.9; E_value=8e-42; Accession=PF01253.14; Description=Translation initiation factor SUI1
MSDLDVQLPSAFDPFAEANAEDSGAGPGTKDYVHVRIQQRNGRKSLTTVQGLKXEFSYNKILKDLKKEFCCNGTVVQDPELGQVIQLQGDQRKNVATFLVQAGIAKKENIKIHGF

SEQ ID NO: 71766 - protein, 115 aa, Setaria italica; identical to SEQ ID NO: 71763
  Transcript Sequence Number=SeqID_5792
  Gene Ontology: Mol. function=translation initiation factor activity; Cellular component=cytoplasm; Biological process=translational initiation
  Homolog annotation: Hit_ID=Q0D5W6; Match level="QueryCoverage=100%, HitCoverage=100%, E-value=4e-56, Identity=90%"; Hit description =Protein translation factor SUI1 homolog
  Pfam annotation: Domain name=SUI1; Domain location=27-108; Score =151.5; E_value=2.5e-42; Accession=PF01253.14; Description =Translation initiation factor SUI1

SEQ ID NO: 71767 - protein, 53 aa, Setaria italica
  Transcript Sequence Number=SeqID_5793
LREIHIGFCSLAKPSMQHSDINKQCRSHARRQHQTTPSGQGTAHHKATSWSYR

SEQ ID NO: 71768 - protein, 89 aa, Setaria italica
  Transcript Sequence Number=SeqID_5794
  Gene Ontology: Mol. function=glutathione peroxidase activity; Cellular component=chloroplast; Biological process=response to oxidative stress
  Homolog annotation: Hit_ID=B6U7S4; Match level="QueryCoverage=96%, HitCoverage=36%, E-value=1e-33, Identity=84%"; Hit description =Glutathione peroxidase
  Pfam annotation: Domain name=GSHPx; Domain location=39-89; Score =19.9; E_value=1.4e-09; Accession=PF00255.11; Description=Glutathione peroxidase
GSRHHPTGWAGPSVAAAPRTARRRAPGVAYATAATEKSIYDYTVKDIDGKDVPLKKFKNKVLLIVNVASQCGLTTANYTELSHIYEKYK

SEQ ID NO: 71769 - protein, 185 aa, Setaria italica
  Transcript Sequence Number=SeqID_5795
  Gene Ontology: Mol. function=glutathione peroxidase activity; Cellular component=chloroplast; Biological process=response to oxidative stress
  Homolog annotation: Hit_ID=B6U7S4; Match level="QueryCoverage=97%, HitCoverage=83%, E-value=5e-91, Identity=86%"; Hit description =Glutathione peroxidase
  Pfam annotation: Domain name=GSHPx; Domain location=28-136; Score =244.1; E_value=3.5e-70; Accession=PF00255.11; Description =Glutathione peroxidase
  Pfam annotation: Domain name=Redoxin; Domain location=18-182; Score= -7.0; E_value=0.016; Accession=PF08534.2; Description=Redoxin
  Pfam module annotation: Pfam domain module=GSHPx::Redoxin; Domain location=28-136::18-182
ATEGPAQPVGWCGSRTKEAAAPAAEGSIYDYTVKDIDGKDVPLKKFKNKVLLIVNVASQCGLTTANYTELSHIYEKYKTQGFEILAFPCNQFGAQEPGSNSQIKQFACTRFKAEFPIFDKVDVNGPNTAPIYKFLKSSAGGFLGDLVKWNFEKFLVDKNGKVVERYPPTTSPFQIEKDIQKLIAA

SEQ ID NO: 71770 - protein, 147 aa, Setaria italica
  misc_feature (137)..(137): Xaa can be any naturally occurring amino acid
  Transcript Sequence Number=SeqID_5796
PHLAASFRDLDAELAVVLDVLPAASLCLSRDAAEHLDLLRARCRRRAPGQYHDLAEAALRDRLLAALRHFELGQPPDPSKLKSLLAQIGISDAASCRVEIDYLEEQILSQEEDTDLPLIGGVVALLRYCLFSLFDPXNTKVLRCLAI

SEQ ID NO: 71771 - protein, 115 aa, Setaria italica
  misc_feature (33)..(33): Xaa can be any naturally occurring amino acid
  Transcript Sequence Number=SeqID_5797
  Gene Ontology: Mol. function=protein serine/threonine kinase activity; Biological process=protein amino acid phosphorylation
  Homolog annotation: Hit_ID=Q69MP3; Match level="QueryCoverage=99%, HitCoverage=13%, E-value=5e-49, Identity=80%"; Hit description =Putative receptor kinase 5
ERLLIYEYLANKGLDAILFDSERKSLLDWPTRXFGIIKGVARGLLYLHQDSRLTVIHRDLKASNVLLDAEMRPKIADFGMAKIFGENQQKANTKRVVGTFGYIAPEYQTEGDFSI

SEQ ID NO: 71772 - protein, 325 aa, Setaria italica
  misc_feature (9)..(9): Xaa can be any naturally occurring amino acid
  Transcript Sequence Number=SeqID_5798
  Gene Ontology: Mol. function=histone-lysine N-methyltransferase activity; Cellular component=nucleus; Biological process=chromatin modification
  Homolog annotation: Hit_ID=Q6GV25; Match level="QueryCoverage=99%, HitCoverage=43%, E-value=1e-151, Identity=75%"; Hit description=SET domain protein
  Pfam annotation: Domain name=Pre-SET; Domain location=46-146; Score =134.0; E_value=4.6e-37; Accession=PF05033.8; Description=Pre-SET motif
  Pfam annotation: Domain name=SET; Domain location=148-304; Score =174.1; E_value=4.1e-49; Accession=PF00856.20; Description=SET domain
  Pfam module annotation: Pfam domain module=Pre-SET::SET; Domain location=46-146::148-304
TKSGTFCFXKYKLLREPGQPDGFAIWKMSQKWLENPTTRGSVLHPDLSSGAENLPVFLVNDIDNDEGPHHFTYITQIKHLKPPSSIKPVQGCTCLSVCLPGDANCSCAQRNGGNLPYGSSGLLVCRKPMVYECGESCRCSFNCRNKVTQKGVRIHFEVFKTGNRGWGLRSWDPIRAGSFLCEYVGEAIDDAKCDLNSHEDDYMFQTLCPGEKTLKWNYGPELIGEQSTNISADTFEPLPLKISAKKMGNVSRFMNHSCAPNVFWQPVQFDHEDDHRPHIMFFALKHIPPMTELTYDYGDIGTDSSGVPRAKNCLCGSSNCRGFFI

SEQ ID NO: 71773 - protein, 66 aa, Setaria italica
  misc_feature (56)..(56): Xaa can be any naturally occurring amino acid
  Transcript Sequence Number=SeqID_5799
SSLAVKAMDVDSCPNLTVIAIAEKSPCLDPRLLRKSSVVITYKEIIKDGWCPPVNXYCTLQITVLI

SEQ ID NO: 71774 - protein, 100 aa, Setaria italica
  Transcript Sequence Number=SeqID_5800
LTDEESSHVAIQRSCESPRTAQQWGQTPKPYTKQSNRIQEFQSKAKQANRDQTLDPQGKQAYRNRRGWSTRIALLGESDGCVGSTRPRGEAKQPSPCFGS

SEQ ID NO: 71775 - protein, 69 aa, Setaria italica
  Transcript Sequence Number=SeqID_5801
  Gene Ontology: Mol. function=transcription regulator activity; Cellular component=nucleus
  Homolog annotation: Hit_ID=B6SSA5; Match level="QueryCoverage=98%, HitCoverage=25%, E-value=4e-21, Identity=73%"; Hit description=DNA binding like
RDAMAQVCRAIEELRLRVITASITAVAGCLMHTVFVEVDQIDQVRMKEMIEVALTQLDATRSPPSSMSC

SEQ ID NO: 71776 - protein, 215 aa, Setaria italica
  Transcript Sequence Number=SeqID_5802
  Gene Ontology: Mol. function=zinc ion binding; Biological process =regulation of transcription
  Homolog annotation: Hit_ID=A5HWF8; Match level="QueryCoverage=99%, HitCoverage=65%, E-value=6e-73, Identity=69%"; Hit description=Dof zinc finger protein 9
RFPGPVRPDLVLEGMVGNPANPGQAIPDMPAAADGSTIDLAMLYAKFLNHPAAEAGAGAVTPESAGQVDEAFDTFSASSDLSPGVLAPAQFDPCHDGFGEWLGPVSSTDPTSTAASTSSATTMLCSDVSVQAALGELNFAMDQSCFDSLGLPTDVGNLSSWCSIVPSLSTLEDTKYDSLDSFPDDALSLHEGMISGPDNHDWSVDCQGLEALYMP

SEQ ID NO: 71777 - protein, 263 aa, Setaria italica
  misc_feature (176)..(176): Xaa can be any naturally occurring amino acid
  Transcript Sequence Number=SeqID_5803
  Gene Ontology: Mol. function=DNA binding
  Homolog annotation: Hit_ID=A2Q346; Match level="QueryCoverage=46%, HitCoverage=18%, E-value=6e-28, Identity=46%"; Hit description =Homeodomain-like
  Pfam annotation: Domain name=Myb_DNA-binding; Domain location=155 -201; Score=16.8; E_value=0.06; Accession=PF00249.23; Description=Myb- like DNA-binding domain
EDTRIYPRVGGEYQVEVPDLLTEEEQAKLRSSTVYDSRAFGFEYPVGVGLAIPVTWTQNTSTRVKEEHGGLSRRSSCPSQDEAPIQSSENFPVNLHQDRICSECLGCKVKYAEEGEKLAGSDGQDMHCSQRREVLGCSCVKRKFDDCLPLPGMPRYSWSDEEAQSFLLGLYIFGKXNLVQVTKFMETKTMGEVLSYYYGEFFRSDAYRRWAACRKARSRRCILGLRIFSGPRQQELLSRLLAGVAREVEASLMEVFKIFNEGT

SEQ ID NO: 71778 - protein, 184 aa, Setaria italica
  misc_feature (125)..(125): Xaa can be any naturally occurring amino acid
  Transcript Sequence Number=SeqID_5804
VPLRKEITNPGVARPGRVFNRNISRGGYSQSQHGFTQEFRIVKDNRSKQKEAVETLPEASHNRDPSNEHTVSNVGDKSSTEKLAAQHHLVTPNVNGHGAAQADKVSGKGSQNRVATPPSGKNNFXGELCCSSSDPIHVPSPGSKSAGTFGAIKREVGVVGARQRPSDSPATNTSTSNSLAKVTS

SEQ ID NO: 71779 - protein, 251 aa, Setaria italica
  Transcript Sequence Number=SeqID_5805
  Homolog annotation: Hit_ID=Q8W0T8; Match level="QueryCoverage=75%, HitCoverage=20%, E-value=4e-09, Identity=31%"; Hit description=Gb protein
  Subcellular localization annotation: CTP_CleavageSite=56; ConfidenceScore=5.58e-01
TPNVNGQATVVGSHAVSGKGSQNRVATPPSGKNNFGGELCCSSSDPIHVPSPGSKSAGTFGAIKREVGVVGARQRPSDSPATNTSTSNSLAKVTSAQKDNPQNEHQSGLPGASLRNGRLNLPVPLSGRASHHVSHTKVSPHLEWKPKSVSPSCVNHEVSVVPPSVDCNQADLAGLSKKLSQANASQDEHVIIPEHIRVPDSERTHLIFGTFEPEIDPKASVTASHTVVTTEDLNDHPSPSQTAALTPSHPL

SEQ ID NO: 71780 - protein, 80 aa, Setaria italica
  misc_feature (66)..(66): Xaa can be any naturally occurring amino acid
  Transcript Sequence Number=SeqID_5806
  Gene Ontology: Mol. function=DNA-3-methyladenine glycosylase I activity; Biological process=base-excision repair
  Homolog annotation: Hit_ID=Q7XT71; Match level="QueryCoverage=100%, HitCoverage=17%, E-value=9e-16, Identity=70%"; Hit description =OSJNBa0029H02.23 protein
  Subcellular localization annotation: CTP_CleavageSite=35; ConfidenceScore=5.35e-01
GGGADSEPRSAGSRTRSVSATRGRKPSPRPGRDVAAAAAAAEEKKPAGVPTLLPSLSAPAGMRRQXLLLRSGLSLDASCS

SEQ ID NO: 71781 - protein, 105 aa, Setaria italica
  Transcript Sequence Number=SeqID_5807
  Subcellular localization annotation: CTP_CleavageSite=23; ConfidenceScore=5.76e-01
TTAAAGPRRTATPRTRRTAATAGARTGSSSTTRRSPAPGAASCDRSFARGILFSWVHDAFSSRKYTKICSFVVLFIVKFLVEYVRMYRIFHFLLLWFMVLCCVGI

SEQ ID NO: 71782 - protein, 347 aa, Setaria italica
  Transcript Sequence Number=SeqID_5808
  Gene Ontology: Biological process=regulation of signal transduction
  Homolog annotation: Hit_ID=B6TVR5; Match level="QueryCoverage=99%, HitCoverage=83%, E-value=1e-141, Identity=71%"; Hit description=PP2A regulatory subunit TAP46
  Pfam annotation: Domain name=TAP42; Domain location=3-335; Score =374.6; E_value=1.8e-109; Accession=PF04177.4; Description=TAP42-like family
VFGLLLPNETKEDVSTANLKYLLVPYYLGEMTEKIAQEDRIPILKASQNHFKEFVALCEVLELIPQDELELSRQKQHDTIANRRAQKIARFKRQKAAETKLQEIKERKERRGRSLRAAALSAPVEAGEEDAFEDDGEEEREAWLATISLALCKAFDLLDMLKKEEEMLLAVKERKEKDGNAFAREMLDERTQKAEAWHHNAANRAPYSKPADPITCATFAQDVLEGRASVSQAHEHKHQPMIFGPASLVGGGLTSERERMAAQVFQPGYRLPTMSIEEAGLCEMKMMEKWQERTANMIKEANSAWHKDGTSSAQEDEDAEEAKARAWDDWKDDNPRGAGNKKLTPCG

SEQ ID NO: 71783 - protein, 105 aa, Setaria italica
  Transcript Sequence Number=SeqID_5809
VEVAAAVPLHPQAAAVRSCRAFFEARIEDDEEEEEVEYVLLELGDCLYSDISPDAPFVLSGLDTMTPTLVVGDDLKMIGEYEETVWHTLSIVSRLWVVDVAGAVD

SEQ ID NO: 71784 - protein, 143 aa, Setaria italica
  misc_feature (136)..(136): Xaa can be any naturally occurring amino acid
  Transcript Sequence Number=SeqID_5810
  Homolog annotation: Hit_ID=Q00RJ2; Match level="QueryCoverage=69%, HitCoverage=72%, E-value=7e-31, Identity=66%"; Hit description =OSIGBa0155K17.8 protein
  Pfam annotation: Domain name=TFIIIC_subunit; Domain location=41-76; Score=25.0; E_value=0.00031; Accession=PF10419.1; Description=TFIIIC subunit
MSEELDKDKKIGEEEEEEEVEYVLLELGDCLYSDISPDAPFVLSGLDTMTPTLVVGDDLKMIGEYEETVGTCYLFSESEAEPKPPSDETTPSEENMDKPASSSKEGSLKEVNHLASTQKILKFRPINAEHPQHRAXQHKDKEI

SEQ ID NO: 71785 - protein, 128 aa, Setaria italica
  Transcript Sequence Number=SeqID_5811
  Gene Ontology: Mol. function=calcium-dependent cysteine-type endopeptidase activity; Cellular component=intracellular; Biological process=proteolysis
  Homolog annotation: Hit_ID=C3SA68; Match level="QueryCoverage=78%, HitCoverage=23%, E-value=4e-29, Identity=65%"; Hit description =Calpain-like protein
LLKSRMIVLFVAGTSRAFLISFGVHYWYLGHCISYAFVASVLLSAAVSCWLSISNPSVARIDALRSTVIKLREGFRRKGQNSSSNSSEGCGSSVKRSSGSVEAGQNGNATDSMYRSNSQSDGVNWNSI

SEQ ID NO: 71786 - protein, 292 aa, Setaria italica
  Transcript Sequence Number=SeqID_5812
  Gene Ontology: Mol. function=catalytic activity; Cellular component =chloroplast; Biological process=folic acid and derivative biosynthetic process
  Homolog annotation: Hit_ID=Q9ZTV0; Match level="QueryCoverage=99%, HitCoverage=98%, E-value=1e-126, Identity=76%"; Hit description=5,10- methylenetetrahydrofolate dehydrogenase-5,10-methenyltetrahydrofolate cyclohydrolase
  Pfam annotation: Domain name=THF_DHG_CYH; Domain location=3-120; Score=226.6; E_value=6.2e-65; Accession=PF00763.15; Description =Tetrahydrofolate dehydrogenasecyclohydrolase, catalytic domain
  Pfam annotation: Domain name=THF_DHG_CYH_C; Domain location=123-290; Score=368.1; E_value=1.6e-107; Accession=PF02882.11; Description =Tetrahydrofolate dehydrogenasecyclohydrolase, NAD(P)-binding domain
  Pfam module annotation: Pfam domain module=THF_DHG_CYH::THF_DHG_CYH _C; Domain location=3-120::123-290
MAQIIDGKAIAADIRREVAAEVATLSSAHNVVPGLAVVIVGSRKDSQTYVNMKRKACAEVGIRSVDVDLPEDISELALVAEVHRLNADPAVHGILVQLPLPKHINEEKILSEISIEKDVDGFHPLNIGKLAMKGREPLFVPCTPKGCMELLSRSGVTVKGKRAVVVGRSNIVGLPVSLLLLKADATVSIVHSRTSNPESIVREADIVIAAAGQAMMIKGDWIKPGAAVIDVGTNSVDDPTRKSGYRLVGDVDFAEVSKVAGYLTPVPGGVGPMTVAMLLKNTVDGAKRGIVE

SEQ ID NO: 71787 - protein, 133 aa, Setaria italica
  misc_feature (17)..(17): Xaa can be any naturally occurring amino acid
  Transcript Sequence Number=SeqID_5813
  Gene Ontology: Mol. function=zinc ion binding; Cellular component =intracellular
  Homolog annotation: Hit_ID=Q94FY3; Match level="QueryCoverage=71%, HitCoverage=17%, E-value=3e-45, Identity=92%"; Hit description=C2H2 zinc-finger protein (Fragment)
GGVGGRGGDGRYGNRAXDWSDSGRGGWNEGPGNGRREGLMSYKQFIQELEDDVSPVEAQSRYEEYKSEYITTQKKAYFDLHKDEDWLRNKYNPTNLEGVIERRNELARTTANEFFQDLQSGSLDTGPGLTGSA

SEQ ID NO: 71788 - protein, 583 aa, Setaria italica
  Transcript Sequence Number=SeqID_5814
  Gene Ontology: Mol. function=zinc ion binding; Cellular component =intracellular
  Homolog annotation: Hit_ID=Q94FY3; Match level="QueryCoverage=90%, HitCoverage=99%, E-value=0.0, Identity=78%"; Hit description=C2H2 zinc-finger protein (Fragment)
LGPVGGGGHEQDDRRYGNGHGGVGGRGGDGRYGNRAPDWSDSGRGGWNEGPGNGRREGLMSYKQFIQELEDDVSPVEAQSRYEEYKSEYITTQKKAYFDLHKDEDWLRNKYNPTNLEGVIERRNELARTTANEFFQDLQSGSLDTGPGLTGSAASKSGNNSSKNLVDADGKKGKLGKGSDDLYYAAPKAHPVSSEARRIRSDIEQAQALICKLDSEKGIENNVLSSSDHDKTDRDKSHGSMGPIVIIRGSSTVKGLEGAELLDTLVTYLWRIHGVDYYGMSETNEPKGLRHVKADARTYNGDSSNATEWENKLDSFWQDRIQGQDPLEILKAKEKIDAAATEVLDPYVRKIRDEKYGWKYGCGAKGCTKLFHAAEFVQKHLKLKHADVVVELTSKVREDIYFENYMNDPKAPGGTPIMQQPAPRGKGRQRPPIESRLRDERGNRRFDTNVDSPPHDGSGENPDDAIYDSFGDPIMHGAFPPDIPAPPILMPVPGAGPLGPFIPAPPEVAMHMMRDQGGPPHFEPAGGPHPRKAGRGGGPPMRGPSPIFSAPPPTHMHDPRRIRSYQDLDAPEDEVTVMDYRSL

SEQ ID NO: 71789 - protein, 82 aa, Setaria italica
  Transcript Sequence Number=SeqID_5815
LKASRVRCKPTIFPNLGIAGSSVLFHHKMNKNRGRNTMGNEAYRRIPCLPDVRGMLLEIARHSLPCASPIHPPSIHSSAALL

SEQ ID NO: 71790 - protein, 592 aa, Setaria italica
  misc_feature (353)..(353): Xaa can be any naturally occurring amino acid
  misc_feature (457)..(457): Xaa can be any naturally occurring amino acid
  Transcript Sequence Number=SeqID_5816
  Gene Ontology: Cellular component=plasma membrane
  Homolog annotation: Hit_ID=B6U1S0; Match level="QueryCoverage=100%, HitCoverage=98%, E-value=0.0, Identity=77%"; Hit description=ATMAP70- 3
  Pfam annotation: Domain name=Myosin_HC-like; Domain location=195-547; Score=781.5; E_value=5.8e-232; Accession=PF07058.3; Description =Myosin II heavy chain-like
EEGNASALKGSARRRGAVQAGLDADDLLTLMHGSDPVKVELNRLENEVRDKDRELGEAHAEIKALRLSERAREKAVEELTAELEKVDEKLKLTESLLETKNLELKKTNDEKKAALAAQFAAEATLRRVHAAQKDDDMPPIEAILAPLEAELKLSRQEIAKLQDDNRALDRLTKQKEAALLEAERTVQIAMAKAAMVDDMQNKNQELMKQIEICQEENKILDRLHRQKVAEVEKLSQTVRELEEAVLQGGAAANAVRDYQRKFQEMNEEKKILDRELARAKVTANRVAVVVANEWKDANDKVMPVKQWLEERRFMQGEMQQLRDKLAIAERTARSEAQLKEKYQLRLKVLEDGXLRGPPSGSSRPPTEGKSISNGPPRRLSLGGADSMSKASPNGVLMRRSPSFNSRSSLTTSSSLVLKHAKGTSRSFDGGTRSLDRGKVLGNGPHSLNRSTDAVKDXKTDDNWKADAEEKNNETTKNDSSDMVSSVFYDMLQKEVVSLRKACHEKDQSLKDKDDAIEMLAKKVDTLNKAMEVEAKKMRREIAAMEKEFAAVRLEKEQDNKAKRLGNLKGPGTSSHTASGRTAPRGGLARNLQ

SEQ ID NO: 71791 - protein, 466 aa, Setaria italica
  Transcript Sequence Number=SeqID_5817
  Gene Ontology: Mol. function=DNA helicase activity; Biological process=DNA metabolic process
  Homolog annotation: Hit_ID=B9SAY6; Match level="QueryCoverage=86%, HitCoverage=60%, E-value=0.0, Identity=72%"; Hit description=Nucleic acid binding protein, putative
  Pfam annotation: Domain name=Toprim; Domain location=14-108; Score =20.9; E_value=0.00038; Accession=PF01751.14; Description=Toprim domain
GENFYGLDDIKRAQDIIIVEGEIDKLSMDEAGYRNCVSVPDGAPPKVSSKIPDKEQDKKYQYLWNCKDYLDSTSRIILATDADPPGQALAEELARRLGKERCWRVKWPKKNETDTCKDANEVLMFLGPQALRKVIEDAELYPIRGLFAFKDFFPEIDNYYLGTHGDELGIHTGWKSMDDLYKVVPGELTVVTGVPNSGKSEWIDALLCNINQESGEHARKLLEKRIKKPFFDARYGGSAERMTPDEFEAGKQWLNETFHLIRCEDDSLPSINWVLDLAKAAVLRHGVRGLVIDPYNELDHQRPSNQTETEYVSQILTKIKRFAQHHSCHVWFVAHPRQLHNWNGGPPNMYDISGSAHFINKCDNGIVIHRNRDKNAGPLDVVQVCVRKVRNKVIGQIGDAFLTYDRVTGQFRDAGKATIAAATAATAQTATRKNSYGKSTKDNVAYEMPVPHVAEDDSVSGLDSLF

SEQ ID NO: 71792 - protein, 53 aa, Setaria italica
  Transcript Sequence Number=SeqID_5818
NLQTLSSSVAVTVDVTFDEPSLAAQLDDPAMLYEEPTRKIKEAIAKAKGIHSL

SEQ ID NO: 71793 - protein, 467 aa, Setaria italica
  Transcript Sequence Number=SeqID_5819
  Gene Ontology: Mol. function=histone-lysine N-methyltransferase activity; Cellular component=nucleus; Biological process=chromatin modification
  Homolog annotation: Hit_ID=B9RPN1; Match level="QueryCoverage=100%, HitCoverage=19%, E-value=4e-97, Identity=44%"; Hit description =Huntingtin interacting protein, putative
PGNLLDEALEAASNLASGAEETKMEEASAEDSEDFYIDDRVEALMDGSILVPGQELEIIGELLGADFKPADWERWSRHEDFTRFQIHHEGDDGINRGSEFQDNRPTDAYGLVSMEKNNFHHYVESSEWFSGRWSCKGGDWKRNDELSQDNPFRKKLVLNEGYPLCQMPKGSREDPRWHCKDELYYAVRAKKHDLPLWAFSSTEEDTDSVSDTCKSVVPGRPGQSRQPPRGVKGMMLPVVRINSRVVKDQSSVEPRTKPRGADRPLSRSSRSHSIGTERSSVHEGSSHFKKHHDHDSQGLHKSKSVPNIPKDRVCTADELSVNRGDWYYLDGTGHEHGPFSYSELQELVKKGTIVERSSVFRKIDNTWFPVLKDLKSLCSVPSVAQSSNSTAAHMQSDQYNVGVNQGSGSFHELHPQFVGYTRGKLHELVMKYFKSRELTLAINEVLDPWISAKQPKKEFEAYFSHNS

SEQ ID NO: 71794 - protein, 113 aa, Setaria italica
  Transcript Sequence Number=SeqID_5820
  Gene Ontology: Mol. function=metal ion binding
MAVQARHLSHAFPPYLHSRRAMDDVGVVPGTAFFDEYGLSAPAPGLGGTPVLGDFPRSELTCNYGFEPRKRPRVTAEAAGSLEDRSVVLPPAVAQELVAAVPVGNGQRRAAGS

SEQ ID NO: 71795 - protein, 95 aa, Setaria italica
  misc_feature (80)..(80): Xaa can be any naturally occurring amino acid
  Transcript Sequence Number=SeqID_5821
RWNMQMSAPAAALGPACERRRVQGLLKKNRRGGAAAARATCNDYTPLSGGPDWMVVAPLGRHTRRHRCPRGTAPLMIFFXPPSRSPTHPTPRPAG

SEQ ID NO: 71796 - protein, 263 aa, Setaria italica
  Transcript Sequence Number=SeqID_5822
  Gene Ontology: Mol. function=transferase activity; Biological process= oxidation reduction
  Homolog annotation: Hit_ID=B6TDS2; Match level="QueryCoverage=95%, HitCoverage=95%, E-value=1e-132, Identity=91%"; Hit description =Transcription factor APFI
  Pfam annotation: Domain name=Hexapep; Domain location=119-136; Score =13.2; E_value=1.1; Accession=PF00132.16; Description=Bacterial transferase hexapeptide (th
  Pfam annotation: Domain name=Hexapep; Domain location=142-159; Score =7.9; E_value=18; Accession=PF00132.16; Description=Bacterial transferase hexapeptide (th
  Pfam annotation: Domain name=Hexapep; Domain location=70-87; Score =10.6; E_value=6.8; Accession=PF00132.16; Description=Bacterial transferase hexapeptide (th
  Pfam annotation: Domain name=Hexapep; Domain location=91-108; Score =2.6; E_value=79; Accession=PF00132.16; Description=Bacterial transferase hexapeptide (th
  Pfam module annotation: Pfam domain module=Hexapep::Hexapep::Hexapep:: Hexapep; Domain location=119-136::142-159::70-87::91-108
MAGLGKAMYAVGFWIRETGQALDRLGCRLQGNYFFHEQISRHRTLMNIFDKTPHVHRDAFVAPSASLIGDVQVGPGASIWYGCVLRGDANNIQIGSGTNIQDNSLVHVAKSNLSGKVFPTIIGENVTVGHSAVLQGCTIEDEAFVGMGATLLDGVIVEKHGMVAAGALVRQNTRIPSGEVWGGNPAKFLRKLTDDEIAFIAESAANYFSLSKEHAAENAKPLEKVEFEKVLPKKFAHQDEEYDSTIGVTREAPPELTPPTPAQ

SEQ ID NO: 71797 - protein, 119 aa, Setaria italica
  Transcript Sequence Number=SeqID_5823
  Gene Ontology: Mol. function=nucleoside-triphosphatase activity
  Subcellular localization annotation: CTP_CleavageSite=36; ConfidenceScore=5.79e-01
RLPLPLQKPPAASSPSVATGSRRLGFLNATSLASARGASASSSAAAYLAVGAAAALASLQVAYADGNEQGPVGPAVSADPTEGEDLARKEKKRIMELVQSRGMQRGSYPQFDVAMKGRS

SEQ ID NO: 71798 - protein, 120 aa, Setaria italica
  Transcript Sequence Number=SeqID_5824
RIGQGNEWMTRLDSRSKILGLSQPSHFTASGRPRSILLACLLIPVASQLLSDGNGGSESKRRKKKEEKGKTKWSRTHAQWRGRLASAGAFTTRPCRRRCHGGAGASRRRRRRSSRRARRS

SEQ ID NO: 71799 - protein, 88 aa, Setaria italica
  Transcript Sequence Number=SeqID_5825
  Pfam annotation: Domain name=GCK; Domain location=1-45; Score=27.6; E_ value=1.1e-06; Accession=PF07802.3; Description=GCK domain
EGTDMVERCHEATANLKKCMDANADYYAPVLQAEQAVNERAEAEAEAAAAAAADAGKGQPASDAEKKEEAVPHQAAPSPPAAGEGKKE

SEQ ID NO: 71800 - protein, 157 aa, Setaria italica
  misc_feature (75)..(75): Xaa can be any naturally occurring amino acid
  misc_feature (120)..(120): Xaa can be any naturally occurring amino acid
  Transcript Sequence Number=SeqID_5826
  Gene Ontology: Mol. function=transferase activity, transferring glycosyl groups; Cellular component=integral to membrane; Biological process=protein amino acid glycosylation
  Homolog annotation: Hit_ID=B6SVW0; Match level="QueryCoverage=98%, HitCoverage=23%, E-value=1e-71, Identity=78%"; Hit description =Galactosyltransferase family
VAICQYGVQNVTADYIMKCDDDTFVRLDIVLQQITTYNRTLPLYLGNLNLLHRPLRRGKWAVTYEEWPEAVYPPXANGPGYVLSIDIARDIASRHANHSLRLFKMEDVSMGMWVEDYNCXAPVQYIHSWRFCQFGCVDNYFTAHYQSPRQMSYCLLG

SEQ ID NO: 71801 - protein, 476 aa, Setaria italica
  Transcript Sequence Number=SeqID_5827
  Gene Ontology: Mol. function=transferase activity, transferring glycosyl groups; Cellular component=integral to membrane; Biological process=protein amino acid glycosylation
  Homolog annotation: Hit_ID=B6SVW0; Match level="QueryCoverage=100%, HitCoverage=73%, E-value=0.0, Identity=88%"; Hit description =Galactosyltransferase family
  Pfam annotation: Domain name=Gal-bind_lectin; Domain location=1-197; Score=120.5; E_value=5.7e-33; Accession=PF00337.14; Description =Galactoside-binding lectin
  Pfam annotation: Domain name=Galactosyl_T; Domain location=243-436; Score=69.0; E_value=1.7e-17; Accession=PF01762.13; Description =Galactosyltransferase
  Pfam module annotation: Pfam domain module=Gal-bind_lectin::Galactosyl _T; Domain location=1-197::243-436
SAVTVVGTPRAARPEYVEALERSGAGNGTVMVAQFAVELRGLRAADGEEPPRILHLNPRLRGDWSGRPVLEMNTCFRMQWGRAQRCDGTPSRDDAQVDGFRKCEKWQRRDIVESKETKTSSWFNRFIGRAKKPEMTWPFPFSEGKMFVLTIQAGVEGYHINVGGRHVASFPHRMGFALEDATGLAVTGGIDVHSVYATALPRAHPSFSLQQVLEMSEKWKARPVPVEPIQLFVGILSATNHFAERMAIRKTWMQFPAIQLGNVVARFFVALSHRKEINAALKKEAEYFGDIVILPFIDRYELVVLKTVAICQYGVQNVTADYIMKCDDDTFVRLDIVLQQITTYNRTLPLYLGNLNLLHRPLRRGKWAVTYEEWPEAVYPPYANGPGYVLSIDIARDIASRHANHSLRLFKMEDVSMGMWVEDYNATAPVQYIHSWRFCQFGCVDNYFTAHYQSPRQMLCLWDKLSAGRAQCCNYR

SEQ ID NO: 71802 - protein, 145 aa, Setaria italica
  misc_feature (138)..(138): Xaa can be any naturally occurring amino acid
  Transcript Sequence Number=SeqID_5828
  Gene Ontology: Mol. function=transferase activity, transferring phosphorus-containing groups; Cellular component=chloroplast; Biological process=phosphorylation
  Homolog annotation: Hit_ID=Q75KR1; Match level="QueryCoverage=91%, HitCoverage=14%, E-value=1e-60, Identity=82%"; Hit description =Pyruvate, phosphate dikinase 2
  Pfam annotation: Domain name=PPDK_N; Domain location=1-145; Score= -44.8; E_value=3.2e-10; Accession=PF01326.11; Description=Pyruvate phosphate dikinase, PEPpyruvate bi
IGGTRLLGARRRLVMGIPHELFEEKLEAMKVAKGLRNDTELNVKDLEDLVAEYKNVYVVTKGEQFPSDPKRQLHLAILAVFDSWDSTRAKKYRSINRITGLKGTAVNVQCMVFGNMGSTSGTGVLFTRNPSTGEKKLXGEFLVNA

SEQ ID NO: 71803 - protein, 123 aa, Setaria italica
  Transcript Sequence Number=SeqID_5829
  Subcellular localization annotation: CTP_CleavageSite=36; ConfidenceScore=5.00e-01
GKLQSLRGKGRQCSKPPPLRLRQHQEARRHSETSSRATELRSRRHELGNDSSELRGTRRRLTADPTAAAGGDNEERSTLPLLLPLAYGRSFLLMRLQPSSQGAARFASWLFLASLLAPAASYY

SEQ ID NO: 71804 - protein, 52 aa, Setaria italica
  Transcript Sequence Number=SeqID_5830
  Gene Ontology: Mol. function=oxidoreductase activity; Biological process=purine base metabolic process
  Homolog annotation: Hit_ID=A2SXR8; Match level="QueryCoverage=94%, HitCoverage=16%, E-value=9e-11, Identity=67%"; Hit description =Uricase
MAGNFELQGRHGKSRVRVSRVWRRPAAAGGDIIVEWNVAVSVVSDCLPSTPP

SEQ ID NO: 71805 - protein, 176 aa, Setaria italica
  misc_feature (106)..(106): Xaa can be any naturally occurring amino acid
  misc_feature (119)..(119): Xaa can be any naturally occurring amino acid
  Transcript Sequence Number=SeqID_5831
  Gene Ontology: Cellular component=membrane
  Homolog annotation: Hit_ID=Q01JQ1; Match level="QueryCoverage=97%, HitCoverage=53%, E-value=3e-29, Identity=38%"; Hit description =H0523F07.12 protein
MAKLAGTLVSLGGAMVLTFYKGVALTHAGSHLHSHHHRPPGGGAAAEAVNRGKWTLGTVAILGNCVCLSCWFLLHGRLARKYPHVYSCNALMSMFSFLQVAVVGLXCQRCIDSEHQLLXIDQGIVGCGVSFVLVTWCIEKRGAVFVAAFIPVVQIIVSVIDFSILHEQLYLGRYCT

SEQ ID NO: 71806 - protein, 91 aa, Setaria italica
  Transcript Sequence Number=SeqID_5832
  Subcellular localization annotation: CTP_CleavageSite=43; ConfidenceScore=5.77e-01
MATSTTALHPQFRPPLRAPGRLRPLPHSSYSSFARARPRTPVRASAASASAPVQQEAVAGVPWGCEIESLESAASLERWLIDSGLPEQRLA

SEQ ID NO: 71807 - protein, 95 aa, Setaria italica
  Transcript Sequence Number=SeqID_5833
  Gene Ontology: Mol. function=microtubule motor activity; Cellular component=microtubule associated complex; Biological process =microtubule-based movement
  Homolog annotation: Hit_ID=Q6H535; Match level="QueryCoverage=96%, HitCoverage=10%, E-value=1e-45, Identity=94%"; Hit description =Putative Carboxy-terminal kinesin 2
  Pfam annotation: Domain name=Kinesin; Domain location=1-95; Score= -202.6; E_value=0.066; Accession=PF00225.15; Description=Kinesin motor domain
  Subcellular localization annotation: CTP_CleavageSite=44; ConfidenceScore=5.33e-01
KKLGIQNTTQPNGLAVPDATMCPVNSTSHVIELMQTGHNNRSMSATALNERSSRSHSVVTIHVQGQDLKTGNTLRGALHLVDLAGSERVDRSAVT

SEQ ID NO: 71808 - protein, 139 aa, Setaria italica
  misc_feature (136)..(136): Xaa can be any naturally occurring amino acid
  Transcript Sequence Number=SeqID_5834
KTTRGRNAAAGGREEWQLTPLDMGLGAGEGWDSAGAVLSDGAAPPGLAPDHTFLRWIIGGEDASAAMGAVMDPPVLELDHAPSMMSPAFGPNMPFAPGMEDTKAAPFGHASNLLIHHHQHHPQPHAAFFGSHPSCXRAP

SEQ ID NO: 71809 - protein, 71 aa, Setaria italica
  Transcript Sequence Number=SeqID_5835
  Homolog annotation: Hit_ID=B6U6J6; Match level="QueryCoverage=80%, HitCoverage=11%, E-value=7e-20, Identity=84%"; Hit description=ABI3 -interacting protein 2
MADAAPSIPAAIDSLQTYSTALSAFTAAWRAVESHAAALDSTLAARLAGFSELELICSAMDGAGLREHLTQ

SEQ ID NO: 71810 - protein, 57 aa, Setaria italica
  Transcript Sequence Number=SeqID_5836
  Homolog annotation: Hit_ID=B6SME2; Match level="QueryCoverage=57%, HitCoverage=16%, E-value=2e-09, Identity=90%"; Hit description =Ethylene-responsive transcription factor 4
  Subcellular localization annotation: CTP_CleavageSite=47; ConfidenceScore=5.58e-01
MAPKSSSTSPAGSSSSSGSGSGQHAQQQPRLRGVRKRPWGRYAAEIRDPARKARVWL

SEQ ID NO: 71811 - protein, 113 aa, Setaria italica
  Transcript Sequence Number=SeqID_5837
  Gene Ontology: Mol. function=transcription factor activity; Cellular component=nucleus; Biological process=regulation of transcription, DNA-dependent
  Homolog annotation: Hit_ID=B6SME2; Match level="QueryCoverage=73%, HitCoverage=36%, E-value=4e-22, Identity=68%"; Hit description =Ethylene-responsive transcription factor 4
  Pfam annotation: Domain name=AP2; Domain location=26-77; Score=83.0; E_value=1.1e-21; Accession=PF00847.12; Description=AP2 domain
  Subcellular localization annotation: CTP_CleavageSite=48; ConfidenceScore=5.45e-01
MAPKRSTSPAGSSSSGSGSGSGAEQPRLRGVRKRPWGRYAAEIRDPVRKARVWLGTFDTPEQAARAYDAAALKLRGPGATTNYPSADAKTAAAAAPATSGSGSGSIVLSEGAS

SEQ ID NO: 71812 - protein, 207 aa, Setaria italica
  Transcript Sequence Number=SeqID_5838
  Gene Ontology: Mol. function=transcription factor activity; Cellular component=nucleus; Biological process=regulation of transcription, DNA-dependent
  Homolog annotation: Hit_ID=A4FS08; Match level="QueryCoverage=70%, HitCoverage=70%, E-value=2e-25, Identity=51%"; Hit description =Ethylene responsive transcription factor
  Pfam annotation: Domain name=AP2; Domain location=30-81; Score=81.7; E_value=2.5e-21; Accession=PF00847.12; Description=AP2 domain
  Subcellular localization annotation: CTP_CleavageSite=23; ConfidenceScore=5.40e-01
MAPKRSTSPAGSSSSGSGVFAPAAAAEQQPRLRGVRKRPWGRYAAEIRDPVRKARVWLGTFDTPEQAARAYDAAARKLRGPGATTNYPAADAKGAASGNTVLSEDASSSSSSSRDSPLAVTVAVAAAPPPSLDLSLALPTTPSCCQMFLDPTMMVAGAPALLQFLPPKSEEGQSFSCSSSSSVVLDAAPAAGLGLDLNLALPAQMVV

SEQ ID NO: 71813 - protein, 87 aa, Setaria italica
  Transcript Sequence Number=SeqID_5839
  Subcellular localization annotation: CTP_CleavageSite=15; ConfidenceScore=5.47e-01
FQALSNLPPTKRQAQGASSSSSPRRNPERRVPLYSTLPPPRNRCLSDCLKIHRLVDFSGAEGITFVLETMYFEGYGYRGSTFEQTYR

SEQ ID NO: 71814 - protein, 28 aa, Setaria italica
  Transcript Sequence Number=SeqID_5840
LEKEAKEEPKKEEPKFSAFTGKKYSLKG

SEQ ID NO: 71815 - protein, 218 aa, Setaria italica
  Transcript Sequence Number=SeqID_5841
  Gene Ontology: Mol. function=ubiquitin-specific protease activity; Biological process=ubiquitin-dependent protein catabolic process
  Homolog annotation: Hit_ID=B6TBJ6; Match level="QueryCoverage=81%, HitCoverage=57%, E-value=1e-100, Identity=98%"; Hit description =Ubiquitin fusion degradation protein 1
  Pfam annotation: Domain name=UFD1; Domain location=1-177; Score =383.6; E_value=3.6e-112; Accession=PF03152.6; Description=Ubiquitin fusion degradation protein UFD1
HFWFAFFAIYCNRSLLLFLQPQLEAGDKIIMPPSALDRLASLHIEYPMLFEVQNAAAERTSHCGVLEFIAEEGMIYMPYWMMQNLLLQEGDMVFIKNANLPKGTYVKLQPHTTDFLDISNPKAILEKTLRNFSCLTTGDSIMVAYNNKKYYIDIVETKPSNAISIIETDCEVDFAPPLDYKEPEPVKPAVPANTEPTGGNALVLYITGCDYSSLCSLF

SEQ ID NO: 71816 - protein, 198 aa, Setaria italica
  Transcript Sequence Number=SeqID_5842
  Gene Ontology: Mol. function=zinc ion binding
  Homolog annotation: Hit_ID=Q67IW8; Match level="QueryCoverage=95%, HitCoverage=22%, E-value=3e-17, Identity=26%"; Hit description=Far -red impaired response protein-like
  Pfam annotation: Domain name=SWIM; Domain location=75-111; Score =22.1; E_value=0.0015; Accession=PF04434.9; Description=SWIM zinc finger
DGKEHEDKLPLTETSTGWPIESHAAEFYTKTMLGKFVDHMKQGAKYDVVEIVPRRKYRLDHVDPLSCDKWYRSSYMVDVREDGGYYQCECGMWDHMGILCCHSIRLMMQLMVRKIPEQHLLRRWSRNGNKVESDIVRQADLASYLHTSRSFRNASLTNKARELVELGDLNIECYDLCYKGICELIEQVKSKRPNTDVA

SEQ ID NO: 71817 - protein, 117 aa, Setaria italica
  Transcript Sequence Number=SeqID_5843
  Gene Ontology: Mol. function=heat shock protein binding; Biological process=protein folding
  Homolog annotation: Hit_ID=B6T720; Match level="QueryCoverage=91%, HitCoverage=33%, E-value=9e-44, Identity=76%"; Hit description=DnaJ protein
TTNGARALGRSIVKKEVSQTVMVKPGWKKGKQVVFEGMGDERPGCLPADAIFTVSEKKHPTFKRVGNDLVLKAEVPLVSALTGWSFSFRLLSGKKVSLAFQDEVICPGYEKVIGGEG

SEQ ID NO: 71818 - protein, 229 aa, Setaria italica
  Transcript Sequence Number=SeqID_5844
  Gene Ontology: Mol. function=heat shock protein binding; Biological process=protein folding
  Homolog annotation: Hit_ID=B6T720; Match level="QueryCoverage=100%, HitCoverage=72%, E-value=1e-104, Identity=78%"; Hit description=DnaJ protein
  Pfam annotation: Domain name=DnaJ_C; Domain location=102-225; Score =31.8; E_value=5.6e-09; Accession=PF01556.10; Description=DnaJ C terminal region
  Subcellular localization annotation: CTP_CleavageSite=35; ConfidenceScore=5.25e-01
MDRTRSDDFCTRSAPGTPAREFKKVYSSGNSGGRRAFAEFSSSIMRKAPPLERKLECTLEELCRGCKKEVKFTRDIVTKNGSIVKKEVSQTVMVKPGWKKGKQVVFEGMGDERPGCLPADAIFTVSEKKHPTFKRVGNDLVLKAEVPLVSALTGWSFSFRLLSGKKVSLAFQDEVICPGYEKVIGGEGMPIPEQKGARGDLRVKFEIVFPKELTDEQRTGLAEILKGSC

SEQ ID NO: 71819 - protein, 362 aa, Setaria italica
  Transcript Sequence Number=SeqID_5845
  Gene Ontology: Mol. function=protein dimerization activity; Biological process=RNA-dependent DNA replication
  Homolog annotation: Hit_ID=B6UD26; Match level="QueryCoverage=100%, HitCoverage=100%, E-value=1e-146, Identity=73%"; Hit description=O -methyltransferase ZRP4
  Pfam annotation: Domain name=Dimerisation; Domain location=31-79; Score=66.8; E_value=8.3e-17; Accession=PF08100.3; Description =Dimerisation domain
  Pfam annotation: Domain name=Methyltransf_2; Domain location=90-339; Score=130.2; E_value=6.8e-36; Accession=PF00891.10; Description=O -methyltransferase
  Pfam module annotation: Pfam domain module=Dimerisation::Methyltransf_ 2; Domain location=31-79::90-339
MTAQTVVPTDAELLQAQADLWRHSLYYLTPMALRCAVELGIPTAIHRLGGAASPTGLITALSLPSAKLPFLRRLMRLLAASGVFTVDKSTEEGVYCINPVSYLLVDGIPDEVHINHTSFVLTTTSTRYIDAAMGLADWFKKDVVTPPFEELHGATLFHESMESLDADYHKMANEALEAHDNFGVPIAMREFRDIFKGIQSTTCCWGASGDDTFARALVKAFPHIKCTVLANPKTISSKPGDGAINYVQDDMFNFIPPAQTVVLKLMLHHWTDEDCVKILAQCRKAIPSRKDGGKVIIGDIVIDYSAGPLLEAQLLMDVAMMTMTKGRQRDEKEWREIFMKAGFSDYKLLKKFGARGVFEVYP

SEQ ID NO: 71820 - protein, 151 aa, Setaria italica
  Transcript Sequence Number=SeqID_5846
  Gene Ontology: Mol. function=DNA binding; Biological process =regulation of transcription
  Homolog annotation: Hit_ID=B6T0L0; Match level="QueryCoverage=99%, HitCoverage=50%, E-value=1e-31, Identity=52%"; Hit description=MYB -like transcription factor DIVARICATA
  Pfam annotation: Domain name=Myb_DNA-binding; Domain location=37-86; Score=41.2; E_value=4.1e-09; Accession=PF00249.23; Description=Myb -like DNA-binding domain
MMAEAWTQVLLPSTAPCFSGQPSCFWQDRLADFGGIGDEWTAEENKLFEEALARIDRNAPDKWERVAAMLPRKTVVDVVNHYHDLEYDVGFIEAGLVPFPHYSSSPPSSGFTLEDWDGGDGGFRRGYCLKRARGPDQERKKGIPWTEEEHK

SEQ ID NO: 71821 - protein, 468 aa, Setaria italica
  misc_feature (171)..(171): Xaa can be any naturally occurring amino acid
  Transcript Sequence Number=SeqID_5847
  Gene Ontology: Cellular component=mitochondrion
  Homolog annotation: Hit_ID=B6SP54; Match level="QueryCoverage=93%, HitCoverage=83%, E-value=1e-161, Identity=72%"; Hit description =Nodulin-like protein
  Pfam annotation: Domain name=Nodulin-like; Domain location=3-176; Score=146.8; E_value=6.7e-41; Accession=PF06813.5; Description =Nodulin-like
PFGAAFGLVGYGVQYLFLDSAGLRYWHLFLLTSLAGNGICWINTVCYLLCIRNFGSSSRVAVGLATSYLGLSAKVYTSLADSIPGLANSKAKAYLLLNAVVPMLVTVVVAPSLRAVDLTSNASTDAAFLVMFAITLATGACAVVGSIGSTSNGLSSREHMVSLGVLLATPXILIPLALRIRESLNKIWETKRENRIHDLGTDDADAIERVVAIDIADVESKEGDSATEKPKEEVGGLRLLRKLDFWLYFFSYMFSGTLGLVFLNNLGQIAESRQLAQTSTLVSLSSSFGFFGRLLPSFLDYYSAKSGYSISRTGSMASLMAPMAGAFFLLLNPGNFFLYLSTAVIGTCTGAITSVAVSATSELFGTKNFGVNHNVVVSNIPVGSLCFGYFAAYLYQRGAAQGGHQSCIGAGCYQETFVVWGAMCAVGTLLCSVLYARSRGFAGRLSAVAAAGGAVRTSCLARLANLFS

SEQ ID NO: 71822 - protein, 189 aa, Setaria italica
  Transcript Sequence Number=SeqID_5848
  Gene Ontology: Mol. function=phosphoglycolate phosphatase activity; Biological process=metabolic process
  Homolog annotation: Hit_ID=B6TLB5; Match level="QueryCoverage=97%, HitCoverage=61%, E-value=1e-100, Identity=91%"; Hit description =Catalytic/ hydrolase
  Pfam annotation: Domain name=Hydrolase; Domain location=3-163; Score =12.6; E_value=0.0036; Accession=PF00702.18; Description=haloacid dehalogenase-like hydrolase
LPPDPAFFKMSMKELLESKHPTAWSEFEKGLIDENELAKKFFSDGRSFDLEGLKECMVRAYEYIDGVEDILCCLKKNNYEIHAFTNYPVWYQLIEDKLKLSKYLSWTFCSCQTGKRKPSPDFYLQAVDHLNVDPASCIFIDDRMVNIEAALSVGMVGLQFKNAEALRKDLCALGVELSPLVCEGEAHVQ

SEQ ID NO: 71823 - protein, 140 aa, Setaria italica
  Transcript Sequence Number=SeqID_5849
  Gene Ontology: Mol. function=catalytic activity; Cellular component =membrane
  Pfam annotation: Domain name=PAP2; Domain location=46-139; Score =16.5; E_value=0.00026; Accession=PF01569.13; Description=PAP2 superfamily
LGGEESLGPRREASRWAPVEAALNRMIKWLVAGCAEPVALWKHDAEVIWILLGAVTNSLLSVVLKKLLNHERPSALRSDPGMPSSHAQSIFYGATILVLSLYYWIGTNYLTLILGPAALSMAAYLSWLRVSQRLHTLNQI

SEQ ID NO: 71824 - protein, 101 aa, Setaria italica
  Transcript Sequence Number=SeqID_5850
  Gene Ontology: Mol. function=catalytic activity; Cellular component =membrane
NAVYYWIGTNYLTLILGPAALSMAAYLSWLRVSQRLHTLNQIMVGAGVGSAFGALWFVLWHSLVQEAFASSLLVRITVILGSSVFCVGFVMYMIRHWLKDE

SEQ ID NO: 71825 - protein, 107 aa, Setaria italica
  Transcript Sequence Number=SeqID_5851
FLSMGSVWLHFVSKARCLFINALTVGLGYKSSLDMKTILFRKRKKKETIFRIYHIDSVRCLSKADRGCISWVCRQASKASSSLLWSSCCPFASCIRASHSRSTISKL

SEQ ID NO: 71826 - protein, 97 aa, Setaria italica
  Transcript Sequence Number=SeqID_5852
  Gene Ontology: Cellular component=mitochondrion
  Homolog annotation: Hit_ID=Q9SS92; Match level="QueryCoverage=100%, HitCoverage=16%, E-value=2e-15, Identity=50%"; Hit description =F4P13.17 protein
  Pfam annotation: Domain name=Nodulin-like; Domain location=2-97; Score=-151.2; E_value=0.039; Accession=PF06813.5; Description =Nodulin-like
  Subcellular localization annotation: CTP_CleavageSite=55; ConfidenceScore=5.25e-01
SAALGLAAYAVQYCCLVFLNPSSLAVRYPLVFLVCLVAGCSICWFNTVCFVLCIRSFSASNRPLALSLSISFNGLSAAFYTLFANAFSPTSPSVYLL

SEQ ID NO: 71827 - protein, 120 aa, Setaria italica
  Transcript Sequence Number=SeqID_5853
  Gene Ontology: Mol. function=transporter activity; Cellular component= membrane; Biological process=oligopeptide transport
  Homolog annotation: Hit_ID=Q9FRU4; Match level="QueryCoverage=92%, HitCoverage=19%, E-value=9e-45, Identity=72%"; Hit description =Putative nitrate transporter NRT1-3
MAERLEAAPASGDEYTQDGTVDLHGNPVLRAKRGGWKACGFVVVYEVFERMAFYGISSNLVLYLTTKLHQGVVPSANNVTNWVGTIWMTPVIGAYVADAHLGRYRTFMGASVIYLIVSRR

SEQ ID NO: 71828 - protein, 56 aa, Setaria italica
  Transcript Sequence Number=SeqID_5854
  Gene Ontology: Mol. function=transporter activity; Cellular component= membrane; Biological process=oligopeptide transport
  Homolog annotation: Hit_ID=B6SWU5; Match level="QueryCoverage=60%, HitCoverage=5%, E-value=4e-10, Identity=85%"; Hit description =Peptide transporter PTR2
MQGMVLLVLSVSLPALKPPPCHGDVCPKVSALQLGVYFGGLYIVALGNGGTKPNIS

SEQ ID NO: 71829 - protein, 180 aa, Setaria italica
  Transcript Sequence Number=SeqID_5855
  Gene Ontology: Mol. function=transporter activity; Cellular component= membrane; Biological process=oligopeptide transport
  Homolog annotation: Hit_ID=B6SWU5; Match level="QueryCoverage=98%, HitCoverage=29%, E-value=4e-50, Identity=58%"; Hit description =Peptide transporter PTR2
RGITLLQRIGAGLLLQVATMAITAAVESRRLGFARSHSAALGAPLPLTIFVLLPQFVLMGAADAFLVVGQIEFFYDQAPESMKSLGTAMSLTAYGVGSMLSSAVLSLVERTTAAGRRGGAPWVANDLNASRLDCYYAFLAVLAAANLAAFVVLSCRYEYRAESTEAIGVTATVQSEPAAP

SEQ ID NO: 71830 - protein, 323 aa, Setaria italica
  misc_feature (311)..(311): Xaa can be any naturally occurring amino acid
  Transcript Sequence Number=SeqID_5856
  Gene Ontology: Mol. function=transporter activity; Cellular component= membrane; Biological process=oligopeptide transport
  Homolog annotation: Hit_ID=B6SWU5; Match level="QueryCoverage=92%, HitCoverage=48%, E-value=1e-118, Identity=69%"; Hit description =Peptide transporter PTR2
  Pfam annotation: Domain name=PTR2; Domain location=116-323; Score= -7.7; E_value=2.9e-06; Accession=PF00854.13; Description=POT family
MVAEKSPPGAAGSLAMESGGDMRAEEYAQDGSVDLRGNPVLRSERGGWTACFFIVVYELFERMAYYGIASNLIIYLTDHLHQGTVEASNNVTNWSGTVFLTPLLGAYIADAYLGRYWTFVAGSAIYLIGMILLTLSVSLPALRPPKCGDGTADPNCTHQATSAQLGVFFLGLYILAVGTGGTKPNISTIGADQFDDNHPRERRHKLSFFNWWMFSIFFGTLFANTVLVYIQDNVGWTVGYALPTLGLAVSIVIFTAGTPFYRHKPTSDSPFAKMARVIVAAARKWAVAAPVDPRDLHELDEEHYAKRTPPXLPHTPNLAVLSK

SEQ ID NO: 71831 - protein, 562 aa, Setaria italica
  Transcript Sequence Number=SeqID_5857
  Gene Ontology: Mol. function=transporter activity; Cellular component= membrane; Biological process=oligopeptide transport
  Homolog annotation: Hit_ID=B6SWU5; Match level="QueryCoverage=100%, HitCoverage=91%, E-value=0.0, Identity=82%"; Hit description=Peptide transporter PTR2
  Pfam annotation: Domain name=DUF898; Domain location=280-561; Score= -209.7; E_value=0.069; Accession=PF05987.5; Description=Bacterial protein of unknown function (DUF898)
  Pfam annotation: Domain name=MFS_1; Domain location=6-481; Score =18.1; E_value=0.0076; Accession=PF07690.8; Description=Major Facilitator Superfamily
  Pfam annotation: Domain name=PTR2; Domain location=68-473; Score =394.4; E_value=1.9e-115; Accession=PF00854.13; Description=POT family
  Pfam module annotation: Pfam domain module=DUF898::MFS_1::PTR2; Domain location=280-561::6-481::68-473
TATRAVVVYELFERMAYYGIASNLIIYLTDHLHQGTVEASNNVTNWSGTVFLTPLLGAYIADAYLGRYWTFVAGSAIYLVGMVLLVLSVSLPALKPPPCHGDVCPKVSALQLGVYFGGLYIVALGNGGTKPNISTIGADQFDEFDPREKMHKLSFFNWWMFTIFLGILFSSTVLVYLQDNVSWSVGYGIPTLGLMVSIAIFLAGTKLYRHRLPQGSPFTSMGKVVAATLCKWNVPVPADAKELHELDVEEYTRKRKFRMDSTNTMRFLNKAAVKVKDDVGNGGSPAKWSLCTVTQVEETKQIMKLVPLLVTMFVPCTLIAQTNTLFVKQGATMNRHMGPRFQIPPASLGAFVTLTMLIAVVVYDLVFVKAVRRYTKNPRGITILKRMGIGMFLQVVTMAIASAIESQRLAYARRHGLDITGGELRLTIFALLPQFVLMGLADAFLVVGKIEFFYDQAPQSMKSLGTAMSLTAYGIGNILSSFLLSTVTRITRDRGNAWVTNNLNASNLDYYYAFLAVLGGINFFAFLALSAMYRYKAESTETVDIAMGLEAEKAKLQAEPLG

SEQ ID NO: 71832 - protein, 217 aa, Setaria italica
  misc_feature (205)..(205): Xaa can be any naturally occurring amino acid
  Transcript Sequence Number=SeqID_5858
SGAAVERKRSPLRGRTNNISDQCDNARPLESPASRVIEQNRWPGMMTGRSSAGLTSTSAAPAEKATRSVSSRDASAGRSPRRTHPSEGTGKSLKRPSNEVAKIVHRRRKDKADSSSDTSSQTSESSKSNCRLSKAVSSPVPVLHRSSSPRQGLAAAASTSRSCQSPSRMRPSAPCQSKCAPSDAQSGVEQPVFNYIVDARKGKKXAGQIENIHQLRL

SEQ ID NO: 71833 - protein, 80 aa, Setaria italica
  Transcript Sequence Number=SeqID_5859
VFYSCWTPEDAKAVRVLGKISSKFSAQVAPPCASNTDCDCKPDRSACCPCRMLPLVGVQLPQYHVKHDWFALGFTQRCHH

SEQ ID NO: 71834 - protein, 57 aa, Setaria italica
  Transcript Sequence Number=SeqID_5860
  Gene Ontology: Mol. function=protein serine/threonine kinase activity
  Homolog annotation: Hit_ID=C4P7U0; Match level="QueryCoverage=100%, HitCoverage=13%, E-value=4e-10, Identity=67%"; Hit description=CBL -interacting protein kinase 07
MDAMDSKSKGSKKQSKSLLGKYELGRLLGRGTFAKVYLARPVAGGEPVAVKVLDKAE

SEQ ID NO: 71835 - protein, 30 aa, Setaria italica
  Transcript Sequence Number=SeqID_5861
VAQFRLKVHQLLKHNTNVPFKTKLLQKKAT

SEQ ID NO: 71836 - protein, 80 aa, Setaria italica
  Transcript Sequence Number=SeqID_5862
  Gene Ontology: Mol. function=DNA binding; Cellular component=nucleus
  Homolog annotation: Hit_ID=Q7XLX6; Match level="QueryCoverage=100%, HitCoverage=100%, E-value=2e-13, Identity=53%"; Hit description=DNA -binding protein S1FA2
  Pfam annotation: Domain name=S1FA; Domain location=10-80; Score =159.5; E_value=1e-44; Accession=PF04689.5; Description=DNA binding protein S1FA
MADQFADSANNVIIEEVNKGLNPGMIVLLVVASFLLLFFVGNYALYVYAQKTLPPKKKKPVSKKKLKREKLKQGVSAPGE

SEQ ID NO: 71837 - protein, 396 aa, Setaria italica
  Transcript Sequence Number=SeqID_5863
  Homolog annotation: Hit_ID=Q53NA2; Match level="QueryCoverage=100%, HitCoverage=77%, E-value=2e-50, Identity=32%"; Hit description =D8Ertd354e protein, putative
  Pfam annotation: Domain name=DUF2261; Domain location=1-326; Score= -44.8; E_value=1e-11; Accession=PF10019.1; Description=Uncharacterized conserved protein (DU
DFVMPAFLFIIGVSAALVFKKRPNKTAATKKATVRAIKLFILGVILQGGYIHGRHKLTYGVDLDQIRWLGVLQRIAIGYFLAAISEIWLVNNNLVDSPVSFVKKYFMEWIMALMITVLYVALLFGLYVSNWEFGVKISNSTLSIPSNLVEMKTIHCGIRGSLGPPCNAVGLVDRVLLGENHLYKNPVYKRTKECSINSPDYGPLPLNAPDWCLAPFDPEGLLSTLMAAVTCFVGLHFGHVLIHCKNHSQRMLFWLLASTVLTISAFLLLVLGMPFSKPLYTVSYMLLTAGVSGFLLLLLYYIVDVIHTKKPFILFQWMGMNALIVYVLAACELFPTLIQGFYWRSPENNLVDITESLLQAIFHSKRWGTLAFVLLEVVFWCLAAGFLHMKGVYVKL

SEQ ID NO: 71838 - protein, 156 aa, Setaria italica
  misc_feature (97)..(97): Xaa can be any naturally occurring amino acid
  Transcript Sequence Number=SeqID_5864
  Gene Ontology: Mol. function=DNA binding; Cellular component=nucleus; Biological process=DNA replication
  Homolog annotation: Hit_ID=B9RAP9; Match level="QueryCoverage=83%, HitCoverage=12%, E-value=3e-16, Identity=39%"; Hit description =Replication factor C / DNA polymerase III gamma-tau subunit, putative
CQACNSNKSNCSERHCRRLKLENIWRRAIGKCRSRSAKSFLRKEGFLSSVHVTEELAIAEVGFGHPDHLSRAEKMQSLIECALQHVLGCNVEIRFKXLVSCPVRKDARLKRQSFSFLNCSGRKQELSDSVVTDEDEAVRPGAKRDTPLKGYTSSQK

SEQ ID NO: 71839 - protein, 36 aa, Setaria italica
  Transcript Sequence Number=SeqID_5865
CIHHETMDIKLNPNYTAQRFQKHLDQKKKSNRLAHV

SEQ ID NO: 71840 - protein, 305 aa, Setaria italica
  Transcript Sequence Number=SeqID_5866
  Gene Ontology: Mol. function=pyridoxal phosphate binding; Cellular component=mitochondrial inner membrane; Biological process=oxidation reduction
  Homolog annotation: Hit_ID=B6T4E6; Match level="QueryCoverage=94%, HitCoverage=88%, E-value=1e-132, Identity=77%"; Hit description=Mo -molybdopterin cofactor sulfurase
  Pfam annotation: Domain name=MOSC; Domain location=144-293; Score =74.0; E_value=5.7e-19; Accession=PF03473.9; Description=MOSC domain
  Pfam annotation: Domain name=MOSC_N; Domain location=17-131; Score =161.2; E_value=3e-45; Accession=PF03476.8; Description=MOSC N -terminal beta barrel domain
  Pfam module annotation: Pfam domain module=MOSC::MOSC_N; Domain location=144-293::17-131
GCTFLFFRCYPNSKFLVRGISVPQAPITATGFRWDRQWMLVNSNGRGITQRVEPKLALIQVELPPEAFAEDWLPTPDDHMVIRAPGMEPLKIPLASECATIYDVSVWEWSGSAYDEGAEAAEWFSNFFGNPTRLVRFKEESETRLTDPDYARGYKTMFSDGYPFLITSQGSLDALNEILEEPIPINRFRPNILVEGCHPYAEDLWKTIKINKLTFRGVKLCGRCKVPTINQDTGIPSPTEPTETLQKYRSGEVLLPSHKNKRQVYFGQNAVCKESLSANSEGRIIKVGDPVYVMRSFRSSDEVPA

SEQ ID NO: 71841 - protein, 257 aa, Setaria italica
  Transcript Sequence Number=SeqID_5867
  Gene Ontology: Mol. function=catalytic activity; Cellular component =chloroplast; Biological process=cellular metabolic process
  Homolog annotation: Hit_ID=B6T962; Match level="QueryCoverage=100%, HitCoverage=100%, E-value=1e-140, Identity=93%"; Hit description=NAD- dependent epimerase/dehydratase
  Pfam annotation: Domain name=3Beta_HSD; Domain location=12-232; Score= -125.7; E_value=0.02; Accession=PF01073.11; Description=3-beta hydroxysteroid dehydrogenaseisomerase family
  Pfam annotation: Domain name=Epimerase; Domain location=11-233; Score= -45.5; E_value=0.00098; Accession=PF01370.13; Description=NAD dependent epimerasedehydratase family
  Pfam annotation: Domain name=NmrA; Domain location=11-252; Score= -85.9; E_value=0.0027; Accession=PF05368.5; Description=NmrA-like family
  Pfam module annotation: Pfam domain module=3Beta_HSD::Epimerase::NmrA; Domain location=12-232::11-233::11-252
MADSAAPRPTVLVTGAGGRTGHIVYNKLKERSEQFIARGLVRTEESKQKIGGADDVYIADIRDADHLVPAVQGADALIILTSAVPKMKPGFDPSKGGRPEFYYEDGMYPEQVDWIGQKNQIDAAKAAGVKHIVLVGSMGGTNPNHPLNSLGNGNILVWKRKAEQYLADSGVPYTIIRPGGLQDKDGGVRELVVGKDDELLQTDTKSIPRADVAEVCVQALQYEEAKFKAFDLASKPEGVGTPTKDFRALFSQIMARF

SEQ ID NO: 71842 - protein, 162 aa, Setaria italica
  Transcript Sequence Number=SeqID_5868
DLSHGEHKIHMHGDDNGSRLTTSTGVSSNGSLKVQISMSPARIILCFPSEFQWDLSHPSVLDKFLVIDHTSCLNVAEAASHPQNEFLNEVHLGKPCTSIRLATGNFDIYLVKPANDVLDGRVCSSSRQTFSTMKIFSVTGASCNDSGITLIRRKYPVTCPEM

SEQ ID NO: 71843 - protein, 137 aa, Setaria italica
  misc_feature (50)..(50): Xaa can be any naturally occurring amino acid
  Transcript Sequence Number=SeqID_5869
  Gene Ontology: Mol. function=transporter activity; Cellular component= outer membrane-bounded periplasmic space; Biological process=transport
  Homolog annotation: Hit_ID=Q7XSS1; Match level="QueryCoverage=51%, HitCoverage=16%, E-value=7e-28, Identity=78%"; Hit description =OSJNBa0041A02.11 protein
SRRPPGSQADAPGWEWAPNAAAALVLQLAVCSLLFFFPSRARAHAPPPPXAAAAAVEATQEEDDQEWEAALQKWKTKTYALSVPLRVVALRGSFPPSWIKDFVKAQGKRIKFSPELRANLDGIFSEMSQCMDKGQVK

SEQ ID NO: 71844 - protein, 102 aa, Setaria italica
  Transcript Sequence Number=SeqID_5870
  Subcellular localization annotation: CTP_CleavageSite=35; ConfidenceScore=5.71e-01
PSRYPLLSKQSSAASLRSGSPRSPIFRRGSSVYCSCSGLGRARREQPLPGAVFYLRFLRSPPGRGWIDLCASCCRLFVPSGLVLSLTLLCGSVRCCCAGDWC

SEQ ID NO: 71845 - protein, 69 aa, Setaria italica
  Transcript Sequence Number=SeqID_5871
  Gene Ontology: Mol. function=phospholipase D activity; Cellular component=membrane; Biological process=phosphatidylcholine metabolic process
  Homolog annotation: Hit_ID=Q43270; Match level="QueryCoverage=100%, HitCoverage=8%, E-value=3e-30, Identity=89%"; Hit description =Phospholipase D alpha 1
MAQILLHSTLHATIFEAQELSNPHRASGGAPKFIRKLVEGIEDTVGVGKGTTKIYATIDLEKTRVGRTR

SEQ ID NO: 71846 - protein, 188 aa, Setaria italica
  Transcript Sequence Number=SeqID_5872
  Gene Ontology: Mol. function=phospholipase D activity; Cellular component=membrane; Biological process=phosphatidylcholine metabolic process
  Homolog annotation: Hit_ID=Q43007; Match level="QueryCoverage=88%, HitCoverage=20%, E-value=3e-78, Identity=84%"; Hit description =Phospholipase D alpha 1
  Pfam annotation: Domain name=PLDc; Domain location=64-91; Score=41.6; E_value=3.1e-09; Accession=PF00614.14; Description=Phospholipase D. Active site motif
LVVLYCYTYITQALRAKEIEANPKDYLTFFCLGNREVKQEGEYEPGEQPEPDTDYSRAQEARRFMIYVHTKMMIVDDEYIIIGSANINQRSMDGARDSEIAMGAYQPYHLATRQPARGQIHGFRMALWYEHLGMLDDVFQHPESMECVQKVNKIAEKYWDLYSSDDLEARNLPKGQPTYKTNPNRDVR

SEQ ID NO: 71847 - protein, 169 aa, Setaria italica
  Transcript Sequence Number=SeqID_5873
  Gene Ontology: Mol. function=protein transporter activity; Cellular component=plasma membrane; Biological process=intracellular protein transport
  Homolog annotation: Hit_ID=O50016; Match level="QueryCoverage=76%, HitCoverage=99%, E-value=1e-67, Identity=96%"; Hit description=AP-2 complex subunit sigma-1
  Pfam annotation: Domain name=Clat_adaptor_s; Domain location=37-168; Score=230.4; E_value=4.4e-66; Accession=PF01217.12; Description =Clathrin adaptor complex small chain
  Subcellular localization annotation: CTP_CleavageSite=42; ConfidenceScore=5.46e-01
TPPIRNRNVVSSSFRPPPSNRAPVLPDSQAFTSSSAMIRFILLQNRQGKTRLAKYYVPLEDSEKHKVEYDVHRLVVNRDPKFTNFVEFRTHKVIYRRYAGLFFSMCVDITDNELAYLECIHLFVEILDHFFSNVCELDLVFNFHKVYLILDEFILAGELQETSKRAIIF

SEQ ID NO: 71848 - protein, 142 aa, Setaria italica
  Transcript Sequence Number=SeqID_5874
  Gene Ontology: Mol. function=protein transporter activity; Cellular component=plasma membrane; Biological process=intracellular protein transport
  Homolog annotation: Hit_ID=O50016; Match level="QueryCoverage=90%, HitCoverage=99%, E-value=2e-67, Identity=97%"; Hit description=AP-2 complex subunit sigma-1
  Pfam annotation: Domain name=Clat_adaptor_s; Domain location=1-142; Score=251.4; E_value=2.1e-72; Accession=PF01217.12; Description =Clathrin adaptor complex small chain
MIRFILLQNRQGKTRLAKYYVPLEDSEKHKVEYEVHRLVVNRDPKFTNFVEFRTHKVIYRRYAGLFFSICVDITDNELAYLECIHLFVEILDHFFSNVCELDLVFNFHKVYLILDEFILAGELQETSKKAIIERMGELEKLE

SEQ ID NO: 71849 - protein, 306 aa, Setaria italica
  Transcript Sequence Number=SeqID_5875
  Gene Ontology: Mol. function=phosphoribosylaminoimidazolesuccinocarbox amide synthase activity; Cellular component=chloroplast; Biological process=purine nucleotide biosynthetic process
  Homolog annotation: Hit_ID=B4FY50; Match level="QueryCoverage=100%, HitCoverage=77%, E-value=1e-170, Identity=93%"; Hit description =Phosphoribosylaminoimidazole-succinocarboxamide synthase
  Pfam annotation: Domain name=SAICAR_synt; Domain location=3-262; Score=415.0; E_value=1.2e-121; Accession=PF01259.10; Description =SAICAR synthetase
VPGLRLAAKGKVRDVYESGEHLVLVTTDRQSAFDRVLASIPFKGQVLNETSLWWFNRTRHITPNAVVSSPDKNVTIAKRCTVFPVEFVVRGFVTGTTDTSLWTVYNKGVRNYCGNALPNGMVKNQKLSANILTPTTKAADHDVPVTPDEIIKSGLMSKDDFDEAGSKALSLFAYGQQVALENGLILVDTKYEFGKTADGTIVLIDEVHTPDSSRYWIANSYEDRFKSGLEPENVDKEFLRLWFKDNCNPYEDKVLPEAPEELVCELAWRYIFLFETITNAKFEIPETQEPIHERISRNVAQALRDL

SEQ ID NO: 71850 - protein, 78 aa, Setaria italica
  misc_feature (25)..(25): Xaa can be any naturally occurring amino acid
  Transcript Sequence Number=SeqID_5876
  Homolog annotation: Hit_ID=B6U055; Match level="QueryCoverage=98%, HitCoverage=33%, E-value=1e-27, Identity=82%"; Hit description=F-box domain containing protein
NAVANSCTDLKSIILWSCRHVTEAXGLVALVNNCRRLECINVGGMRVPPESFVGLLSISPALRIRSIPQILNAGVQVS

SEQ ID NO: 71851 - protein, 303 aa, Setaria italica
  Transcript Sequence Number=SeqID_5877
  Gene Ontology: Mol. function=transferase activity
  Homolog annotation: Hit_ID=Q5QPZ2; Match level="QueryCoverage=97%, HitCoverage=51%, E-value=1e-132, Identity=82%"; Hit description =Glycosyltransferase
  Pfam annotation: Domain name=DUF563; Domain location=198-303; Score= -105.1; E_value=0.017; Accession=PF04577.6; Description=Protein of unknown function (DUF563)
MKSGERPKLVRGLRQDSRRFRLLVIVVGFFLVSLTFVVISKPDAILFNLNGKLPVDQAPTSILIKQKVNSPPATSRKTSTDALPGGDPRVVDDEADVRPKGTKGEEEESRVLSEPDPTSGMTEHTPNKDGSGRKSDEETLGGGGDGEGKRKEGEERGHAAEKHKVTLPTVSNYTIHDTEDTENGKQDDGSSDLQGSKPLCDFSNFRANVCEMRGDVRVHPNATSIMFMEPAGSRRDELWKIKPYPRKGDEFCLSHITELTVKSSKVAPECTRYHDVPAVIFSLTGYYRKSDDFTDSCSYCTFY

SEQ ID NO: 71852 - protein, 179 aa, Setaria italica
  Transcript Sequence Number=SeqID_5878
AAAAAAERVLRLGKEVEVECGDISASQEDLLARAPFLGGGGGEEEAEVFSTPPLTQGQQGQQSQQGQGVQEEEEDAITMCSLPFTQLSPSVPSSEDKEDQALAVSKPRKPRVCTRKVRGARIRTPTPSPNQSPDNRSTSTNTSSIVDPLYRAVLMIPTNPAPPTAAEDLLALARNRGIF

SEQ ID NO: 71853 - protein, 157 aa, Setaria italica
  Transcript Sequence Number=SeqID_5879
MKLFMCFGGAAAVADDEAAAEAAARHRDQRGRSMSFRARFLSGKKGSGKKKPSAASPPPAKSKKRGMDADDDVYGLFGTASSVASSAPLSSAASLDSGYSSSSSSSSARSSTASSSSPSVSGVLFPPAAARRRAAKKGSSSSPVAGAAAVVLCLLMV

SEQ ID NO: 71854 - protein, 128 aa, Setaria italica
  misc_feature (11)..(11): Xaa can be any naturally occurring amino acid
  Transcript Sequence Number=SeqID_5880
  Gene Ontology: Mol. function=binding
  Homolog annotation: Hit_ID=Q2RAU4; Match level="QueryCoverage=100%, HitCoverage=7%, E-value=7e-58, Identity=81%"; Hit description=HEAT repeat family protein, expressed
LDLWNIYTESXSSAIVRNFCIVYIEMAFERLPTEEKGNIAPDFLTNISNVPAQHQGIILRLVTKAIGECNIHKVDDTTTSKYRAITESNDGLVFADFCFHTLLYQTPLQGIGCPAGLSVAQSDRVTGK

SEQ ID NO: 71855 - protein, 126 aa, Setaria italica
  misc_feature (119)..(119): Xaa can be any naturally occurring amino acid
  Transcript Sequence Number=SeqID_5881
  Homolog annotation: Hit_ID=B6SZI9; Match level="QueryCoverage=61%, HitCoverage=40%, E-value=2e-22, Identity=70%"; Hit description=2-Sep
MRLSCSFPPFSPCSDVALSLHMLDLDAWSDPVLVLLQVAFAAAVAVELTTGSSLFKKLDAMEIEEAAGVCVAVVACAAAFAWASSARNRIGQMFTLGCNAFVDSLIDNIVEALFSEGEXQDWSDDI

SEQ ID NO: 71856 - protein, 150 aa, Setaria italica
  misc_feature (32)..(32): Xaa can be any naturally occurring amino acid
  Transcript Sequence Number=SeqID_5882
  Homolog annotation: Hit_ID=B6SZI9; Match level="QueryCoverage=78%, HitCoverage=60%, E-value=4e-37, Identity=70%"; Hit description=2-Sep
LLVIITLVVIRIRPGRKDGSGAADSAGGSGAXLPFFASLADYIESSRKSQDFETISGRLAMVAFAAAVAVELTTGSSLFKKLDAMEIEEAAGVCVAVVACAAAFAWASSARNRIGQMFTLGCNAFVDSLIDNIVEALFSEGEPQDWSDDI

SEQ ID NO: 71857 - protein, 429 aa, Setaria italica
  misc_feature (187)..(187): Xaa can be any naturally occurring amino acid
  misc_feature (195)..(195): Xaa can be any naturally occurring amino acid
  misc_feature (412)..(412): Xaa can be any naturally occurring amino acid
  Transcript Sequence Number=SeqID_5883
  Gene Ontology: Mol. function=metal ion binding
  Homolog annotation: Hit_ID=B6U0S2; Match level="QueryCoverage=100%, HitCoverage=57%, E-value=1e-138, Identity=64%"; Hit description=PHD -finger family protein
RELRENWAALRDGSVGFAPRVPNGRGKDTGSTSAATDHQRHRQTTPATASYRNGAPATSAQQPRPSPEETSTSLGHSKKVSHKDARDAHKAWKRLEIAKTSGGRKISSKPASLSCSTPFSMGNRSTSYSPIDSILGQKNGNLPNKVSQHNRANCGQGTEMESTPPTEYTAERRSLPEDRHAWVHERXISFRNRIXNEESLNGKVDSSTQDQHVDQPLASSCSTGGLEKSKSGMLHPLKCSSSSGQSPVISSLQLGPRAGSQSTMMVNPEEPSAVCAATTNEIGSAATAEVRKSSRADRHERKRKHSSEKCSDEGPKRSRSACKIAKSEISSLAVRELKLLKIDKTHGSETFKEVARTATHTVLASCGFEHSPSQSLALSRPVCKHSPKVKAQMSSAIIDSCRECLRSSVKEXISLALLGRHMDQTGASC

SEQ ID NO: 71858 - protein, 93 aa, Setaria italica
  Transcript Sequence Number=SeqID_5884
  Gene Ontology: Mol. function=metal ion binding; Cellular component =integral to membrane; Biological process=ubiquitin-dependent protein catabolic process
  Homolog annotation: Hit_ID=Q69QB2; Match level="QueryCoverage=68%, HitCoverage=14%, E-value=1e-24, Identity=81%"; Hit description =Putative RING-H2 zinc finger protein
  Pfam annotation: Domain name=PHD; Domain location=18-63; Score=-1.2; E_value=0.036; Accession=PF00628.21; Description=PHD-finger
  Pfam annotation: Domain name=zf-C3HC4; Domain location=19-60; Score =37.7; E_value=4.7e-08; Accession=PF00097.17; Description=Zinc finger, C3HC4 type (RING finger)
  Pfam module annotation: Pfam domain module=PHD::zf-C3HC4; Domain location=18-63::19-60
MRYAEAKALRIGKGGALECAVCLSEFEDEERLRLLPKCSHAFHPDCIGEWLASHVTCPVCRCNLDPNKDTSSDEEPSFGSIPVASSISSEWLH

SEQ ID NO: 71859 - protein, 148 aa, Setaria italica
  Transcript Sequence Number=SeqID_5885
VQGNSYSSALQITESSRDGTEFTSAANTEHSGQSDFIFSASTFNQSTLHLQRRHNKKKGGGMCNHANSTQSLPSSAIGLARSEVSATQQCGDSAAQWTEYIKMEPNRVTISGGAECTKTENFEHHEDCETWRLRGNQAYAEGQLTKAE

SEQ ID NO: 71860 - protein, 109 aa, Setaria italica
  misc_feature (89)..(89): Xaa can be any naturally occurring amino acid
  Transcript Sequence Number=SeqID_5886
  Gene Ontology: Mol. function=ATP-dependent helicase activity
  Homolog annotation: Hit_ID=UPI0000162AB8; Match level="QueryCoverage =97%, HitCoverage=14%, E-value=6e-34, Identity=65%"; Hit description =RNA helicase, putative
MSRFWKPGSEKPSTLLVDDEEGGVVFLPSSTSSASSSGFGYASLERQRQRLPVYRYRKAILYLVERHATTIVVGETGSGKSTQIPQVLXYLKEAGWADGGRLIGCTQPR

SEQ ID NO: 71861 - protein, 82 aa, Setaria italica
  Transcript Sequence Number=SeqID_5887
  Gene Ontology: Mol. function=hydrolase activity
  Homolog annotation: Hit_ID=B9RPB1; Match level="QueryCoverage=95%, HitCoverage=28%, E-value=3e-20, Identity=53%"; Hit description=Sigma factor sigb regulation protein rsbq, putative
GMFGCIASIKRPDLFAHLVLVGASPRYMNSEDYEGGFDESDIEAMLASISSDFRRWAEGFVPLIVGSADPSAVERVARSFFA

SEQ ID NO: 71862 - protein, 315 aa, Setaria italica
  Transcript Sequence Number=SeqID_5888
  Gene Ontology: Mol. function=protein binding; Cellular component =clathrin adaptor complex; Biological process=intracellular protein transport
  Homolog annotation: Hit_ID=B6TBI2; Match level="QueryCoverage=100%, HitCoverage=75%, E-value=1e-177, Identity=94%"; Hit description=AP-3 complex subunit mu-2
  Pfam annotation: Domain name=Adap_comp_sub; Domain location=169-314; Score=104.7; E_value=3.1e-28; Accession=PF00928.13; Description =Adaptor complexes medium subunit family
MLQCIFLLSDSGEVMVEKQMAGHRVDRAICSWFWDYVLAHAAGDPSKVLQVVVSPTHYLFHIYRNGVTFLACTQVEMPPLMAIEFLSRVGDVLTDYLGDLNEDIIKDNFVIVYQILDEMMDNGFPLTTEPNILKEMIAPPNIVNKMLNVVTGKSSTLGSKLPDAAASYVPWRSTVVKDASNEVYVNIVEELDACVNREGALVKCEAYGDVQVNCSLAGVPELTMSFANPAIINDVTFHPCVRFKPWESNQVLSFVPPDGQFKLMSYRVKKLKKTPIYVKPQLTSDSGNCRVSVMVGIRNDPGKPIDSITVQFQLP

SEQ ID NO: 71863 - protein, 583 aa, Setaria italica
  Transcript Sequence Number=SeqID_5889
  Gene Ontology: Mol. function=electron carrier activity; Cellular component=mitochondrion; Biological process=metabolic process
  Homolog annotation: Hit_ID=Q9ST62; Match level="QueryCoverage=90%, HitCoverage=90%, E-value=0.0, Identity=69%"; Hit description =External rotenone-insensitive NADPH dehydrogenase
  Pfam annotation: Domain name=Pyr_redox; Domain location=224-331; Score=60.0; E_value=8.7e-15; Accession=PF00070.19; Description =Pyridine nucleotide-disulphide oxidore
  Pfam annotation: Domain name=Pyr_redox_2; Domain location=59-378; Score=132.6; E_value=1.2e-36; Accession=PF07992.6; Description =Pyridine nucleotide-disulphide oxidore
  Pfam annotation: Domain name=efhand; Domain location=384-412; Score =25.5; E_value=0.00021; Accession=PF00036.24; Description=EF hand
  Pfam module annotation: Pfam domain module=Pyr_redox::Pyr_redox _2::efhand; Domain location=224-331::59-378::384-412
MGFFFTSRAAARFLDGIGRPGVSTAALLLTAASGGGLVAYADSAAESAPEPSHDAPKKKVLVLGTGWAGTSFLKNLDCSQYEVKVISPRNYFAFTPLLPSVTCGTVEPRSIIEPIRRMFEKKSKDVTFYEAECFKIDASKKTVHCRSAVGTNLDGNGDFMLDYDYLVVALGATVNTFNTPGVLEHCHFLKEVEDAQKIRRSVIDCFEKASLPNISEEEKRKTLHFVVIGGGPTGVEFAAELHDFLVEDLVKLYPAIQEFVKITIIQSGEHILNMFDKRIAAFAELKFQRDGIEVATGFRVVKVSDDLITMKSKSVGEEVSVPYGMAVWSAGIGTRPVIMDFMQQIGQTNRRALATNEWLRVRECEGVYAIGDCATVGQRKIMDDISMVFKMADKDNSGTLTLKEINDVLEDICIRYPQVELYMKSMHMLDIADLIKDAIGDSHKESMVVDIEEFKKALSHVDSQVKSAPATAQVASQQGNYLAECFNKMEKCKEQPEGPLRMTGGSGRHFFRPFRYKHLGQFAPLGGEQAAAELPGDWVSMGHSTQWLWYSVYASKQVSWRTRVLVVSDWTRRFIFGRDSSRI

SEQ ID NO: 71864 - protein, 182 aa, Setaria italica
  Transcript Sequence Number=SeqID_5890
  Gene Ontology: Mol. function=zinc ion binding
  Homolog annotation: Hit_ID=Q7XDA5; Match level="QueryCoverage=82%, HitCoverage=41%, E-value=3e-41, Identity=58%"; Hit description=Zinc finger, C3HC4 type family protein, expressed
  Pfam annotation: Domain name=zf-C3HC4; Domain location=30-75; Score =50.8; E_value=5.4e-12; Accession=PF00097.17; Description=Zinc finger, C3HC4 type (RING finger)
MAASVSVTAAAAAKEAELARSDSFDDYEQCRVCQQKTEEPLVDLGCRCRGDLAKAHRTCIDVWFRTRGSNKCEICQQVAVNIPPPETQASTSYWVWRVDSTYGRGRGGRERGWFSPLWVAFAILIGGLLLDVLISVSLGVSALPVNIIIGVLIVLGLGTALRLALECCQEWGSRRNVSNMPR

SEQ ID NO: 71865 - protein, 34 aa, Setaria italica
  Transcript Sequence Number=SeqID_5891
SAETPRETDISTSNKRPPIRIANATQSGLNHPYT

SEQ ID NO: 71866 - protein, 295 aa, Setaria italica
  Transcript Sequence Number=SeqID_5892
  Gene Ontology: Mol. function=zinc ion binding
  Homolog annotation: Hit_ID=Q7XDA5; Match level="QueryCoverage=48%, HitCoverage=44%, E-value=2e-49, Identity=66%"; Hit description=Zinc finger, C3HC4 type family protein, expressed
  Pfam annotation: Domain name=zf-C3HC4; Domain location=150-195; Score= 50.8; E_value=5.4e-12; Accession=PF00097.17; Description=Zinc finger, C3HC4 type (RING finger)
MSSGADGSAPGAALDPGPGPEPDREPQPPLPQAPAATLVPAPQQEMVALQTEAPAVTIVMSRPGEEVQAPAPQQEVVALQTEAPAPAVTIVISRPGEEVQVPDAKGVSPASSPQADGVKAMAASVSVTAAAAAKEAELARSDSFDDYEQCRVCQQKTEEPLVDLGCRCRGDLAKAHRTCIDVWFRTRGSNKCEICQQVAVNIPPPETQASGWFSPLWVAFAILIGGLLLDVLISVSLGVSALPVNIIIGVLIVLGLGTALRLALECCQEWGSRRNVSNMPRLENIPPTGYHPAVV

SEQ ID NO: 71867 - protein, 192 aa, Setaria italica
  misc_feature (63)..(63): Xaa can be any naturally occurring amino acid
  misc_feature (87)..(87): Xaa can be any naturally occurring amino acid
  misc_feature (113)..(113): Xaa can be any naturally occurring amino acid
  Transcript Sequence Number=SeqID_5893
  Gene Ontology: Cellular component=cytoplasm
  Homolog annotation: Hit_ID=B9RHA2; Match level="QueryCoverage=90%, HitCoverage=38%, E-value=3e-58, Identity=59%"; Hit description=WD -repeat protein, putative
  Pfam annotation: Domain name=WD40; Domain location=149-187; Score =43.4; E_value=9.1e-10; Accession=PF00400.24; Description=WD domain, G-beta repeat
  Pfam annotation: Domain name=WD40; Domain location=21-58; Score=3.9; E_value=14; Accession=PF00400.24; Description=WD domain, G-beta repeat
  Pfam annotation: Domain name=WD40; Domain location=98-143; Score=4.4; E_value=12; Accession=PF00400.24; Description=WD domain, G-beta repeat
  Pfam module annotation: Pfam domain module=WD40::WD40::WD40; Domain location=149-187::21-58::98-143
CLHCQLEANYCLQDESKCRAGRVISKLNFDDAVTALDIDHTGQLIFAGDAQGYIYTVSVNSHXEGHYLELHKNKSSRSKSPISTIQXRTFSLVARCPVLLSCAQDGNLSFFRXIRASFCPLLSLEKGEFIVTGSEDANVYFYDLARPKNSCVNKLQGHGSPVIGVAWSHGENLLASSDSDGTVIVWKRAKNN

SEQ ID NO: 71868 - protein, 453 aa, Setaria italica
  misc_feature (197)..(197): Xaa can be any naturally occurring amino acid
  Transcript Sequence Number=SeqID_5894
  Gene Ontology: Mol. function=nucleotide binding; Cellular component =cytoplasm
  Homolog annotation: Hit_ID=B9RHA2; Match level="QueryCoverage=98%, HitCoverage=91%, E-value=1e-157, Identity=61%"; Hit description=WD -repeat protein, putative
  Pfam annotation: Domain name=WD40; Domain location=163-215; Score =19.8; E_value=0.012; Accession=PF00400.24; Description=WD domain, G -beta repeat
  Pfam annotation: Domain name=WD40; Domain location=219-257; Score =7.2; E_value=5.5; Accession=PF00400.24; Description=WD domain, G -beta repeat
  Pfam annotation: Domain name=WD40; Domain location=261-298; Score =3.9; E_value=14; Accession=PF00400.24; Description=WD domain, G-beta repeat
  Pfam annotation: Domain name=WD40; Domain location=308-351; Score =4.6; E_value=11; Accession=PF00400.24; Description=WD domain, G-beta repeat
  Pfam annotation: Domain name=WD40; Domain location=360-404; Score =4.2; E_value=12; Accession=PF00400.24; Description=WD domain, G-beta repeat
  Pfam annotation: Domain name=WD40; Domain location=410-448; Score =43.4; E_value=9.1e-10; Accession=PF00400.24; Description=WD domain, G-beta repeat
  Pfam module annotation: Pfam domain module=WD40::WD40::WD40::WD40::WD4 0::WD40; Domain location=163-215::219-257::261-298::308-351::360 -404::410-448
TNDPLPIDRTDPDFLSCVLQPPTPSSSRPDADYAALRRLLLRRKPPSALQHRMDWRCNGKGYVAYRNFLLRRIDGGSAHSTPSSSGRWAPSPGPALSEADSWGSIRDLRTNSGLSRTVSISSKQSDTERHVRFAEPAYSFVGMHCIFDSCKTSVTVLKFGRASSDLLAYGAADGSLTVCQVSEPPSVLQKLIGHSKXISQYIASCSLDKTVRVWEISKGTCIRVVYGVSSQLCICFHPVNNNLLLVGNANKEINAINFSTGRVISKLNFDDAVTALDIDHTGQLIFAGDAQGYIYTVSVNSHTGSLSRTHKNKSSRSKSPISTIQYRTFSLVARCPVLLSCAQDGNLSFFSIATDAKGYLTLICSLKLASRVQTIRASFCPLLSLEKGEFIVTGSEDANVYFYDLARPKNSCVNKLQGHGSPVIGVAWSHGENLLASSDSDGTVIVWKRAKNN

SEQ ID NO: 71869 - protein, 63 aa, Setaria italica
  Transcript Sequence Number=SeqID_5895
  Gene Ontology: Mol. function=double-stranded RNA binding; Cellular component=intracellular
  Homolog annotation: Hit_ID=Q1EPG5; Match level="QueryCoverage=60%, HitCoverage=6%, E-value=5e-15, Identity=97%"; Hit description=Double- stranded RNA-binding (DsRBD) domain-containing protein
WACVLQGNLLRNAVEVEVLTLFTPQDETGIYKNLLQETAHRAGLKLPVYTTVRSGPGHTPVFT

SEQ ID NO: 71870 - protein, 351 aa, Setaria italica
  misc_feature (68)..(68): Xaa can be any naturally occurring amino acid
  Transcript Sequence Number=SeqID_5896
  Homolog annotation: Hit_ID=B9SQJ1; Match level="QueryCoverage=84%, HitCoverage=91%, E-value=4e-89, Identity=57%"; Hit description=Non -imprinted in Prader-Willi/Angelman syndrome region protein, putative
  Pfam annotation: Domain name=DUF803; Domain location=4-308; Score =583.7; E_value=2e-172; Accession=PF05653.6; Description=Protein of unknown function (DUF803)
MMAEVSDNAKGLALAVASSAFIGVSFILKKIGLLRAAKCGARAGGGGYTYLSEPLWWAGMTTMLTLAXLLGEVANFVAYIFAPAVLVTPLGALSIIVSSVLAHFVLKERLEKLGVLGCVSCIVGSVVVVVHAPEEHMPNSVEEIWNLATQPGFVAYAVTTLLVVGTLVLFFERRYGQTNILIYLGICSSMGSLTVVSIKAIGVAIKLTLDGVNQAAYPYTWFFLMVAVTCGVSQINYLNKALDTFNLAIVSPIYYVMFTTLTIVASGIMFKDWAGQSLSSIASELCGLITILSGTILLHAAEEGANNSAALLPWPLDKGSISWCISLSSDNLLKNVEEDYFAALQNSPAPV

SEQ ID NO: 71871 - protein, 121 aa, Setaria italica
  Transcript Sequence Number=SeqID_5897
  Gene Ontology: Mol. function=metallopeptidase activity; Cellular component=vacuole; Biological process=proteolysis
  Homolog annotation: Hit_ID=Q8LF32; Match level="QueryCoverage=96%, HitCoverage=24%, E-value=1e-51, Identity=81%"; Hit description =Aspartyl aminopeptidase-like protein
MAAVAPVVSDLVDFLNASPTAFHAVDEAKRRLKAAGFVQLSEREEWAGLEPGRKYFFTRNHSTIVAFAIGAKYVAGNGFHIIGAHTDSPCLKLKPVSKVTKGGYLEVGVQTYGGGLWYTWF

SEQ ID NO: 71872 - protein, 132 aa, Setaria italica
  misc_feature (69)..(69): Xaa can be any naturally occurring amino acid
  Transcript Sequence Number=SeqID_5898
  Gene Ontology: Mol. function=actin binding; Cellular component =cytoskeleton; Biological process=cytoskeleton organization and biogenesis
  Homolog annotation: Hit_ID=B9SI12; Match level="QueryCoverage=89%, HitCoverage=12%, E-value=1e-11, Identity=35%"; Hit description =Villin 1-4, putative
KDYYLFFAWSGKNSVKEDSMATASLVSNLADSVKGHPVVAQVFEGREPGLFFSIFKSLIIFKLSPFHSXGGRSAAYRNHVLQKSDRNGSHQRDGVALFRVQGLKHDCMQAIQVDLVSSDKKIRELPTISVIA

SEQ ID NO: 71873 - protein, 212 aa, Setaria italica
  misc_feature (22)..(22): Xaa can be any naturally occurring amino acid
  misc_feature (131)..(131): Xaa can be any naturally occurring amino acid
  Transcript Sequence Number=SeqID_5899
  Gene Ontology: Mol. function=actin binding; Cellular component =cytoskeleton; Biological process=cytoskeleton organization and biogenesis
  Homolog annotation: Hit_ID=B9SI12; Match level="QueryCoverage=99%, HitCoverage=22%, E-value=6e-49, Identity=47%"; Hit description =Villin 1-4, putative
  Pfam annotation: Domain name=Gelsolin; Domain location=41-122; Score =8.3; E_value=0.071; Accession=PF00626.14; Description=Gelsolin repeat
GREKVAAIFKHQGYDVTEIPEXPQQLISCDGSLKVWLVDHGCTTLLSTEEQEQLYTGDSYIIQYSYVEDGKDYYLFFAWSGKNSVKEDSMATASLVSNLADSVKGHPVVAQVFEGREPGLFFSIFKSLIIXNYKREFKGGRSAAYRNHVLQKSDRNGSHQRDGVALFRVQGLKHDCMQAIQVDLVASSLNSSHCYILQDGGSYFTWLGSLSL

SEQ ID NO: 71874 - protein, 610 aa, Setaria italica
  misc_feature (221)..(221): Xaa can be any naturally occurring amino acid
  misc_feature (243)..(243): Xaa can be any naturally occurring amino acid
  Transcript Sequence Number=SeqID_5900
  Gene Ontology: Mol. function=actin binding; Cellular component =cytoskeleton; Biological process=cytoskeleton organization and biogenesis
  Homolog annotation: Hit_ID=B9SI12; Match level="QueryCoverage=84%, HitCoverage=53%, E-value=1e-126, Identity=46%"; Hit description =Villin 1-4, putative
  Pfam annotation: Domain name=Gelsolin; Domain location=1-63; Score =12.9; E_value=0.025; Accession=PF00626.14; Description=Gelsolin repeat
  Pfam annotation: Domain name=Gelsolin; Domain location=287-357; Score= 4.4; E_value=0.17; Accession=PF00626.14; Description=Gelsolin repeat
  Pfam annotation: Domain name=Gelsolin; Domain location=392-470; Score= 23.4; E_value=0.00093; Accession=PF00626.14; Description=Gelsolin repeat
  Pfam module annotation: Pfam domain module=Gelsolin::Gelsolin::Gelsoli n; Domain location=1-63::287-357::392-470
EILNSDRSYILDCGTEIFLWMGMTTLVSERKTSVTALEDYVHSQGRSSHTVIMTEGHETVEFKLHFQHWPKIVGMKLYNAGREKVAAIFKHQGYDVTEIPEDKPQQLISCDGSLKVWLVDHGCTTLLSTEEQEQLYTGDSYIIQYSYVEDGKDYYLFFAWSGKNSVKEDSMATASLVSNLADSSKRASSCGQLLQPYTTENFTCHHTSVHSVVNSFANVIXAQVFEGREPGLFFSIFDYFSNXKSLIIFKGGRSAAYRNHVLQKSDRNGSHQRDGVALFRVQGLKHDCMQAIQVDLVASSLNSSHCYILQDGGSYFTWLGSLSLPSDHNILDRMMNKLCPLKQSLLVREGSEPDDFWKALGGRSEYSKEKHVKGWPADPHLYACRFEQGLLKVKEIFSFCQDDLATEETLILDCNDEIYVWVGLHSDVTSKEQALDIAKMFLQDGILQNRRSIETTVYIVTEGDEPAFFTNFFNWDSSKQSSMAGNSFERKLALLKGLSPKLETPDRSMRRPSTRRPGVSSEPTTPEQQQQQPSVARRAFGSASTWRLARERSPATGLPPSPTLSQSPRSRSSSSTSTPTAVARRLFPASLHASETVHALSNGNGTARRR

SEQ ID NO: 71875 - protein, 80 aa, Setaria italica
  misc_feature (56)..(56): Xaa can be any naturally occurring amino acid
  Transcript Sequence Number=SeqID_5901
MEEICCEVAAGSRRRTGKGEGVGDAGSRAARRRRMEIRRLRVVAEEQAAKRRRSWXGCTYGEEEEDAVRDPAPRYGVTSV

SEQ ID NO: 71876 - protein, 55 aa, Setaria italica
  Transcript Sequence Number=SeqID_5902
MEAVQPVLSEKTNPLLGRSSSPSGVTLLQPHADSGAGLYNGAYSFLDTTRPCATR

SEQ ID NO: 71877 - protein, 276 aa, Setaria italica
  misc_feature (61)..(61): Xaa can be any naturally occurring amino acid
  misc_feature (144)..(144): Xaa can be any naturally occurring amino acid
  Transcript Sequence Number=SeqID_5903
  Gene Ontology: Mol. function=DNA binding; Biological process=protein modification process
  Homolog annotation: Hit_ID=Q9LL45; Match level="QueryCoverage=87%, HitCoverage=33%, E-value=2e-50, Identity=48%"; Hit description =Telomere binding protein-1
VHPSTARDKGSRPQYIGSHRIRKLLASKVRKAARNKICGGMPSKKVCGGMSNKGSKLNLCXKKIPARRQKVQRTIFKKKKPAHHATSFAKEMLTGAAGTSFSTEGRNKSSGSDNYHVKLRIKSFNIPEVFINVPENATIGSLKXGLRVGVLLQGKDIQDDNKTLRQAVICHGEKLNNIDFTLECERQQDSPSGVIIAEEMDFVSADIVEPLARMKYEEPFPGTKGGGGNQQPIKAYPNDSFRWFVVSIRSLFVNGLTRCISKLASHNPCCSFRLER

SEQ ID NO: 71878 - protein, 165 aa, Setaria italica
  Transcript Sequence Number=SeqID_5904
TGSRIRPLPHHHILMSPTQQVFTDGEEIQTPHPSSLSSCRSVRGGARQPVSWVLSFAIPSAVLFHVADGRQNGSLRRLDGEVACRSSSALDAQPASPPTGAGGSIWTGGNRSLPDRDGGGKSRGSGQFARGCDGRRVPSLLPDLAGGRRAQSPKDEEGMGIGERN

SEQ ID NO: 71879 - protein, 150 aa, Setaria italica
  misc_feature (91)..(91): Xaa can be any naturally occurring amino acid
  Transcript Sequence Number=SeqID_5905
  Gene Ontology: Mol. function=DNA binding
  Homolog annotation: Hit_ID=Q9LL45; Match level="QueryCoverage=94%, HitCoverage=23%, E-value=6e-20, Identity=42%"; Hit description =Telomere binding protein-1
RRKKNEMCAFDLLASVAGTLLTDQDSSSYVPNTSGAATSYARNRKSVKEEYFDEILHLKNVAVKKDCGSGCVVGSGGVSALPRKGNDGLAXNSLTRNEDESVLKSLTVKSNMLARDSSVRCTRPCEISRGLGIICEYGAFWSIPSRILKL

SEQ ID NO: 71880 - protein, 261 aa, Setaria italica
  misc_feature (43)..(43): Xaa can be any naturally occurring amino acid
  misc_feature (70)..(70): Xaa can be any naturally occurring amino acid
  Transcript Sequence Number=SeqID_5906
  Gene Ontology: Mol. function=DNA binding; Biological process=protein modification process
  Homolog annotation: Hit_ID=Q9LL45; Match level="QueryCoverage=99%, HitCoverage=40%, E-value=6e-74, Identity=55%"; Hit description =Telomere binding protein-1
  Pfam annotation: Domain name=Myb_DNA-binding; Domain location=162 -212; Score=21.3; E_value=0.004; Accession=PF00249.23; Description =Myb-like DNA-binding domain
KTVMDVVNSIMQGGLRVGVLLQGKDIQDDNKTLRQAGICHDKXLNNIDFTLECEGGQDSPSGVIIAEEMXFVSADIVEPLARMKYEEPFPGTKGGGGNQQPIKAYPNDSFAGCVHRPVEMASQDASASLQAIIPVAASDLNALAIVPICKTRRSEFGQRRTRMPFSVGEVEALVEAVEQLGTGRWRDVKMHAFDGADHRTYVDLKDKWKTLVHTASISPQQRRGEPVPQELLDRVLSAQAYWSQQQAKLHGKAPLPEICLA

SEQ ID NO: 71881 - protein, 659 aa, Setaria italica
  misc_feature (315)..(315): Xaa can be any naturally occurring amino acid
  Transcript Sequence Number=SeqID_5907
  Gene Ontology: Mol. function=DNA binding; Biological process=protein modification process
  Homolog annotation: Hit_ID=Q9LL45; Match level="QueryCoverage=96%, HitCoverage=96%, E-value=1e-173, Identity=52%"; Hit description =Telomere binding protein-1
  Pfam annotation: Domain name=Myb_DNA-binding; Domain location=561 -611; Score=26.6; E_value=0.0001; Accession=PF00249.23; Description =Myb-like DNA-binding domain
  Subcellular localization annotation: CTP_CleavageSite=23; ConfidenceScore=5.10e-01
MVMRKRSDSGSRGRRTATMPRVPNSARGKRTTRKKKDEMCAFDLLATVAGTLLADQDNSNNVPNTSGAAKAKNKKAVKEEHRDEILPLNNMAVEKDCCNGCVVGSGGICAFPRQANNCSAENSSTINEAGSMLESLTVKSNMLVRDSLVSCTRPYETSCGLGIIPEFGAHGTHHPGSSSSAEAEQMHQAEPKVVRRQADGHAAVLHSLFDSVDLDVRPPALVSSDSSSGVLLCSHDKEHKAASLCQVEMQHTADRDDDENSSGCTHPSTTGNEGYKPHFLGNHRIRKLLASKVRKAARNKTSGGMSSKGSKLNFXREKIPTTRQKVQRTNFKRKKLARGTTPFAKGMLTGATGTSFRMQGQNKSCGSEDYHVKLRIKSFNIPELFVEIPETATIGSLKRTVMDVVTSIMEGGLRVGVLLQGKSIQDDSKTLRQAGICHGEKLNNIDFTLECEGGQDSPSGVVKPEQMDLLSADVVEPLARMKCEEHFPETVGDDNQQRTPPYRSRSLSDLYSVVHPVEMASQDTSTSSQAIVPVAPSDDGALAIVPLCSVRRSETGQRRTRMPFTVDEVAALVEAVELIGTGRWRAVKMHAFEHVEHRTYVDLKDKWKTLVHTASISPQQRRGEPVPQELLDRVLAAQAYWSEHPKIRGKAPLPAICSA

SEQ ID NO: 71882 - protein, 197 aa, Setaria italica
  Transcript Sequence Number=SeqID_5908
KYISSFWFMVSHNHRLPDYPNRHISNLPRTCLSLEQVLNQAAAVSQSTCCRSVKKMYCSTALASSDHRRNDSSPARRRPCGTIASPQHRLSSSSETASCRCSAAPRRVANSATAPEAPRHPCARKPPSQPFLRRWRSHMVRWLILARLGTHGGACGQVVADAGRGRSSSGAATAARGKQQCASTYAAARWSSACGVG

SEQ ID NO: 71883 - protein, 127 aa, Setaria italica
  Transcript Sequence Number=SeqID_5909
  Gene Ontology: Mol. function=protein serine/threonine kinase activity; Cellular component=Golgi apparatus; Biological process =protein amino acid phosphorylation
  Homolog annotation: Hit_ID=Q8LKU7; Match level="QueryCoverage=93%, HitCoverage=13%, E-value=4e-66, Identity=100%"; Hit description =Putative serine/ threonine kinase
  Pfam annotation: Domain name=Pkinase; Domain location=2-125; Score= -40.8; E_value=4.6e-06; Accession=PF00069.17; Description=Protein kinase domain
  Pfam annotation: Domain name=Pkinase_Tyr; Domain location=1-124; Score=-129.2; E_value=3.9e-05; Accession=PF07714.9; Description =Protein tyrosine kinase
  Pfam module annotation: Pfam domain module=Pkinase::Pkinase_Tyr; Domain location=2-125::1-124
IGITEEPLDESQIAYICREALKGLAYLHSIFKVHRDIKGGNILLTEQGEVKLGDFGVAAQLTRTMSKRNTFIGTPHWMAPEVIQESRYDGKVDVWALGVSAIEMAEGMPPRSTVHPMRVRAVLLSAC

SEQ ID NO: 71884 - protein, 742 aa, Setaria italica
  misc_feature (29)..(29): Xaa can be any naturally occurring amino acid
  Transcript Sequence Number=SeqID_5910
  Gene Ontology: Mol. function=protein serine/threonine kinase activity; Cellular component=cell cortex; Biological process=protein amino acid phosphorylation
  Homolog annotation: Hit_ID=Q8LKU7; Match level="QueryCoverage=96%, HitCoverage=87%, E-value=0.0, Identity=82%"; Hit description =Putative serine/ threonine kinase
  Pfam annotation: Domain name=Pkinase; Domain location=161-415; Score =284.6; E_value=2.3e-82; Accession=PF00069.17; Description=Protein kinase domain
  Pfam annotation: Domain name=Pkinase_Tyr; Domain location=161-415; Score=122.5; E_value=1.4e-33; Accession=PF07714.9; Description =Protein tyrosine kinase
  Pfam module annotation: Pfam domain module=Pkinase::Pkinase_Tyr; Domain location=161-415::161-415
  Subcellular localization annotation: CTP_CleavageSite=37; ConfidenceScore=5.31e-01
YLRPPTEASISAPSRQARRPASARSPFLXDLRRSSPRAAEEDPYSTFVVHSTARSGVASSSPRESASGTFIRHSGGSSSPRESFSGTFIRHTSGGSSPHEVASGSGGGFGSSFWSPAVEQSEELRQPSPLMQQQQQQNSRRKPSVSSVPDSVTREDPSTKYELLHELGKGSYGAVYKARDLRTQELVAVKIISLTEGEEGYEDIRGEIEMLQQCSHPNVVRYFGSYQGEEYLWIIMEYCGGGSVADLIGITEEPLDESQIAYICREALKGLAYLHSIFKVHRDIKGGNILLTEQGEVKLGDFGVAAQLTRTMSKRNTFIGTPHWMAPEVIQESRYDGKVDVWALGVSAIEMAEGMPPRSTVHPMRVIFMISSEPAPMLEDKEKWSLLFHDFIAKCLTKDPRLRPAASEMVKHKFIEKCNTGASKMLAKIKDAKRIRATLAAQSQLDGPDDEMLDATVRINEDYGETVPANSQQHMNQATYNDGQAGDFGTMIVHSEDGDEVAESPIFPRTEFIPGLGSINSFTHDPKRAELISKFWAENTTDSDANKDRDLDDHVDMQQPKAIPTSTGTVKKHIGAEGTMRRHDSQISSSPGLANPTMKLNNSPSRKAFSVQDKLWSIYAAGNTVPIPFLKAIDISPLALVSENDAGNGLAGSSTNDALEAVRELFSGDGQAKKGRKGQNEVPLPPGVHHRLTTCPTLMNLAQALAYHKTCYEDMPLQDSQATQEQQTIQNLCDTLRTILRL

SEQ ID NO: 71885 - protein, 167 aa, Setaria italica
  Transcript Sequence Number=SeqID_5911
  Homolog annotation: Hit_ID=Q9M9M1; Match level="QueryCoverage=80%, HitCoverage=16%, E-value=1e-23, Identity=43%"; Hit description =F10A16.3 protein
SFKGSSDYSCASSVTDEEGREMKAPGVVARLMGLDALPTSGVPEPYCTPFRDTRSFRDSQSLKRSPEYSMNDQFSHVPRRVDGYMRKPLDLRAQKMPSSPIERFQIEALPPRSAKPLPMSHHRLLSPIKNPGFSSARNAAQIMEEAAKILQPRTQSSSREKICSFSP

SEQ ID NO: 71886 - protein, 70 aa, Setaria italica
  Transcript Sequence Number=SeqID_5912
MANKKMVAAVAALLLVAMALAPASAMDCKAGCAELKDSPLGTADCEKKCAEIAASTGSRDPWKESKWDIP

SEQ ID NO: 71887 - protein, 47 aa, Setaria italica
  Transcript Sequence Number=SeqID_5913
VSNGCMPDESTYIILLEALAYEGLLNEAAELLGDLCSRGVIGKTVRA

SEQ ID NO: 71888 - protein, 159 aa, Setaria italica
  misc_feature (141)..(141): Xaa can be any naturally occurring amino acid
  Transcript Sequence Number=SeqID_5914
  Gene Ontology: Mol. function=protein serine/threonine kinase activity; Cellular component=extracellular region; Biological process=xenobiotic metabolic process
  Homolog annotation: Hit_ID=B6SSJ6; Match level="QueryCoverage=84%, HitCoverage=57%, E-value=1e-50, Identity=76%"; Hit description =Protein P21
  Pfam annotation: Domain name=Thaumatin; Domain location=27-155; Score= 185.4; E_value=1.6e-52; Accession=PF00314.9; Description=Thaumatin family
MASILHLLPLVLLAAAAADAATFTVTNNCQYTVWAAAVPGGGRQLDNGQTWTVDVPAGTTGGRVWARTGCSFDGSGNGRCDTGDCGGVLQCSGYGQPPNTLAEYGLNKFQDLDFFDISLVDGFNVPMDFLPAGGGAGCPKXGGPRCRADVTAQCPRPAA

SEQ ID NO: 71889 - protein, 40 aa, Setaria italica
  Transcript Sequence Number=SeqID_5915
KLHVLLNIAKNNAYIESHMHVICCMKLDRYASLYISCALT

SEQ ID NO: 71890 - protein, 199 aa, Setaria italica
  misc_feature (37)..(37): Xaa can be any naturally occurring amino acid
  misc_feature (59)..(59): Xaa can be any naturally occurring amino acid
  Transcript Sequence Number=SeqID_5916
  Gene Ontology: Mol. function=signal transducer activity; Biological process=G-protein coupled receptor protein signaling pathway
  Homolog annotation: Hit_ID=Q2R941; Match level="QueryCoverage=95%, HitCoverage=23%, E-value=4e-83, Identity=76%"; Hit description=G -protein alpha subunit, putative, expressed
TRLACALVSLPVPPVNSDEPKDENHYSSRSVPNYFDXKKVQKLLILGSPGAGTSTIFKXRFTHEELESIKLMIQSNMFKYLGILLEGRERFEEEALAVSNHTNSEDEDPHQDDNKPTSSNSCIYSINAKLKKFSDWLLDIIAMGDLDAFFPAATREYAPVVDELWNDPAIQATYKRKDELHFLPDAAEVFPEDKGLIRK

SEQ ID NO: 71891 - protein, 802 aa, Setaria italica
  Transcript Sequence Number=SeqID_5917
  Gene Ontology: Mol. function=signal transducer activity; Biological process=G-protein coupled receptor protein signaling pathway
  Homolog annotation: Hit_ID=Q2R941; Match level="QueryCoverage=88%, HitCoverage=82%, E-value=0.0, Identity=78%"; Hit description=G -protein alpha subunit, putative, expressed
  Pfam annotation: Domain name=G-alpha; Domain location=362-778; Score =8.5; E_value=1.4e-19; Accession=PF00503.12; Description=G-protein alpha subunit
  Subcellular localization annotation: CTP_CleavageSite=45; ConfidenceScore=5.15e-01
RCQRRRPGGAGRRALPVRANPPPPPRVAQAQRAHHSSAAQARGSSASANSAAARDEEYSDDDDEDSRSPRSLQGHKAAARPAAPDGRRAQVVTFGVAAAAEDSKYESKEFDEVSEQYVAVTRVEKKGRTCHRCGKSKWETKESCIVCDARYCSHCLLRAMGSMPEGRKCITCIGQPIDEAKRSKLGKGSRILSRLLSPLEVKQILKVEKECQANQLRPEQLIVNGFPLHDEEMADLLSCQRPPGNLKPGRYWYDKESGLWGKEGEKPDRVISTNLNFNGKLQPDASNGTAQVYINGREITKLELRILKIAKVQCPRDTHFWVYHDGGYEEEGQNNIKGKIWESPLTRLACALVSLPVPPVNSDEPKDENHYSSRSVPNYFDHKKVQKLLILGSPGAGTSTIFKQAKLLYGSRFTHEELESIKLMIQSNMFKYLGILLEGRERFEEEALAVSNHTNSEDEDPHQDDNKPTSSNSCIYSINAKLKKFSDWLLDIIAMGDLDAFFPAATREYAPVVDELWNDPAIQATYKRKDELHFLPDAAEYFLSRAIEVSSNEYEPSEKDVIYAEGVTQGNGLSFIDFTLDDRSPMSESFGDSHEAYSQPVNKYQLIRVSAKGMNEGCKWVEMFEDVRMVIFSVALSDYDQLASPGSSGCRSLVNKMIQSRDLFEATVRQPCFRDTPFVLVLNKYDLFEEKIGRSPLSAACEWFGDFCPLRTHHNNQSLAQQAFYYVAMKFKDLYAASTGGRKLFVWQARARDRPTVDEAFRYIREVLRWEDERDAAGYCPEESFYSTTELSSSRLIAADAA

SEQ ID NO: 71892 - protein, 247 aa, Setaria italica
  misc_feature (15)..(15): Xaa can be any naturally occurring amino acid
  Transcript Sequence Number=SeqID_5918
  Gene Ontology: Cellular component=chloroplast
  Homolog annotation: Hit_ID=B9S4F5; Match level="QueryCoverage=99%, HitCoverage=65%, E-value=2e-32, Identity=27%"; Hit description =Pentatricopeptide repeat-containing protein, putative
  Pfam annotation: Domain name=PPR; Domain location=153-187; Score =20.1; E_value=0.0095; Accession=PF01535.12; Description=PPR repeat
  Pfam annotation: Domain name=PPR; Domain location=51-85; Score=16.9; E_value=0.083; Accession=PF01535.12; Description=PPR repeat
  Pfam module annotation: Pfam domain module=PPR::PPR; Domain location =153-187::51-85
EEVQQMHAFTLKTGXVCYTNVCNALMSVYSEFGSLLCAESIFKTMQSPDIVSWAGVMAGCVKNLQYERACSYFRELSDAGAPLDQHCIATVINACTSLQDLDKGMQIHSLALKLGLLLADFVSASLVNMYAKCHSIEGAVELFSHALFPRNLVVTNAMLSGYSRNFMPEKALLLFYREYQFGLCPDQFTLSIVLGACSDIGAKKAGEQIHGYLVKYGSGYLDVIIGNAIIDFYVKCGCIASACRFFI

SEQ ID NO: 71893 - protein, 167 aa, Setaria italica
  Transcript Sequence Number=SeqID_5919
RRQEHSSEEAGKEASSEQSTPCSCRASQDSKLQRQSGMSRGGLDLKLHLSPPAAAAAASPASSSDEEWSSSSPSSCLSSEGEREPPQRGHHGLQWSDSPEATSMVLAACPRCLMYVMLSEADPRCPRCRSPVLLDFLHHAGAGARGNANGGREGGNYGCNSTPGGSG

SEQ ID NO: 71894 - protein, 192 aa, Setaria italica
  Transcript Sequence Number=SeqID_5920
  Gene Ontology: Mol. function=rRNA binding; Cellular component =ribosome; Biological process=ribosome biogenesis
  Homolog annotation: Hit_ID=B6U897; Match level="QueryCoverage=89%, HitCoverage=87%, E-value=2e-81, Identity=85%"; Hit description =Structural constituent of ribosome
  Pfam annotation: Domain name=Ribosomal_L10; Domain location=21-113; Score=-16.3; E_value=0.02; Accession=PF00466.12; Description =Ribosomal protein L10
MTSLRSSAASLAPSIRGAAEMVRQEALRRELEGCQLLAGIWCHGLTVAQLRSIRASLPPTARLVVTKNSDMAAAVAGTRWEALKPCARGMNAWLFVRSDEIPPALKPYRDFQKEWKLQLNDFTGAVYEGRLYGPDDFAQLEAMPTRAQSYQYLLGCLQMPAVNLLAVLRARQEAMLAQEGEAAAPATEPAVK

SEQ ID NO: 71895 - protein, 130 aa, Setaria italica
  misc_feature (44)..(44): Xaa can be any naturally occurring amino acid
  Transcript Sequence Number=SeqID_5921
  Gene Ontology: Mol. function=nucleotidyltransferase activity; Cellular component=plasma membrane; Biological process=metabolic process
  Homolog annotation: Hit_ID=Q7XLC8; Match level="QueryCoverage=90%, HitCoverage=20%, E-value=1e-59, Identity=92%"; Hit description =OSJNBa0070C17.21 protein
HLQHFIARYHLAEKKIPSIHGYTTGLKLEQFIFDAFTYSPSTAXFEVMREEEFAPVKNANGATYDTPDSARLMLLRLHSRWVVAAGGFLTHSVPLYMTGVEVSPLCSYAGENLEAICRGRTFHAPSEISF

SEQ ID NO: 71896 - protein, 485 aa, Setaria italica
  Transcript Sequence Number=SeqID_5922
  Gene Ontology: Mol. function=nucleotidyltransferase activity; Cellular component=cytoplasm; Biological process=metabolic process
  Homolog annotation: Hit_ID=Q7XLC8; Match level="QueryCoverage=96%, HitCoverage=82%, E-value=0.0, Identity=76%"; Hit description =OSJNBa0070C17.21 protein
  Pfam annotation: Domain name=UDPGP; Domain location=53-469; Score =36.0; E_value=4.9e-16; Accession=PF01704.10; Description=UTP- -glucose-1-phosphate uridylyltransferase
LSAPGPVGRWGAAPPQALLERMKDYGQEGAFALWDDLSPEDRELLVRDIESIDLSRIDRIIRRSLGSQGMPLPAVEPVPESSVSKVEDRSPEDKERWWKKGLKAISEGKLAVVLLAGGQGTRLGSSDPKGCFNIGLPSGKSLFQLQAERILCVQKLAAQSSESPSNTVPIHWYIMTSPFTDAATRKFFETRRYFGLDADQVTFFQQGTLPCISADGRFIMETPYKVAKAPDGNGGVYAALKSKKLMEDMAARGVKYVDCYGVDNALVRVADPTFLGYFIDKGVSSAAKVVRKAYPQENVGVFVQRGRGGPLSVVEYSEMDAAMTTEINQSTGRLRYCWSNICLHMFTLDFLNQVANSLEKDSVYHLAEKKIPSIHGYTTGLKLEQFIFDAFTYSPSTALFEVMREEEFAPVKNANGATYDTPDSAKLMLLRLHSRWVVAAGGFLTHSVPLYMTGVEVSPLSSYAGENLEAICRGRTFHAPSEISF

SEQ ID NO: 71897 - protein, 96 aa, Setaria italica
  Transcript Sequence Number=SeqID_5923
MLTIHSTNKLQLVWNVISCVLLFYAFFTSDSPHKIHLSKKPFNFTISASRLLHEIGVNSGLLEEKVDTRQRLAENTHSITNITANARSGWSIVNEE

SEQ ID NO: 71898 - protein, 139 aa, Setaria italica
  misc_feature (106)..(106): Xaa can be any naturally occurring amino acid
  Transcript Sequence Number=SeqID_5924
  Gene Ontology: Mol. function=nucleic acid binding; Biological process= transposition, DNA-mediated
  Homolog annotation: Hit_ID=Q9FFD3; Match level="QueryCoverage=95%, HitCoverage=21%, E-value=4e-56, Identity=78%"; Hit description =Mutator-like transposase-like protein
  Pfam annotation: Domain name=MuDR; Domain location=6-50; Score=16.6; E_value=6.5e-05; Accession=PF03108.7; Description=MuDR family transposase
DYYRSYVKSDRSRFIAKCSKEGCPWRVHIAKCPGVPTFTVRTLHGEHTCEGVRDLHHQQATVGWVARSVEARLRDNPQIKPKEILQDIREQHGVLSCYSILLSRSXWRGKERSMAAVNGTLEDGYRLLPAYCEQIGKTN

SEQ ID NO: 71899 - protein, 141 aa, Setaria italica
  Transcript Sequence Number=SeqID_5925
  Homolog annotation: Hit_ID=B6TD34; Match level="QueryCoverage=42%, HitCoverage=15%, E-value=6e-24, Identity=90%"; Hit description =SWIB/MDM2 domain containing protein
  Pfam annotation: Domain name=DEK_C; Domain location=3-58; Score=31.9; E_value=2.5e-06; Accession=PF08766.3; Description=DEK C terminal domain
MVSDQEIASCVESLLRGSAGGPGEASLAAVLQQAEAKLGMDLSHKAQFIRDQMDLFFGPRLQPQPKPQAAPPPPQAVCPAAAVPQPQVLPQAQAQAQPPAQQIQTQPQQQQLAALQPQLIFQAMPQLPAVATVPAVSSPPA

SEQ ID NO: 71900 - protein, 130 aa, Setaria italica
  Transcript Sequence Number=SeqID_5926
  Gene Ontology: Mol. function=DNA binding; Cellular component=nucleus; Biological process=regulation of transcription
  Homolog annotation: Hit_ID=C3SAA3; Match level="QueryCoverage=66%, HitCoverage=27%, E-value=2e-41, Identity=88%"; Hit description=Myb
  Pfam annotation: Domain name=Myb_DNA-binding; Domain location=18-63; Score=52.1; E_value=2.2e-12; Accession=PF00249.23; Description=Myb -like DNA-binding domain
GRSCRLRWLNYLRPDVKRGDFTADEQLLILDLHSRWGNRWSKIAAQLPGRTDNEIKNYWRTRVQKHAKQLNCDVNSARFKDAMRFLWTAAAISGGAAVSTTLITVPEVMTMMMNNENDDDRSPCSAVTTA

SEQ ID NO: 71901 - protein, 55 aa, Setaria italica
  Transcript Sequence Number=SeqID_5927
ESHTKHNEKHNQQLNHAYKHSHVGIKMHSTFIKIVDKLLTSSRRTKDSEVELLSS

SEQ ID NO: 71902 - protein, 162 aa, Setaria italica
  Transcript Sequence Number=SeqID_5928
  Gene Ontology: Mol. function=hydrolase activity, hydrolyzing O -glycosyl compounds; Biological process=carbohydrate metabolic process
  Homolog annotation: Hit_ID=Q60DY5; Match level="QueryCoverage=98%, HitCoverage=41%, E-value=1e-59, Identity=66%"; Hit description =Putative beta-glucosidase
  Pfam annotation: Domain name=Glyco_hydro_1; Domain location=1-162; Score=-301.3; E_value=0.0016; Accession=PF00232.10; Description =Glycosyl hydrolase family 1
FRELGDRVAHWTTILEPNIIAQGSYDMGAVPPGRCSNPFGVGRNCTVGNSSVEPYLFLHHSLLAHSSAVRLYREKYQSVQKGVVGINLYSLWIYTLTDSAEDIQATERANDYLFGSILHPFLFGDYPESMKKAAGTRLPSFTSYESELVTGAFDFIGLNLLN

SEQ ID NO: 71903 - protein, 43 aa, Setaria italica
  Transcript Sequence Number=SeqID_5929
LGGAIGSDRDVAKLLAAEEALRTLKSTTDPQIKKYLRPVRCNG

SEQ ID NO: 71904 - protein, 63 aa, Setaria italica
  Transcript Sequence Number=SeqID_5930
MGSSEAPLLIPHPAGKEDAEAEGGKSCLWWRRCGGACSEGWWGEATAEAGRLASLAAPMIAVA

SEQ ID NO: 71905 - protein, 627 aa, Setaria italica
  misc_feature (342)..(342): Xaa can be any naturally occurring amino acid
  misc_feature (414)..(414): Xaa can be any naturally occurring amino acid
  Transcript Sequence Number=SeqID_5931
  Gene Ontology: Mol. function=protein serine/threonine kinase activity; Cellular component=intrinsic to membrane; Biological process=regulation of transcription, DNA-dependent
  Homolog annotation: Hit_ID=Q6K246; Match level="QueryCoverage=99%, HitCoverage=96%, E-value=1e-174, Identity=55%"; Hit description =Loricrin-like
MDHTLEHSGYTGKSLNSNNLGNWTTLRPIVMDSRACPTQVDVLSQDRTNILSRGIKRKWIDLSLGLGNTSSSSDSSKQSMGTCCTLSSAAKDRDDGSSIDLDLNFQFSLCNEGTSKLGTNACNAKTAPEKQPVTDLQLSLTVGPAESVVTNVDLNMGSQNHTVLFQSYNMASVPTVDEGSTSARWKSGGKLLPYLLPVGSNQSHGPLPMSPAIQLPKSSVACSSGVSSPQQRCTSTKICSQPGCSKGARGSSGRCISHGGGRRCQREGCKRGAEGKTIFCKSHGGGRRCEHLGCTKSAEGRTDFCIAHGGGRRCRNEGCKKAARGKSGLCIKHGWGKRCQKXNCTKSAEGQSGFCIAHGGGRRCKHEGCTKGAQGSTNFCKSHGGGKRCTHPNCSKGAEGSTLFCKGHGGGKRXCGAEGCPKSVHGGTEFCVAHGGGKRCVVPGCTKSARGRTDCCVRHGGGKRCQFAGCSKSAQGSTDFCKAHGGGKRCLWGQPGSELGTSSTPCERFSRGKNGLCVAHNALVEDSRVRGGETLGAMGSPGPVVNNMVSHGSISRTADGEAFNPFNFSERASNILRPAETLPQAPISAPEGRVRGGNIVAILSTSMNLGKQLSYNAEASTSAGNWL

SEQ ID NO: 71906 - protein, 55 aa, Setaria italica
  Transcript Sequence Number=SeqID_5932
LVTSKQKHMATRKNSHEGTKHPFRITLNSEDLLCQIVNNSVFYRPKMLESVQVYK

SEQ ID NO: 71907 - protein, 142 aa, Setaria italica
  Transcript Sequence Number=SeqID_5933
  Gene Ontology: Biological process=pollen maturation
  Homolog annotation: Hit_ID=Q66VB0; Match level="QueryCoverage=100%, HitCoverage=13%, E-value=6e-43, Identity=55%"; Hit description=No pollen
RRMITRDGAKQLDSEGRLKFHFQSFVSFNVAHKTIMALWKARSLTPEQKVQLVEEESETEDFQNEEGGSFLGIEDAKMSAVFSSTKPFDVSTLMSIFEGGPLEHRVMERVGCVDYSVTEWEPVRADVYQRQVHHKFDKKSER

SEQ ID NO: 71908 - protein, 109 aa, Setaria italica
  Transcript Sequence Number=SeqID_5934
PARRRGGHGQRRRIPSQGGAAERAATANPGANLLLPAGGEQPRRVPAPGDTRAVPGAGASAAEPVGRRDRARRRHVVEALPGAGRPTTGRRLPGLLQHVEVLTEINQAR

SEQ ID NO: 71909 - protein, 107 aa, Setaria italica
  Transcript Sequence Number=SeqID_5935
QTRLNSATAAVAMETLVGHGRSHVGQGRPFMDLFGRLPKRLRHRLRWEPQPNGCLQNSFEIEAHLELELFLLRVGSRKTWLPAAPPCRHAQGCSYSSKLQILQLKCH

SEQ ID NO: 71910 - protein, 141 aa, Setaria italica
  Transcript Sequence Number=SeqID_5936
AEANRPMASCGSSLSACTRMQLLLEIANTTAKMPLIGGAASRSDALRLAAGGPCIKGALCRGRSTTARRWHVGARARPLVGEQRRIRPTLTPSQWLGVAQHHGERRARLSVGAAQRGRSKLTGRALLDKGKNRGKNINFTQ

SEQ ID NO: 71911 - protein, 120 aa, Setaria italica
  Transcript Sequence Number=SeqID_5937
  Subcellular localization annotation: CTP_CleavageSite=24; ConfidenceScore=5.48e-01
QQLQQQQQQQQQQQQQQQMGSPLQQAQVGSPAGSQQSMMMQQQQQQQISPQQMGQHAAMSPQLSSGTLQQMSNNVANPVATPGPPPSPQLSSQTHGSVNSIANSPMEQLQGANKGGPGSM

SEQ ID NO: 71912 - protein, 135 aa, Setaria italica
  misc_feature (16)..(16): Xaa can be any naturally occurring amino acid
  Transcript Sequence Number=SeqID_5938
  Gene Ontology: Mol. function=protein binding; Cellular component =cytoplasm; Biological process=protein amino acid autophosphorylation
  Homolog annotation: Hit_ID=Q8S5N8; Match level="QueryCoverage=92%, HitCoverage=10%, E-value=2e-63, Identity=87%"; Hit description =Putative F-box protein family
  Pfam annotation: Domain name=Mob1_phocein; Domain location=1-118; Score=159.8; E_value=8.3e-45; Accession=PF03637.9; Description =Mob1phocein family
TAGPKYEYRWADGVQXKKPIEVAAPKYVEYLMDWIEGQLDDESIFPQKLGTPFPPNFKEVVKTIFKRLFRVYAHIYHSHFQKIVSLKEEAHLNTCFKHFILFTNEFGLIDKKELAPLQELIESILVLPSVLLSKE

SEQ ID NO: 71913 - protein, 216 aa, Setaria italica
  misc_feature (161)..(161): Xaa can be any naturally occurring amino acid
  Transcript Sequence Number=SeqID_5939
  Gene Ontology: Mol. function=protein binding; Cellular component =cytoplasm; Biological process=protein amino acid autophosphorylation
  Homolog annotation: Hit_ID=Q8GYX0; Match level="QueryCoverage=100%, HitCoverage=100%, E-value=1e-116, Identity=93%"; Hit description=Mps one binder kinase activator-like 1
  Pfam annotation: Domain name=Mob1_phocein; Domain location=29-206; Score=379.6; E_value=5.5e-111; Accession=PF03637.9; Description =Mob1phocein family
MSLFGLGRNQKTFRPKKSAPSGSKGAQLRKHIDATLGSGNLREAVRLPPGEDINEWLAVNTVDFFNQVNLLFGTLTEFCTPESCPTMTAGPKYEYRWADGVQIKKPIEVAAPKYVEYLMDWIEGQLDDESIFPQKLGTPFPPNFKEVVKTIFKRLFRVYAXHIYHSHFQKIVSLKEEAHLNTCFKHFILFTNEFGLIDKKELAPLQELIESIIVPY

SEQ ID NO: 71914 - protein, 156 aa, Setaria italica
  Transcript Sequence Number=SeqID_5940
  Subcellular localization annotation: CTP_CleavageSite=38; ConfidenceScore=5.52e-01
RGDCNGGLHSFPPLDPSLPRPSCVSSSSNPPLALLPCSRSQVRPFFASLLHETMIIQRCLNSPGSWNLGKISILANVSASEYGCIRNRGNDTMRLQFSFLFPSSLGTFPAGPTTMFVFSRTSLHMYCMPVMVYLCAFALMTSSSSHSNLAAIKVQN

SEQ ID NO: 71915 - protein, 193 aa, Setaria italica
  Transcript Sequence Number=SeqID_5941
  Gene Ontology: Mol. function=catalytic activity; Cellular component =chloroplast
  Homolog annotation: Hit_ID=B6T3C7; Match level="QueryCoverage=100%, HitCoverage=58%, E-value=2e-98, Identity=91%"; Hit description =Protein phosphatase 2C
  Subcellular localization annotation: CTP_CleavageSite=34; ConfidenceScore=5.40e-01
MAASTASRLSTPRFLAPPASPHPPIRRSRFSPVRAAKLEAVLSIGTHLIPHPRKAASGGEDAFFANSDAGGVFAIADGVSGWAEKDVNPALFSRELMRNSSNFLNDEEVNRDPQTLLMKAHAATSSIGSATVIIAMLEKTGTLKIASVGDCGLKVIRKGQVMFSISPQEHYFDCPYQISSESAGQTYQDALVC

SEQ ID NO: 71916 - protein, 40 aa, Setaria italica
  Transcript Sequence Number=SeqID_5942
LERIREDSSEITSPSQGAAAATVVNRMLGGTNRLNLYREI

SEQ ID NO: 71917 - protein, 225 aa, Setaria italica
  Transcript Sequence Number=SeqID_5943
MDKAIMSNQAGKVLKKGKKKQAKDELDRQKQAEKKRRRLEKALANSAAIISELEKKKQKKKEEQQRLDEEGAAIAEAVALHVLIGEDSDEPCHLMLNKHRRCNHWDPSAGFEFTVDAQATDIYPSDGLICASHATFAPKGRWADWGIGQPMPSWGEVRDLQGPYYQGTFHQSVNCPGFIAAQAVSSLKIREDSSEITSPSQGAAAATVVNRMLGGTNRLNLYREI

SEQ ID NO: 71918 - protein, 56 aa, Setaria italica
  Transcript Sequence Number=SeqID_5944
TCDPVLANWTIVELLIALMFRFFSKLDLHGFAICQSPCLNEKLQITFSYAVAYCKK

SEQ ID NO: 71919 - protein, 378 aa, Setaria italica
  misc_feature (55)..(55): Xaa can be any naturally occurring amino acid
  Transcript Sequence Number=SeqID_5945
  Gene Ontology: Mol. function=Rab GTPase activator activity; Cellular component=chloroplast; Biological process=regulation of GTPase activity
  Homolog annotation: Hit_ID=Q15042; Match level="QueryCoverage=53%, HitCoverage=22%, E-value=2e-14, Identity=30%"; Hit description=Rab3 GTPase-activating protein catalytic subunit
EEAEEELERFDDFTIASSWERFISEIEAICRQWLADGPKILMQKGAEIVPPFENXYLIKRELKHGKRVYSMEYHFMKSAKGKNSYWDDDTHSMQLSFGVDEFLMIAPLSASGVVLDDPESTKLLSSVAIALSNCGSNWPAFVPVHDPSRKAHIGIQNLGTVFTRRFEADRIGSQVPIRLMHLEGLHELFLSKFVLSSTDFPSRVKVHFSMKLTYRTPEYDYDNETLDSEAAESLTENEVASHPKNQWDDDCPWAEWYSAEDPVKGFELTAIWGERTFEETLEMAEVENASSFDADSWFLHPVVSQYMVDDSIGKFVGFASQLHLLVNAYESSAEAQFLEDFVADTSGQDNSKSTTTVPPPSVIDRVMKDLFSDEAGNS

SEQ ID NO: 71920 - protein, 88 aa, Setaria italica
  misc_feature (66)..(88): Xaa can be any naturally occurring amino acid
  Transcript Sequence Number=SeqID_5946
ILFAAEVQSNRLLNRQQTFWNFFSPLILCSQHVPRLSQLVKYQRLCNFSCHIINKYIFMNKKKKKXXXXXXXXXXXXXXXXXXXXXXX

SEQ ID NO: 71921 - protein, 102 aa, Setaria italica
  misc_feature (45)..(45): Xaa can be any naturally occurring amino acid
  misc_feature (69)..(69): Xaa can be any naturally occurring amino acid
  misc_feature (101)..(101): Xaa can be any naturally occurring amino acid
  Transcript Sequence Number=SeqID_5947
  Gene Ontology: Mol. function=DNA binding; Cellular component =mitochondrion
  Homolog annotation: Hit_ID=B9RNC6; Match level="QueryCoverage=94%, HitCoverage=18%, E-value=2e-18, Identity=51%"; Hit description =Pentatricopeptide repeat-containing protein, putative
CVIVFTQLMDWMVNARGMHMSHTNHAIRLDLIYKVRGLEAAENYXASLPDPAKNHRTYGALLNCYCSAXKMEEKAIDIYRKMDELGICSSRLPINNLMSLXM

SEQ ID NO: 71922 - protein, 162 aa, Setaria italica
  misc_feature (39)..(39): Xaa can be any naturally occurring amino acid
  Transcript Sequence Number=SeqID_5948
  Homolog annotation: Hit_ID=Q259K5; Match level="QueryCoverage=98%, HitCoverage=22%, E-value=3e-33, Identity=47%"; Hit description =H0402C08.8 protein
LGGPSRRDYWLAITREVLQVNRFIRKFNLGDVQRAEALXKAILGILRYSAVKEAFHIAPSHFKTTLTFSLAEKLPKGDMVLEALYNNYFQLLDSSLSHLATDSAVDKMPENHSVPFSLYALSRMGFLLLKRKDETEKEISFCAVCFGVTKSLEAALEESICY

SEQ ID NO: 71923 - protein, 254 aa, Setaria italica
  misc_feature (235)..(235): Xaa can be any naturally occurring amino acid
  Transcript Sequence Number=SeqID_5949
  Gene Ontology: Mol. function=protein dimerization activity; Cellular component=nucleus; Biological process=regulation of transcription, DNA-dependent
  Homolog annotation: Hit_ID=B6SXT0; Match level="QueryCoverage=94%, HitCoverage=36%, E-value=6e-64, Identity=58%"; Hit description=DNA binding protein
  Pfam annotation: Domain name=bZIP_1; Domain location=153-216; Score =48.9; E_value=2e-11; Accession=PF00170.13; Description=bZIP transcription factor
  Pfam annotation: Domain name=bZIP_2; Domain location=153-207; Score =26.9; E_value=8.3e-05; Accession=PF07716.7; Description=Basic region leucine zipper
  Pfam module annotation: Pfam domain module=bZIP_1::bZIP_2; Domain location=153-216::153-207
FDPDLPLAGGDLPLEFAGDDGLDFDLPVDFSIDDFLLRSPDRGGDGDDSGEGSAAGSGPAASSSASPATSAANSAVANAGDREVKHEDSDEGRSGAAPSWSLKRKQASPGASSDGVKCRRSGDGELSPSVSASASASRAAAEDSDERGAGGEEEDKRRTARLMRNRESAQLSRQRKKRYVEELEEKVKSMHSVINDLNSKISFIVAENATLRQQLGGGGVSAPPPGVYPPPPLPXIHFPWVPGYAMRPHGSHVP

SEQ ID NO: 71924 - protein, 135 aa, Setaria italica
  Transcript Sequence Number=SeqID_5950
  Homolog annotation: Hit_ID=B6SXW9; Match level="QueryCoverage=100%, HitCoverage=29%, E-value=4e-52, Identity=77%"; Hit description =Carboxyl-terminal proteinase
GDVIHCVPLHRQPAFDHPKLRGQKPEDEPAVRPMTKGGGGAAGEEEEESVFFRQAWSDGGERCPEGTVPIRRTTAQDVLRSGSARRFGMKPRASNVRRDSTSSGHEHAVGYVTGDQFYGAKASLNVWSAKVASAA

SEQ ID NO: 71925 - protein, 116 aa, Setaria italica
  Transcript Sequence Number=SeqID_5951
  Gene Ontology: Mol. function=protein serine/threonine kinase activity; Biological process=protein amino acid phosphorylation
  Homolog annotation: Hit_ID=B6SVX9; Match level="QueryCoverage=98%, HitCoverage=17%, E-value=2e-27, Identity=55%"; Hit description=TAK14
RTWATFVNCSQPIENNGMYKPVACLSTNSSFIYVITGLLSSSAENFELSCGYLAMTPLGAAFTVVPNNASYADIVKLISKGFAVRFSYMDGDFRQCLAEATSEFHEPTDNTGIKDR

SEQ ID NO: 71926 - protein, 405 aa, Setaria italica
  misc_feature (109)..(109): Xaa can be any naturally occurring amino acid
  Transcript Sequence Number=SeqID_5952
  Gene Ontology: Mol. function=protein serine/threonine kinase activity; Biological process=protein amino acid phosphorylation
  Homolog annotation: Hit_ID=B6SVX9; Match level="QueryCoverage=100%, HitCoverage=60%, E-value=1e-134, Identity=60%"; Hit description=TAK14
  Pfam annotation: Domain name=Pkinase; Domain location=267-405; Score=- 49.4; E_value=1.5e-05; Accession=PF00069.17; Description=Protein kinase domain
  Pfam annotation: Domain name=Pkinase_Tyr; Domain location=267-403; Score=-82.4; E_value=3e-08; Accession=PF07714.9; Description=Protein tyrosine kinase
  Pfam module annotation: Pfam domain module=Pkinase::Pkinase_Tyr; Domain location=267-405::267-403
ESNLGAQSSCLLPRWSHHALEYMFVKRSRRSVELAPSRWRTTWATFVNCSQPIENNGMYKPVACLSTNSSFIYVMIGSSSSSAENFELSCGYLAMTPLGGAGPLGVLRXTVVPNNASYADIVKLISKGFAVRFPYMDGDFRQCLAEATSEFHEPTDNTGIKDRIVSILFVDSSFWRCIIEQFRFPHSAAALVLIGPAIAFPTAMWFLKFIIVICRFVLSPLAMFTFLAHMYWKTRITMDAVEKFLRMQQILNGPLRYAYTDIVAITSHFREKLGQGGYGSVYKGVLLPGNVHIAVKMLENSNCNGEEFISEVATIGRIHHVNVVRLVGFCSEEMRRALLYEYMPNGSLDKYIFSSEKRFSWDKLDEIALGIARGINYLHQGCDMRILHFDIKPHNILLDNNFVPK

SEQ ID NO: 71927 - protein, 106 aa, Setaria italica
  Transcript Sequence Number=SeqID_5953
  Gene Ontology: Mol. function=hydrogen ion transmembrane transporter activity; Cellular component=integral to membrane; Biological process=proton transport
  Homolog annotation: Hit_ID=B1XN58; Match level="QueryCoverage=86%, HitCoverage=21%, E-value=1e-11, Identity=39%"; Hit description =Proton extrusion protein pcxA
IGKSPPLSDEEVWSELREKALELRDDWRLENRKAFANIWSDMVYGIALFLIICFNQSKVAMLKFTGYKLLNNISDSGKAFLIILISDILLGYVILISFLLNRRSVH

SEQ ID NO: 71928 - protein, 346 aa, Setaria italica
  Transcript Sequence Number=SeqID_5954
  Gene Ontology: Mol. function=hydrogen ion transmembrane transporter activity; Cellular component=integral to membrane; Biological process=proton transport
  Pfam annotation: Domain name=CemA; Domain location=191-346; Score= -128.2; E_value=0.0037; Accession=PF03040.6; Description=CemA family
MTFMSCSAVRSNGIALRFLIEDRIRRRSACAYKMFTLGSQRRRVRHPVVFATKRRRPKKWERPWWKTFFYDGNEDEESLAGWREVDELSEEIGNDQELSENEKFETWRRKAEAIVELREAQQDAMNAEERSWEDWISGGSTSGGGDGGGGASMLDQITDDPAEIMRDKSVIEVFRDPLNEDYDDMLFEDRVFMYASTNSAKFLAILIVVPWVIDFLVHDYVMLPFLERYVQKVPLAAELLDVRRSQKLQMVKDLNIEKARYRLEVEIGKSPPLSDEEVWSELREKALELRDDWRLENRKAFANIWSDMVYGIALFLIICFNQSKVSIYQKSMSISFSVHFQLRKYL

SEQ ID NO: 71929 - protein, 229 aa, Setaria italica
  Transcript Sequence Number=SeqID_5955
  Gene Ontology: Mol. function=protein serine/threonine kinase activity; Cellular component=plasma membrane; Biological process =protein amino acid phosphorylation
  Homolog annotation: Hit_ID=B6SWS1; Match level="QueryCoverage=100%, HitCoverage=35%, E-value=3e-92, Identity=73%"; Hit description =BRASSINOSTEROID INSENSITIVE 1-associated receptor kinase 1
  Pfam annotation: Domain name=LRR_1; Domain location=112-134; Score =14.4; E_value=0.46; Accession=PF00560.25; Description=Leucine Rich Repeat
  Pfam annotation: Domain name=LRR_1; Domain location=40-62; Score =12.6; E_value=1.2; Accession=PF00560.25; Description=Leucine Rich Repeat
  Pfam annotation: Domain name=LRR_1; Domain location=64-86; Score =18.7; E_value=0.025; Accession=PF00560.25; Description=Leucine Rich Repeat
  Pfam annotation: Domain name=LRR_1; Domain location=88-110; Score =14.6; E_value=0.42; Accession=PF00560.25; Description=Leucine Rich Repeat
  Pfam annotation: Domain name=SKG6; Domain location=174-209; Score =10.8; E_value=0.043; Accession=PF08693.2; Description=Transmembrane alpha-helix domain
  Pfam module annotation: Pfam domain module=LRR_1::LRR_1::LRR_1::LRR _1::SKG6; Domain location=112-134::40-62::64-86::88-110::174-209
VDPCSWTMVTCSPENLVTGLEAPSQNLSGILSPSIGNLTNLETVLLQNNNINGLIPAEIGKLTKLKTLDLSSNHFSGEIPSSVGHLESLQYLRLNNNTLSGAFPSSAANLSHLIFLDLSYNNLSGPIPGSLTRTYNIVGNPLICAATTEQDCYGSLPMPMSYSLNNTQGTVMPAKAKSHKVAIAFGTATGCISLLFLAVGLLFWWRHRRNRQTLFNVDDQHIENVNLGN

SEQ ID NO: 71930 - protein, 403 aa, Setaria italica
  Transcript Sequence Number=SeqID_5956
  Gene Ontology: Mol. function=protein serine/threonine kinase activity; Cellular component=plasma membrane; Biological process =protein amino acid phosphorylation
  Homolog annotation: Hit_ID=B6SWS1; Match level="QueryCoverage=96%, HitCoverage=62%, E-value=0.0, Identity=87%"; Hit description =BRASSINOSTEROID INSENSITIVE 1-associated receptor kinase 1
  Pfam annotation: Domain name=Pkinase; Domain location=83-352; Score =112.4; E_value=1.5e-30; Accession=PF00069.17; Description=Protein kinase domain
  Pfam annotation: Domain name=Pkinase_Tyr; Domain location=83-352; Score=111.6; E_value=2.7e-30; Accession=PF07714.9; Description =Protein tyrosine kinase
  Pfam annotation: Domain name=SKG6; Domain location=12-47; Score=10.8; E_value=0.043; Accession=PF08693.2; Description=Transmembrane alpha -helix domain
  Pfam module annotation: Pfam domain module=Pkinase::Pkinase _Tyr::SKG6; Domain location=83-352::83-352::12-47
  Subcellular localization annotation: CTP_CleavageSite=56; ConfidenceScore=5.10e-01
MTTLSKGTVMPAKAKSHKVAIAFGTATGCISLLFLAVGLLFWWRHRRNRQTLFNVDDQHIENVNLGNMKRFQFRELQAATESFSSKNILGKGGFGIVYRGQLPDGTLVAVKRLKDGNAAGGEAQFQTEVEMISLAVHRNLLRLYGFCMTTSERLLVYPYMSNGSVALRLKGKPPLDWTTRKRIALGAARGLLYLHEQCDPKIIHRDVKAANILLDDCCEAIVGDFGLAKLLDHRESHVTTAVRGTVGHIAPEYLSTGQSSEKTDVFGFGILLLELITGQTALEFGKSSNQKGAMLDWVKKMHQEKQLDILVDKGLGSKYDRIELEEMVQVALLCTQFLPGHRPKMSEVVRMLEGDGLAERWEASQHTDSHKFKVPEFTFSRCYSDLTDDSSLLVQAVELSGPR

SEQ ID NO: 71931 - protein, 124 aa, Setaria italica
  Transcript Sequence Number=SeqID_5957
  Gene Ontology: Mol. function=ATP-dependent helicase activity; Cellular component=intracellular; Biological process=RNA processing
  Homolog annotation: Hit_ID=Q10HL3; Match level="QueryCoverage=73%, HitCoverage=6%, E-value=2e-32, Identity=72%"; Hit description =Endoribonuclease Dicer homolog 2a
KRIADSVEALIGAYLSAGGEQAAYLFLISLGMDIEFHKMPVERKITIKSEEFINLRSLEVMLGYDFNDPSLLVEAMTHGSYQIAGTTACYQVDLEASQQFSACAKLLSFFEKFLKPRIFIFAFS

SEQ ID NO: 71932 - protein, 144 aa, Setaria italica
  misc_feature (28)..(28): Xaa can be any naturally occurring amino acid
  misc_feature (96)..(96): Xaa can be any naturally occurring amino acid
  Transcript Sequence Number=SeqID_5958
  Gene Ontology: Mol. function=ATP-dependent helicase activity; Cellular component=intracellular; Biological process=RNA processing
  Homolog annotation: Hit_ID=Q10HL3; Match level="QueryCoverage=90%, HitCoverage=9%, E-value=1e-56, Identity=81%"; Hit description =Endoribonuclease Dicer homolog 2a
  Pfam annotation: Domain name=Ribonuclease_3; Domain location=15-128; Score=105.4; E_value=1.9e-28; Accession=PF00636.18; Description =RNase3 domain
RFYRVIYLQLHAPVQRLEFLGDAVLDHXQLGLILQTRQYPECTPELLTDLRSASVNNNCYAHAAVKAGLHKHILHSSSALHKRMADYLENFKQSFXGPSHGWEAGIGLPKVLGDVIESIAGAIYIDSKCDKEVVWRSMKRLLEP

SEQ ID NO: 71933 - protein, 272 aa, Setaria italica
  misc_feature (37)..(37): Xaa can be any naturally occurring amino acid
  Transcript Sequence Number=SeqID_5959
  Gene Ontology: Mol. function=ATP-dependent helicase activity; Cellular component=intracellular; Biological process=RNA processing
  Homolog annotation: Hit_ID=Q10HL3; Match level="QueryCoverage=100%, HitCoverage=19%, E-value=1e-118, Identity=74%"; Hit description =Endoribonuclease Dicer homolog 2a
  Pfam annotation: Domain name=Ribonuclease_3; Domain location=162-272; Score=128.3; E_value=2.4e-35; Accession=PF00636.18; Description =RNase3 domain
  Pfam annotation: Domain name=Ribonuclease_3; Domain location=5-90; Score=8.4; E_value=0.0011; Accession=PF00636.18; Description=RNase3 domain
  Pfam module annotation: Pfam domain module=Ribonuclease _3::Ribonuclease_3; Domain location=162-272::5-90
GLANRDEENLISNAALCQLACSNNLVGYIRGEAFNPXTWIIPGIDHDACSDSKLILLSPNMYSVRKMSIKSKRIADSVEALIGAYLSAGGEQAAYLFLISLGMDIEFHKMPVERKITIKSEEFINLRSLEVMLGYDFNDPSLLVEAMTHGSYQIAGTTACYQRLEFLGDAVLDHIFTDYFYRQYPECTPELLTDLRSASVNNNCYAHAAVKAGLHKHILHSSSALHKRMADYLENFKQSFSGPSHGWEAGIGLPKVLGDVIESIAGAIYIDS

SEQ ID NO: 71934 - protein, 480 aa, Setaria italica
  misc_feature (39)..(39): Xaa can be any naturally occurring amino acid
  Transcript Sequence Number=SeqID_5960
  Gene Ontology: Mol. function=ATP-dependent helicase activity; Cellular component=intracellular; Biological process=RNA processing
  Homolog annotation: Hit_ID=Q10HL3; Match level="QueryCoverage=94%, HitCoverage=32%, E-value=0.0, Identity=67%"; Hit description =Endoribonuclease Dicer homolog 2a
  Pfam annotation: Domain name=PAZ; Domain location=189-346; Score =22.4; E_value=1.6e-05; Accession=PF02170.14; Description=PAZ domain
  Pfam annotation: Domain name=Ribonuclease_3; Domain location=385-472; Score=67.9; E_value=3.8e-17; Accession=PF00636.18; Description=RNase3 domain
  Pfam module annotation: Pfam domain module=PAZ::Ribonuclease_3; Domain location=189-346::385-472
ERRVRCGQEAVARAESSSYILEPTNLGVPYQDGPDIVVXNTKKKQPNYFPEQLVDSWLSFSRLGLYHCYEISLEWCSKTANSPAEIVLAVKCDMGSDFISNSFKMWGVQDHVSVTMRYIGIIHLNQEQVIVARRFQTAILSLLISNNQLEVRDSIKNSLEMQASPGVVYLVLPLVSGKIDWCSIKFSASPMLEVTNKDMRHCHSCKDTNLVQTKDGPLCQCMLQHAIVCTPHNGMLYAVSGFLDLNANSLLHRSDGSVVSYKTHFKTRHGLDLTCEDQPLLAASMLLKVRNFLHKCNYKNEKESTSTNAVELPPELCVVVMSPVSSDTLRSFLFIPSIMYRIQCMLLSVKLKIQLSQRMGQFDIPALKILEALTTKKCQEEFSQESLETLGDSFLKYITTQHLFNKYRHQHEGLLTEMKKNLISNAALCQLACSNNLVGYIRGEAFNPKTWIIPGIDHDACSDSKLILLSPNMYSVRKNV

SEQ ID NO: 71935 - protein, 244 aa, Setaria italica
  misc_feature (34)..(34): Xaa can be any naturally occurring amino acid
  Transcript Sequence Number=SeqID_5961
  Gene Ontology: Mol. function=ATP-dependent helicase activity; Cellular component=intracellular; Biological process=RNA processing
  Homolog annotation: Hit_ID=Q10HL3; Match level="QueryCoverage=89%, HitCoverage=14%, E-value=2e-84, Identity=67%"; Hit description =Endoribonuclease Dicer homolog 2a
  Pfam annotation: Domain name=Ribonuclease_3; Domain location=36-147; Score=141.1; E_value=3.5e-39; Accession=PF00636.18; Description =RNase3 domain
  Pfam annotation: Domain name=dsrm; Domain location=174-237; Score =27.2; E_value=6.7e-05; Accession=PF00035.17; Description=Double -stranded RNA binding motif
  Pfam module annotation: Pfam domain module=Ribonuclease_3::dsrm; Domain location=36-147::174-237
NDPSLLVEAMTHGSYQIAGTIAILSSNLLTAPCXVQRLEFLGDAVLDHIFTDYFYRQYPECTPELLTDLRSASVNNNCYAHAAVKAGLHKHILHSSSALHKRMADYLENFKQSFSGPSHGWEAGIGLPKVLGDVIESIAGAIYIDSKCDKEVVWRSMKRLLEPLATPDTLDVDPVKELQELCGREAYSITYNVIREDRVTSVVAEVQTKGTAFKAARTGLSKLDAKKLAAKAVLQDMKAADGAK

SEQ ID NO: 71936 - protein, 105 aa, Setaria italica
  Transcript Sequence Number=SeqID_5962
LLLPAKRGGKKKIILRLPLAAVGHDDNTIHYRQGPLLEADEKENPSVLATWSLVNFASLMMREICRSHLLWPFSSATNSVAACSIDFSAVKKTCTLVLNNGVRFP

SEQ ID NO: 71937 - protein, 60 aa, Setaria italica
  Transcript Sequence Number=SeqID_5963
  Gene Ontology: Mol. function=secondary active sulfate transmembrane transporter activity; Cellular component=integral to membrane; Biological process=sulfate transport
  Homolog annotation: Hit_ID=B9SFG4; Match level="QueryCoverage=75%, HitCoverage=8%, E-value=4e-11, Identity=73%"; Hit description =Sulfate transporter, putative
LQACKIFIALTEVLTVVCSFCQMQEGIAVGRSFAMFKNYNIDGNKEMTAIGTMNIVGSLT

SEQ ID NO: 71938 - protein, 556 aa, Setaria italica
  Transcript Sequence Number=SeqID_5964
  Gene Ontology: Mol. function=secondary active sulfate transmembrane transporter activity; Cellular component=integral to membrane; Biological process=sulfate transport
  Homolog annotation: Hit_ID=B9H8C3; Match level="QueryCoverage=93%, HitCoverage=79%, E-value=0.0, Identity=73%"; Hit description =Sulfate/bicarbonate/oxalate exchanger and transporter sat-1
  Pfam annotation: Domain name=Sulfate_transp; Domain location=177-487; Score=513.1; E_value=3.6e-151; Accession=PF00916.12; Description =Sulfate transporter family
MGGGGGAEANGGGAARVPVPPARPFLDTFRGNLKETFFPDDPFRSVVRERGAARRTLAALRYFFPFLEWAPAYTVGAFKSDLIAGITIASLAIPQGISYAKLANLPPILGLYSSFVPPLVYALMGSSKDLAVGTVAVASLLIGSMLSSQVSPTDNPALYMHLAFTATFFAGVFQASLGLLRLGFIVDLLSHATIIGFMGGAATVVILQQLKGMLGLDRFTTATDIISVMESVFSQTHQWRWESVVLGSGFLFFLLVTRFISKRRPKLFWIAAAAPLTSVILGSVLVYLTHAENHGIQVIGHLKKGLNPPSVTSLQFSPPYMMLALKTGIITGVIALAEGIAVGRSFAMFKNYNIDGNKEMTAIGTMNIVGSLTSCYLTTGPFSRSAVNYNAGCKTAMSNVIMSLAVMLTLLFLTPLFHYTPLVVLSAIIMSAMLGLIDYQGAIHLWHVDKVDFCVCLGAYLGVVFGSVEIGLVVAVSISILRVLLFVARPKTTVLGNMPNSMIYRRMDQYTEAQAVPGVLVLRIDAPIYFTNATYLRERILRWINEEEERAKGEGE

SEQ ID NO: 71939 - protein, 567 aa, Setaria italica
  Transcript Sequence Number=SeqID_5965
  Gene Ontology: Mol. function=secondary active sulfate transmembrane transporter activity; Cellular component=integral to membrane; Biological process=sulfate transport
  Homolog annotation: Hit_ID=A1YKF8; Match level="QueryCoverage=96%, HitCoverage=82%, E-value=0.0, Identity=83%"; Hit description=Sulfate transporter
  Pfam annotation: Domain name=C4dic_mal_tran; Domain location=170-404; Score=-94.7; E_value=0.076; Accession=PF03595.9; Description=C4 -dicarboxylate transportermalic acid transport protein
  Pfam annotation: Domain name=STAS; Domain location=439-557; Score =93.9; E_value=5.7e-25; Accession=PF01740.13; Description=STAS domain
  Pfam annotation: Domain name=Sulfate_transp; Domain location=108-416; Score=455.1; E_value=1e-133; Accession=PF00916.12; Description =Sulfate transporter family
  Pfam module annotation: Pfam domain module=C4dic_mal_tran::STAS::Sulfa te_transp; Domain location=170-404::439-557::108-416
KYWSASTSRRADLIAGLTIASLAIPQGISYAKLANLPPIIGLYSSFVPPLIYSLLGSSRDLAVGPVSIASLVMGSMLREAVSPDDQPILYLQLAFTATFFAGVFQASLGFLRLGFIVDFLSKATLTGFMGGAAIIVSLQQLKGLLGIVHFTSHMGFIDVMRSVFKRHDEWEWQTIVMGTAFLAILLLTRQISARNPKLFWISAGAPLASVIISTILSFIWKSHSISVIGILPRGVNPPSANMLTFNGSYVALTIKTGIMTGILSLTEGIAVGRTFASINNYQVDGNKEMMAIGIMNMAGSCASCYVTTGSFSRSAVNYSAGCKTAVSNIVMAAAVLVTLLFLMPLFHYTPNVILSAIIITAVVGLIDVRGAAKLWKVDKLDFLACMAAFLGVLLVSVQMGLAIAVGISLFKILLQVTRPNMVVKGLVPGTQTYRSVVQYREAVRVPAFLVVGVESAIYFTNSMYLVERVMRYLRDEEEMALKSNQSSIRCVVLDMSAVAAIDTSGLDALSELKKILDKRNIELVLANPVGSVAERMFNSAVGETFGSDRLFFSVAEAVAAGACKAQP

SEQ ID NO: 71940 - protein, 93 aa, Setaria italica
  Transcript Sequence Number=SeqID_5966
  Gene Ontology: Mol. function=protein kinase binding; Cellular component=ribonucleoprotein complex; Biological process=nuclear mRNA splicing, via spliceosome
  Homolog annotation: Hit_ID=Q7F193; Match level="QueryCoverage=98%, HitCoverage=31%, E-value=1e-48, Identity=100%"; Hit description =Putative snRNP core protein SMX5d
  Pfam annotation: Domain name=LSM; Domain location=5-72; Score=71.5; E_ value=3.1e-18; Accession=PF01423.14; Description=LSM domain
MLFFSYFKELVGKEVTVELKNDLAIRGTLHSVDQYLNIKLENTRVVDQDKYPHMLSVRNCFIRGSVVRYVLLPQDGVDIDILHDATRREARGG

SEQ ID NO: 71941 - protein, 139 aa, Setaria italica
  Transcript Sequence Number=SeqID_5967
  Homolog annotation: Hit_ID=B6TP17; Match level="QueryCoverage=100%, HitCoverage=100%, E-value=1e-54, Identity=73%"; Hit description =Enzyme of the cupin superfamily
  Pfam annotation: Domain name=Cupin_3; Domain location=61-136; Score =127.0; E_value=6.1e-35; Accession=PF05899.4; Description=Protein of unknown function (DUF861)
  Subcellular localization annotation: CTP_CleavageSite=37; ConfidenceScore=5.75e-01
MASPMVATPVQLRTSTGRLSYSSSSPSAARRRFAAVRASAETMATEKLGIRVERNPPESRLSELGVRQWPKWGCEKSKFPWTYSAKETCYLLQGKVKVYPEGHGEEFVEIAAGDLVVFPKGMSCTWDVAEAVDKHYNFE

SEQ ID NO: 71942 - protein, 380 aa, Setaria italica
  Transcript Sequence Number=SeqID_5968
  Gene Ontology: Mol. function=ferredoxin-NADP+ reductase activity; Cellular component=thylakoid membrane; Biological process=electron transport chain
  Homolog annotation: Hit_ID=B6TD64; Match level="QueryCoverage=100%, HitCoverage=100%, E-value=0.0, Identity=86%"; Hit description =Ferredoxin--NADP reductase
  Pfam annotation: Domain name=NAD_binding_1; Domain location=234-349; Score=134.2; E_value=4.2e-37; Accession=PF00175.13; Description =Oxidoreductase NAD-binding domain
  Subcellular localization annotation: CTP_CleavageSite=67; ConfidenceScore=5.54e-01
MASAALGTQVAATALAPVGSDGFLNGSSLKGNNNLNFRSKPWIRRTLAWEKTQQSRHLNKVFCMSVQLASKSKVAVKPVELENAKEPPLNLYKPKEPYTATIVSVERLVGPKAPGEICHIVIDHGGNVPYWEGQSYGVIPPGENPKKPGSPNTVRLYSIASTRYGDSFDGKTASLCVRRAVYYDPETGKEDPSKKGICSNFLCDSKPGDKVQITGPSGKILLLPEDDPNATHIMIATGTGVAPYRGYLRRMFMEDVPAYKFGGLAWLFLGVANSDSLLYDEEFTTYLQQYPDNFRYDKALSREQKNKSGGKMYVQDKIEEYSDEIFKLLDGGAHIYFCGLKGMMPGIQDTLKRVAEQRGESWDQKLSQLKKNKQWHVEVY

SEQ ID NO: 71943 - protein, 124 aa, Setaria italica
  misc_feature (53)..(53): Xaa can be any naturally occurring amino acid
  Transcript Sequence Number=SeqID_5969
  Gene Ontology: Mol. function=ligase activity, forming aminoacyl-tRNA and related compounds; Cellular component=cytoplasm; Biological process=alanyl-tRNA aminoacylation
  Homolog annotation: Hit_ID=B9T776; Match level="QueryCoverage=95%, HitCoverage=14%, E-value=4e-40, Identity=69%"; Hit description =Alanyl-tRNA synthetase, putative
  Subcellular localization annotation: CTP_CleavageSite=29; ConfidenceScore=5.14e-01
ASVDAKLRQGAKAHHTATHLLQSALKSVVGSETSQAGSLVAFDRLRFDFNFHXRPLSEEELVKIESLVNQWIGNATHLETKVMALQDAKNAGAIAMFGEKYGEEVRVVEVPGVSLELCWLVTSI

SEQ ID NO: 71944 - protein, 259 aa, Setaria italica
  Transcript Sequence Number=SeqID_5970
  Gene Ontology: Mol. function=catalytic activity; Biological process =alkaloid metabolic process
  Homolog annotation: Hit_ID=Q6RYA0; Match level="QueryCoverage=98%, HitCoverage=98%, E-value=7e-56, Identity=47%"; Hit description =Salicylic acid-binding protein 2
  Pfam annotation: Domain name=Abhydrolase_1; Domain location=32-253; Score=32.3; E_value=1.9e-06; Accession=PF00561.12; Description =alphabeta hydrolase fold
MGCIKHIVLVHGACLGGWSWFKVATALRAAGYRVDTPDLAASGVDPRLLREAAPTFRDYTAPLLDLLAALPAGDRVVLVGHSLGGINVALAAELFPEKVAAAVFLCAFMPDFAARPSHVLEKFVEGKWLDWMDTEMKPQDAEGKLPTSMMFGPGILREKFVQLCSPEDVTLVSSLMRVSSMFVEDLAVQQPFTKGGYGSVRRVYVVCTEDHAIAEGFQRLMVENDPVDEVKEIAADHMVMLSRPDELVRCLTDIVEKYT

SEQ ID NO: 71945 - protein, 62 aa, Setaria italica
  Transcript Sequence Number=SeqID_5971
FFFFFLFQQLTYSCDSVTVRRRHTNDCLHARTEAIIKFNWPVTMRWLAASCTVGELLCRYYL

SEQ ID NO: 71946 - protein, 212 aa, Setaria italica
  misc_feature (195)..(195): Xaa can be any naturally occurring amino acid
  Transcript Sequence Number=SeqID_5972
  Gene Ontology: Mol. function=isomerase activity; Cellular component =endoplasmic reticulum; Biological process=cell redox homeostasis
  Homolog annotation: Hit_ID=Q7XRB5; Match level="QueryCoverage=88%, HitCoverage=88%, E-value=2e-83, Identity=61%"; Hit description =OSJNBa0006B20.4 protein
  Pfam annotation: Domain name=Thioredoxin; Domain location=70-174; Score=150.7; E_value=4.4e-42; Accession=PF00085.12; Description =Thioredoxin
MPNKLPRHCSQYFGLKENDVPLLFVIAQGGKYLNPTIDPDQVIPWLKQYIYGNLTPYVKSEPIPKENDQPVKVVVADSIDDIVFNSGKNVLIEFYAPWCGHCRKLAPILEEVAVSLQDDEDVVIAKMDGTANDIPTDFAVEGYPTMYFYSTTGDLYSYNGGRTAEDIISFIKKHKGPKAGAADEVAQTGAGGVEXGITSSSPSEILESELLT

SEQ ID NO: 71947 - protein, 64 aa, Setaria italica
  Transcript Sequence Number=SeqID_5973
SHFNPQGFKVSLVLFVSLFQLTNLFVEKVALCMLSSQIDCMLCFYLSRTISRCTFWHCKSIITS

SEQ ID NO: 71948 - protein, 98 aa, Setaria italica
  Transcript Sequence Number=SeqID_5974
  Gene Ontology: Mol. function=calcium ion binding
  Homolog annotation: Hit_ID=B6TJU2; Match level="QueryCoverage=45%, HitCoverage=21%, E-value=4e-13, Identity=86%"; Hit description =Calmodulin-like protein 1
  Pfam annotation: Domain name=efhand; Domain location=19-47; Score =42.0; E_value=2.4e-09; Accession=PF00036.24; Description=EF hand
  Pfam annotation: Domain name=efhand; Domain location=59-87; Score =28.3; E_value=3e-05; Accession=PF00036.24; Description=EF hand
  Pfam module annotation: Pfam domain module=efhand::efhand; Domain location=19-47::59-87
LDAVAAMAAQAPAPGGEDELMEAFRVFDADGDGRITAEELRAVMEAILGGGAEGCSLDDCRRMIGGVDADGDGFVGFQDFARMMMATATAAVDARAFL

SEQ ID NO: 71949 - protein, 54 aa, Setaria italica
  Transcript Sequence Number=SeqID_5975
  Homolog annotation: Hit_ID=B6T6Z8; Match level="QueryCoverage=100%, HitCoverage=27%, E-value=4e-09, Identity=64%"; Hit description =Protein binding protein
  Pfam annotation: Domain name=DUF1232; Domain location=1-35; Score =19.5; E_value=0.00066; Accession=PF06803.4; Description=Protein of unknown function (DUF1232)
VALSAIYVLSPVDILPESVLGLFGFVDDLLILVIVFLHLAAVYRSLLLYRHGGQ

SEQ ID NO: 71950 - protein, 94 aa, Setaria italica
  Transcript Sequence Number=SeqID_5976
  Gene Ontology: Mol. function=metal ion binding
  Homolog annotation: Hit_ID=B6T6Z8; Match level="QueryCoverage=72%, HitCoverage=34%, E-value=8e-28, Identity=86%"; Hit description =Protein binding protein
SFPGECIIRVWHHGPAVQACKCPICRRLINLLVPAPLSDQEDDPQVGRILGEIQHYNCIFGGAPRSLTQVCTLSMKADFFTVSFKIKIYAGYLY

SEQ ID NO: 71951 - protein, 191 aa, Setaria italica
  Transcript Sequence Number=SeqID_5977
  Gene Ontology: Mol. function=metal ion binding; Cellular component =integral to membrane
  Homolog annotation: Hit_ID=B6T6Z8; Match level="QueryCoverage=94%, HitCoverage=92%, E-value=4e-83, Identity=83%"; Hit description =Protein binding protein
  Pfam annotation: Domain name=DUF1232; Domain location=132-172; Score =37.1; E_value=7.2e-08; Accession=PF06803.4; Description=Protein of unknown function (DUF1232)
  Pfam annotation: Domain name=zf-C3HC4; Domain location=17-59; Score =18.2; E_value=0.00085; Accession=PF00097.17; Description=Zinc finger, C3HC4 type (RING finger)
  Pfam module annotation: Pfam domain module=DUF1232::zf-C3HC4; Domain location=132-172::17-59
MSSSSSASAAPPEDDVCSVCHDRFRIPCQANCSHWFCGECIIRVWHHGPAVQACKCPICRRLINLLVPAPLSDQEDDPQVGRILGEIQHYNCIFGGAPRSLTQRLQDLPFFIRRLFRELLDPQRTLPLVFRARMMMMVALSAIYVLSPVDILPESVLGLFGFVDDLLILVIVFLHLAAVYRSLLLYRHGGQ

SEQ ID NO: 71952 - protein, 182 aa, Setaria italica
  misc_feature (12)..(12): Xaa can be any naturally occurring amino acid
  Transcript Sequence Number=SeqID_5978
  Homolog annotation: Hit_ID=B6TT29; Match level="QueryCoverage=83%, HitCoverage=44%, E-value=3e-55, Identity=71%"; Hit description =Arginine/serine-rich coiled coil protein 1
GRGGRDGGKVDXSASVEEVIEWLVAPCSCCLTPAERVKAKMKLQLSETSAKDSTLGTATVRWERFEFNKDAPLDEDNDDVEVANDDASLVKNIGKSFRLSAVESKHEDRVRDAHEEAIFGVPTTSYVHTEAAEDEPKANDEEEKAEDIEAQPSSSLISDKVLAMQKGSWRERAQKLRQDSNT

SEQ ID NO: 71953 - protein, 210 aa, Setaria italica
  Transcript Sequence Number=SeqID_5979
  Gene Ontology: Mol. function=protein binding; Cellular component =mitochondrion
  Homolog annotation: Hit_ID=B9S9X3; Match level="QueryCoverage=99%, HitCoverage=98%, E-value=2e-55, Identity=51%"; Hit description =Neighbor of COX4, putative
  Pfam annotation: Domain name=UPF0172; Domain location=4-210; Score =354.4; E_value=2.2e-103; Accession=PF03665.5; Description =Uncharacterised protein family (UPF0172)
MGAECRYEVAQAAYVKLALHALKHPSAPVNGLLVGRLVEPSSTPAVVSVVDAVPLSHHPQHLPLLPTLELALTLVEDHFAIQGDGLAVVGYYHANPRRDDADLPPVAKRVGDHIFRYFPRSAVLLVDNKKLEEAVQGKSREPVVQLYTRDSSKSWRQAGSDGSSQLALKEPSSNVVLADHVTTKKWEKLADFDDHLDDISKDWLNPGLLD

SEQ ID NO: 71954 - protein, 82 aa, Setaria italica
  Transcript Sequence Number=SeqID_5980
LVLSLFDVSISSGRLTLGHALRMDEILSQSVIINPENYSRTDSTNIFPGCASEQHGKQASAPIALFHEKLSYGSGIEVDRKL

SEQ ID NO: 71955 - protein, 97 aa, Setaria italica
  Transcript Sequence Number=SeqID_5981
  Subcellular localization annotation: CTP_CleavageSite=58; ConfidenceScore=5.78e-01
SSLTSSTSSAAGAAASAASSSTSSCNAFHAPRPLHLSLKPVSPQPKPQSLSCSAPHVPCAAAGDGSGTGNRGDGSGGNGGKDGGGGGAGEDDDDYEE

SEQ ID NO: 71956 - protein, 445 aa, Setaria italica
  Transcript Sequence Number=SeqID_5982
  Gene Ontology: Mol. function=substrate-specific transmembrane transporter activity; Cellular component=integral to membrane; Biological process=transmembrane transport
  Homolog annotation: Hit_ID=Q2R0P9; Match level="QueryCoverage=98%, HitCoverage=90%, E-value=1e-169, Identity=71%"; Hit description =Sugar transporter family protein
  Pfam annotation: Domain name=MFS_1; Domain location=1-394; Score =88.3; E_value=2.7e-23; Accession=PF07690.8; Description=Major Facilitator Superfamily
  Pfam annotation: Domain name=Sugar_tr; Domain location=1-443; Score =289.4; E_value=8.1e-84; Accession=PF00083.16; Description=Sugar (and other) transporter
  Pfam module annotation: Pfam domain module=MFS_1::Sugar_tr; Domain location=1-394::1-443
MLVRFYDLTLMSGAQLFMREDVGLTDGEVEVLAGSMNVFMLASILGGGWFADRLGRRRVLVLANAFLMAGALAMSLGGSFAALMAARFVTSVGAGFARVVAPVYNAEISPPSTRGVLSSLLDVFINVGILLSYVSNYALAGLPAHLGWRLMYAIGVVPPVFIAAGVFFMPESPRWLAMRGRYADAHAVLLRTLDTPAEADLRLAEIKQAVAHQRPQPEAAGSHGGGVWKELLFRPSASVRRILTCVLGLQFFVQASGIDAILLYGPLVFKAAGMASNGAILGATVAIGAVKTCFILVGMLFTDRLGRRPLLLASTAGVSVTTASLAVTLCVSAASSAAATTACLASVLAIVAAYSVGYGSVVNTYSAEILPLRLRAQGSSLGVAVNRLTCGLVGMTFISLADGITMAGCFFLYAGVTAAAFVFVYARLPETRGRSLEDVEVLFDK

SEQ ID NO: 71957 - protein, 538 aa, Setaria italica
  Transcript Sequence Number=SeqID_5983
  Gene Ontology: Mol. function=potassium ion transmembrane transporter activity; Cellular component=integral to membrane; Biological process=potassium ion transport
  Homolog annotation: Hit_ID=Q67UC7; Match level="QueryCoverage=100%, HitCoverage=77%, E-value=0.0, Identity=78%"; Hit description =Probable potassium transporter 17
  Pfam annotation: Domain name=K_trans; Domain location=1-538; Score =492.9; E_value=4.3e-145; Accession=PF02705.8; Description=K+ potassium transporter
MAILGMCMLIGDGILTPAISVLSAINGLRAPFPSVSKSVVEALSAAILIGLFLLQKYGTSKVSFLFSPIMAVWTFTTPIIGVYSIFNYYPGIFKAISPHYIVRFFLRNKKEGWRMLGGTVLCITGAEAMFADLGHFSKKGIQIAFLSSIYPSLVLTYAGQTAYLINNVNDYSDGFYKFVPRPVYWPMFVITTLAAIVASQSLISATFSVIKQSVVLDYFPRVKVVHTSQHKEGEVYSPETNYILMVLCVGVVLGFGAGNAIGNAFGVVVIMVMLITTIMLALVMIIIWRTPPALVALFFVPFFIMEGSYVSAVFTKIPEGGWLPFAVSMILALVMFGWYYGRQRKIEYEMSNKVTVERLGELLARPEVQRVPGLCFFYSNIQDGLTPILGHYIKNMSSLHAATVFVTLRYLLVAKVEQRERILVRRLGPSGVYGCTIQYGYADSLRDDDLAAQVMSHLRRHVQTEAGADEAARLEAAWKASVVHVRGKMRLYVGEDAGWFDRVMLGFYEFLHGICRSALPALGTPLQQRVEIGMLYKV

SEQ ID NO: 71958 - protein, 126 aa, Setaria italica
  Transcript Sequence Number=SeqID_5984
  Homolog annotation: Hit_ID=B9SX19; Match level="QueryCoverage=80%, HitCoverage=61%, E-value=6e-46, Identity=82%"; Hit description =Transporter, putative
  Pfam annotation: Domain name=Vps55; Domain location=8-124; Score =166.0; E_value=1.1e-46; Accession=PF04133.6; Description=Vacuolar protein sorting 55
MAMTVEVLAGLAFMFSTSILLQILACALYNNWWPMLAALMYVLVPMPCLFFGGGSTHFLTSREGGGWINAAKFLTGASAMGSLAIPAILRHAGLIETGAMFIEFTSFFILVCTVMCFHRATLDEDW

SEQ ID NO: 71959 - protein, 140 aa, Setaria italica
  misc_feature (25)..(25): Xaa can be any naturally occurring amino acid
  Transcript Sequence Number=SeqID_5985
  Gene Ontology: Mol. function=electron carrier activity
  Homolog annotation: Hit_ID=B6TNY3; Match level="QueryCoverage=44%, HitCoverage=25%, E-value=2e-25, Identity=88%"; Hit description =Uclacyanin-2
  Pfam annotation: Domain name=Cu_bind_like; Domain location=16-90; Score=-0.8; E_value=9.1e-05; Accession=PF02298.9; Description =Plastocyanin-like domain
TTGSNRNHTVGGADGWFFDAKANAXSGNYSGWANGETFYLGDYLIFKTNDNSSVVQTTNATTYDLCDRPATSTSPASPTSSSSSLWSFSLYCAPRLPCTFCCVLVRALCTCQAVDFRNLPTNKERLADQPFFFLKKKKKN

SEQ ID NO: 71960 - protein, 154 aa, Setaria italica
  misc_feature (97)..(97): Xaa can be any naturally occurring amino acid
  misc_feature (110)..(110): Xaa can be any naturally occurring amino acid
  Transcript Sequence Number=SeqID_5986
  Gene Ontology: Mol. function=electron carrier activity
  Homolog annotation: Hit_ID=B6TNY3; Match level="QueryCoverage=81%, HitCoverage=51%, E-value=2e-46, Identity=75%"; Hit description =Uclacyanin-2
  Pfam annotation: Domain name=Cu_bind_like; Domain location=41-147; Score=42.3; E_value=1.9e-09; Accession=PF02298.9; Description =Plastocyanin-like domain
VAVMATAVVLLASAPAARADSPAAGDAPEYRNHTVGGADGWFFDAKANATSGNYSGWANGETFYLGDYLIFKTNDNSSVVQTTNATTYDLCDPSDDXDPETLIYGGGGGXGGGGLEQNNTIPVALVLEGTNYFFSDADGGSQCQQGMRFEIKVQ

SEQ ID NO: 71961 - protein, 153 aa, Setaria italica
  Transcript Sequence Number=SeqID_5987
  Gene Ontology: Mol. function=electron carrier activity
  Homolog annotation: Hit_ID=B6TNY3; Match level="QueryCoverage=74%, HitCoverage=48%, E-value=4e-34, Identity=66%"; Hit description =Uclacyanin-2
  Pfam annotation: Domain name=Cu_bind_like; Domain location=1-76; Score=-14.7; E_value=0.0027; Accession=PF02298.9; Description =Plastocyanin-like domain
LIFKTNDNSSVVQTTNATTYDLCDPSDDPETLIYGGGGGGGGGLEQNNTIPVALVLEGTNYFFSDADGGSQCQQGMRFEIKVQHGQGLPPSLKSPPPAPKERVLAPPPAGTAFSGTGGVEPGDGAGDNGGAGRSGASRAAAAGGRFLGAAVGV

SEQ ID NO: 71962 - protein, 219 aa, Setaria italica
  misc_feature (42)..(42): Xaa can be any naturally occurring amino acid
  Transcript Sequence Number=SeqID_5988
  Gene Ontology: Mol. function=glucosyltransferase activity; Cellular component=membrane; Biological process=protein modification process
  Homolog annotation: Hit_ID=Q7X7D3; Match level="QueryCoverage=99%, HitCoverage=36%, E-value=1e-63, Identity=60%"; Hit description =OSJNBa0014K14.9 protein
  Pfam annotation: Domain name=DIE2_ALG10; Domain location=1-218; Score= -182.1; E_value=0.0002; Accession=PF04922.4; Description=DIE2ALG10 family
ASLAAVLAMYLFCLKKQFWISATFGAFSILFRQTNVIWIIFXAANGAISYIQDLYPKDNVSQENTEATHQSNKVVSGRGNKTAAQGLRRRRINSPISKKLVISESSHLYSSLAEELRDICLKLWNSKCEVLIAFAPFAVVMMAFVAFIIWNGGIVLGAKEAHVVSPHFAQFLYFGLVSAAALLPWHFSPRRVLDLFHLSGKNKTCSFLAVLMGLGLSFG

SEQ ID NO: 71963 - protein, 250 aa, Setaria italica
  Transcript Sequence Number=SeqID_5989
  Gene Ontology: Mol. function=glucosyltransferase activity; Cellular component=membrane; Biological process=protein modification process
  Homolog annotation: Hit_ID=Q7X7D3; Match level="QueryCoverage=99%, HitCoverage=46%, E-value=5e-95, Identity=69%"; Hit description =OSJNBa0014K14.9 protein
  Pfam annotation: Domain name=DIE2_ALG10; Domain location=2-204; Score= -50.8; E_value=2.5e-11; Accession=PF04922.4; Description=DIE2ALG10 family
CSGLAEELRDICLKLWNSKCEVLIAFAPFAVVMMAFVAFIIWNGGIVLGAKEAHVVSPHFAQFLYFGLVSAAALLPWHFSPRRVLDLFHLSGKNKTCSFLAVLMGLGLSFVAVHFFSIAHPYLLADNRHYTFYIWRKVIQVNWLMKYMLIPLYVYSWFSIIYILGKSQTRVWVLSFVLSVMLVLVPAPLVEFRYYTIPFVIMVLHFPVIGNRKLLALGLLYAVADVFTLVMFLFRPFNWEHEPGTQRFMW

SEQ ID NO: 71964 - protein, 81 aa, Setaria italica
  Transcript Sequence Number=SeqID_5990
  Gene Ontology: Mol. function=hydrolase activity, hydrolyzing O -glycosyl compounds; Cellular component=vacuole; Biological process =carbohydrate metabolic process
  Homolog annotation: Hit_ID=Q10CU3; Match level="QueryCoverage=96%, HitCoverage=19%, E-value=5e-18, Identity=59%"; Hit description =Glycosyl hydrolase family 3 N terminal domain containing protein, expressed
MAAGEAAPLYRDASAPVEARVRDLLGRMTLREKAAQMAQIERTVASPRALTELGAGSVLNAGGSAPRDRASPADWAAMVDG

SEQ ID NO: 71965 - protein, 100 aa, Setaria italica
  misc_feature (21)..(21): Xaa can be any naturally occurring amino acid
  misc_feature (42)..(42): Xaa can be any naturally occurring amino acid
  Transcript Sequence Number=SeqID_5991
  Gene Ontology: Mol. function=phosphotransferase activity, for other substituted phosphate groups; Cellular component=membrane; Biological process=phospholipid biosynthetic process
  Homolog annotation: Hit_ID=B6U6I8; Match level="QueryCoverage=85%, HitCoverage=22%, E-value=1e-34, Identity=81%"; Hit description =Ethanolaminephosphotransferase
MILAHLCDDQRFETGMCMALXYFPFAIANALTAQLDDGNPLXDEQLVLLMYCLFTVALYVHFATSVIHEITNALGIHCFRFVSHQFITIFFSTYFYHSIG

SEQ ID NO: 71966 - protein, 159 aa, Setaria italica
  Transcript Sequence Number=SeqID_5992
  Gene Ontology: Mol. function=phosphotransferase activity, for other substituted phosphate groups; Cellular component=membrane; Biological process=phospholipid biosynthetic process
  Homolog annotation: Hit_ID=B6U6I8; Match level="QueryCoverage=100%, HitCoverage=40%, E-value=7e-89, Identity=98%"; Hit description =Ethanolaminephosphotransferase
  Pfam annotation: Domain name=CDP-OH_P_transf; Domain location=85-157; Score=-5.3; E_value=0.053; Accession=PF01066.13; Description=CDP -alcohol phosphatidyltransferase
MGYIGHHGVATLRRYKYSGVDHSLVAKYILQPFWSRFVNIFPLWFPPNMITLTGFMFLLTSAFLGFLYSPHLDTAPPRWVHLAHGLLLFLYQTFDAVDGKQARRTNSSSPLGELFDHGCDALACAFESLAFGSTAMCGKATFWFWVISAVPFYFATWEQ

SEQ ID NO: 71967 - protein, 90 aa, Setaria italica
  Transcript Sequence Number=SeqID_5993
LSVSTRYWATEIFLHELIHGPRSPELYLASLPTTRPAPIALLPSPPQAMTTAMVSLSGGRRLWPAAPGLAAAGFFPSITGRRHVGHEDRR

SEQ ID NO: 71968 - protein, 102 aa, Setaria italica
  Transcript Sequence Number=SeqID_5994
  Subcellular localization annotation: CTP_CleavageSite=52; ConfidenceScore=5.22e-01
GARTPTTAARRRWPPWRRPRRRGSSPPPCAPHRSPAAGDETAGPPLTCTCPSAQLLRGRSSLPIPRGGYALLGARASGALFAWGRGGRQEAMPRAMARRDRD

SEQ ID NO: 71969 - protein, 44 aa, Setaria italica
  Transcript Sequence Number=SeqID_5995
MQTGSPIFYSVPYGMEKLVMYYKQRYNNTPIYITENGKDSIYLV

SEQ ID NO: 71970 - protein, 58 aa, Setaria italica
  Transcript Sequence Number=SeqID_5996
  Gene Ontology: Mol. function=hydrolase activity, hydrolyzing O -glycosyl compounds
QNAVHIYRKKYQVKQGGHIGINVCSRWYEPFHNTTADILAVERVLSFNGPWYSTFPLE

SEQ ID NO: 71971 - protein, 533 aa, Setaria italica
  Transcript Sequence Number=SeqID_5997
  Gene Ontology: Mol. function=hydrolase activity, hydrolyzing O -glycosyl compounds; Biological process=carbohydrate metabolic process
  Homolog annotation: Hit_ID=Q7XSK2; Match level="QueryCoverage=90%, HitCoverage=92%, E-value=1e-180, Identity=60%"; Hit description =OSJNBa0004N05.24 protein
  Pfam annotation: Domain name=Glyco_hydro_1; Domain location=34-509; Score=642.6; E_value=3.8e-190; Accession=PF00232.10; Description =Glycosyl hydrolase family 1
MGGAAAGRRKGMVVGLALFLLAHQGLLPCASAVDRGEFPENFLFGTSTSAYQIEGGYLEGNKGLSNWDVFTHKQGTIKDGSNGDSADDHYHRYMEDINLMHSLGVNSYRFSIAWTRILPRGRFGKVNPDGVAFYNAIIDALLQKGMQPFVTIYHFDIPHELDKRYGGWLSSEIQKDFGYFADICFKMFGDRVKFWITINEPNLFTKLSYMYGRYAPGHCSKPFGNCAFGNSSVETYIVGHNIILSHANAVHIYRKKYQVKQGGHIGINVCSRWYEPFHNTTADILAVERVLSFNGPWFLDPLILGEYPLEMRKILGSNLPEFTSKQKKKLQATKLDFIGLNHYTTSYLKDCIFSPCELDPVEGEAQVLTSAERDGIFIGKRTGSPIFYSVPYGMEKLVMYYKQRYNNTPIYITENGYAQASNSSMITKDFTNDTGRVDYLQGYLTFLASAIRKGADVRGYFVWSLLDNFEWNSGYTQRFGLYHVDFKTQKRTPKLSAKWYREFLKGSPLRTSLRNGYSHQYTAQSMDHFSSED

SEQ ID NO: 71972 - protein, 148 aa, Setaria italica
  Transcript Sequence Number=SeqID_5998
  Gene Ontology: Mol. function=protein transporter activity; Cellular component=mitochondrial inner membrane; Biological process=protein transport
  Homolog annotation: Hit_ID=B4FFR3; Match level="QueryCoverage=100%, HitCoverage=100%, E-value=1e-67, Identity=85%"; Hit description =Protein translocase/ protein transporter
  Pfam annotation: Domain name=Tim17; Domain location=2-129; Score =69.0; E_value=1.8e-17; Accession=PF02466.11; Description =Tim17Tim22Tim23 family
MEDDSPVTKTVKGAVTGLAAGTIWGTVVATWYDVPRVERHVALPGLIRTLKMCGTYGATFATIGGLYIGVEQLVQAQRKKHDFVNGAVGAFVAGASVCGYRGKSIQSALIGGSCLAFTSAILDIGGNTTRVDNGKEYYAYTTEKKPAH

SEQ ID NO: 71973 - protein, 43 aa, Setaria italica
  Transcript Sequence Number=SeqID_5999
MEEYLENMKSLRSYMNDLEEDAAKRSAEEQQQRTAIDAQTPSR

SEQ ID NO: 71974 - protein, 101 aa, Setaria italica
  misc_feature (97)..(97): Xaa can be any naturally occurring amino acid
  Transcript Sequence Number=SeqID_6000
  Gene Ontology: Mol. function=electron carrier activity; Cellular component=integral to membrane; Biological process=oxidation reduction
  Homolog annotation: Hit_ID=Q6ZD82; Match level="QueryCoverage=95%, HitCoverage=26%, E-value=1e-30, Identity=69%"; Hit description =Putative cytochrome P450
TGGKKLPPSPPALPIIGHLHLVGDLPHVSLRDLAASHGRDGLMLLRLGAVPNLIVSSRSAARAVLRTHDHVFASRPASAIADALMYGPSSDMGFAPXGEHW

SEQ ID NO: 71975 - protein, 90 aa, Setaria italica
  Transcript Sequence Number=SeqID_6001
  Gene Ontology: Mol. function=methyltransferase activity; Biological process=methylation
  Homolog annotation: Hit_ID=B6SPJ2; Match level="QueryCoverage=100%, HitCoverage=14%, E-value=2e-38, Identity=83%"; Hit description =Selenium-binding protein-like
RRYLDHIVRRYGVELKMEHYGCLVDLYGRAGQLNEAKKVIDDMPMEPDVGVLGALFGACKLHGDVDLGEAIGWRVIELDPQNSGRYVLLA

SEQ ID NO: 71976 - protein, 224 aa, Setaria italica
  misc_feature (19)..(19): Xaa can be any naturally occurring amino acid
  misc_feature (101)..(101): Xaa can be any naturally occurring amino acid
  Transcript Sequence Number=SeqID_6002
  Gene Ontology: Mol. function=ubiquitin-protein ligase activity; Cellular component=ubiquitin ligase complex; Biological process =ubiquitin-dependent protein catabolic process
  Homolog annotation: Hit_ID=B6SWJ0; Match level="QueryCoverage=83%, HitCoverage=26%, E-value=4e-81, Identity=82%"; Hit description =Ubiquitin-protein ligase
  Pfam annotation: Domain name=Arm; Domain location=144-182; Score=1.4; E_value=8.1; Accession=PF00514.15; Description=Armadillobeta-catenin -like repeat
  Pfam annotation: Domain name=Arm; Domain location=183-223; Score=7.9; E_value=1.2; Accession=PF00514.15; Description=Armadillobeta-catenin -like repeat
  Pfam annotation: Domain name=Arm; Domain location=58-98; Score=31.0; E_value=4.7e-06; Accession=PF00514.15; Description=Armadillobeta -catenin-like repeat
  Pfam annotation: Domain name=Arm; Domain location=99-140; Score=19.1; E_value=0.018; Accession=PF00514.15; Description=Armadillobeta -catenin-like repeat
  Pfam module annotation: Pfam domain module=Arm::Arm::Arm::Arm; Domain location=144-182::183-223::58-98::99-140
AARGDRHGALANTAAPFGXAAASAARLTVTYIVAQISTGSTEERRKATCEARKLCKHSVFYRACLVEANAVPWLLCLLSSTDASVQENAVASLLNLSKHPXGRAALFEAGGVGLVVDVINVGARAEAKQNAAAVLFYLSSDPEHAEEIGRIPESIPTLVQLIRDGAHRGRKNAMVSLYGLLQCASNYGKAVAAGAVAALAAVLSVDCEDLAGDALALLARLAEH

SEQ ID NO: 71977 - protein, 425 aa, Setaria italica
  Transcript Sequence Number=SeqID_6003
  Subcellular localization annotation: CTP_CleavageSite=53; ConfidenceScore=5.10e-01
MAAGATLNWVKTPFDSRRFHDLSSLSFRCRNPFGPIQRCWLPTDQDSSLTKVRVAADYSDSVPDSKYTRDRGYHPLEEVKERSRKKDLLLTDVETARTVVEGNSKGLLVFPARVHNEPHGNVAWSEFQYVIDDYGDIFFEVPDSENLLEDDTANNPVTVLIGMDGPIIGESSVAISDFSDYMDGEKFMDVPDEHYSKIDTEITDILIEWGMPATMRAIHPIYFAKCLTKAVHDNRGEKMDSPSNSVSIVGYLRPAFIEEESYLRSLFHAESNSDGYSSDWKVNETDGYNTETRPISGTNHLVDDDKSRFDFNDTGTSTGSMIYKLEIMTIELFSMYGKQLMIDPQDFQDSEPDILANSASAIIERIKENSDQCAVALRSLCRRKKSLTVEEASLIGVDSLGIDVRAFSGLEARTVRFSFNAQVSH

SEQ ID NO: 71978 - protein, 163 aa, Setaria italica
  Transcript Sequence Number=SeqID_6004
LTLSKYSDDDKSRFDFNDTGTSTGSMIYKLEIMTIELFSMYGKQLMIDPQDFQDSEPDILANSASAIIERIKENSDQCAVALRSLCRRKKSLTVEEASLIGVDSLGIDVRAFSGLEARTVRFSFNAQALSERSAEKKIRRMLFPRYQRKSVKTSTEDESQPIS

SEQ ID NO: 71979 - protein, 87 aa, Setaria italica
  Transcript Sequence Number=SeqID_6005
  Homolog annotation: Hit_ID=B6UCF2; Match level="QueryCoverage=85%, HitCoverage=36%, E-value=1e-32, Identity=92%"; Hit description=Seed specific protein Bn15D17A
  Pfam annotation: Domain name=DUF260; Domain location=15-87; Score =64.4; E_value=4.4e-16; Accession=PF03195.6; Description=Protein of unknown function DUF260
MRGGPLDTAVVPAMSCNGCRVLRKGCSEACVLRPCLQWIEGAEAQGHATVFVAKFFGRAGLMSFLTAVPEPQRPAVFQSLLYEAAGR

SEQ ID NO: 71980 - protein, 88 aa, Setaria italica
  Transcript Sequence Number=SeqID_6006
LPIQQGEAAAPATRRSKDHHPLLPRRDLGADHGDGARHSLVRASSEGRRKGNMAVWATWPSEPVMCLRSPTVEGRVQPVLCLTHTHLN

SEQ ID NO: 71981 - protein, 63 aa, Setaria italica
  Transcript Sequence Number=SeqID_6007
  Subcellular localization annotation: CTP_CleavageSite=39; ConfidenceScore=5.15e-01
KQNQCKVHSAQHTLMSISNLFKHKVAKNNHLLSNMTTIQYSLIQNLCLFRILEVQFTKFSLTT

SEQ ID NO: 71982 - protein, 177 aa, Setaria italica
  Transcript Sequence Number=SeqID_6008
  Gene Ontology: Mol. function=oxidoreductase activity
  Homolog annotation: Hit_ID=B9S8L8; Match level="QueryCoverage=98%, HitCoverage=32%, E-value=3e-58, Identity=64%"; Hit description =Multicopper oxidase, putative
  Pfam annotation: Domain name=Cu-oxidase_2; Domain location=14-155; Score=170.1; E_value=6.4e-48; Accession=PF07731.6; Description =Multicopper oxidase
RRCAVNGVSFVVPDTPLKLADNYNIANVMDWDGVPARPVGGAPPRAGTPVVRLNLHEFVEVVFQNTENEMQSWHLDGYDFWVVGYGNGQWTEMQRQTYNLVDAQARHTVQVYPNGWSAILVSLDNQGMWNLRSAIWDRQYLGQQLYLRVWTPEQSFANEYSIPTNAILCGRAAGLPH

SEQ ID NO: 71983 - protein, 150 aa, Setaria italica
  Transcript Sequence Number=SeqID_6009
  Subcellular localization annotation: CTP_CleavageSite=59; ConfidenceScore=5.70e-01
QVGVSIARDYLTRTSKNQKGTSASCNTSTLLPLKNLIGSFCFKNSTNGSNGSVNPMPIDAAREWPLACRSPVEPPEAVGSRSSSSVDGGARPASATWRPYQAGRFDDSPPERGDLGDSPAHGEEDLTSGEIRGVGRFQEPEIGNLVDNKK

SEQ ID NO: 71984 - protein, 113 aa, Setaria italica
  Transcript Sequence Number=SeqID_6010
  Gene Ontology: Mol. function=nucleoside-triphosphatase activity
  Homolog annotation: Hit_ID=B6THD1; Match level="QueryCoverage=99%, HitCoverage=20%, E-value=2e-29, Identity=60%"; Hit description=Cell Division Protein AAA ATPase family
DGASGGANDLYDSAQLYLGERCLATAPAVRLHKPRQAHRPVASLPDSHTTHDTYQGVRVRWTSTARTAERGAGGGGYSPYGVFGRGGHGVGGGGDHRTLELQFPRQHRDLIHD

SEQ ID NO: 71985 - protein, 117 aa, Setaria italica
  misc_feature (30)..(30): Xaa can be any naturally occurring amino acid
  Transcript Sequence Number=SeqID_6011
  Gene Ontology: Mol. function=protein dimerization activity; Cellular component=nucleus; Biological process=regulation of transcription, DNA-dependent
  Homolog annotation: Hit_ID=B6UBE1; Match level="QueryCoverage=76%, HitCoverage=36%, E-value=5e-20, Identity=63%"; Hit description=G-box- binding factor 4
  Pfam annotation: Domain name=bZIP_1; Domain location=55-115; Score =36.9; E_value=8.3e-08; Accession=PF00170.13; Description=bZIP transcription factor
  Pfam annotation: Domain name=bZIP_2; Domain location=55-109; Score =35.3; E_value=2.4e-07; Accession=PF07716.7; Description=Basic region leucine zipper
  Pfam module annotation: Pfam domain module=bZIP_1::bZIP_2; Domain location=55-115::55-109
MTLEDFLARDSGARAAAAVEGCMALGFPVXAGDAPGGVGGGRGSRKRAMVDPADRAVMQRQKRMIKNRESAARSRDRKQAYVAELESQVTQLEEEQAELLREQEERRQKRLTELMER

SEQ ID NO: 71986 - protein, 430 aa, Setaria italica
  Transcript Sequence Number=SeqID_6012
  Gene Ontology: Mol. function=electron carrier activity; Biological process=oxidation reduction
  Homolog annotation: Hit_ID=B6SRL7; Match level="QueryCoverage=99%, HitCoverage=79%, E-value=0.0, Identity=90%"; Hit description =Cytochrome P450 CYP72A28v3
  Pfam annotation: Domain name=p450; Domain location=1-426; Score =188.2; E_value=2.3e-53; Accession=PF00067.14; Description=Cytochrome P450
MTGKTSITWFGPVPRVTITKPELVREVLSNKFGHFEKIKFGRLQRLLHNGLGSHEGEKWAKHRRIVNPAFHVEKLKRMLPAFAACCTDLVMRWEGLVADGQPCEVDVWPEMQNLTGDVISRAAFGSSYLEGRRIFQLQGEQVKLVVQAMQKLHIPGYLYLPTRTNRRMKQIASEIEALLKGIIAKRENALRTGSATSDDLLGLLLESNMEHCRGDGGNSRRAGITTDDVIGECKLFYFAGMETTSVLLTWTMIVLSMHPEWQDRAREEVLHVFGERTPDYDGLSRLRIGTMVLYEVLRLYTPLAALQRQTYKPMELGGVRYPAGVMLMLPLLCVHHDKDVWGPDASEFRPQRFAEGISRASLDAPAFFPFGWGPRTCIGQNFALLEAKMGLAMILQRFAFELSPAYTHAPFPLGLLQPEHGAQVMLRRLP

SEQ ID NO: 71987 - protein, 65 aa, Setaria italica
  Transcript Sequence Number=SeqID_6013
ECNSFISQKLIVDTASNHFHPNSSSWKIQNTSTGTYWDCFKQANHHDLFQLTWLSLRQLTSTCRM

SEQ ID NO: 71988 - protein, 131 aa, Setaria italica
  Transcript Sequence Number=SeqID_6014
  Gene Ontology: Mol. function=SNAP receptor activity; Cellular component=membrane; Biological process=intracellular protein transport
  Homolog annotation: Hit_ID=B6TET0; Match level="QueryCoverage=100%, HitCoverage=36%, E-value=5e-48, Identity=77%"; Hit description =Syntaxin 32
  Subcellular localization annotation: CTP_CleavageSite=60; ConfidenceScore=5.52e-01
MNPTRPAQASFRDRTNEFRSAVESARRHAAPSSSSSSAVAAAAASSSGSGGAGPLDGSIAATSARSEFNNRASKIGLGIHQTSQKLARLAKLAKRTSVFDDPTVEIQELTAVIKKDITALNSAVVDLQALC

SEQ ID NO: 71989 - protein, 262 aa, Setaria italica
  Transcript Sequence Number=SeqID_6015
  Gene Ontology: Mol. function=SNAP receptor activity; Cellular component=membrane; Biological process=intracellular protein transport
  Homolog annotation: Hit_ID=B6TET0; Match level="QueryCoverage=98%, HitCoverage=75%, E-value=1e-134, Identity=90%"; Hit description =Syntaxin 32
  Pfam annotation: Domain name=SNARE; Domain location=175-237; Score =78.8; E_value=2e-20; Accession=PF05739.11; Description=SNARE domain
  Pfam annotation: Domain name=Syntaxin; Domain location=1-82; Score =24.4; E_value=0.00046; Accession=PF00804.17; Description=Syntaxin
  Pfam module annotation: Pfam domain module=SNARE::Syntaxin; Domain location=175-237::1-82
IFAVAKRTSVFDDPTVEIQELTAVIKKDITALNSAVVDLQALCNSQNESGNLSKDTTNHSTTVVDNLKNRLMSATKEFKEVLTMRTENLKVHENRRQMFSSSAAKDASNPFIRQRPLVARDPSESSVPPAPWASDSASTPLFQRKKTNGDHGASSSSQPFQQQQLAVQQDSYMQSRAEALQNVESTIHELSNIFTQLATMVSQQGELAIRIDENMDETLTNVEGAQGQLLKYLNSISSNRWLMMKIFFVLMVFLMIFIFFVA

SEQ ID NO: 71990 - protein, 64 aa, Setaria italica
  Transcript Sequence Number=SeqID_6016
  Gene Ontology: Mol. function=zinc ion binding; Cellular component =nucleus
  Homolog annotation: Hit_ID=Q9SHI0; Match level="QueryCoverage=76%, HitCoverage=5%, E-value=5e-11, Identity=67%"; Hit description =F20D23.9 protein
CCINSGSSTALSGWQLTVDAIETLQSLGQAQNQTMQSDSAASLYKDDHAPPSRKLLKRANHSKS

SEQ ID NO: 71991 - protein, 864 aa, Setaria italica
  Transcript Sequence Number=SeqID_6017
  Gene Ontology: Mol. function=zinc ion binding; Cellular component =nucleus; Biological process=ubiquitin-dependent protein catabolic process
  Homolog annotation: Hit_ID=Q9SHI0; Match level="QueryCoverage=99%, HitCoverage=91%, E-value=0.0, Identity=49%"; Hit description =F20D23.9 protein
  Pfam annotation: Domain name=zf-C3HC; Domain location=8-135; Score =218.2; E_value=2.1e-62; Accession=PF07967.5; Description=C3HC zinc finger-like
FSQSSCRPWERGDLLHRLATFKQSTWASKPKAASSLACAQRGWVNIDVDKIECESCGAHLIFTALTSWSPAEVANAGEAFAEQLDASHQNDCPWRGNSCADSLVQFHLTPSALVGGFKDRCDGLLQFVSLPVIASSAIESMKITRSVQIDRILSQSVTILSGELGYRTDSTTGIDISQQDESCGYSQAQKLISVCGWEPRWLPNVQDWEENSTRSARNAGSAEPDGQFHSQIPEHHQSSYSASVKKEKGKGKMRVKDSGCSMRSPLLDCSLCGATVRIWDFKSVPRPSHLSLNNIDMPDTGRKPVLTRGISATSGINGLVAEVAEKENVEGRDEAGTDERKSVSNAQVDLNLTMAGGLPSNHSALPPMPGHFSYGGMGRDLIIGQPTGSELGGHAASFESRGPSSRKRNLEEGGSTADKPINRLQPADSIEGTVIDRDGDEVDDAAQDSGARSKRPRGFNLFDINRPSSTGAGPSRNLSFDLDIDVNRFDTSNAEGPSALHNPFPKDSMRASSVIAMDTVHSAEENSMESVEYHPCDGDDVNKPSSALRSGGMSEALDLNYSNQAQQSSFVQPAAETESNAREIGGSSMNGGEEVLNAETTPASARDQLSLGVSGGSVGMGASHEAEIHGTDISEHKTGSVVGDADPIPELIEIMGHTGESAPGPALMDESAPEEVGREDPHGDSQDMASRLAVRADSGSKICGSTKADSVESGEKMSHAVAHENSAHPSLSCNARVYSGIDASKEEVTGIMLTNDDYDPANGLGATNGENDYETELPDFDPIKHHNNYCPWVNGNVAAACCINSGSSTALSGWQLTVDAIETLQSLGQAQNQTMQSDSAASLYKDDHAPPSRKLLKRANHSKS

SEQ ID NO: 71992 - protein, 226 aa, Setaria italica
  Transcript Sequence Number=SeqID_6018
  Gene Ontology: Mol. function=heat shock protein binding
AAGAASATASSAAAAQAANVVHQTYEKVKREREEAQAAARREEALRRKYNPLKRHGSMSENINHGTGDVASGKKMRTKDSGVGSSSVVPGPGANCFRVPGVNISFSTNIGVYEFQGVNGGLNWKTRPPIHISLAKTFSQLDVRGLLLEKAKNDLRNKLAEIKSKTSKVAASEKASKKHVVKENGGDNEALASDDPTTSKDVHADPKEICSNMSSDAENEDDDPFPL

SEQ ID NO: 71993 - protein, 322 aa, Setaria italica
  Transcript Sequence Number=SeqID_6019
  Gene Ontology: Cellular component=nucleus; Biological process=cell division
  Homolog annotation: Hit_ID=B6TRI7; Match level="QueryCoverage=100%, HitCoverage=76%, E-value=1e-164, Identity=86%"; Hit description =Cyclin B2
  Pfam annotation: Domain name=Cyclin_C; Domain location=187-307; Score= 171.7; E_value=2.1e-48; Accession=PF02984.11; Description=Cyclin, C -terminal domain
  Pfam annotation: Domain name=Cyclin_N; Domain location=59-185; Score =247.0; E_value=4.6e-71; Accession=PF00134.15; Description=Cyclin, N -terminal domain
  Pfam module annotation: Pfam domain module=Cyclin_C::Cyclin_N; Domain location=187-307::59-185
PVSNGTIDIDLEQYEEVPDVDIDMDETDHKESVNEDESIMDIDSADSGNPLAATEYVEELYKFYRETEAKSCVKPDYMSSQQDINAKMRAILIDWLIEVHYKFELMDETLFLTVNIIDRFLEKQVVPRKKLQLVGVTAMLLACKYEEVSVPVVEDLVLISDRAYTKGQILEMEKLILNTLQFNMSVPTPYVFMRRFLKAADSDKQLELVSFFMLELCLVEYQMLKYRPSLLAAAAVYTAQCAINRCQHWRKVCESHSRYTGDQLLECSRMMVDFHQKAGAGKLTGVHRKYSTFKFGCAAKVEPALFLLESGDAPSPPPSGTI

SEQ ID NO: 71994 - protein, 129 aa, Setaria italica
  misc_feature (120)..(120): Xaa can be any naturally occurring amino acid
  Transcript Sequence Number=SeqID_6020
  Subcellular localization annotation: CTP_CleavageSite=30; ConfidenceScore=5.23e-01
MVAISPHLTATLPFLPTLRPRPRRLPQDAFAASVSAHRTAGVALHGCRHCNPLARRLHGFENTISFWTRTEHNKQALFASGRDDNSSSPDGPPVLTILAGVIVFLLVLWVIGSIVTWIVXGLVFGAAKS

SEQ ID NO: 71995 - protein, 108 aa, Setaria italica
  misc_feature (97)..(97): Xaa can be any naturally occurring amino acid
  Transcript Sequence Number=SeqID_6021
  Gene Ontology: Mol. function=ATP-dependent peptidase activity; Biological process=ATP-dependent proteolysis
  Homolog annotation: Hit_ID=B9RLV0; Match level="QueryCoverage=85%, HitCoverage=5%, E-value=3e-25, Identity=59%"; Hit description=Kinase, putative
  Pfam annotation: Domain name=TPR_2; Domain location=48-81; Score =17.1; E_value=0.073; Accession=PF07719.9; Description=Tetratricopepti de repeat
FCRISQLLRERSAADSEYQPLNGLDPTTHAELALKDAEKIISINSNSPRPYLLKAYALILLEHYHEAREALLAGLQVDPLSHVLQTCLSDLDRNTNXAAGARRARLDR

SEQ ID NO: 71996 - protein, 360 aa, Setaria italica
  Transcript Sequence Number=SeqID_6022
  Gene Ontology: Mol. function=ATP-dependent peptidase activity; Biological process=ATP-dependent proteolysis
  Homolog annotation: Hit_ID=B9RLV0; Match level="QueryCoverage=78%, HitCoverage=18%, E-value=1e-108, Identity=61%"; Hit description =Kinase, putative
  Pfam annotation: Domain name=LON; Domain location=155-351; Score =122.5; E_value=1.4e-33; Accession=PF02190.8; Description=ATP -dependent protease La (LON) domain
  Pfam annotation: Domain name=zf-C3HC4; Domain location=72-109; Score =40.4; E_value=6.9e-09; Accession=PF00097.17; Description=Zinc finger, C3HC4 type (RING finger)
  Pfam module annotation: Pfam domain module=LON::zf-C3HC4; Domain location=155-351::72-109
ADSEYQPLNGLDPTTHAELEHYHEAREALLAGLQVDPLSHVLQTCLSDLDRNTNIAAGARRARLDRTDDFECTLCFKLLYEPVTTPCGHSFCRSCLHQSMDHGNKCPMCRTVLFIGPRTYPISVTLSNIIQRNFPEEYAERRSEHETMTYAGVDLMPLFVMDVVLPCQKMALNIFEPRYRLMVRRIMEGNHRMGMVAIDSATGTVADCGCEVEILECEPLPDGRFYLEVEGSRRFRILRSWDQDGYRVAEVEWLQDMPLPEGSQERRELIELANGASELARAYIRRARETVRTARRTRHLDLESMPGPQDPEKFSFWLVNLISLRPSDRLDLLRLRDTRERISSSIRLLSDAAEQGCHVQ

SEQ ID NO: 71997 - protein, 146 aa, Setaria italica
  Transcript Sequence Number=SeqID_6023
  Gene Ontology: Mol. function=protein serine/threonine kinase activity; Cellular component=integral to membrane; Biological process=protein amino acid phosphorylation
  Homolog annotation: Hit_ID=C0LGQ5; Match level="QueryCoverage=100%, HitCoverage=57%, E-value=7e-30, Identity=36%"; Hit description =Leucine-rich repeat receptor-like protein kinase (Fragment)
  Pfam annotation: Domain name=LRR_1; Domain location=112-135; Score =0.8; E_value=2.1e+02; Accession=PF00560.25; Description=Leucine Rich Repeat
  Pfam annotation: Domain name=LRR_1; Domain location=16-38; Score =10.3; E_value=3.3; Accession=PF00560.25; Description=Leucine Rich Repeat
  Pfam annotation: Domain name=LRR_1; Domain location=40-62; Score =12.9; E_value=1; Accession=PF00560.25; Description=Leucine Rich Repeat
  Pfam annotation: Domain name=LRR_1; Domain location=64-86; Score =13.2; E_value=0.89; Accession=PF00560.25; Description=Leucine Rich Repeat
  Pfam annotation: Domain name=LRR_1; Domain location=88-110; Score =17.8; E_value=0.045; Accession=PF00560.25; Description=Leucine Rich Repeat
  Pfam module annotation: Pfam domain module=LRR_1::LRR_1::LRR_1::LRR _1::LRR_1; Domain location=112-135::16-38::40-62::64-86::88-110
NRLSGPVPDWLGSLPQLGELTLSNNEFAGPLPVQLSNCSKLLKLSLDNNQINGTVPPEIGSLVSLNVLNLAHNQLSGLIPTTIAKLNNLYELNLSQNFLSGPIPPDIGKLQELQSLLDLSSNNFSGHIPASLGSLSKLEDLNLSHN

SEQ ID NO: 71998 - protein, 240 aa, Setaria italica
  Transcript Sequence Number=SeqID_6024
  Gene Ontology: Mol. function=structural molecule activity; Cellular component=plasma membrane; Biological process=lipid transport
  Homolog annotation: Hit_ID=B6UGD8; Match level="QueryCoverage=99%, HitCoverage=98%, E-value=8e-98, Identity=76%"; Hit description =Vesicle-associated membrane protein-associated protein A
  Pfam annotation: Domain name=Motile_Sperm; Domain location=8-115; Score=143.0; E_value=9.3e-40; Accession=PF00635.18; Description=MSP (Major sperm protein) domain
MSGGSGSFLEIQPSELAFPFEIMKQSSCSMQLTNKTDHYVAFKVKTTNPKQYCVRPNIGVVSPGSTCDVTVTMQAQKEPPPDMQCKDKFLVQSVAAENGVTAQDINAAMFNKEPGKVVDEFKLRVVYVPTTTPSPIPEDSELGSSAHSFAHENGINHSAMSQSVSRSPADTTKEKSSEATSVISKLTEEKMSAIQQNQKLRQELELLRKESSKNSGGFSITFLLVVGLLGIVVGYILKRT

SEQ ID NO: 71999 - protein, 108 aa, Setaria italica
  Transcript Sequence Number=SeqID_6025
  Subcellular localization annotation: CTP_CleavageSite=45; ConfidenceScore=5.38e-01
LRWWWSRGAGRWSGLTVAGGAGDRRPPPSEPRPAPNSFSPRSLCAAATRPAPLPPARPLAAICALRSIPPRLQPPVDPLPPHPQTFSVDVAATGGGPARRALHHRVLA

SEQ ID NO: 72000 - protein, 441 aa, Setaria italica
  Transcript Sequence Number=SeqID_6026
  Gene Ontology: Mol. function=protein dimerization activity; Cellular component=cytoplasm; Biological process=amino acid metabolic process
  Homolog annotation: Hit_ID=B6TNG9; Match level="QueryCoverage=96%, HitCoverage=96%, E-value=0.0, Identity=84%"; Hit description =Aminoacylase-1
  Pfam annotation: Domain name=Peptidase_M20; Domain location=101-435; Score=131.2; E_value=3.3e-36; Accession=PF01546.20; Description =Peptidase family M20M25M40
  Pfam annotation: Domain name=Peptidase_M28; Domain location=98-301; Score=-51.5; E_value=0.012; Accession=PF04389.9; Description =Peptidase family M28
  Pfam module annotation: Pfam domain module=Peptidase_M20::Peptidase _M28; Domain location=101-435::98-301
MAAPLRHRPLLLAVVLLISGLPRPAHPFTELESDQIARFQEYLRIRTAHPSPDYAGAAAFLLPYAASLGLHTTTLHFTPCKTKPLLLLTWPGTDPSLPSVLLNSHMDSVPAEPELWSHPPFAAHRDPATGRIFARGAQDDKCLPVQYLEAIRGLRAAGFAPARTVHISLVPDEETGGVDGFEKFARSEEFRALNVGFMLDEGQASPTDAFRVFYADRLVWRLIVKAAGAPGHGARMFDGAAVGNLMDCVETVAGFKEAQFGKVKAGEKGPGEVVSVNPVYMKAGIPSPTGFVMNIQPSEAEVGFDLRLPPTEDIEQIKRRVKEEWAPAHKNLTYELMQKGPVMDVAGRPIFTATNESNPWWSVFEQAITSAGGKLSKPEILSSTTDSRFVRQLGIPALGFSPMTNTPILLHDNNEFLEDKVFLRGIKVYEHVIRALSSFQG

SEQ ID NO: 72001 - protein, 238 aa, Setaria italica
  misc_feature (126)..(126): Xaa can be any naturally occurring amino acid
  Transcript Sequence Number=SeqID_6027
  Gene Ontology: Mol. function=nucleotide binding; Biological process =defense response
  Homolog annotation: Hit_ID=Q5CAF9; Match level="QueryCoverage=99%, HitCoverage=24%, E-value=2e-99, Identity=72%"; Hit description =OSJNBa0065H10.8 protein
WCLFCNTTFREDADGECPRHLEHWALKILYKCGGLPLAIVSVGNLLALKEKSEFAWKNVHDSLVWVESTDHGMGQVSSILNLSIDDLPYHLKRCFLYCSIYPEDFFVKRKILIRMWIAEGFVEEKXHATMEDVADDYLNELVQRSLLQVVMKNEFGRAKRFQIHDLIRELILSRSAKEGHFVFSKCTPTFESNSNFRHLIIDRCARSDLPAPKMLSLRSLHGFKTDLDASLLSRFRIN

SEQ ID NO: 72002 - protein, 107 aa, Setaria italica
  Transcript Sequence Number=SeqID_6028
  Gene Ontology: Mol. function=DNA binding; Cellular component=nucleus; Biological process=nucleosome assembly
  Homolog annotation: Hit_ID=B6T648; Match level="QueryCoverage=75%, HitCoverage=60%, E-value=5e-34, Identity=83%"; Hit description=SWIb domain-containing protein
  Pfam annotation: Domain name=SWIB; Domain location=28-105; Score =119.8; E_value=9e-33; Accession=PF02201.10; Description=SWIBMDM2 domain
WRRGPKKAAPAPQVTKADATAAKEKRGIMKPVPVSEEMRRFAGGAPELARPQAVKLIWAHIKANGLQNPAKKTEINCDATLKSLFGGRDKVGMLEISKLLNPHFLKN

SEQ ID NO: 72003 - protein, 79 aa, Setaria italica
  Transcript Sequence Number=SeqID_6029
  Gene Ontology: Mol. function=hydrolase activity; Cellular component =intracellular
  Homolog annotation: Hit_ID=Q8L3V9; Match level="QueryCoverage=100%, HitCoverage=15%, E-value=3e-18, Identity=62%"; Hit description =Histone deacetylase HDA110 isoform 2
LKIQQQFWPVLGPTYASLQEQAGLTKLNELRKRKHSGGPGPFWWKFGSKRLLYRVLYEGPYLRKIKVSGEGKTIDSAEP

SEQ ID NO: 72004 - protein, 75 aa, Setaria italica
  Transcript Sequence Number=SeqID_6030
  Gene Ontology: Mol. function=hydrolase activity; Cellular component =intracellular
  Homolog annotation: Hit_ID=Q8L3V9; Match level="QueryCoverage=96%, HitCoverage=14%, E-value=2e-20, Identity=75%"; Hit description =Histone deacetylase HDA110 isoform 2
MCRYNLRSISSSATEVVKVLVGESSGFHFETAPSKEGLKTVLQVLKIQQQFWPVLGPTYASLQEQQGSVFSKSSE

SEQ ID NO: 72005 - protein, 524 aa, Setaria italica
  misc_feature (21)..(21): Xaa can be any naturally occurring amino acid
  misc_feature (117)..(117): Xaa can be any naturally occurring amino acid
  Transcript Sequence Number=SeqID_6031
  Gene Ontology: Mol. function=hydrolase activity; Cellular component =intracellular; Biological process=loss of chromatin silencing during replicative cell aging
  Homolog annotation: Hit_ID=Q8L3V9; Match level="QueryCoverage=95%, HitCoverage=97%, E-value=0.0, Identity=73%"; Hit description=Histone deacetylase HDA110 isoform 2
  Pfam annotation: Domain name=Hist_deacetyl; Domain location=126-416; Score=442.1; E_value=8.5e-130; Accession=PF00850.11; Description =Histone deacetylase family
KIEVACCDDLPQEFEREQAGXTLEELFFSNDEEEDDSDWDPASSLVVNRWFCLNCTMPNVDEITNCLNCHELKGSVVGGYDAFKTQIAQAALVSPDTELPPVSTAIGFDERMLLHSXQLEIKPNPHPERPDRLRAIAASLAAAGIFPSKCALVPPREITKEELLMVHTPDHIESVEQTKNMLYSYFTSDTYANGHSACAAKLAAGLCADLASLIVSGRVHNGFAMVRPPGHHAGVKQAMGFCLHNNAAVAALAAKRAGAKKVLIVDWDVHHGNGTQEIFDGDSSVLYISLHRHEYGNFYPGTGAADEVGILDGQGFSVNIPWSRGGVGDNDYIFAFQTVVLPIAAEFAPDITIISAGFDAARGDPLGCCDVTPMGYSIMTSLLSDCSKGRLLVILEGGYNLRSISSSATEVVKVLVGESSGFHFETAPSKEGLKTVLQVLKIQQQFWPVLGPTYASLQEQQGSVFSKSTNKTNELRKRKHSGGPGPFWWKFGSKRLLYRVLYEGPYLRKIKVSGEGKTIDSAEP

SEQ ID NO: 72006 - protein, 73 aa, Setaria italica
  Transcript Sequence Number=SeqID_6032
QQKVEKFYIMCHYLQHPATVKISWQITERSCRFLQPKKSLRKKNRGKNRVCYERWHEYSNFLFITRIPSPGSC

SEQ ID NO: 72007 - protein, 94 aa, Setaria italica
  Transcript Sequence Number=SeqID_6033
  Gene Ontology: Mol. function=peptidase activity
  Homolog annotation: Hit_ID=B9GSL1; Match level="QueryCoverage=67%, HitCoverage=58%, E-value=8e-16, Identity=61%"; Hit description=Non -specific lipid-transfer protein
  Pfam annotation: Domain name=Tryp_alpha_amyl; Domain location=34-94; Score=5.2; E_value=0.085; Accession=PF00234.14; Description=Protease inhibitorseed storageLTP f
  Subcellular localization annotation: CTP_CleavageSite=67; ConfidenceScore=5.40e-01
MRRDRMAAAVAALLLLAAAMSAAPASGQAVATSCTASLITTFTPCLNFVTGSTNGGGSPTQQCCGSLAEMVRTGADCACLILTGNVPFSLPINR

SEQ ID NO: 72008 - protein, 318 aa, Setaria italica
  misc_feature (107)..(107): Xaa can be any naturally occurring amino acid
  misc_feature (123)..(123): Xaa can be any naturally occurring amino acid
  misc_feature (153)..(153): Xaa can be any naturally occurring amino acid
  Transcript Sequence Number=SeqID_6034
  Gene Ontology: Mol. function=methyltransferase activity; Cellular component=cellular_component; Biological process=metabolic process
  Homolog annotation: Hit_ID=B9RWD4; Match level="QueryCoverage=96%, HitCoverage=39%, E-value=1e-100, Identity=58%"; Hit description=S -adenosylmethionine-dependent methyltransferase, putative
  Pfam annotation: Domain name=Methyltransf_11; Domain location=12-119; Score=40.3; E_value=7.7e-09; Accession=PF08241.4; Description =Methyltransferase domain
RDGAGAPAPEILVPACGSSALSERLYDAGFRRITNVDFSRVVVADMLRRHARARPEMRWRVMDITSMQFADGSFDVILDKGGLDALMEPGAGTKLGTKYLNEASFAXKRVLKSGGKFVCLTLXESHVLALLLSEFRFGWDMNIQAIASESSKXSAFQTFMVVMVKGKMGAVQTIKSSLDQSAEYCNMKQATAVIRALGNENIIRESYSSGVDVLLSLRDLQLGAIGDLKVIVPGRRRQFILGEQETSLYCYKAVLLDAKKQTETFVYHCGVFIVPKARAQEWLFASAEGQWHVVESAKAARLIMVFLDSRHANFDMVI

SEQ ID NO: 72009 - protein, 138 aa, Setaria italica
  Transcript Sequence Number=SeqID_6035
  Subcellular localization annotation: CTP_CleavageSite=17; ConfidenceScore=5.42e-01
VARALPMAVPPPVSTPRESSHQGERTLPSFPLPSLIHSTRRGAAIRHAEGRRRRSASLRLGSRTESSLGIKERRSCCRGGQLQATPSLEADPPGRQEADNPCGRRCRRRANIVGSVVDEGSSECLEQRHEATICSRCS

SEQ ID NO: 72010 - protein, 41 aa, Setaria italica
  Transcript Sequence Number=SeqID_6036
QGGQLCDYFHITKRDRDLNMRRKEKYVLFGGEAIHSVHSVL

SEQ ID NO: 72011 - protein, 131 aa, Setaria italica
  Transcript Sequence Number=SeqID_6037
  Gene Ontology: Mol. function=hydrolase activity, hydrolyzing O -glycosyl compounds; Biological process=carbohydrate metabolic process
  Homolog annotation: Hit_ID=B0FLE9; Match level="QueryCoverage=100%, HitCoverage=14%, E-value=6e-70, Identity=93%"; Hit description =Starch branching enzyme III
MEWAPGARYCSLVGDFNEWSPTENCAREGHLGHDDFGYWFIILEDKLREGQEPDEYFFQEYNYVDDYDKGDNGVDAEEIMHRMKEEYWEPGEIRSHKSQLEMVVKLYEQMFGPNGPQTEEELGEIPDAQTR

SEQ ID NO: 72012 - protein, 48 aa, Setaria italica
  Transcript Sequence Number=SeqID_6038
CNSKKYGQKTYDKRCISTVILDHFTEMMHVLIKYNARIWNFIFFMENS

SEQ ID NO: 72013 - protein, 90 aa, Setaria italica
  Transcript Sequence Number=SeqID_6039
PTESLVTTRAAKVSKQLKFSSLETLGLNSPDSLAASEYNQGLTNNLPFPNHDFLFLYHRDKLKYLSLSSSHTVISSQTPRKPELDSLNSY

SEQ ID NO: 72014 - protein, 141 aa, Setaria italica
  misc_feature (109)..(109): Xaa can be any naturally occurring amino acid
  misc_feature (119)..(119): Xaa can be any naturally occurring amino acid
  misc_feature (125)..(125): Xaa can be any naturally occurring amino acid
  Transcript Sequence Number=SeqID_6040
  Gene Ontology: Mol. function=GTP binding; Cellular component =intracellular; Biological process=embryonic development ending in birth or egg hatching
  Homolog annotation: Hit_ID=Q9SVA6; Match level="QueryCoverage=85%, HitCoverage=32%, E-value=1e-57, Identity=85%"; Hit description=GTP -binding-like protein
  Pfam annotation: Domain name=TGS; Domain location=100-140; Score =12.0; E_value=0.0092; Accession=PF02824.13; Description=TGS domain
LTLGTFVVLVKSPILVSCSYRIHNADVSLRYDATADDLIDVIEGSRIYTPCIYVVNKIDQITLEELEILDKLPHYCPISAHLEWNLDGLLEKVWEYLDLVRIYTKPKGXNPDYEDPVIXSSKKKXVEDFCNRIHKDMVKTI

SEQ ID NO: 72015 - protein, 390 aa, Setaria italica
  Transcript Sequence Number=SeqID_6041
  Gene Ontology: Mol. function=GTP binding; Cellular component =intracellular; Biological process=multicellular organismal development
  Homolog annotation: Hit_ID=Q9SVA6; Match level="QueryCoverage=93%, HitCoverage=99%, E-value=1e-174, Identity=82%"; Hit description=GTP -binding-like protein
  Pfam annotation: Domain name=Dynamin_N; Domain location=89-197; Score= -34.5; E_value=0.077; Accession=PF00350.15; Description=Dynamin family
  Pfam annotation: Domain name=GTP_EFTU; Domain location=87-313; Score=- 81.8; E_value=0.0059; Accession=PF00009.19; Description=Elongation factor Tu GTP binding domain
  Pfam annotation: Domain name=MMR_HSR1; Domain location=87-207; Score =127.0; E_value=6.1e-35; Accession=PF01926.15; Description=GTPase of unknown function
  Pfam annotation: Domain name=Miro; Domain location=88-207; Score= -6.8; E_value=0.047; Accession=PF08477.5; Description=Miro-like protein
  Pfam annotation: Domain name=TGS; Domain location=314-388; Score =146.7; E_value=7.1e-41; Accession=PF02824.13; Description=TGS domain
  Pfam module annotation: Pfam domain module=Dynamin_N::GTP_EFTU::MMR _HSR1::Miro::TGS; Domain location=89-197::87-313::87-207::88-207::314- 388
QLPSVLPLSLNTWRDALHIFNEPRTVMQKIKDIEDEMARTQKNKATAHHLGLLKAKLAKLRRELLTPTSKGGGGAGEGFDVTKSGDARVGLVGFPSVGKSTLLNKLTGTFSEVAAYEFTTLTCIPGVIMYKGAKIQLLDLPGIIEGAKDGKGRGRQVISTARTCNVILIVLDAIKPITHKRLIEKELEGFGIRLNKTPPNLTFRKKDKGGINFTSTVTNTHLDLETVKAICSEYRIHNADVSLRYDATADDLIDVIEGSRIYTPCIYVVNKIDQITLEELEILDKLPHYCPISAHLEWNLDGLLEKVWEYLDLVRIYTKPKGLNPDYEDPVIVSSKKKTVEDFCNRIHKDMVKQFKYALVWGSSVKHKPQRVGKEHELEDEDVVQIIKKI

SEQ ID NO: 72016 - protein, 135 aa, Setaria italica
  Transcript Sequence Number=SeqID_6042
  Gene Ontology: Mol. function=nucleic acid binding; Cellular component= chloroplast
  Homolog annotation: Hit_ID=B6TL11; Match level="QueryCoverage=100%, HitCoverage=100%, E-value=9e-57, Identity=81%"; Hit description =Glycine-rich RNA-binding protein 2
  Pfam annotation: Domain name=RRM_1; Domain location=37-107; Score =99.7; E_value=9.8e-27; Accession=PF00076.14; Description=RNA recognition motif. (a.k.a. RRM, RBD, o
MAMAALRGASRCLASGGSPAAVRPMLLAHSRGITYKLFIGGLSQFATEDTLAEAFSRYGQVIEATIVTDKMTDKPKGFGFVKFASQEEANTAREEMNGKVLNGRVIYVDIAKPKLERDADARPIARGPPKPFGND

SEQ ID NO: 72017 - protein, 64 aa, Setaria italica
  Transcript Sequence Number=SeqID_6043
CLSSSTVAVLAAPDFLLSPEEDDRHDSSRQAKCRFANTSNFEFWTILDAKIGKYGGLMSSSSYF

SEQ ID NO: 72018 - protein, 328 aa, Setaria italica
  misc_feature (150)..(150): Xaa can be any naturally occurring amino acid
  Transcript Sequence Number=SeqID_6044
  Gene Ontology: Mol. function=catalytic activity; Biological process =metabolic process
  Homolog annotation: Hit_ID=B9RQ06; Match level="QueryCoverage=78%, HitCoverage=76%, E-value=1e-103, Identity=70%"; Hit description=2 -deoxyglucose-6-phosphate phosphatase, putative
  Subcellular localization annotation: CTP_CleavageSite=22; ConfidenceScore=5.24e-01
SPPLRAAVAPSSGRRLPAPPLRCSSSSSDTSVPPSIGLLVEVEGVLADVYRFGNRQAFNVAFQSLGLDCANWTEPIYTDLVRKARGDEERMLALFFDRIGWPTSLPTSEKGSFMKSVLREKLKALEEFSASGSLPLRPGVETFIDDALSXGIPVAILAAYGRNGENISRSIVKKLGPERTSKIKIVGKDEVEGSFYGQLVLGKGVTSSLDEQLIREAQKAASAEKQRIAEEVASILKLSVDITASESSEKVIAALRAGSEYVGCDVQNCILVAGSQPGVLAAERIGMPCVVVRSSFTARAEFPSAKAVMDGFGGTDLTVSKLLSKKWS

SEQ ID NO: 72019 - protein, 129 aa, Setaria italica
  Transcript Sequence Number=SeqID_6045
  Gene Ontology: Mol. function=nucleic acid binding; Cellular component= nucleus; Biological process=regulation of transcription, DNA-dependent
  Homolog annotation: Hit_ID=Q24BQ3; Match level="QueryCoverage=97%, HitCoverage=9%, E-value=8e-17, Identity=29%"; Hit description=Zinc knuckle family protein
  Pfam annotation: Domain name=zf-CCHC; Domain location=112-129; Score =37.9; E_value=3.9e-08; Accession=PF00098.15; Description=Zinc knuckle
  Pfam annotation: Domain name=zf-CCHC; Domain location=3-20; Score =41.2; E_value=4e-09; Accession=PF00098.15; Description=Zinc knuckle
  Pfam annotation: Domain name=zf-CCHC; Domain location=35-52; Score =41.0; E_value=4.8e-09; Accession=PF00098.15; Description=Zinc knuckle
  Pfam annotation: Domain name=zf-CCHC; Domain location=77-94; Score =38.4; E_value=2.8e-08; Accession=PF00098.15; Description=Zinc knuckle
  Pfam module annotation: Pfam domain module=zf-CCHC::zf-CCHC::zf -CCHC::zf-CCHC; Domain location=112-129::3-20::35-52::77-94
GAGACYKCGEPGHMARDCPSADGGGGYGGGGGGGSGCFKCGEPGHIARDCPSGGGGGYGGGGYGGGYGGGGGGGGGGACYNCGQTGHMARDCSSGGGGGGGRFGGGGGGGDRSCYNCGEAGHIARDCRA

SEQ ID NO: 72020 - protein, 172 aa, Setaria italica
  Transcript Sequence Number=SeqID_6046
QSFPSGAAKHKKKEADFVIPSATQNQSISHFLNFFLNLDDEQRRRLTKHTMITEQSSSPTKPNQIQSETKRKKAAGSSIARRRALGPRSAKLKQYSDERDIKSERLGRDLDGDHHRVVVARCRSDLIRLTRGSRGRCGRPRRSCSRSGRRRRRHRQTGRRRRRLRPRCLVLV

SEQ ID NO: 72021 - protein, 75 aa, Setaria italica
  Transcript Sequence Number=SeqID_6047
  Gene Ontology: Cellular component=membrane
  Homolog annotation: Hit_ID=B0FSL2; Match level="QueryCoverage=88%, HitCoverage=9%, E-value=6e-19, Identity=66%"; Hit description=Early responsive to dehydration protein
VSLVVLLFLSYESNGRMWPHMHTRIIAALLLYQATMIGVIGLKKFYYSPILVPLLPISIIFAYICHMRFYPAFAN

SEQ ID NO: 72022 - protein, 39 aa, Setaria italica
  Transcript Sequence Number=SeqID_6048
  Gene Ontology: Cellular component=membrane
  Homolog annotation: Hit_ID=B0FSL2; Match level="QueryCoverage=82%, HitCoverage=4%, E-value=4e-09, Identity=87%"; Hit description=Early responsive to dehydration protein
RQSWWPGYGLELSRVVPLIIFHLKRKYLCKTEDDVKAAV

SEQ ID NO: 72023 - protein, 120 aa, Setaria italica
  Transcript Sequence Number=SeqID_6049
  Gene Ontology: Cellular component=membrane
  Homolog annotation: Hit_ID=B0FSL2; Match level="QueryCoverage=75%, HitCoverage=12%, E-value=2e-18, Identity=52%"; Hit description=Early responsive to dehydration protein
  Subcellular localization annotation: CTP_CleavageSite=19; ConfidenceScore=5.07e-01
MDFASFITSVLTSFVIFVVLVLVFTWLSRRPGNAPVYYPSLLLRGLDPWEGRRRGSRSPVGWIREALSASETDVIAAGGVDAAVYLVFLSSGTANPAAAQFFFSVFLPLLETLSSVGSSP

SEQ ID NO: 72024 - protein, 214 aa, Setaria italica
  Transcript Sequence Number=SeqID_6050
  Gene Ontology: Cellular component=membrane
  Homolog annotation: Hit_ID=B0FSL2; Match level="QueryCoverage=99%, HitCoverage=28%, E-value=2e-90, Identity=76%"; Hit description=Early responsive to dehydration protein
  Pfam annotation: Domain name=DUF221; Domain location=1-212; Score =98.9; E_value=1.7e-26; Accession=PF02714.7; Description=Domain of unknown function DUF221
IKTILQAYLPQIALIVFLALLPAFLMFLSKAEGIPSQSHVVRASAGKYFYFIVFNVFLIYTLGKSLITSLKTILNNANITVIINMLATSLPGGATFFLTFVALKFFVGYGLELSRVVPLIIFHLKRKYLCKTEDDVKAAWYPGDLGYSTRVPNDMLIATVTLCYSVMAPLIIPFGVAYFALGWLIAKNQVLRVYVPSYESNGRMWPHMRTRIGE

SEQ ID NO: 72025 - protein, 50 aa, Setaria italica
  Transcript Sequence Number=SeqID_6051
REEEGCPFREDQEEQGCCQVQGLTRRCRSRSMRSRTSFSPRGGRKSMRSR

SEQ ID NO: 72026 - protein, 79 aa, Setaria italica
  Transcript Sequence Number=SeqID_6052
LAGLKSCRFQRYIDEHALLTRKLSVVHLDVVLTSNLLDAQTCTNGYYHIKNDAQIRGALHYRIRNFIQQMKNGAAFSTI

SEQ ID NO: 72027 - protein, 69 aa, Setaria italica
  Transcript Sequence Number=SeqID_6053
  Gene Ontology: Mol. function=structural constituent of ribosome; Cellular component=ribonucleoprotein complex; Biological process =translation
  Homolog annotation: Hit_ID=Q8GVY2; Match level="QueryCoverage=100%, HitCoverage=100%, E-value=2e-30, Identity=91%"; Hit description=60S ribosomal protein L38, putative, expressed
  Pfam annotation: Domain name=Ribosomal_L38e; Domain location=2-69; Score=169.4; E_value=1e-47; Accession=PF01781.10; Description =Ribosomal L38e protein family
MPKQIHEIKDFLLTARRKDARSVKIKRSKDVVKFKVRCSKYLYTLCVFDAEKANKLKQSLPPGLSVQEI

SEQ ID NO: 72028 - protein, 139 aa, Setaria italica
  misc_feature (132)..(132): Xaa can be any naturally occurring amino acid
  Transcript Sequence Number=SeqID_6054
DVVPSESEDMGDVRPRRVPRETMLRRNGRNNGVARWEAAGTIAAGSNDDRGWSGGAFFSDSERARESHSEQRWQETSSSASTRKRASGRGNATNTSARNRVGQRGRAGAGSFSDSEAMHGGSEPKWRSRTKXGNRNGAG

SEQ ID NO: 72029 - protein, 163 aa, Setaria italica
  Transcript Sequence Number=SeqID_6055
  Gene Ontology: Mol. function=receptor activity; Cellular component =endoplasmic reticulum; Biological process=intracellular protein transport
  Homolog annotation: Hit_ID=B6TG43; Match level="QueryCoverage=87%, HitCoverage=63%, E-value=5e-31, Identity=53%"; Hit description=B -cell receptor-associated protein 31-like containing protein
  Pfam annotation: Domain name=Bap31; Domain location=3-158; Score= -77.8; E_value=0.027; Accession=PF05529.4; Description=B-cell receptor-associated protein 31-like
  Subcellular localization annotation: CTP_CleavageSite=67; ConfidenceScore=5.03e-01
MIQLLFTVLAAEAAVAATLLFKTPLRKLAVLALDRLKRGRGPVMVRTVAATVLVVLASSLHSMAQIRGRAEGELDGAGVVGLTPTDQVLLARHLLEASLMGYSLFLALVIDRLHNYVKEIRRLKKNLEAVSKQNKTMLEEATHGRSEESERDLKDISDAKKDV

SEQ ID NO: 72030 - protein, 232 aa, Setaria italica
  Transcript Sequence Number=SeqID_6056
  Gene Ontology: Mol. function=galactosylgalactosylxylosylprotein 3 -beta-glucuronosyltransferase activity; Cellular component=membrane
  Homolog annotation: Hit_ID=Q50HW1; Match level="QueryCoverage=100%, HitCoverage=62%, E-value=1e-105, Identity=80%"; Hit description =Glycosyltransferase
  Pfam annotation: Domain name=Glyco_transf_43; Domain location=4-230; Score=191.8; E_value=1.8e-54; Accession=PF03360.8; Description =Glycosyltransferase family 43
LLRLAHTLRLVRPPVVWVVVEPAADAPATAEVLRGTGVMYRHIAFKPEENFTTAAAEAHAQRNAALAHVEKHRLAGVLHFADAAGVYDTGFFDQIRQIEAFGTWPVATMSAGEKKVVVEGPLCSASMVVGWFSRDFNDGTTRAVTYNTEADSNPAGAAGTRAHTIDVSGFAFNSSILWDPERWGRPTSLPDTSQDSIKFVQEVVLEDRAKLKGIPSDCSQIMVWQYSVPSSQ

SEQ ID NO: 72031 - protein, 130 aa, Setaria italica
  Transcript Sequence Number=SeqID_6057
  Gene Ontology: Mol. function=hydrolase activity, hydrolyzing O -glycosyl compounds; Cellular component=vacuole; Biological process =carbohydrate metabolic process
  Homolog annotation: Hit_ID=Q60DY5; Match level="QueryCoverage=99%, HitCoverage=33%, E-value=4e-46, Identity=63%"; Hit description =Putative beta-glucosidase
FTAYADVCFREFGDRVSYWTTLDEANVATVASYDNGQFAPGRCSDPFGVTKCTVGNSSVEPYIAQHNTLLAHASAARLYRGKYQAMQKGVIGINIFTMWSYPLTNSTADLKASQRFRDFYFGWVLEPLVS

SEQ ID NO: 72032 - protein, 172 aa, Setaria italica
  Transcript Sequence Number=SeqID_6058
  Gene Ontology: Mol. function=hydrolase activity, hydrolyzing O -glycosyl compounds; Cellular component=vacuole; Biological process =carbohydrate metabolic process
  Homolog annotation: Hit_ID=B6SKG0; Match level="QueryCoverage=97%, HitCoverage=31%, E-value=4e-67, Identity=67%"; Hit description=Non -cyanogenic beta-glucosidase
  Pfam annotation: Domain name=Glyco_hydro_1; Domain location=1-172; Score=-193.0; E_value=5.9e-09; Accession=PF00232.10; Description =Glycosyl hydrolase family 1
MMFQDDVKLVADTNLEAYRFSISWSRLIPKGRGDVNPQGLEYYNNLIDELVRHGVQVHVMMCHLDLPQVLEDEYSGWLSPRIVEDFTAYADVCFREFGDRVSYWTTLDEANVATVASYDNGQFAPGRCSDPFGVTKCTVGNSSVEPYIAQHNTLLAHASAARLYRGKYQVST

SEQ ID NO: 72033 - protein, 98 aa, Setaria italica
  Transcript Sequence Number=SeqID_6059
RWEFANEGFLRGQKHLLKTINRRKPSLQGNSQPQQPQLQNAPLPACVEVGKGAFCNWGNSQPQQPQLQNAPLPACVEVGKFGLEEEIERLKRHKEHSY

SEQ ID NO: 72034 - protein, 442 aa, Setaria italica
  Transcript Sequence Number=SeqID_6060
  Gene Ontology: Mol. function=sequence-specific DNA binding; Cellular component=nucleus; Biological process=regulation of transcription, DNA-dependent
  Homolog annotation: Hit_ID=Q84T61; Match level="QueryCoverage=99%, HitCoverage=86%, E-value=1e-174, Identity=72%"; Hit description=Heat stress transcription factor A-1
  Pfam annotation: Domain name=HSF_DNA-bind; Domain location=1-146; Score=207.0; E_value=5.2e-59; Accession=PF00447.9; Description=HSF -type DNA-binding
VWNTPEFARDLLPKYFKHSNFSSFVRQLNTYGFRKVDPDRWEFANEGFLRGQKHLLKTINRRKPSLQGNSQPQQPQLQNAPLPACVEVGKFGLEEEIERLKRDKNVLMQELVRLRQQQQTTDHQLQTLGKRLQGMESRQQQMMSFLAKAMQSPGFLAQFVQQNENSRRRIVAVNKKRRLPKQDGGLDSESASASLDGQIIKYQPMINEAAKAMLRKILKLDASHRLESVGNSDNFLLENYMPAAQGFDSSSSTRNSGVTLAEVPATSGLPYVAASSGLSAICSSSVAPEIQCPAVLDSNSSNQVPNMTVVPPVSKPIAPAPGDLTIPEFPDLADIVPEDSDIPGGPFGMPGPEFPLPEEGDDSVPIETDEILYNDETQDLPAIVDSFWEQFLVGSPLSVDNDEVDSGVLDTRETPQENGWNKLEHMANLTEQMGLLSPNHRV

SEQ ID NO: 72035 - protein, 567 aa, Setaria italica
  misc_feature (456)..(456): Xaa can be any naturally occurring amino acid
  Transcript Sequence Number=SeqID_6061
  Gene Ontology: Mol. function=ATP-dependent helicase activity; Cellular component=mitochondrial matrix; Biological process =regulation of translation
  Homolog annotation: Hit_ID=Q0DBU5; Match level="QueryCoverage=97%, HitCoverage=99%, E-value=0.0, Identity=86%"; Hit description=DEAD -box ATP-dependent RNA helicase 31
  Pfam annotation: Domain name=DEAD; Domain location=123-302; Score =228.1; E_value=2.2e-65; Accession=PF00270.21; Description=DEADDEAH box helicase
  Pfam annotation: Domain name=Helicase_C; Domain location=376-452; Score=94.0; E_value=5.1e-25; Accession=PF00271.23; Description =Helicase conserved C-terminal domain
  Pfam annotation: Domain name=ResIII; Domain location=119-297; Score= -17.4; E_value=0.0015; Accession=PF04851.7; Description=Type III restriction enzyme, res subunit
  Pfam module annotation: Pfam domain module=DEAD::Helicase_C::ResIII; Domain location=123-302::376-452::119-297
DDDVVGFGDSSGRGLKKFDFGLSEGEDDDDDDDAVGEVGEDDEPSGFEDDPFDDEGAKDNVREIAGNKSGSFELDKEEPAKQKRDTRSTGGGDSYLSQKRFDECPLSPLTLKGVKAANYERMTAVQEATLPIILQGKDVLAKARTGTGKTVAFLLPAIEVVSKLPPVDRDQKRPPISVVVVCPTRELADQAAAEASKLLKFHPSIGVQLVIGGTRMALEQKRMHTNPCQILVATPGRLRDHMENTPGFATRLMGVKVLILDEADRLLDMGFRSDIEKIVAALPKQRQTLLFSATVPDEVRQVCHIAMKRDLEFVNTVEEGSEETHSQVKQMHLVAPLDKQFSILYGLLTDHISENVDYKVIVFCTTAKVTSLVAELLSELKLNVREIHSRKPQSYRTRISKEFKESKGLILVSSDVSARGVDYPNVTLVVQLGVPTDREQYIHRLGRTGRKGNEGXGVLLLAPWEEYFLRSIKDLPLTEATQPLIDQDSKKKVDKALAHVEVKDKESAYQAWLGYYNSNKFIGRDKYQLVSLANEFSRSMGLNNPPAVPKLVLRKMGLSNIPGLRAK

SEQ ID NO: 72036 - protein, 75 aa, Setaria italica
  Transcript Sequence Number=SeqID_6062
VGFFCLLMNILSRYMKLLTCVIHFIKLCSVARVIEEQLPIFHVFILSTKVLWTQVVDWCSCISHTPLFPHVIFFA

SEQ ID NO: 72037 - protein, 176 aa, Setaria italica
  misc_feature (14)..(14): Xaa can be any naturally occurring amino acid
  Transcript Sequence Number=SeqID_6063
  Gene Ontology: Mol. function=protein binding; Cellular component =nucleus; Biological process=ubiquitin-dependent protein catabolic process
  Homolog annotation: Hit_ID=B9S2S7; Match level="QueryCoverage=89%, HitCoverage=58%, E-value=4e-62, Identity=71%"; Hit description =Protein binding protein, putative
  Pfam annotation: Domain name=BTB; Domain location=1-98; Score=53.4; E_ value=8.4e-13; Accession=PF00651.23; Description=BTBPOZ domain
RRRRARPDTPAVPXHRVILASRSPVFRAMLENEMEESRSGIIKIYDVSYDVLRAFVHYMYTAEALLDEQMASDLLVLAEKYEVKHLKAYCEKFITSKVNNDNAITHYAFAHRHSAKQLLESSLSVLMDNMSTLADREEYKELVEKDPRLVVEIYEAYLNRQVNTAAGKDTDCSGRK

SEQ ID NO: 72038 - protein, 34 aa, Setaria italica
  Transcript Sequence Number=SeqID_6064
FYTKVRYSKGYMVSTELKTLNFVATVNSSIGSTF

SEQ ID NO: 72039 - protein, 57 aa, Setaria italica
  Transcript Sequence Number=SeqID_6065
  Gene Ontology: Mol. function=thiol oxidase activity; Biological process=oxidation reduction
MIKPETRDSLIRFLQILVSHHPSKRCRRGSANVLINFDDHWHTNQSLSSQESSTLFN

SEQ ID NO: 72040 - protein, 454 aa, Setaria italica
  misc_feature (242)..(242): Xaa can be any naturally occurring amino acid
  Transcript Sequence Number=SeqID_6066
  Gene Ontology: Mol. function=thiol oxidase activity; Cellular component=intracellular; Biological process=cell redox homeostasis
  Homolog annotation: Hit_ID=Q9M9Q3; Match level="QueryCoverage=99%, HitCoverage=82%, E-value=1e-153, Identity=56%"; Hit description =T15D22.7 protein
  Pfam annotation: Domain name=Evr1_Alr; Domain location=249-344; Score= 88.3; E_value=2.8e-23; Accession=PF04777.5; Description=Erv1  Alr family
  Pfam annotation: Domain name=Thioredoxin; Domain location=1-110; Score=-4.4; E_value=0.00048; Accession=PF00085.12; Description =Thioredoxin
  Pfam module annotation: Pfam domain module=Evr1_Alr::Thioredoxin; Domain location=249-344::1-110
PESFAVVEFFAHWCPACRNYKPHYEKVAKLFNGPDAAHPGIIVMARVDCASKVNLDLCNKFSVDHYPFLVWGPPAKFNSPQWKPKQENSELELIDDGRTAERLLKWINKKMGSSFNLDDKRYENESALPKNASDPEQIVRAIYDVEEATAHAWQIILELKMIKPETRDSLIRFLQILVSHHPSKRCRRGSANVLINFDDHWHTNQSLSSQESSTLLTSVTGDNICGEGVPRGYWMFCRGSKXETRGFSCGLWVLLHSLTVRSGDGESQSTFTSICDFIHNFFICEECRKHFYEMCSSVSVPFKSARDLTLWLWRAHNKVNERLMKEEKDLDTADPSFPKVIWPPKQLCPSCYRSSSRTADGVTQVEWDEDEVFHFLVGYYGKKLVSSYRETSMDSHLQVTKQVGSISDDSSASSAATVPIGAALGVAVASCTFGALACFWRTQQKNRKQRKNWN

SEQ ID NO: 72041 - protein, 167 aa, Setaria italica
  misc_feature (77)..(77): Xaa can be any naturally occurring amino acid
  Transcript Sequence Number=SeqID_6067
  Gene Ontology: Mol. function=acyltransferase activity; Cellular component=mitochondrial outer membrane; Biological process=metabolic process
  Homolog annotation: Hit_ID=Q7XPI9; Match level="QueryCoverage=91%, HitCoverage=51%, E-value=9e-75, Identity=88%"; Hit description =OSJNBa0087O24.21 protein
  Pfam annotation: Domain name=Acyltransferase; Domain location=2-134; Score=54.2; E_value=5.2e-13; Accession=PF01553.13; Description =Acyltransferase
APPSSPGRGPPRGRPLLTVSNHMSTVDDPLMWGFKGFPTSDAKLGRWVLTAEDICFRNVVMSYVFRLGKCVPITRGXGIYQEHMNEALEVLINGGWLHSFPEGKIAQDDQPIRRLKWGTASLIVRAPITPIVLPIVHSGFEKVMPETLFFGRRPPVPLCGKKIDIIV

SEQ ID NO: 72042 - protein, 63 aa, Setaria italica
  Transcript Sequence Number=SeqID_6068
  Homolog annotation: Hit_ID=B6T443; Match level="QueryCoverage=100%, HitCoverage=15%, E-value=2e-19, Identity=79%"; Hit description=THUMP domain containing protein
MAPGGEAKANPGGGGGGGGGRKRKFLPHGKPVRKGAYPLRPGVQGFFITCDGGRERQATREAL

SEQ ID NO: 72043 - protein, 843 aa, Setaria italica
  Transcript Sequence Number=SeqID_6069
AGEHEGGESLPGGVIGGVGEGIGASAAECGGGLPGSAPEAASAVDGGDSAEQSSGNGTGHQVIGDESAEDHLISSSNIPSEITSEASKMDDDNLTTVDTQYSEKETPIEDGDPSDPAVGSEQLKDIPTSILLSEPEDGAKCTSEISEHGKQNSLSEYETQNSTAVPLESNATGGGTSEQMDDVASQVDGTAVIEEDDTINTIGKNKFSEDKSIDGDDFDLSCQENLQTKIGEEHSNTGVVEESSDKNLNAIHNKEIPSDEAESNQQNKLMITDSFENIANIDVPVESSTEKSVGTEDDMLKLGTVGSYSETPDVKPQQQPDSTSETEGHLAVSEGADNVDEQHYPISGGTANVTENICSSGVTMDGSMQQNVTAGTVVTSQVDIVELSTPAMPHEINMVARTNNVDENRQNEKDGTDLTSYGGNELHIVENFEEKQENKEVIVDPIPHEANTASSVVQSMSSAEEKEQIEEFIANLAPEVTSVTSSRDIVEEKQGEIDVKTSGEIDGARSMETAGENNDATWEINAGTSTDDVEDKVQNEEFTTGPISDGINMICSSTNEGKMHKEEVTESLGCHENIVVRGTDDVEEKTIEETMADATSSKFSLVTPTDSVEERKDEETTADPTLLERSAEHTIDNIDERKNEEPVLDPTTTTATIRSIGDVEGKKQNEETTADPSSGECNGLPGTDNAEAENKKEKGDIATTGPATTNVVKEIGETEDMSSKEISTIESTDDLKRAADQNEEIADKEMVMDSDKNHVSLKVLLADKNVETKDKEKKTSTKERVLSFRRRTSKDNVSPVKPGSPKVGSGQQDWNSPARLPVEKKPKGRKQQWVPFICCSSVQ

SEQ ID NO: 72044 - protein, 66 aa, Setaria italica
  Transcript Sequence Number=SeqID_6070
  Subcellular localization annotation: CTP_CleavageSite=30; ConfidenceScore=5.11e-01
SSWGGRQAGRQLGIPLPPPARNLKDRCFLSLKAKPSQHTQAKLTHSSFLCRVFLFHSREREDNASQ

SEQ ID NO: 72045 - protein, 99 aa, Setaria italica
  Transcript Sequence Number=SeqID_6071
  Gene Ontology: Mol. function=protein kinase activity; Biological process=protein amino acid phosphorylation
ALPRLQEFNVSNNLMSGRIPSAVAAFPAAAFDGNVGLCGAPLPPCKDEAQQPNASGAVNASAAGDCPPAAAMVAPAGAEAQGGGGKGKMSRAAVVAIVV

SEQ ID NO: 72046 - protein, 56 aa, Setaria italica
  Transcript Sequence Number=SeqID_6072
LANKVYESTWSDSWERFPLCHHEYHRAVLLCIDTSIDLFTIRLLALSGLLVKTVLC

SEQ ID NO: 72047 - protein, 97 aa, Setaria italica
  Transcript Sequence Number=SeqID_6073
  Gene Ontology: Mol. function=catalytic activity; Cellular component =plasma membrane; Biological process=pyridoxine biosynthetic process
  Homolog annotation: Hit_ID=Q69LA6; Match level="QueryCoverage=100%, HitCoverage=28%, E-value=7e-34, Identity=79%"; Hit description =Probable pyridoxal biosynthesis protein PDX1.1
  Subcellular localization annotation: CTP_CleavageSite=62; ConfidenceScore=5.37e-01
MASDGTGVVALYGGGSGNNKVKVMDASSKSPAAAATFSVKVGLAQMLRGGVIMDVVTPEQARIAEEAGACAVMALERVPADIRAQGGVARMSDPGLI

SEQ ID NO: 72048 - protein, 95 aa, Setaria italica
  misc_feature (14)..(14): Xaa can be any naturally occurring amino acid
  Transcript Sequence Number=SeqID_6074
  Gene Ontology: Mol. function=catalytic activity; Cellular component =cytosol; Biological process=pyridoxine biosynthetic process
  Homolog annotation: Hit_ID=Q69LA6; Match level="QueryCoverage=100%, HitCoverage=29%, E-value=3e-46, Identity=95%"; Hit description =Probable pyridoxal biosynthesis protein PDX1.1
TKQLGRLPVVQFAXGGVATPADAALMMQLGCDGVFVGSGIFKSGDPARRARAIVQAVTHYSDPEILADVSSGLGEAMVGINLSDPKVERYAARSE

SEQ ID NO: 72049 - protein, 318 aa, Setaria italica
  Transcript Sequence Number=SeqID_6075
  Gene Ontology: Mol. function=catalytic activity; Cellular component =cytosol; Biological process=pyridoxine biosynthetic process
  Homolog annotation: Hit_ID=Q69LA6; Match level="QueryCoverage=100%, HitCoverage=100%, E-value=1e-163, Identity=90%"; Hit description =Probable pyridoxal biosynthesis protein PDX1.1
  Pfam annotation: Domain name=SOR_SNZ; Domain location=30-237; Score =440.0; E_value=3.6e-129; Accession=PF01680.9; Description=SORSNZ family
  Pfam annotation: Domain name=ThiG; Domain location=133-295; Score= -162.9; E_value=0.00013; Accession=PF05690.6; Description=Thiazole biosynthesis protein ThiG
  Pfam module annotation: Pfam domain module=SOR_SNZ::ThiG; Domain location=30-237::133-295
  Subcellular localization annotation: CTP_CleavageSite=14; ConfidenceScore=5.23e-01
MASDGNGSGVVTVYGNNGAALLEPSKQSKSTFSVKVGLAQMLRGGVIMDVVTPEQARLAEEAGACAVMALERVPADIRAQGGVARMSDPGLIRDIKRAVTIPVMAKARIGHFVEAQILEAIGVDYVDESEVLTLADDAHHINKHNFRVPFVCGCRDLGEALRRVREGAAMIRTKGEAGTGNVVEAVRHVRSVMGDIRALRNMDDDEVFAYAKRIAAPYDLVMQTKQLGRLPVVQFAAGGVATPADAALMMQLGCDGVFVGSGIFKSGDPARRARAIVQAVTHYSDPNILADVSAGLGEAMVGINLNDPKVERFAARSE

SEQ ID NO: 72050 - protein, 112 aa, Setaria italica
  Transcript Sequence Number=SeqID_6076
MATATVVGGPGRMEAAASSSSAAELTAAVAAQRLLGLLALAIQAVNSGSEILNEDQRAIYKLLGRIKSDSVPENKDAGGSDDDDDDDDEDEDDDGGEDDDDAEEYSGDDGGQ

SEQ ID NO: 72051 - protein, 197 aa, Setaria italica
  Transcript Sequence Number=SeqID_6077
  Gene Ontology: Mol. function=protein serine/threonine kinase activity; Biological process=protein amino acid phosphorylation
  Homolog annotation: Hit_ID=Q8H4I0; Match level="QueryCoverage=79%, HitCoverage=22%, E-value=6e-43, Identity=58%"; Hit description =Putative receptor-type protein kinase LRK1
  Pfam annotation: Domain name=Lectin_legB; Domain location=29-197; Score=118.1; E_value=3e-32; Accession=PF00139.11; Description=Legume lectin domain
MEHLPMAFLVAFFLLCLSLNNLPGFCVAGGDSFAFSGFAGANLTRDGTAKITREGLLELTNNDAHVQGHAFHPTPVQFKDSPNGTVQSFSLIFVFAILSDPASSDVSSDGMAFVIAPGKDFSSASPAQCLGLLNSKSTGPANASNHIFAVELDTIQNEEFKDIDNNHVGIDINTLSSVYSHSAAFYDDKDGTLKNLN

SEQ ID NO: 72052 - protein, 199 aa, Setaria italica
  misc_feature (187)..(187): Xaa can be any naturally occurring amino acid
  Transcript Sequence Number=SeqID_6078
  Gene Ontology: Mol. function=phosphoglycolate phosphatase activity; Cellular component=cellular_component; Biological process=methionine salvage
  Homolog annotation: Hit_ID=Q2R483; Match level="QueryCoverage=98%, HitCoverage=38%, E-value=1e-84, Identity=73%"; Hit description =Haloacid dehalogenase-like hydrolase family protein, putative, expressed
  Pfam annotation: Domain name=Hydrolase; Domain location=2-191; Score=- 0.7; E_value=0.048; Accession=PF00702.18; Description=haloacid dehalogenase-like hydrolase
HLDATYGSDETNDDIAMLRAQVEQDLSEGIAGVVPVPPDEAGKDPVIDALVANVEAMIKADRKITSLKQLQGHVWRTGFESEEIKGVVFDDVPPALQKWHASGIKTYIYSSGSREAQRLIFGNTTYGDLRKYLCGFFDTTVGTKREARSYYEIWQSVGVDRPSQILFLTDVYQEAAAAKAAGLEVLXSIRPGNAPLPRK

SEQ ID NO: 72053 - protein, 289 aa, Setaria italica
  Transcript Sequence Number=SeqID_6079
  Gene Ontology: Mol. function=acid phosphatase activity; Cellular component=chloroplast
  Homolog annotation: Hit_ID=Q8VXF4; Match level="QueryCoverage=98%, HitCoverage=45%, E-value=1e-144, Identity=81%"; Hit description =Putative metallophosphatase
  Pfam annotation: Domain name=Metallophos; Domain location=67-283; Score=59.9; E_value=9.9e-15; Accession=PF00149.20; Description =Calcineurin-like phosphoesterase
SVGWSGVPVSTVGWRDPGFIHTAFMRDLWPNKEYYYKIGHQLQDGSVVWGKPYTFRAPPSPGQNSLQRVIVFGDMGKAERDGSNEFANYQPGSLNTTDALVRDLDNYDIVFHIGDLPYANGYISQWDQFTAQVAPITAKKPYMIASGNHERDWPNTGGFFDVKDSGGECGVLAETMYYYPAENRANFWYKVDYGMFRFCVADSEHDWREGTEQYKFIEHCLSTVDRKHQPWLIFAAHRVLGYSSNSWYAMEGSFEEPEGRESLQKLWQKYRVDIAFFGHVHNYERTCPI

SEQ ID NO: 72054 - protein, 118 aa, Setaria italica
  Transcript Sequence Number=SeqID_6080
  Gene Ontology: Mol. function=heat shock protein binding; Biological process=protein folding
  Homolog annotation: Hit_ID=B6UEF0; Match level="QueryCoverage=100%, HitCoverage=79%, E-value=3e-41, Identity=73%"; Hit description=Tsi1 -interacting protein TSIP1
  Subcellular localization annotation: CTP_CleavageSite=48; ConfidenceScore=5.72e-01
MQTPATTCGAHAPAFAPFPRHAAPPGSFRKPCPGSSRRAPGLRLVAPMASTVNSPGSSSDFAKRIERAWLISQQPRPISCSSCQSAGHVECKWCAGTGFFILGNNMLCEVPSRNTTCV

SEQ ID NO: 72055 - protein, 77 aa, Setaria italica
  Transcript Sequence Number=SeqID_6081
LFSPHTMFGLHCIVSCLLRISRVSLLTCQFHCYLVLVFLLCTEPYMNTFREVKRKKRNGNREFGSLSISHIYVECRC

SEQ ID NO: 72056 - protein, 528 aa, Setaria italica
  misc_feature (24)..(24): Xaa can be any naturally occurring amino acid
  Transcript Sequence Number=SeqID_6082
DWADVRGINYLNELQTDTSMAVEXKIMKRWEFYSVNQASSLITSWFSGNDSECQLLQDYLDSISPNGDVFYDARNDFLTPEWEDSPSDSDDSCHVQIIRESSSFTDPSYTPPPCSGPYKRRKIIKFDDGSSMSEESYSEIVTSPKYSSSSCSSCGSDNESAKTLLEPSTYKDVLICFRFDDHDLPFRLKEVILSDVRLLTLLEYGLPSWVIFLQSYPVFCKIYRPWMCPLARALYVLMSLITVLIGFYDLYKNVPMLKATASRLFGPFFDWIETWEMISRLKYLGTMLFLHNFQQAFTWSLKIVRAVKSALSVLTKPIAGPILEVFEFTLPMWNFCAETVGYLSSVVMVSLETSWSVVLGTMQMIIWPFWFVFSTLVNIVNSVLYPVLWLLGEILAAPFRLVIGLSSFVVDLFVDIISVLRQSWSTLSALYQAGSVPRSHVLTSDNSIWGSLWKDLLYQIFRAIRSILYGFVAFFSTCNRHRLSIYNHIQVFLRRLSHVSTSGRYTAYREGARKYSSQNHPRRKTKTR

SEQ ID NO: 72057 - protein, 422 aa, Setaria italica
  misc_feature (79)..(79): Xaa can be any naturally occurring amino acid
  misc_feature (241)..(241): Xaa can be any naturally occurring amino acid
  Transcript Sequence Number=SeqID_6083
  Gene Ontology: Mol. function=transporter activity; Cellular component= membrane; Biological process=iron ion transport
  Homolog annotation: Hit_ID=Q9C6B2; Match level="QueryCoverage=95%, HitCoverage=75%, E-value=1e-180, Identity=76%"; Hit description =Metal transporter Nramp2
  Pfam annotation: Domain name=Nramp; Domain location=1-350; Score =651.2; E_value=9.5e-193; Accession=PF01566.10; Description=Natural resistance-associated macrophage protein
WLLMWATAMGLLVQLLAARLGVATGRHLAELCRDEYPDWARRALWLMAEVAMVGADIQEVIGSAIAIKILSRGYLPLWXAGVVITSLDCFIFLSLENYGVRKLEAVFAFLIATMAIAFAWMFTDTKPNMKDLLVGILVPKLSSRTIRQAVGVVGCVIMPHNVFLHSALVQSRKIDQNKEYQVREALRYYSIESTIALAVSFMINLFVTTVFAKGFYGSKEAGNIGLENAGQYLQEKFGGGXFFPILYIWGIGLLAAGQSSTITGTYAGQFIMGGFLNLRLKKWVRALITRSFAIVPTIVVALFFNTSDSALDVLNEWLNVLQSIQIPFALIPLITLVSKEQVMGIFKIGPNTQAVTWTVATLLITINGYLLMDFFSSEIRGPLSGALLCVAVLIYASFVLYLILRGTELSEKIAKGIRNSFS

SEQ ID NO: 72058 - protein, 44 aa, Setaria italica
  Transcript Sequence Number=SeqID_6084
  Homolog annotation: Hit_ID=B4F9E3; Match level="QueryCoverage=75%, HitCoverage=8%, E-value=5e-10, Identity=96%"; Hit description=Anther- specific proline-rich protein APG
LTGVNFASAAAGIRDETGQQLGQRISFGGQLQDAHQLLHRHSID

SEQ ID NO: 72059 - protein, 128 aa, Setaria italica
  Transcript Sequence Number=SeqID_6085
  Gene Ontology: Mol. function=hydrolase activity, acting on ester bonds; Cellular component=nucleus; Biological process=lipid metabolic process
  Homolog annotation: Hit_ID=B6TJW4; Match level="QueryCoverage=88%, HitCoverage=30%, E-value=9e-43, Identity=75%"; Hit description =Anther-specific proline-rich protein APG
FSVGMGSNYYLNNYFMPAFYDTGSRYTPEQYADSLAADYSRLLMVMYRYGARKVAVIGVGQVGCSPNELAQRSPDGATCVEAINAAIRIFNQRLVGLVDRFNRQLPGARFTYVLTSLRSILSFTLLIS

SEQ ID NO: 72060 - protein, 141 aa, Setaria italica
  Transcript Sequence Number=SeqID_6086
  Gene Ontology: Mol. function=hydrolase activity, acting on ester bonds; Biological process=lipid metabolic process
  Homolog annotation: Hit_ID=B6SUN1; Match level="QueryCoverage=80%, HitCoverage=29%, E-value=6e-46, Identity=82%"; Hit description =Anther-specific proline-rich protein APG
MRPTKFCPVLSRIPAAADAKFTPWRAASPFNQQIKNFEQTLDQLSRKLGGAGKLAPSLARSIFYVGMGSNDYLNNYLMPNYNTRNEYDGDQYSTLLVQQYAKQLGALYKLGARKFVIAGVGSMACIPNMRARSPRNVCSPD

SEQ ID NO: 72061 - protein, 162 aa, Setaria italica
  misc_feature (11)..(11): Xaa can be any naturally occurring amino acid
  misc_feature (100)..(100): Xaa can be any naturally occurring amino acid
  Transcript Sequence Number=SeqID_6087
  Gene Ontology: Mol. function=hydrolase activity, acting on ester bonds; Biological process=lipid metabolic process
  Homolog annotation: Hit_ID=B6SUN1; Match level="QueryCoverage=98%, HitCoverage=41%, E-value=2e-66, Identity=82%"; Hit description =Anther-specific proline-rich protein APG
GVNFASAAAGXLDNTGQNFVGRIPFNQQIKNFEQTLDQLSRKLGGAGKLAPSLARSIFYVGMGSNDYLNNYLMPNYNTRNEYDGDQYSTLLVQQYAKQLXLYKLGARKFVIAGVGSMACIPNMRARSPRNVCSPDVDDLIIPFNNKVKAMVNSLLATWPIPT

SEQ ID NO: 72062 - protein, 88 aa, Setaria italica
  Transcript Sequence Number=SeqID_6088
  Gene Ontology: Mol. function=hydrolase activity, acting on ester bonds; Biological process=lipid metabolic process
  Homolog annotation: Hit_ID=B6SUN1; Match level="QueryCoverage=90%, HitCoverage=20%, E-value=5e-41, Identity=95%"; Hit description =Anther-specific proline-rich protein APG
NTTKVPTGNPWSYGFSVVDRGCCGIGRNRGMITCLPFLRPCLNRNTYIFWDAFHPTERVNVLLGRAAFNGGTDVVYPMNIQQLAAWQP

SEQ ID NO: 72063 - protein, 175 aa, Setaria italica
  Transcript Sequence Number=SeqID_6089
  Gene Ontology: Mol. function=hydrolase activity, acting on ester bonds; Biological process=lipid metabolic process
  Homolog annotation: Hit_ID=B6TJW4; Match level="QueryCoverage=88%, HitCoverage=41%, E-value=3e-83, Identity=98%"; Hit description =Anther-specific proline-rich protein APG
  Pfam annotation: Domain name=Lipase_GDSL; Domain location=30-175; Score=-2.7; E_value=0.011; Accession=PF00657.14; Description=GDSL -like LipaseAcylhydrolase
MEVRQLACLVAAVSLALAAVARCDPQVPCYFIFGDSLVDNGNNNYIVSLARANYPPYGIDFAGGPSGRFTNGLTTVDVIAQLLGFDNFIPPFAATSGDQLLGGANFASAAAGIRAETGQQLGGRIPFAGQVQNYQTAVQTLVSILGDQDTASDHLSRCIFSVGMGSNDYLNNYFM

SEQ ID NO: 72064 - protein, 366 aa, Setaria italica
  Transcript Sequence Number=SeqID_6090
  Gene Ontology: Mol. function=hydrolase activity, acting on ester bonds; Biological process=lipid metabolic process
  Homolog annotation: Hit_ID=B4F9E3; Match level="QueryCoverage=92%, HitCoverage=91%, E-value=1e-176, Identity=89%"; Hit description =Anther-specific proline-rich protein APG
  Pfam annotation: Domain name=Lipase_GDSL; Domain location=35-346; Score=236.1; E_value=8.5e-68; Accession=PF00657.14; Description=GDSL- like LipaseAcylhydrolase
MGRTAAMRWMQPALLLVLATVAVVVVRAEPQVPCYFVFGDSLVDNGNNNDIASLARANYPPYGIDFPGGATGRFSNGLTTVDAISRLLGFDDYIPAYAGASNDQLLTGVNFASAAAGIRDETGQQLGQRISFGGQLQNYQAAVQQLVSILGDEDSAANHLSQCIFTVGMGSNDYLNNYFMPAVYSTSQQYTPEQYADALAGQYSQQLRTLYNYGARKVALMGVGQVGCSPNELAQRSPDGATCVSEINAAIDIFNRRLVALVDQFNALPGAHFTYINAYGIFEDILRSPGSHGLTVTNRGCCGVGRNNGQVTCLPFQTPCTNRNEYLFWDAFHPTEAANILVGRRAYSAALPSDVHPVDLRTLAQL

SEQ ID NO: 72065 - protein, 359 aa, Setaria italica
  Transcript Sequence Number=SeqID_6091
  Gene Ontology: Mol. function=hydrolase activity, acting on ester bonds; Biological process=lipid metabolic process
  Homolog annotation: Hit_ID=B6SUN1; Match level="QueryCoverage=93%, HitCoverage=86%, E-value=1e-159, Identity=83%"; Hit description =Anther-specific proline-rich protein APG
  Pfam annotation: Domain name=Lipase_GDSL; Domain location=29-338; Score=198.0; E_value=2.5e-56; Accession=PF00657.14; Description=GDSL- like LipaseAcylhydrolase
ETFPPGSEAGSGGGGGGAAAGTATGVPAMFVFGDSLTDNGNNNDLQSLAKANYPPYGIDFAGGPTGRFSNGYTMVDEIAQLLGLPLLPSHPSASSADAALHGVNFASAAAGILDNTGQNFVGRIPFNQQIKNFEQTLDQLSRKLGGAGKLAPSLARSIFYVGMGSNDYLNNYLMPNYNTRNEYDGDQYSTLLVQQYAKQLGALYKLGARKFVIAGVGSMACIPNMRARSPRNVCSPDVDDLIIPFNNKVKAMVNSLNANRPNAKFIYVDNYAMISEVLRNPWSYGFSVVDRGCCGIGRNRGMITCLPFLRPCLNRNTYIFWDAFHPTERVNVLLGRAAFNGGTDVVYPMNIQQLAAWQP

SEQ ID NO: 72066 - protein, 299 aa, Setaria italica
  Transcript Sequence Number=SeqID_6092
  Gene Ontology: Mol. function=hydrolase activity, acting on ester bonds; Biological process=lipid metabolic process
  Homolog annotation: Hit_ID=B4F9E3; Match level="QueryCoverage=96%, HitCoverage=77%, E-value=1e-128, Identity=76%"; Hit description =Anther-specific proline-rich protein APG
  Pfam annotation: Domain name=Lipase_GDSL; Domain location=3-279; Score=151.6; E_value=2.3e-42; Accession=PF00657.14; Description=GDSL- like LipaseAcylhydrolase
QELFPSTYRPPTVEFLAKLLGFDDFIPPFAGASSQQLLTGVNFASAAAGIREETGQQLGGRISFSGQVQNYQSAVQELISILGDEGSAATHLSRCIFSVGMGSNDYLNNYFMPAFYDTGSRYTPEQYADSLAADYSRLLMVMYRYGARKVAVIGVGQVGCSPNELAQRSPDGATCVEAINAAIRIFNQRLVGLVDRFNRQLPGARFTYVNAYGIFDDILRSPGAHGLRVTNAGCCGVGRNNGQVTCLPFQMPCANRHEYLFWDAFHPTEAANVLVGQRTYAARLASDVHPYDIRTLARL

SEQ ID NO: 72067 - protein, 335 aa, Setaria italica
  Transcript Sequence Number=SeqID_6093
  Gene Ontology: Mol. function=hydrolase activity, acting on ester bonds; Biological process=lipid metabolic process
  Homolog annotation: Hit_ID=B6TJW4; Match level="QueryCoverage=84%, HitCoverage=76%, E-value=1e-159, Identity=96%"; Hit description =Anther-specific proline-rich protein APG
  Pfam annotation: Domain name=Lipase_GDSL; Domain location=20-315; Score=146.9; E_value=6e-41; Accession=PF00657.14; Description=GDSL -like LipaseAcylhydrolase
LHSDSEPTYADGTKVLHGLYVRVGAIRTKKRAGTTWRDRSHTKKRARKLNACAAQLLGFDNFIPPFAATSGDQLLGGANFASAAAGIRAETGQQLGGRIPFAGQVQNYQTAVQTLVSILGDQDTASDHLSRCIFSVGMGSNDYLNNYFMPAFYNTGSRYSPEQFADALIADYRRYLQVLYNYGARKVVLIGVGQVGCSPNELARYSADGVTCVDRIDGAIQIFNRRLVGLVDEFNALPGAHFTFINAYNIFDDLLANAASYGFTVTNAGCCGVGRNNGQVTCLPYQAPCANRDQHIFWDAFHPSEAANIIVGRRSYRAESPNDVYPMDISTLASI

SEQ ID NO: 72068 - protein, 92 aa, Setaria italica
  Transcript Sequence Number=SeqID_6094
  Subcellular localization annotation: CTP_CleavageSite=33; ConfidenceScore=5.11e-01
FINYMQQVNIQHQVGNNLSQLSSSHGNILSIASCTEFSSIFKWQTYMQYSSERNSLPSPNILTGCSAIDFIWRRVVCQVSAACWVCLALNLA

SEQ ID NO: 72069 - protein, 227 aa, Setaria italica
  misc_feature (34)..(34): Xaa can be any naturally occurring amino acid
  Transcript Sequence Number=SeqID_6095
  Gene Ontology: Cellular component=plasma membrane
  Pfam annotation: Domain name=Hyccin; Domain location=1-143; Score= -111.5; E_value=0.011; Accession=PF09790.1; Description=Hyccin
EPQAAVKSTKRAGIIGVAFEAYYSKISQMPAASXKVDACNAVAAWAGQYCKCRFELDEKELEEEEGGSLGSVSPMSSEAENGKELVEELARMRINGDSSGRNCREDYDKEARVLLPWELLQPVMRVLGHCLLAPLNPVEVRDAAAGAVRVVYARACHDLVPQAMLAARSLIELDKSARKAAKAAAAAASGTIVAAGTAGSTASGSRPSSKPNTPSKQRKPDTLLASK

SEQ ID NO: 72070 - protein, 106 aa, Setaria italica
  Transcript Sequence Number=SeqID_6096
  Subcellular localization annotation: CTP_CleavageSite=55; ConfidenceScore=5.19e-01
VVSQTHQNSKAPLRLVHLVTPSASQPRADTPETARAERASSPLGDEVAAPRGRVVAAAATAALPPASSPLRHAPRPQVPRVPVAVPRSSPRPRGRSSPSRQSARQP

SEQ ID NO: 72071 - protein, 296 aa, Setaria italica
  misc_feature (282)..(282): Xaa can be any naturally occurring amino acid
  Transcript Sequence Number=SeqID_6097
  Gene Ontology: Mol. function=ion channel activity; Cellular component= integral to membrane; Biological process=ion transport
  Homolog annotation: Hit_ID=B9SF64; Match level="QueryCoverage=99%, HitCoverage=41%, E-value=1e-58, Identity=43%"; Hit description =Cyclic nucleotide-gated ion channel, putative
MTDQERDDVPMLLRNVELPRFPLRSTSMCIPVRDDEYEEGTFVPHTGPLFIQPPTQTTSGSPFTSRDAPDRLPRPSQGKPVSKPQAVMPEQTGGTRWSYSGQVPKNEHLLMSGPLGQCDNPDCVNCPPACKNKRHFHRGSNAEDNKLHNILYGYGGGWKKKIEQILSRIPIMNPHAKPVQHWNQFFVISCLIAIFIDPLFFFLLSVEQDNKCIVLNWDFATALAVLRSVTDAIYFLHMLLQFRLAYVAPESRVVGVGELVDEPKKVAIHYLRGYFLLDFFVXLPLPQVMILLVIPK

SEQ ID NO: 72072 - protein, 251 aa, Setaria italica
  misc_feature (41)..(41): Xaa can be any naturally occurring amino acid
  Transcript Sequence Number=SeqID_6098
  Gene Ontology: Mol. function=protein binding; Cellular component =integral to membrane; Biological process=positive regulation of catalytic activity
  Homolog annotation: Hit_ID=B4FUF4; Match level="QueryCoverage=93%, HitCoverage=93%, E-value=3e-97, Identity=76%"; Hit description=Gamma- secretase subunit APH-1B
  Pfam annotation: Domain name=Aph-1; Domain location=2-244; Score =364.1; E_value=2.5e-106; Accession=PF06105.4; Description=Aph-1 protein
  Subcellular localization annotation: CTP_CleavageSite=49; ConfidenceScore=5.13e-01
MTVAAGLGYALIALGPAFSLFAGVVARKPFLVLTLLSSTLXFWLISLIVLSGIWRGFLPIKSGTWWAYAILILTSVALQEGTRLVFWRLYKKMEEMLDAFADRISKPRLSLTDKMLISLAGGLGHGVAHAVFFCLSLLTPAFGQATFYVERCSKMPFFLASALIALGFLVIHTFSMIIAFNAYDERKKSDQIFVPVVHLTAAVMTLVNLTPGGCLIGTPLLLVMAAVTLHYCWRVACRRLTEHQHRQLNSN

SEQ ID NO: 72073 - protein, 261 aa, Setaria italica
  Transcript Sequence Number=SeqID_6099
  Gene Ontology: Mol. function=microtubule motor activity; Cellular component=microtubule associated complex; Biological process =microtubule-based movement
  Homolog annotation: Hit_ID=Q10SR0; Match level="QueryCoverage=95%, HitCoverage=36%, E-value=1e-57, Identity=57%"; Hit description =Kinesin motor protein, putative, expressed
SESEVAVLKQTIKEMELKLKEQEHDRSVVELKIKDLELRLKEQENQQSVAELKNKELELKLKEQEHQRSVAELKAREIGLELLETQRTEAMLQIKLRDLESKLKAQNPNMILDSTIATPGEAKLLPFSRVEAMIEKENHLLRSSNSLNKQQPLSENSSLPEAPEAVVNEKKRKGDARNASIGGEQENNGPASGQNVGRKRSLPGERESRQKRTSTEPQVKNLGRSTASSRAAAAATHKVSAPSSRFSRQQPGGNKTRGWVR

SEQ ID NO: 72074 - protein, 44 aa, Setaria italica
  Transcript Sequence Number=SeqID_6100
  Gene Ontology: Mol. function=ribonucleoside-diphosphate reductase activity; Cellular component=ribonucleoside-diphosphate reductase complex; Biological process=oxidation reduction
  Homolog annotation: Hit_ID=B2M117; Match level="QueryCoverage=95%, HitCoverage=5%, E-value=2e-14, Identity=88%"; Hit description =Ribonucleoside-diphosphate reductase
VNNLLHDLTEMGVWTPTLKNQIIYDDGSVQKMTEIPDDLKAIYK

SEQ ID NO: 72075 - protein, 165 aa, Setaria italica
  Transcript Sequence Number=SeqID_6101
  Gene Ontology: Mol. function=ribonucleoside-diphosphate reductase activity; Cellular component=ribonucleoside-diphosphate reductase complex; Biological process=response to cadmium ion
  Homolog annotation: Hit_ID=B2M117; Match level="QueryCoverage=83%, HitCoverage=16%, E-value=7e-78, Identity=97%"; Hit description =Ribonucleoside-diphosphate reductase
  Pfam annotation: Domain name=Ribonuc_red_lgC; Domain location=7-165; Score=-251.0; E_value=4.2e-05; Accession=PF02867.7; Description =Ribonucleotide reductase, barrel doma
  Subcellular localization annotation: CTP_CleavageSite=50; ConfidenceScore=5.50e-01
MSNQRVCAGTTFFALPSLSYFLYKFSNSSKSAGGIGVSVHNIRATGSYIRGTNGTSNGIVPMLRVFNDTARYVDQGGGKRKGAFAVYLEPWHADIFEFLDLRKNHGKEEHRARDLFYALWVPDLFMQRVQNNGEWSLFCPNEAPGLADCWGDEFENLYKKYEREG

SEQ ID NO: 72076 - protein, 101 aa, Setaria italica
  Transcript Sequence Number=SeqID_6102
  Gene Ontology: Mol. function=ribonucleoside-diphosphate reductase activity; Cellular component=ribonucleoside-diphosphate reductase complex; Biological process=oxidation reduction
  Homolog annotation: Hit_ID=B2M117; Match level="QueryCoverage=100%, HitCoverage=12%, E-value=3e-47, Identity=91%"; Hit description =Ribonucleoside-diphosphate reductase
MAVDRGCYIDQSQSLNVHMEQANFGKLTSLHFHAWSKGLKTGMYYLRTRAAADAIKFTVDTTLLKENGVPNGKPAEEDVEAKMAQMVCSLNNREECLACGS

SEQ ID NO: 72077 - protein, 253 aa, Setaria italica
  misc_feature (7)..(7): Xaa can be any naturally occurring amino acid
  misc_feature (174)..(174): Xaa can be any naturally occurring amino acid
  Transcript Sequence Number=SeqID_6103
  Gene Ontology: Mol. function=ribonucleoside-diphosphate reductase activity; Cellular component=ribonucleoside-diphosphate reductase complex; Biological process=response to cadmium ion
  Homolog annotation: Hit_ID=B2M117; Match level="QueryCoverage=93%, HitCoverage=28%, E-value=1e-112, Identity=86%"; Hit description =Ribonucleoside-diphosphate reductase
  Pfam annotation: Domain name=Ribonuc_red_lgN; Domain location=101 -173; Score=134.3; E_value=3.9e-37; Accession=PF00317.13; Description= Ribonucleotide reductase, all-alpha d
KVCAGVXYKGVTTSQLDELAAETAAAMTASHPDYASLAARIAVSNLHKNTKKSFSETIKDMYMHFNERSGLMAPLVAEDVYEIIMKNAARLDSEIIYDRDFDYDYFGFKTLERSYLLKLGGKVVERPQHMLMRVSVGIHKEDIESAIKTYHLMSQRWFTHASPTLFNAGTPRPXQLSSCFLICMKDDSIEGIYDTLKECAVISKSAGGIGVSVHNIRATGSYIRGTNGTSNGIVPMFTLLFLTYYFVLSFYLF

SEQ ID NO: 72078 - protein, 470 aa, Setaria italica
  Transcript Sequence Number=SeqID_6104
  Gene Ontology: Mol. function=ribonucleoside-diphosphate reductase activity; Cellular component=ribonucleoside-diphosphate reductase complex; Biological process=oxidation reduction
  Homolog annotation: Hit_ID=B2M117; Match level="QueryCoverage=95%, HitCoverage=55%, E-value=0.0, Identity=94%"; Hit description =Ribonucleoside-diphosphate reductase
  Pfam annotation: Domain name=Ribonuc_red_lgC; Domain location=1-419; Score=568.2; E_value=9.1e-168; Accession=PF02867.7; Description =Ribonucleotide reductase, barrel doma
KQKSLKTKVNEINQQLTRRLVDEFENLYKKYEREGKAKKVVPAQTLWFDILKAQIETGTPYMLYKDTCNRKSNQQNLGTIKSSNLCTEIIEFTSPTETAVCNLASIALPRFVREKGVPLESHPSKLVGSTDSKNRYFDFEKLAEVTSTVTYNLNKIIDINYYPVETAKRSNMRHRPIGIGVQGLADTFILLGMPFDSTEAQQLNKDIFETIYYHSLKASAELAAKEGPYETYEGSPVSKGILQPDMWNVVPSNRWDWPSLRETISKVGIRNSLLVAPMPTASTSQILGNNECFEPYTSNIYSRRVLSGEFVVVNKHLLHDLTEMGVWTPTLKNQIIYDDGSVQKMTEIPDDLKAIYKTVWEIKQKTLVDMAVDRGCYIDQSQSLNVHMEQANFGKLTSLHFHAWSKGLKTGMYYLRTRAAADAIKFTVDTTLLKENGVPNGKPAEEDVEAKMAQMVCSLNNREECLACGS

SEQ ID NO: 72079 - protein, 220 aa, Setaria italica
  Transcript Sequence Number=SeqID_6105
  Gene Ontology: Mol. function=transferase activity, transferring groups other than amino-acyl groups
  Homolog annotation: Hit_ID=B6TU21; Match level="QueryCoverage=100%, HitCoverage=48%, E-value=6e-89, Identity=76%"; Hit description =Anthocyanin 5-aromatic acyltransferase
MAPPSSPPDVRLVDRIRVSPAPSDSAQEHALPLTFFDVAWLFTGPVERLFFFRHPDPSSALPLLRSSLPVALRRFYPLAGTIRPHAPFLCSYARGADALTLVVAEFDSPDDFDHLVARAPRDLSRIRALVPQLPPPGDDGAFALAALQVTVFPGRGLCLGVSVHHAACDDASTMHFVRTWAAACRLGLESGDGSGDATLPPPPVLDRSLVADPDDLRGKT

SEQ ID NO: 72080 - protein, 268 aa, Setaria italica
  Transcript Sequence Number=SeqID_6106
  Gene Ontology: Mol. function=translation initiation factor activity; Cellular component=eukaryotic translation initiation factor 2 complex; Biological process=translational initiation
  Homolog annotation: Hit_ID=O24473; Match level="QueryCoverage=100%, HitCoverage=99%, E-value=1e-118, Identity=77%"; Hit description =Eukaryotic translation initiation factor 2 subunit beta
  Pfam annotation: Domain name=eIF-5_eIF-2B; Domain location=124-251; Score=278.7; E_value=1.3e-80; Accession=PF01873.9; Description =Domain found in IF2BIF5
MADEEHAEKREEVSELAPFDPTKKKKKKKVSIQDPSDEVDKLADKTESLAVSEPAELNFSGMKKKKKKQVDLDSSLADLGDGEDTQDDQAVDDEQGEGIMLGDGPRYPWDGTDRDYKYEELLDRVFNILRENNPDLAGDRRRTVMRPPQVLREGTKKTVFVNFMDLCKTMHRQPEHVMMFLLAEMGTSGSLDGQQRLVIKGRFAPKNFEAILRRYINEYVICNGCKSPDTILSKENRLFFLRCEQCGSSRSVAPIKAGFVAQVGRRKA

SEQ ID NO: 72081 - protein, 345 aa, Setaria italica
  misc_feature (57)..(57): Xaa can be any naturally occurring amino acid
  misc_feature (60)..(60): Xaa can be any naturally occurring amino acid
  Transcript Sequence Number=SeqID_6107
  Gene Ontology: Mol. function=transferase activity, transferring nitrogenous groups; Biological process=biosynthetic process
  Homolog annotation: Hit_ID=Q43201; Match level="QueryCoverage=90%, HitCoverage=85%, E-value=1e-164, Identity=88%"; Hit description=1 -aminocyclopropane-1-carboxylate synthase (Fragment)
  Pfam annotation: Domain name=Aminotran_1_2; Domain location=2-334; Score=274.0; E_value=3.4e-79; Accession=PF00155.13; Description =Aminotransferase class I and II
TRFLFQALAGFMRQIMHESVSFDPSQMVVTSGATPAMEILSFCIADPGNAFLVPSPXSKXWDRDIKWRTGVELIPVPCRSTDNFNISITALEIAYKQAKKRGVRVRGVLISNPSNPTGGIVPRETLHDLLEFAAEKNIHVISDEIFAGSTYGSDKFVSVAEVVNELEDFDKGRVHIIYGLSKDLSLAGFRVGVIYSYNESIVTAAAKIARFSSVSTPTQRLLVSMLSDQRFISEYLKVNRERLQKMYHLFVSALKQVGVECFKSSGGFYCWADMSKYIRSYSEKGERKLWDRLLEEAKVNVTPGSSCHCIEPGWFRCCFTALSEEDIPVLVERLRRVTDSHKSNS

SEQ ID NO: 72082 - protein, 96 aa, Setaria italica
  Transcript Sequence Number=SeqID_6108
  Gene Ontology: Mol. function=protein serine/threonine kinase activity; Cellular component=nucleus; Biological process=protein amino acid phosphorylation
  Homolog annotation: Hit_ID=Q9XH03; Match level="QueryCoverage=95%, HitCoverage=31%, E-value=2e-35, Identity=76%"; Hit description =T1N24.12 protein
YVDGLSVKDILLGFGSNGVNEERLNDIATQIGNAIGKLHDGGLVHGDLTTSNMIIKNSNNQLVLIDFGLSFTSTIPEDKAVDLYVLERALISYAIL

SEQ ID NO: 72083 - protein, 106 aa, Setaria italica
  misc_feature (68)..(68): Xaa can be any naturally occurring amino acid
  Transcript Sequence Number=SeqID_6109
  Gene Ontology: Mol. function=protein serine/threonine kinase activity; Cellular component=nucleus; Biological process=protein amino acid phosphorylation
  Homolog annotation: Hit_ID=B9SFH4; Match level="QueryCoverage=92%, HitCoverage=43%, E-value=4e-45, Identity=85%"; Hit description=O -sialoglycoprotein endopeptidase, putative
GLRLSDVCHDGGLVHGDLTTSNMIIKNSNNQLVLIDFGLSFTSTIPEDKAVDLYVLERALISMHSSCXDVMEKILAAYRKSSKQWCSTQNKLAQVRQRGRKRTMVG

SEQ ID NO: 72084 - protein, 145 aa, Setaria italica
  Transcript Sequence Number=SeqID_6110
  Gene Ontology: Mol. function=protein serine/threonine kinase activity; Biological process=protein amino acid phosphorylation
  Homolog annotation: Hit_ID=B9RLV3; Match level="QueryCoverage=73%, HitCoverage=22%, E-value=9e-21, Identity=46%"; Hit description =Pentatricopeptide repeat-containing protein, putative
  Pfam annotation: Domain name=PPR; Domain location=24-57; Score=7.6; E_ value=1.1; Accession=PF01535.12; Description=PPR repeat
  Pfam annotation: Domain name=PPR; Domain location=58-92; Score=16.8; E_value=0.091; Accession=PF01535.12; Description=PPR repeat
  Pfam module annotation: Pfam domain module=PPR::PPR; Domain location =24-57::58-92
TGRIIRGKRLVHAMLENGVLPTAKFFHGLIGVLCGTEQVDHALDMFRLMESCELVDTHIYDLLIEKLCRNGRFELGRELWDDATKSGLVLGCSEDLLDPLKTEVFRPACPAQRLSPQSYKRLTQRKEITAVGAKKNTATTASRKK

SEQ ID NO: 72085 - protein, 235 aa, Setaria italica
  Transcript Sequence Number=SeqID_6111
  Gene Ontology: Mol. function=protein serine/threonine kinase activity; Cellular component=nucleus; Biological process=protein amino acid phosphorylation
  Homolog annotation: Hit_ID=B9SFH4; Match level="QueryCoverage=91%, HitCoverage=94%, E-value=6e-90, Identity=75%"; Hit description=O -sialoglycoprotein endopeptidase, putative
ALFKCLLYFMDNSQDQEHDFGVLLKQGAEGRVFVSTFVGRKCVIKERFSKKYRHPLLDAKLTLKRLNAEARCMTKARRLGVPTPVLYAVDPLLHTLTFEYVDGLSVKDILLGFGSNGVNEERLNDIATQIGNAIGKLHVFFFFFFFFFFFFILFKNSNNQLVLIDFGLSFTSTIPEDKAVDLYVLERALISMHSSCGDVMEKILAAYRKSSKQWCSTQNKLAQVRQRGRKRTMVG

SEQ ID NO: 72086 - protein, 167 aa, Setaria italica
  Transcript Sequence Number=SeqID_6112
  Gene Ontology: Mol. function=nucleoside-triphosphatase activity
  Homolog annotation: Hit_ID=B9R919; Match level="QueryCoverage=94%, HitCoverage=31%, E-value=2e-40, Identity=55%"; Hit description=ATP binding protein, putative
LIETKSKSIMVFEDIDCSLDLTGKRKSKEEEDKDDGDGEDPTRRPDKKGTKSNVTLSGLLNFIDGLWSACGEERLIVFTTNHVDKLDAALVRTGRMDKKIEMSYCDFESFKFLARMHLHDGVVEEHQAQCDRVKALLEEVDMAPVDVGEHLTPKAPVEFEDAGPLPR

SEQ ID NO: 72087 - protein, 237 aa, Setaria italica
  Transcript Sequence Number=SeqID_6113
  Gene Ontology: Mol. function=triacylglycerol lipase activity
  Homolog annotation: Hit_ID=B9RWS5; Match level="QueryCoverage=85%, HitCoverage=23%, E-value=4e-09, Identity=27%"; Hit description =Triacylglycerol lipase, putative
TSQFVQSAFGQLSSFTYTYLPKPSSLESGGEVSESVEEPRDNAVESNNLQQQKIDSGDSLDSHCEAQSPAAAVNSEGDVSSDEYFWRALNNVLNQNVLQNFGFSLPEVKKLDGFDLLSSLGLKSREIAEQKYLESGLATTDTSTSDGSETTPEDSVGVDNENGALTTKEEDQSSFLDINKVSRDVLSQTENILGALMILSKNLSPHDNKSVTTNETNKKDDMIIEQEVAAAEDSIDK

SEQ ID NO: 72088 - protein, 52 aa, Setaria italica
  Transcript Sequence Number=SeqID_6114
FFWSIIKSTVTVIIELAHCNFFTFVVHSDSTWTWALTTKYATAYIFLILPLF

SEQ ID NO: 72089 - protein, 42 aa, Setaria italica
  Transcript Sequence Number=SeqID_6115
NMEQDRHFKPCFILKLSLFLHCFRLMACVSIKTLNLFHQRVI

SEQ ID NO: 72090 - protein, 78 aa, Setaria italica
  Transcript Sequence Number=SeqID_6116
  Gene Ontology: Mol. function=identical protein binding
  Homolog annotation: Hit_ID=B6TSE1; Match level="QueryCoverage=91%, HitCoverage=18%, E-value=1e-30, Identity=83%"; Hit description=PRP38 pre-mRNA processing factor 38 domain containing B
FTSLCFGVIGFLYLRYVADPKTLWTWYEPYLRDDEEFSPGSNGRMTTMGVYVRDLILGQYYFDSLLPRIPLPVTRQVT

SEQ ID NO: 72091 - protein, 141 aa, Setaria italica
  Transcript Sequence Number=SeqID_6117
  Gene Ontology: Cellular component=spliceosome; Biological process =mRNA processing
  Homolog annotation: Hit_ID=B6TSE1; Match level="QueryCoverage=100%, HitCoverage=30%, E-value=2e-56, Identity=73%"; Hit description=PRP38 pre-mRNA processing factor 38 domain containing B
  Pfam annotation: Domain name=PRP38; Domain location=3-127; Score= -46.7; E_value=0.0015; Accession=PF03371.7; Description=PRP38 family
VEHVEPWMTGNCRGPSTAFCLLYKFFTMKLTVKQMHGLLKHPDSPYIRADTGMTNLCFGVIGFLYLRYVADPKTLWTWYEPYLRDDEEFSPGSNGRMTTMGVYVRDLILGQLGRTSHLVQYYFDSLLPRIPLPVTRQVTAN

SEQ ID NO: 72092 - protein, 78 aa, Setaria italica
  Transcript Sequence Number=SeqID_6118
  Homolog annotation: Hit_ID=B6TSE1; Match level="QueryCoverage=79%, HitCoverage=15%, E-value=3e-23, Identity=74%"; Hit description=PRP38 pre-mRNA processing factor 38 domain containing B
MTMCCWILQIGFLYLRYVADPKTLWTWYEPYLRDDEEFSPGSNGRMTTMGVYVRDLILGQVSFSTPLWFQNGINILLF

SEQ ID NO: 72093 - protein, 176 aa, Setaria italica
  Transcript Sequence Number=SeqID_6119
  Gene Ontology: Mol. function=identical protein binding; Cellular component=spliceosome; Biological process=mRNA processing
  Homolog annotation: Hit_ID=B6TSE1; Match level="QueryCoverage=100%, HitCoverage=45%, E-value=2e-86, Identity=81%"; Hit description=PRP38 pre-mRNA processing factor 38 domain containing B
  Pfam annotation: Domain name=PRP38; Domain location=1-169; Score =106.1; E_value=1.2e-28; Accession=PF03371.7; Description=PRP38 family
MEIQTSGKPIDLLMEKVLCMNILSSEYFKELYRLKTYHEVIDEIYTCVEHVEPWMTGNCRGPSTAFCLLYKFFTMKLTVKQMHGLLKHPDSPYIRAIGFLYLRYVADPKTLWTWYEPYLRDDEEFSPGSNGRMTTMGVYVRDLILGQYYFDSLLPRIPLPVTRQVTANLEKMKLPT

SEQ ID NO: 72094 - protein, 217 aa, Setaria italica
  Transcript Sequence Number=SeqID_6120
  Homolog annotation: Hit_ID=B6TSE1; Match level="QueryCoverage=49%, HitCoverage=28%, E-value=3e-33, Identity=66%"; Hit description=PRP38 pre-mRNA processing factor 38 domain containing B
MFVFNWSGKSIFILFTDFQLCGIISYMSFKLTNDFDFEPLQLILICMMRCFPFMVQYYFDSLLPRIPLPVTRQVTANLEKMKLPTKLSGATGDSSRQGSEDTARRPPSVKASLSVSFGQRAPHRASTRDSSPVRRTITHDDPRRSYSPSRRSGSREYPDRDRSSRDRDHSSRDRDRSSRDQDRDRDIRDYHRRERDSRDRDSSCPCFYSCFCSYDES

SEQ ID NO: 72095 - protein, 407 aa, Setaria italica
  Transcript Sequence Number=SeqID_6121
  Gene Ontology: Mol. function=identical protein binding; Cellular component=spliceosome; Biological process=mRNA processing
  Homolog annotation: Hit_ID=B6TSE1; Match level="QueryCoverage=56%, HitCoverage=58%, E-value=1e-112, Identity=82%"; Hit description =PRP38 pre-mRNA processing factor 38 domain containing B
  Pfam annotation: Domain name=DUF1777; Domain location=251-407; Score=- 75.7; E_value=0.028; Accession=PF08648.4; Description=Protein of unknown function (DUF1777)
  Pfam annotation: Domain name=PRP38; Domain location=1-169; Score =106.1; E_value=1.2e-28; Accession=PF03371.7; Description=PRP38 family
  Pfam module annotation: Pfam domain module=DUF1777::PRP38; Domain location=251-407::1-169
MEIQTSGKPIDLLMEKVLCMNILSSEYFKELYRLKTYHEVIDEIYTCVEHVEPWMTGNCRGPSTAFCLLYKFFTMKLTVKQMHGLLKHPDSPYIRAIGFLYLRYVADPKTLWTWYEPYLRDDEEFSPGSNGRMTTMGVYVRDLILGQYYFDSLLPRIPLPVTRQVTANLEKMKLPTKLSGATGDSSRQGSEDTARRPPSVKASLSVSFGQRAPHRASTRDSSPVRRTITHDDPRRSYSPSRRSGSREGPDRDRSSRDRDHSSRDRDRSSRDQDRDRDIRDYHRRERDSRDRDYYRSRHSEERRDDRRDRESSRHRRSSSRHRSRSRSRSRDRRSRSRSRSRSWSRNEQRSSPFGNGNKEKAAVSSNLAKLKDLYGDITEKKEDGDAEKLRRDSCAEEVIRLGGPRWR

SEQ ID NO: 72096 - protein, 265 aa, Setaria italica
  Transcript Sequence Number=SeqID_6122
  Gene Ontology: Cellular component=integral to membrane
  Homolog annotation: Hit_ID=B6TPW9; Match level="QueryCoverage=75%, HitCoverage=77%, E-value=9e-95, Identity=86%"; Hit description=APE1
  Subcellular localization annotation: CTP_CleavageSite=46; ConfidenceScore=5.68e-01
MSVQCAAHAVRALAALPAPASPRRRATCVSLSLLPRRPGRAVAPVRAAEPSSPPAAAPAAQPSGASTGKAVIPDDEFSLAKVSFGVIGLGVGISLLSYGFGSYFNLLPGSEWSALLLTYGFPLTIIGMALKYAELKPVPCITYADAFALREKCATPILKQVRSDVTRFRYGDEQHLDEALQRIFQYGLGGGIPRRSAPILQKIREEVTEDGKYSLVLVFEAKALELSDFEKRQAKFTSFFGPGIKAEIGKGGDDLYEVRLISEST

SEQ ID NO: 72097 - protein, 87 aa, Setaria italica
  Transcript Sequence Number=SeqID_6123
  Subcellular localization annotation: CTP_CleavageSite=53; ConfidenceScore=5.76e-01
AAQQAQARLMMMARGGVSLPFGAASFSSSSSSAPQILDFSTQQLIRPGPPSPAAAAPSTPSSTTTASSPGGSAWPYGGEHHRNKKDA

SEQ ID NO: 72098 - protein, 140 aa, Setaria italica
  Transcript Sequence Number=SeqID_6124
  Subcellular localization annotation: CTP_CleavageSite=79; ConfidenceScore=5.08e-01
NKVLRQQHPALATKSAVSAAAAAAAASTGGIRAPAAPAMNTDITASTKPEYPVVDRNPAFTKVVGNFSALDYMRLSTISAVSVTVGYLSGIKPGIRGPSMVTGGLIGVMGGFMYAYQNSAGRLMGFFPNDAEVARYKHKL

SEQ ID NO: 72099 - protein, 167 aa, Setaria italica
  Transcript Sequence Number=SeqID_6125
  Homolog annotation: Hit_ID=B6SIN5; Match level="QueryCoverage=79%, HitCoverage=37%, E-value=1e-26, Identity=61%"; Hit description=TCP -domain protein
  Subcellular localization annotation: CTP_CleavageSite=43; ConfidenceScore=5.33e-01
ASVAPSLPSPNSGLARPHHHHPHHMWAPPTASAGFSSPAFLNSAGAGAGDAAGIGGLMQRMGLPAGLEMPAGGAAGGTLGAGGHIGFAPMFAGHAMPGLELGLSQDGHIGVLAAHAQSISQFYHQVGAAGASGQLQHQHEHQHHHHQQQEDGEDDREDGESDEESGQ

SEQ ID NO: 72100 - protein, 78 aa, Setaria italica
  Transcript Sequence Number=SeqID_6126
SFHYFTKFSMLLDGEMIWPPSLEVHPKTQSDWTMFCMPDYKKAAVFPPECSPRSCSHGPPRSASGNKVGIRFLCYFAC

SEQ ID NO: 72101 - protein, 58 aa, Setaria italica
  Transcript Sequence Number=SeqID_6127
PLLRQVWVPCTEGEDEGYNGGCPRSGDQGSSKFDGLNVKWRWSSRLEGTIAQCVLKHT

SEQ ID NO: 72102 - protein, 106 aa, Setaria italica
  Transcript Sequence Number=SeqID_6128
  Gene Ontology: Mol. function=metal ion binding
  Homolog annotation: Hit_ID=B6SQ45; Match level="QueryCoverage=100%, HitCoverage=64%, E-value=3e-27, Identity=63%"; Hit description =Protein binding protein
  Pfam annotation: Domain name=zf-C3HC4; Domain location=68-105; Score =9.8; E_value=0.0078; Accession=PF00097.17; Description=Zinc finger, C3HC4 type (RING finger)
DGDWITARYLLSSILGRNPLVVDYVDEESFPVDPPPAAVGSRLAEAVPPAVSAPPAVRAPAGVAGTVCAVCTEEIAVADAVVRLPCAHWYHDGCIAPWLGIRGTCP

SEQ ID NO: 72103 - protein, 282 aa, Setaria italica
  misc_feature (75)..(75): Xaa can be any naturally occurring amino acid
  Transcript Sequence Number=SeqID_6129
YSVPLVLEGTAGLQLLDVKQSGEEVDGLMGLSITLDEWMRLDSGVVDEEEQHSDRTSKILAAHHAKSMELVAEKXNGDKKSKRSGRRWGLLGNNFTVALMVQLRDPLRNYEPVGTPMLALIQVERVFVPPKPKIYSTVSYKGNSEKYDEEPKTEEVPNKALVVEQKVEELEDSIPQFKVTEVHVAGFKSEPEKTKPWGNQTQQQSGSRWLLAAGMGKGNKHPLMKSKAIAKPSQEAAGRPGDTLWSISSRVHGAGTRWGELAGAKNHSRNPNILLQKDKRFR

SEQ ID NO: 72104 - protein, 202 aa, Setaria italica
  Transcript Sequence Number=SeqID_6130
  Gene Ontology: Mol. function=nucleic acid binding; Cellular component= intracellular
  Homolog annotation: Hit_ID=C1BH83; Match level="QueryCoverage=95%, HitCoverage=91%, E-value=6e-40, Identity=49%"; Hit description=Zinc finger matrin type 2
  Pfam annotation: Domain name=zf-U1; Domain location=80-115; Score =9.3; E_value=0.0078; Accession=PF06220.4; Description=U1 zinc finger
MSGNQPVGVDNTSRRKFDKEEYLERARQREQREKDEARKGKERGPLVQRQPLKHRDYEVDLESRLGKTQVVTPIAPLNQQAGYYCSVCECVVKDSANYLDHINGKKHQRALGMSMRVERASLEQVQKRFEALKKRKDPSTFTEQDLDERIMKQQQEEEERKRQRKEKKKEKKREQAAQHEPEDVDPDIAAMMGFGGFGSSKK

SEQ ID NO: 72105 - protein, 97 aa, Setaria italica
  Transcript Sequence Number=SeqID_6131
  Gene Ontology: Mol. function=DNA binding; Cellular component =chromosome; Biological process=nucleosome assembly
  Homolog annotation: Hit_ID=B6TMR1; Match level="QueryCoverage=57%, HitCoverage=35%, E-value=1e-23, Identity=98%"; Hit description =Histone H2A
LPSSVRRFLELAGNAARDNKKNRIIPRHVLLAIRNDEELGKLLAGVTIAHGGVLPNINPVLLPKKTASAAAKEGKEGKEKKSPKKAATKSPKKAAAA

SEQ ID NO: 72106 - protein, 162 aa, Setaria italica
  Transcript Sequence Number=SeqID_6132
  Gene Ontology: Mol. function=DNA binding; Cellular component =chromosome; Biological process=nucleosome assembly
  Homolog annotation: Hit_ID=Q6L500; Match level="QueryCoverage=62%, HitCoverage=62%, E-value=1e-39, Identity=82%"; Hit description =Probable histone H2A.4
  Pfam annotation: Domain name=CBFD_NFYB_HMF; Domain location=34-98; Score=12.4; E_value=0.013; Accession=PF00808.15; Description=Histone- like transcription factor (CBFNF-Y) and archaeal histone
  Pfam annotation: Domain name=Histone; Domain location=28-101; Score =103.7; E_value=6.3e-28; Accession=PF00125.16; Description=Core histone H2AH2BH3H4
  Pfam module annotation: Pfam domain module=CBFD_NFYB_HMF::Histone; Domain location=34-98::28-101
  Subcellular localization annotation: CTP_CleavageSite=27; ConfidenceScore=5.09e-01
MDVGAKVPKKGAAGRRGGGGPKKKPVSRSVKAGLQFPVGRIGRYLKQGRYSQRIGTGAPVYLAAVLEYLAAEVLELAGNAARDNKKNRIIPRHVLLAIRNDEELGKLLAGVTIAHGGVLPNINPVLLPKKTASAAAKEGKEGKEKKSPKKAATKSPKKAAAA

SEQ ID NO: 72107 - protein, 92 aa, Setaria italica
  Transcript Sequence Number=SeqID_6133
  Gene Ontology: Mol. function=cysteine protease inhibitor activity; Cellular component=extracellular region; Biological process=defense response
  Homolog annotation: Hit_ID=B6SNY0; Match level="QueryCoverage=98%, HitCoverage=70%, E-value=4e-34, Identity=75%"; Hit description =Cystatin
  Pfam annotation: Domain name=Cystatin; Domain location=2-89; Score =9.7; E_value=0.015; Accession=PF00031.13; Description=Cystatin domain
WSAIQNVSDPHIQELGGWALGQAKEKQLAGAGLRFRRVVRGEQQVVSGMNYRLYVDVADAGGRSAPYVAVVYEQLWTSTRELTSFNKARRAH

SEQ ID NO: 72108 - protein, 91 aa, Setaria italica
  Transcript Sequence Number=SeqID_6134
  Gene Ontology: Mol. function=phosphoric diester hydrolase activity; Cellular component=nucleus
GDYFMKYVNLGDEHKSSVPMDLGSIKKERRHSEEDSAAVKRNRQIMEDEALARTLQESFTEENTTVSGMTSGQKISPPDSAGSSGKHNERM

SEQ ID NO: 72109 - protein, 315 aa, Setaria italica
  misc_feature (93)..(93): Xaa can be any naturally occurring amino acid
  Transcript Sequence Number=SeqID_6135
  Homolog annotation: Hit_ID=B9RCL7; Match level="QueryCoverage=88%, HitCoverage=35%, E-value=4e-33, Identity=33%"; Hit description =Atpob1, putative
  Pfam annotation: Domain name=DUF1191; Domain location=22-307; Score =553.9; E_value=1.9e-163; Accession=PF06697.4; Description=Protein of unknown function (DUF1191)
  Pfam annotation: Domain name=SKG6; Domain location=236-272; Score =7.6; E_value=0.1; Accession=PF08693.2; Description=Transmembrane alpha-helix domain
  Pfam module annotation: Pfam domain module=DUF1191::SKG6; Domain location=22-307::236-272
MGFLICACLLQLLLLATSSGVAAQSQPLSPARILDATLQDYAYRAFVRPRTGIVYNATLPANLTGIAVSAVRLRSGSLRRKGFADYLQFGIPXGVVVQPHVERVVLVYHNLGNSSDRYYPLPGYTYLAPVLGLLVYDAANLSAVGLQELDIIASGSPISVTFSDVRSVPAGSAAPRCVVFDLNGVPQFRDLEATNLCSTYHQGHISIVVNSSEIAPAPAPPGTISPPIPTEGGHKKGSSKAWKIAVSVVGAAVALGLLAALLLCLVRYKRDKKLEVMERNAEVGETLRMAQVGRTQAPVALGTRTQPVIENDYAA

SEQ ID NO: 72110 - protein, 206 aa, Setaria italica
  misc_feature (79)..(79): Xaa can be any naturally occurring amino acid
  Transcript Sequence Number=SeqID_6136
  Gene Ontology: Mol. function=nucleic acid binding
MNSPSKLSNDYDLKLTTQGAAEVLQTSKPSEGNRDVGKNRNASVNQKPSKKARNNCNADESQQTYQGAAEQISNSSKRXRKSRRNKNIYINERPLKKAHNNSNVDRSSRSKAYASDLEPHAGFIPPTSRVHSNHAYDQRRTAEYDIHPIDRHPYARETAASRSAYSGYTSHAGYEAGYTYVYPPPPPPSGSYYRGNGSYIPRRGDY

SEQ ID NO: 72111 - protein, 80 aa, Setaria italica
  Transcript Sequence Number=SeqID_6137
  Subcellular localization annotation: CTP_CleavageSite=33; ConfidenceScore=5.12e-01
SLFFLVFFFFFDAILHFPSFFHPQLGLMHYFVSTQQGKQQSYAVNLTNLKNTDTRSLQVQIYTTIQHVQYIDLLPSTRSL

SEQ ID NO: 72112 - protein, 110 aa, Setaria italica
  misc_feature (15)..(15): Xaa can be any naturally occurring amino acid
  misc_feature (31)..(32): Xaa can be any naturally occurring amino acid
  Transcript Sequence Number=SeqID_6138
  Gene Ontology: Mol. function=phosphatidate cytidylyltransferase activity; Cellular component=membrane; Biological process =phospholipid biosynthetic process
  Homolog annotation: Hit_ID=B6TSG9; Match level="QueryCoverage=100%, HitCoverage=40%, E-value=2e-50, Identity=88%"; Hit description =Phytol kinase 2
KLCRKLVHITVGLVXVCMWPLFSSDDVYAPXXAPLIFVINIVKVTVIGLGVVKDEGVVNSMTRHGDCRELLKGPLYYACAITLTTMVFWRTSPISIAVICNLCAGDGVAD

SEQ ID NO: 72113 - protein, 155 aa, Setaria italica
  Transcript Sequence Number=SeqID_6139
  Gene Ontology: Mol. function=phosphatidate cytidylyltransferase activity; Cellular component=membrane; Biological process =phospholipid biosynthetic process
  Homolog annotation: Hit_ID=B6TSG9; Match level="QueryCoverage=100%, HitCoverage=56%, E-value=1e-53, Identity=66%"; Hit description =Phytol kinase 2
MWTENPVVRDAGAAVLSGVAAAVVLRFWEEVANRALLDQTLCRKLVHITVGLVYFLMWPLFSSDDVYAPFLAPLIIVVNIIKVLVIGLGVVKDDGVVNSMTRHGDCRELLKGPLYYACAITLTTIAFWRTSPISIAVICNLCAGDGVADIVGRRF

SEQ ID NO: 72114 - protein, 79 aa, Setaria italica
  Transcript Sequence Number=SeqID_6140
  Subcellular localization annotation: CTP_CleavageSite=12; ConfidenceScore=5.00e-01
MGKKRKLETKPAAAAKASPATAAKSTTARAAGLSEVIAPVAAVKEEPQMAGGEEEEEEEEVEVEEEVEVEEEVEVEEEE

SEQ ID NO: 72115 - protein, 628 aa, Setaria italica
  misc_feature (287)..(287): Xaa can be any naturally occurring amino acid
  misc_feature (562)..(562): Xaa can be any naturally occurring amino acid
  Transcript Sequence Number=SeqID_6141
  Gene Ontology: Mol. function=nucleic acid binding
SASKITLILIFQFICQKQCHSSGAKHDGLLPNDPIPGRAPANGGAEVLNDRITPVDRRFRFVYSRRRFCRKKNGFLNTSEQNSNSQRSASPAMVLATLPCVQSGSETGASVTYVILLLSLPLKPVYKLIREACCVWVSNALFLLQHGTLVALWPVVQLDILLVDNVLGLRHILLETCLRSAVSLFCLLVGSFKRCPRQRTTKASTMPCTSIKFQISGVHGRRQVVFMLFSFVGVEKSKWEHLQGKLQYQCSKREFSKGCTNDVVHRGLSSIDPFSKDFDVQELTFFXESNYSDTEPVIYCLDEQCKFARNVLDVTTAPSLLLCHHLKSLTEINLINGSQQSISFALDENQQLLVTERSSGTVRPVPPRVCSLNLSSSPDSPLDMASASCTDQTRSTSREFKTAESTVSPECNGGNTGDANIMRRKFLDQNGPYLDADKPCSYNLNVICSPQKSSERHLSINIPQDKVIDAPNDKPLNKDEKDKQPVSNLVQELNEHPIGRATPTAPRTTYHRNRFTSISRTFGDGSKLLPEDLMVTGFAGGSKKPRSQVSYSISPRSEEFGXKNKGHFRKIQSHSSAKINDAKKLPDSSRSGHSSPESLTCVANVLVTVGDRGWREYDTQITMDSDGQ

SEQ ID NO: 72116 - protein, 132 aa, Setaria italica
  Transcript Sequence Number=SeqID_6142
  Gene Ontology: Mol. function=electron carrier activity; Cellular component=integral to membrane; Biological process=oxidation reduction
  Homolog annotation: Hit_ID=Q69LJ6; Match level="QueryCoverage=89%, HitCoverage=16%, E-value=6e-51, Identity=79%"; Hit description =Putative respiratory burst oxidase protein E
  Pfam annotation: Domain name=Ferric_reduct; Domain location=2-131; Score=46.3; E_value=1.2e-10; Accession=PF01794.11; Description =Ferric reductase like transmembrane component
NMALVLLPVCRNTLTWLRSTWARFFVPFDDSIAFHKIIATAIALGICLHAGNHLACDFPRLIASGPDEYRLVARFFGRDKPTYRALLAGAEGVTGIVMVTLMAVSFTLATRPFRKREEMAKGAAAAAAGGGG

SEQ ID NO: 72117 - protein, 108 aa, Setaria italica
  Transcript Sequence Number=SeqID_6143
  Gene Ontology: Mol. function=hydrolase activity; Biological process =metabolic process
  Homolog annotation: Hit_ID=B6UAZ4; Match level="QueryCoverage=97%, HitCoverage=33%, E-value=1e-17, Identity=47%"; Hit description =Gibberellin receptor GID1L2
VRRFMGTDTVPASTDPATGVASRDVVVDAAAGLAVRLYLPRLATNRTAGTETDGGQLLPLVVFFHGGAFVTESAFSPTYHRYLNALASRARVLAVSVEYRLAPEHRPT

SEQ ID NO: 72118 - protein, 86 aa, Setaria italica
  Transcript Sequence Number=SeqID_6144
  Subcellular localization annotation: CTP_CleavageSite=7; ConfidenceScore=5.11e-01
PFRQSPCAAGTSSSQGSPVPRPGAHPHLLLEAPIPPPAAPAPALALPPQAAAVPALPQPPPAAPISSYMPPPRPPQQQTGSMLPAP

SEQ ID NO: 72119 - protein, 228 aa, Setaria italica
  Transcript Sequence Number=SeqID_6145
  Gene Ontology: Mol. function=oligopeptide transporter activity; Cellular component=integral to membrane; Biological process =oligopeptide transport
  Homolog annotation: Hit_ID=B9IH03; Match level="QueryCoverage=100%, HitCoverage=30%, E-value=1e-106, Identity=78%"; Hit description =Oligopeptide transporter OPT family
  Pfam annotation: Domain name=OPT; Domain location=1-228; Score= -150.2; E_value=2.1e-06; Accession=PF03169.7; Description=OPT oligopeptide transporter protein
LSHVALYHGRSIWEQTKATVRAQNAGDVHTRLMKRNYAAVPQWWFQVMLVLVLGLSVFTCEGFGRQLQLPYWGVLLAAGLAFFFTLPIGIITATTNQQPGLNVVTELIIGYLYPGRPLANVAFKTYGYISMSQAIMFLQDFKLGHYMKIPPRRMFIVQLVGTVLASSVYFGTSWWLLESVPNICDPSKLPEGSPWTCPGDDVFFNASIIWGVVGPLRMFGRLGLYAKM

SEQ ID NO: 72120 - protein, 157 aa, Setaria italica
  Transcript Sequence Number=SeqID_6146
  Gene Ontology: Mol. function=RNA polymerase II transcription factor activity; Cellular component=nucleus; Biological process =transcription initiation
  Homolog annotation: Hit_ID=B9RNR0; Match level="QueryCoverage=80%, HitCoverage=88%, E-value=2e-52, Identity=73%"; Hit description =Transcription factor, putative
  Pfam annotation: Domain name=TFIID_30kDa; Domain location=51-101; Score=115.2; E_value=2.2e-31; Accession=PF03540.5; Description =Transcription initiation factor TFIID
MMGSNSSGGGGGPGGGMAPGMGGPVGGGGDGRHDDETALTEFLSSLMDYTPTIPDELVEHYLGRSGFNCPDLRLTRLVAVATQKFLSDIASDSLQHCKARVAAPIKDNKSKQPKDRRLVLTMDDLSKALREHGVNLKHPEYFADSPSAGMAPSTREE

SEQ ID NO: 72121 - protein, 91 aa, Setaria italica
  Transcript Sequence Number=SeqID_6147
  Homolog annotation: Hit_ID=Q9SHG2; Match level="QueryCoverage=67%, HitCoverage=13%, E-value=3e-23, Identity=77%"; Hit description =F20D23.27 protein
RWRARPAGVRGGAPGDRRRQRPPRGNARRAEQPTTYCDAYSNPQPQEILQLLPHPVWGEFGYPTAKGQGWVGDPRAWELDVGALSQALYFY

SEQ ID NO: 72122 - protein, 149 aa, Setaria italica
  Transcript Sequence Number=SeqID_6148
  Homolog annotation: Hit_ID=Q9SHG2; Match level="QueryCoverage=91%, HitCoverage=29%, E-value=4e-54, Identity=68%"; Hit description =F20D23.27 protein
NGTRVHRTDAARFPYGAYHVYCSPGNARRAEQPTTYCDAYSNPQPQEILQLLPHPVWGEFGYPTAKGQGWVGDPRAWELDVGALSQALYFYQDPGTPAARRRWTSLDVGTEIYVSENAEAEWTLSGFDILVPDTCIKSQQEGTAGNSCW

SEQ ID NO: 72123 - protein, 94 aa, Setaria italica
  Transcript Sequence Number=SeqID_6149
  Subcellular localization annotation: CTP_CleavageSite=55; ConfidenceScore=5.34e-01
MARHAGKPFLFALLLVLSGLILLPLASSVPTPRSLRLGNPQQHPPALKLAFSQEMAMAARNLGRRAARMAVEVNDYQPSGPNNRHDPPKGPGRA

SEQ ID NO: 72124 - protein, 113 aa, Setaria italica
  Transcript Sequence Number=SeqID_6150
  Gene Ontology: Mol. function=RNA binding
  Homolog annotation: Hit_ID=Q69J34; Match level="QueryCoverage=61%, HitCoverage=10%, E-value=5e-15, Identity=62%"; Hit description =Putative agenet domain-containing protein / bromo-adjacent homology (BAH) domain-containing protein
ANSNGDKPVPEQGLAATQANSNGDKPVPEQGLAATQAICNGDKSVTEQGLEAIQTTSNGDKQTEASKQTEVSLTDKTSSLLVEDEKQTILGKRPRDDGEQDCNGEVGVDVGKT

SEQ ID NO: 72125 - protein, 73 aa, Setaria italica
  Transcript Sequence Number=SeqID_6151
YSPIPVVIQLLWPYLVVYKLILLWPYLVVYKLILLSTLWLQEAHIQSSIHEGNGNATTIISQDTILTNMVCLS

SEQ ID NO: 72126 - protein, 140 aa, Setaria italica
  Transcript Sequence Number=SeqID_6152
  Gene Ontology: Mol. function=nucleic acid binding; Cellular component= nucleus
  Homolog annotation: Hit_ID=B6TFI3; Match level="QueryCoverage=100%, HitCoverage=54%, E-value=2e-43, Identity=74%"; Hit description =Arginine/serine-rich splicing factor RSP41
  Pfam annotation: Domain name=RRM_1; Domain location=1-43; Score=10.7; E_value=0.02; Accession=PF00076.14; Description=RNA recognition motif. (a.k.a. RRM, RBD, o
PYGKIANIRVRRNFAFVRYETQEEATAAVKNTDKSTILDRVITVEYAFRDDDNERDDRYGSPKQGAHDRRRGNPYMRSPSPRYRKDYSPDYNRRGRYPGYDRRDGAMYDRRSPAYDRYSRGRSPVYDRYDRRRSPVYDQY

SEQ ID NO: 72127 - protein, 182 aa, Setaria italica
  misc_feature (22)..(22): Xaa can be any naturally occurring amino acid
  misc_feature (43)..(43): Xaa can be any naturally occurring amino acid
  misc_feature (141)..(141): Xaa can be any naturally occurring amino acid
  misc_feature (150)..(150): Xaa can be any naturally occurring amino acid
  Transcript Sequence Number=SeqID_6153
  Pfam annotation: Domain name=Transposase_24; Domain location=13-144; Score=-2.5; E_value=0.00093; Accession=PF03004.6; Description=Plant transposase (PttaEnSpm family)
LDEIINGKPNKVNELQWKALVXIWCREQHKKVCATNSRIAKEXKNTHTSRRKSHAKLKKEMEDNQKRKVHRLELWEVAHKKKNGRYTTHKVDAIMNATYEELEKRQQNNNGNLSAQDFNEVFNDIVAKELKAHRYYDDKYXSEVRVSQGXTFVTQTKEERRYQEKVNEMENKMQHMGGFMKH

SEQ ID NO: 72128 - protein, 157 aa, Setaria italica
  Transcript Sequence Number=SeqID_6154
  Gene Ontology: Mol. function=DNA-directed RNA polymerase activity; Cellular component=mitochondrion; Biological process=transcription
  Homolog annotation: Hit_ID=O82725; Match level="QueryCoverage=75%, HitCoverage=12%, E-value=1e-60, Identity=96%"; Hit description=DNA -directed RNA polymerase
RQRERARRAQHRRLRQRQVKAETEAWARAAEEYREIEREMLDRRLAPALPYVKSLFVGWFEPLRDAIARDQDVQRRKRVKHVYAKYLLLLPADKIAVIVMHKMMGLLMSSKDGTGSVRVVQAAHCIGEAVEREFKVQSFFQKSRKKKDQGENDQALE

SEQ ID NO: 72129 - protein, 92 aa, Setaria italica
  Transcript Sequence Number=SeqID_6155
  Gene Ontology: Mol. function=transferase activity, transferring glycosyl groups; Cellular component=integral to membrane; Biological process=cell wall organization and biogenesis
  Homolog annotation: Hit_ID=Q6YWK8; Match level="QueryCoverage=88%, HitCoverage=15%, E-value=1e-22, Identity=65%"; Hit description =Probable mannan synthase 11
VVPAVRALVYLSLGMTVMILVEKLFVCAVCLAVRALRLSPDRRYRWEPIAAGRGGDEESGDAAKYPMVLVQIPMYNEREVYKLSIGAACALE

SEQ ID NO: 72130 - protein, 243 aa, Setaria italica
  Transcript Sequence Number=SeqID_6156
  Subcellular localization annotation: CTP_CleavageSite=80; ConfidenceScore=5.29e-01
PSSGNSSLLNARMSTAHGSGHKIVANHVLLKSSNASDSLQVAPSKDNKISIISQMTGARIAKLGIRSPKSDRVLEKESVQLSGTKGSPVTTSKILKSVPEGKPALPSPAIMQKVPEESVLDPKAPTVLKCIMRSPAVRKSPQTVPELGNGMILGSGTPKAHMDNAISSCMPSGMGDISDLELPMLLENDGNLEKAETCRKELEDICILLKRKHAEAKELAVKAIVNNNTMLMLNHPMFEEKIS

SEQ ID NO: 72131 - protein, 132 aa, Setaria italica
  Transcript Sequence Number=SeqID_6157
  Gene Ontology: Cellular component=mitochondrion
  Homolog annotation: Hit_ID=B6STL4; Match level="QueryCoverage=100%, HitCoverage=57%, E-value=2e-67, Identity=91%"; Hit description=NADH dehydrogenase 1 alpha subcomplex, assembly factor 1
  Pfam annotation: Domain name=CIA30; Domain location=1-128; Score =84.3; E_value=4.4e-22; Accession=PF08547.4; Description=Complex I intermediate-associated prote
YGFCGMRSKKFDGFIDLDAYDTIAMKIKGDGRCYISTIYTENWVNSPGQQEDNSWQAFVYTPQDRWQILKIPLDRYLPTWRGSVIEAKLEMNPARIVGMSLSVNAEGGVPGAKTGTGDFRLEVDWIKALRTV

SEQ ID NO: 72132 - protein, 225 aa, Setaria italica
  misc_feature (118)..(118): Xaa can be any naturally occurring amino acid
  misc_feature (163)..(163): Xaa can be any naturally occurring amino acid
  Transcript Sequence Number=SeqID_6158
  Gene Ontology: Cellular component=mitochondrion
  Homolog annotation: Hit_ID=B6STL4; Match level="QueryCoverage=100%, HitCoverage=96%, E-value=1e-111, Identity=88%"; Hit description=NADH dehydrogenase 1 alpha subcomplex, assembly factor 1
  Pfam annotation: Domain name=CIA30; Domain location=26-221; Score =217.4; E_value=3.7e-62; Accession=PF08547.4; Description=Complex I intermediate-associated prote
ASFNSTKRALVWSSDDLIPPTERYIFNFNSKDELKRWHLYSDSEYGGLSSASLEITEGAAGADTSLTGVFSGNLSSDMSEGSTWRIRRYGFCGMRSKKFDGFIDLDAYDTIAMKIKGXGRCYISTIYTENWVNSPGQQEDNSWQAFVYTPQDRWQILKFLFCXIPLDRYLPTWRGSVIEAKLEMNPARIVGMSLSVNAEGGVPGAKTGTGDFRLEVDWIKALRTV

SEQ ID NO: 72133 - protein, 168 aa, Setaria italica
  Transcript Sequence Number=SeqID_6159
  Gene Ontology: Mol. function=Rab GTPase activator activity; Cellular component=intracellular; Biological process=regulation of Rab GTPase activity
  Homolog annotation: Hit_ID=B6T5C5; Match level="QueryCoverage=97%, HitCoverage=37%, E-value=6e-61, Identity=69%"; Hit description=TBC domain containing protein
MLKWGLSSGTPADSYYEVRSDCTDDVPKSKFKIKAGKTLSARKWQAAFSADGCLDIASVLRRIQTGGVHPTVRGEVWEFLLGCFDPRSTFDEREEIRQIRRLQYARWKEDCREMDSHVGSGKIITAPLITEDGRAIKDPLVLLEATSDKNTSEGTPATRRNEIEVDES

SEQ ID NO: 72134 - protein, 59 aa, Setaria italica
  misc_feature (10)..(10): Xaa can be any naturally occurring amino acid
  Transcript Sequence Number=SeqID_6160
  Gene Ontology: Mol. function=nucleotide binding; Cellular component =myosin complex; Biological process=signal transduction
  Homolog annotation: Hit_ID=Q94GQ9; Match level="QueryCoverage=94%, HitCoverage=6%, E-value=2e-17, Identity=73%"; Hit description =Putative myosin heavy chain, 3'-partial (Fragment)
  Pfam annotation: Domain name=Myosin_N; Domain location=11-52; Score =37.8; E_value=4.5e-08; Accession=PF02736.11; Description=Myosin N -terminal SH3-like domain
MGTPVNIIVXGSHVWLEDPGEAWVDGVVTEIKGRDATIATTNGKTVVASLGSIYPQGHG

SEQ ID NO: 72135 - protein, 93 aa, Setaria italica
  Transcript Sequence Number=SeqID_6161
RKGTRNCEKEKSLSSRSSSSSGMTSVDSLPHLPPPQQHHQPTTLPLMPVSPVEEKATVAAATVEPSAVAAPGAGAHPAPPRALRPVPAAAATW

SEQ ID NO: 72136 - protein, 286 aa, Setaria italica
  misc_feature (33)..(33): Xaa can be any naturally occurring amino acid
  Transcript Sequence Number=SeqID_6162
HDTEFFTQKMVEEKNSSQDTVQISGNVTLQNVXYEKDVMEIKLADTVDSDNYGGNFVKDVCVDEGAILHRKISEEKPVDKRSSPNFSCQMIPANSDIRYGKKDDSKKYMHELKPEAVVPVDFAPDYDNEKQHSSGKEYDLEDRTTTSCIAGDPSEKISLQELLRLESAEESRHASTINSESSEIHEEAVGQVALTNTSQPVSSGTSSKENTSGCSGTMSECHDAASALDVREPHKIDRYNPFIDHRLEDASEPERSIPGITDAASADSICSIDNAVNGSTGLDEVE

SEQ ID NO: 72137 - protein, 303 aa, Setaria italica
  Transcript Sequence Number=SeqID_6163
QADWCLSKQPEHQENHLWKSVSSGTSSKENTSGCSGTMSECHDAASALDVREPHKIDRYNPFIDHRLEDASEPERSIPGITDAASADSICAIDNAVNGSTGLDEVETVEPGTDAVSTSSSDIQSSGKSDDHSGSIFSKAITGAVDETAVATSSSSNTEPSNANGDNQEKCVSDGVADQIDEEHRVGSDGAVNKSSTLAQDHSVAEQTASESSKSTARIGNDNPSEPNFFGPSIMSGPLSMSGHIAYSGNVSLRSDSSTTSTRSFAFPVLQREWISSPVRMAKAERRRNRRRRAWRKGLICCKF

SEQ ID NO: 72138 - protein, 107 aa, Setaria italica
  Transcript Sequence Number=SeqID_6164
YRKDIFNYESARMPIFLAQACISGSQLPYPCLPQNLYFSFRFKYEINSKPQETNTFNLRSLKHPKYGLIETYLAGIGKSQVCINSIDQLHVRIDKVNFHKYGSYSAR

SEQ ID NO: 72139 - protein, 57 aa, Setaria italica
  Transcript Sequence Number=SeqID_6165
HLCQTTGGVVLLRKLEVNYLLTSNLLSFHVISRLFWHVNRLAVISARALYSKCTYYL

SEQ ID NO: 72140 - protein, 98 aa, Setaria italica
  Transcript Sequence Number=SeqID_6166
  Gene Ontology: Mol. function=ATPase activity, coupled to transmembrane movement of ions, phosphorylative mechanism; Cellular component=membrane
  Homolog annotation: Hit_ID=B6TVS8; Match level="QueryCoverage=100%, HitCoverage=55%, E-value=2e-32, Identity=69%"; Hit description =Copper-transporting ATPase PAA1
  Pfam annotation: Domain name=HMA; Domain location=15-87; Score=48.0; E_value=3.7e-11; Accession=PF00403.18; Description=Heavy-metal -associated domain
LGEAEPSDGDADAIVLHVGGMSCSGCAAKVKRILENQPEVAAAAVDVEKATAVVWTTPEAKATKDWQKQLGEKLANHLTTCGFQSHVQDEGEAEPSDS

SEQ ID NO: 72141 - protein, 84 aa, Setaria italica
  misc_feature (57)..(57): Xaa can be any naturally occurring amino acid
  Transcript Sequence Number=SeqID_6167
MVRVATFFAMTFGAFLFWQSMDRVHVWIALHQDEKKERMERDLEIKRMQAELMAQAXKRVNHDYHFANGFGQFLYHISSAVSSK

SEQ ID NO: 72142 - protein, 152 aa, Setaria italica
  Transcript Sequence Number=SeqID_6168
  Gene Ontology: Mol. function=ATPase activity, coupled to transmembrane movement of substances; Cellular component=integral to membrane; Biological process=transport
  Homolog annotation: Hit_ID=Q6YUU5; Match level="QueryCoverage=100%, HitCoverage=12%, E-value=3e-63, Identity=76%"; Hit description =Putative multidrug resistance protein
TYVLFFVALAVASFLLSIVQHYNFGVMGERLTKRIREHMLTKILTFEIAWFDHEENSTGAICSQLAKDANAVRSLVGDRMALAIQVVSSVLVSWTMGLVIAWRLAVVMIAAQPLIIIGFYARRALLKNMSKRSIRAQSEGSKLAAEAISNFR

SEQ ID NO: 72143 - protein, 153 aa, Setaria italica
  Transcript Sequence Number=SeqID_6169
VLSSLGTSLGQRVAERERARRRRRDPGRDEFFVPTPESLAWLDSVSLPMVLTAAAVALFTKLLMMEHEATDQERRERKINNSHPDQGKVRMLSREEWEEVQEVRPRTPFESKLARPHARIRTGEPMRLEDVKDWATDVITDAFTRVEESTKQK

SEQ ID NO: 72144 - protein, 228 aa, Setaria italica
  Transcript Sequence Number=SeqID_6170
  Gene Ontology: Mol. function=DNA binding; Cellular component=nucleus; Biological process=regulation of transcription
DPDTHKPLAEASSSRGGGAAAASRTAVFSDAELILSSAAGKHMPPPPVTAESYVYSRSISADGGVSDGSLQSLSGYNGDFAAGYLQEPDALQQGGPSDGPPAVVLPSVSSSSTLNSMAGLSPPATTATDEQCNNNSSSGGGNGSFELSTQQSCSASQLPWLELGTSSGAAAVLDQYGAALDELKWSDYVFDGYGGGGQYQQGQCIYGDSKDAVQFVDASGLSSSWCLN

SEQ ID NO: 72145 - protein, 205 aa, Setaria italica
  Transcript Sequence Number=SeqID_6171
  Homolog annotation: Hit_ID=Q7FA10; Match level="QueryCoverage=98%, HitCoverage=40%, E-value=1e-24, Identity=37%"; Hit description =OSJNBa0064D20.3 protein
QTCVLSQRWRSLWRSAPRISIDEQDFGISLMIERDDALEVKWARFEDFATNLLLFHDNTSSLGEFRLSSRVYNQRHVDRWIRRGIEYCPSVLIILILNYCRFKLPPVVGSNFCHLKMLRLCSVDLGRNFADLLCSACPVMEDLKLGNCEFSGNSSQVITSPTLKKLELESCVNNTGYPLVITVPSLAYLCLCYGYFEAGISLFKM

SEQ ID NO: 72146 - protein, 110 aa, Setaria italica
  Transcript Sequence Number=SeqID_6172
  Subcellular localization annotation: CTP_CleavageSite=3; ConfidenceScore=5.15e-01
MMHAKSESDVTSLAASSPPRSPKRGGGGAGGGNNYYVQSPSRESHDGGYKSSSMQATPVYNSPNESPSHPSYGRHSRSSSVSRFSGNLRKGGAGRTGRGKYGKGTNLLKR

SEQ ID NO: 72147 - protein, 72 aa, Setaria italica
  misc_feature (50)..(50): Xaa can be any naturally occurring amino acid
  Transcript Sequence Number=SeqID_6173
  Homolog annotation: Hit_ID=B6TEA2; Match level="QueryCoverage=90%, HitCoverage=20%, E-value=7e-23, Identity=83%"; Hit description =Harpin-induced protein
SLFLWYTQLRRYYQPRKSHRMVTAVIHGEKVPLYGAGGSLMLSSTGGAVXPLTLDFDLTSRGYVIGKLVRVT

SEQ ID NO: 72148 - protein, 97 aa, Setaria italica
  Transcript Sequence Number=SeqID_6174
  Gene Ontology: Mol. function=phosphotransferase activity, alcohol group as acceptor; Cellular component=phosphoinositide 3-kinase complex; Biological process=phosphoinositide-mediated signaling
  Homolog annotation: Hit_ID=P42347; Match level="QueryCoverage=95%, HitCoverage=13%, E-value=2e-29, Identity=61%"; Hit description =Phosphatidylinositol 3-kinase, root isoform
MVGGGNEFRFFLSCDISLPLAFRVLHAEHILLTQQKVPELFVECKLYIDGILFGLPVKTRLEPSGPTYFWNELITLSTKYRDLTSLSQLAFTVWDVS

SEQ ID NO: 72149 - protein, 74 aa, Setaria italica
  Transcript Sequence Number=SeqID_6175
  Gene Ontology: Mol. function=electron carrier activity; Cellular component=extracellular region; Biological process=response to oxidative stress
  Homolog annotation: Hit_ID=Q5U1N1; Match level="QueryCoverage=94%, HitCoverage=19%, E-value=7e-22, Identity=71%"; Hit description=Class III peroxidase 62
KANGPNASLQPRALQLIENIRAKVHAACGPTVSCADIIALATRDAVSLAGGPSFAMPQGRTDSFRPASDDEIAT

SEQ ID NO: 72150 - protein, 131 aa, Setaria italica
  Transcript Sequence Number=SeqID_6176
  Gene Ontology: Mol. function=electron carrier activity; Biological process=response to oxidative stress
  Homolog annotation: Hit_ID=B6TZQ7; Match level="QueryCoverage=74%, HitCoverage=29%, E-value=3e-31, Identity=67%"; Hit description =Peroxidase 12
  Pfam annotation: Domain name=peroxidase; Domain location=41-131; Score=-63.5; E_value=5.3e-05; Accession=PF00141.15; Description =Peroxidase
MAATRASCVVVVLLLIIAASNVGGLSVDFHAASCPQLEGIVRGAVQAARAQDVQVTAGLLRIFFHDCLPQGCDASILLDGEKANGPNASLQPRALQLIENIRAKVHAACGPTVSCADIIALDKPDERPYKT

SEQ ID NO: 72151 - protein, 87 aa, Setaria italica
  Transcript Sequence Number=SeqID_6177
  Homolog annotation: Hit_ID=B6SSK0; Match level="QueryCoverage=42%, HitCoverage=12%, E-value=6e-09, Identity=81%"; Hit description =Ethylene-responsive element binding protein 2
LVAGRVGVRRGGPAAHPALEAADQSSGGASKRQRTEPESADDEASPRASDSESDALFDAFIFGDQFAYFNGGAAALHGVRAEQAVQG

SEQ ID NO: 72152 - protein, 86 aa, Setaria italica
  Transcript Sequence Number=SeqID_6178
  Subcellular localization annotation: CTP_CleavageSite=22; ConfidenceScore=5.56e-01
MNFQFCRQFPIHMSHGLQTNLKSNKRRSEPSNPSSTVAALPDLTRGRDQKSATILLSGIPLGGLERQPPSLPMARGRRRWRRRLVR

SEQ ID NO: 72153 - protein, 107 aa, Setaria italica
  Transcript Sequence Number=SeqID_6179
HIRWRQPWLKTAQPAPTRLTSRQPSTMLNWKVMKSAREELRPREIYHTRIADHITNDSLSIYSGIFHLSGISLLDCPRIYSSITGKEHICTPLPITYLISRTLHQST

SEQ ID NO: 72154 - protein, 120 aa, Setaria italica
  Transcript Sequence Number=SeqID_6180
  Gene Ontology: Mol. function=nucleic acid binding; Cellular component= ribonucleoprotein complex; Biological process=regulation of transcription, DNA-dependent
  Homolog annotation: Hit_ID=B6T623; Match level="QueryCoverage=65%, HitCoverage=26%, E-value=7e-38, Identity=94%"; Hit description =Arginine/serine-rich splicing factor 10
  Pfam annotation: Domain name=RRM_1; Domain location=39-109; Score =85.7; E_value=1.6e-22; Accession=PF00076.14; Description=RNA recognition motif. (a.k.a. RRM, RBD, o
WPRPPRRRRGRRPRRRGRACRCSGRRRRVRGIDNPGNNLYVTGLSTRVTEDDLEKFFSKEGKVKNCHVVLDPRSKESRGFAFVTMDTVEDARRCIKYLHRTVLEGRLVTVEKLSTLMKGS

SEQ ID NO: 72155 - protein, 197 aa, Setaria italica
  Transcript Sequence Number=SeqID_6181
  Gene Ontology: Mol. function=nucleic acid binding; Cellular component= ribonucleoprotein complex; Biological process=regulation of transcription, DNA-dependent
  Homolog annotation: Hit_ID=B6T623; Match level="QueryCoverage=40%, HitCoverage=26%, E-value=2e-37, Identity=94%"; Hit description =Arginine/serine-rich splicing factor 10
  Pfam annotation: Domain name=RRM_1; Domain location=94-164; Score =85.7; E_value=1.6e-22; Accession=PF00076.14; Description=RNA recognition motif. (a.k.a. RRM, RBD, o
  Subcellular localization annotation: CTP_CleavageSite=77; ConfidenceScore=5.67e-01
CVLVCKILFFRYTARSITPPAERNGTSSSPPPKRRSPSRSPPPKSTSRSPHPRSPKRRSTSRSPPPRRRGRSRSRSRDRSRSRSLDDRNPGNNLYVTGLSTRVTEDDLEKFFSKEGKVKNCHVVLDPRSKESRGFAFVTMDTVEDARRCIKYLHRTVLEGRLVTVEKFNMVLGCLDVNLVGAGCAVFNHGCRQRMCS

SEQ ID NO: 72156 - protein, 284 aa, Setaria italica
  misc_feature (242)..(242): Xaa can be any naturally occurring amino acid
  Transcript Sequence Number=SeqID_6182
  Gene Ontology: Mol. function=nucleic acid binding; Cellular component= ribonucleoprotein complex
  Homolog annotation: Hit_ID=B6T623; Match level="QueryCoverage=33%, HitCoverage=32%, E-value=4e-47, Identity=95%"; Hit description =Arginine/serine-rich splicing factor 10
  Pfam annotation: Domain name=RRM_1; Domain location=91-161; Score =85.7; E_value=1.6e-22; Accession=PF00076.14; Description=RNA recognition motif. (a.k.a. RRM, RBD, o
  Subcellular localization annotation: CTP_CleavageSite=74; ConfidenceScore=5.81e-01
MSQAKEVRYTARSITPPAERNGTSSSPPPKRRSPSRSPPPKSTSRSPHPRSPKRRSTSRSPPPRRRGRSRSRSRDRSRSRSLDDRNPGNNLYVTGLSTRVTEDDLEKFFSKEGKVKNCHVVLDPRSKESRGFAFVTMDTVEDARRCIKYLHRTVLEGRLVTVEKAKRTRERTPTPGKYCGRRGGSQRSPSPHRSRRRERSRSRDRKRERSRSRDRRERSRSRERRRERSRSRDRRERSRSRXDRRRERSRSRDRRKERSRSRDSQRRRGDRSRSLAGNGNHKTD

SEQ ID NO: 72157 - protein, 167 aa, Setaria italica
  misc_feature (109)..(109): Xaa can be any naturally occurring amino acid
  Transcript Sequence Number=SeqID_6183
  Gene Ontology: Mol. function=nucleic acid binding; Cellular component= ribonucleoprotein complex; Biological process=regulation of transcription, DNA-dependent
  Homolog annotation: Hit_ID=B6T623; Match level="QueryCoverage=48%, HitCoverage=27%, E-value=7e-37, Identity=91%"; Hit description =Arginine/serine-rich splicing factor 10
  Pfam annotation: Domain name=RRM_1; Domain location=91-161; Score =76.5; E_value=9.9e-20; Accession=PF00076.14; Description=RNA recognition motif. (a.k.a. RRM, RBD, o
  Subcellular localization annotation: CTP_CleavageSite=74; ConfidenceScore=5.81e-01
MSQAKEVRYTARSITPPAERNGTSSSPPPKRRSPSRSPPPKSTSRSPHPRSPKRRSTSRSPPPRRRGRSRSRSRDRSRSRSLDDRNPGNNLYVTGLSTRVTEDDLEKFXSKEGKVKNCHVVLDPRSKESRGFAFVTMDTVEDARRCIKYLHRTVLEGRLVTVEKVRY

SEQ ID NO: 72158 - protein, 310 aa, Setaria italica
  misc_feature (8)..(8): Xaa can be any naturally occurring amino acid
  misc_feature (78)..(78): Xaa can be any naturally occurring amino acid
  misc_feature (207)..(207): Xaa can be any naturally occurring amino acid
  misc_feature (242)..(242): Xaa can be any naturally occurring amino acid
  Transcript Sequence Number=SeqID_6184
  Gene Ontology: Mol. function=transcription factor activity; Cellular component=nucleus; Biological process=regulation of transcription, DNA-dependent
  Homolog annotation: Hit_ID=B6SSK0; Match level="QueryCoverage=100%, HitCoverage=100%, E-value=1e-48, Identity=45%"; Hit description =Ethylene-responsive element binding protein 2
  Pfam annotation: Domain name=AP2; Domain location=93-144; Score=72.9; E_value=1.1e-18; Accession=PF00847.12; Description=AP2 domain
MCGGAILXAELIPSTPAGRVTPGHLWPAASKGKQQRRADDYEAAFREFDEEEEEVESKPAFAFSASFAATRKLRRQQXRSWPLRRRARRRKAAQYKGVRRRPWGKWAAEIRDPVKGVRVWLGTFPSAEAAALAYDAAARDIRGARAKLNFPSPADAVQNSGKRGRAAEVVDLVADEEDEASESSDSGALPDFSWQGVSVYDEEAPRXRHPALEAADQSSGGASKRQRTEPESADDEASPRAXSDSESDALFDAFIFGDQFAYFNGGAYESLDSLFSADAVQGSSAAVAADEGMGLWSFDDGCLVEDNLSF

SEQ ID NO: 72159 - protein, 489 aa, Setaria italica
  misc_feature (420)..(420): Xaa can be any naturally occurring amino acid
  Transcript Sequence Number=SeqID_6185
  Gene Ontology: Mol. function=phosphatidylinositol phosphate kinase activity; Biological process=phosphatidylinositol metabolic process
  Homolog annotation: Hit_ID=Q652R9; Match level="QueryCoverage=61%, HitCoverage=17%, E-value=1e-113, Identity=66%"; Hit description =Finger-containing phosphoinositide kinase-like
  Pfam annotation: Domain name=Cpn60_TCP1; Domain location=41-425; Score=-220.4; E_value=0.00011; Accession=PF00118.16; Description=TCP- 1cpn60 chaperonin family
LGQMNDSVTDSSGEGSKTQNPVDFGANIWCPPPPEDEGDDIESSLFGFDEEDVADSSALLVPGSFSANKIAGVDEVTNIAQKEGLKIAVLGHFRALVAQLLKAEGIDPGNDDGFKNWLDIVSSLTWQAASYVRPDTKKGGSMDPTDYVKVKCIASGDPIDSNFVKGVVCSKNVKHKRMVSEHRNAKLLILGGALEYHRVPNKLASINRILEQEKEHMKMVVGKIESRRPNVVLVEKSVSSSAQELFPKDISLVLNVKRPLLDRISRCTGAQIASSVDSISSARLGHCELFKVQKVIEFSSGKQTNRLSKTLMFFEGCPWRLGCTVLLRGSCREELKKIKRAVQLAVFAAYHLSLETSFFADEGATLPKFPSRPVVVEPDMRDSTDNNSAATATVGIPHGRKPEQDKLSQATMVNMMFEIXSVSPSSLPSHEEAHGLVGDSEHTETEYSVDHLNSCEPCLSRANDSCNGHETSLCSLDHDLRMKPQYLHN

SEQ ID NO: 72160 - protein, 134 aa, Setaria italica
  Transcript Sequence Number=SeqID_6186
LRRYEGSKFVMRSVSCEVNWFLHSVYNMRGWRVPLSMFMMYDMTGLRFEIFIRRSRVLNFLAIPNSSTSRTRVDFDGPNPRTLRSPYQKKSPSNVGGEMIPRQLWISYVSFFNWVPLRLRIMVRGALSYLIPPL

SEQ ID NO: 72161 - protein, 72 aa, Setaria italica
  Transcript Sequence Number=SeqID_6187
  Gene Ontology: Mol. function=oxidoreductase activity; Biological process=oxidation reduction
LFCVENLRKSYGFQTDSTCFRYGVSHRTHCLQLVNHGVPDEVLQDVKRDITEFFNLPLEAKKAHAQVPGGLE

SEQ ID NO: 72162 - protein, 355 aa, Setaria italica
  Transcript Sequence Number=SeqID_6188
  Gene Ontology: Mol. function=oxidoreductase activity; Biological process=oxidation reduction
  Homolog annotation: Hit_ID=Q7XC87; Match level="QueryCoverage=100%, HitCoverage=84%, E-value=1e-124, Identity=60%"; Hit description =Oxidoreductase, 2OG-Fe oxygenase family protein
  Pfam annotation: Domain name=2OG-FeII_Oxy; Domain location=204-304; Score=130.5; E_value=5.4e-36; Accession=PF03171.12; Description=2OG -Fe(II) oxygenase superfamily
MAHAKAGASLQVPNVQELAQTWNGSGERVPDRYVRKEETAAEEVVAGRAIPVVDLSRLLDPRSSEEELANLGDACQHWGFFQLVNHGVPDEVLQDVKRDITEFFNLPLEAKKAHAQVPGGLEGYGQAFVFSETQKLDWADMIYLMISPREERDPRFWPARPPSFTGSVDRYAAETARVAASLLRSMAADLGVAPERLSEAFRGLPQSMRTTYYPPCRQASDVLGLSPHTDATGLALLLHVNDVQGLQIRKDGRWLAVDPLPGAFVVTVGDILEILSNGRYRSIEHRAVVHPDKDRISAAVFHQPCPDTTIGPLPELVKKDSGGARYKSMEYMDFMKSFFAAKLDGRRSHMDALRI

SEQ ID NO: 72163 - protein, 425 aa, Setaria italica
  Transcript Sequence Number=SeqID_6189
  Gene Ontology: Mol. function=protein serine/threonine kinase activity; Cellular component=plasma membrane; Biological process =protein amino acid phosphorylation
  Homolog annotation: Hit_ID=A9RAA9; Match level="QueryCoverage=100%, HitCoverage=100%, E-value=0.0, Identity=84%"; Hit description =Serine/threonine protein kinase 1
  Pfam annotation: Domain name=Pkinase; Domain location=144-398; Score =224.4; E_value=3e-64; Accession=PF00069.17; Description=Protein kinase domain
  Pfam annotation: Domain name=Pkinase_Tyr; Domain location=144-398; Score=265.8; E_value=1e-76; Accession=PF07714.9; Description=Protein tyrosine kinase
  Pfam module annotation: Pfam domain module=Pkinase::Pkinase_Tyr; Domain location=144-398::144-398
MAEGARFHGMIGGGGGGGGKGMQDNEINGFYNMPYYQKFGEGSHMSVDSADGFNLANCAGGSVAMSVDNSSVGSNESRTVILKHPGLRDAPTASYSVGNSVFRPNRVAAHTLNEDALARVLMDPNHPTEILNNYEQWTIDLGRLDMGDPFAQGAFGKLYRGTYNGEDVAIKLLEKPENDPERAHLMEQQFVQEVMMLSRLSHPNIVRFIGACRKSIVWCIITEYAKGGSVRQFLARRQNKSVPLRLAVKQALDVARGMAYVHALGFIHRDLKSDNLLIAADKSIKIADFGVARIEVKTEGMTPETGTYRWMAPEMIQHRPYDHKVDVYSFGIVLWELITGMLPFTNMTAVQAAFAVVNKGARPVIPQDCLPSLTHIMTRCWDANPEVRPAFTEIVCMLESAEMEIVSNVRKARFRCCMSQPMTTD

SEQ ID NO: 72164 - protein, 54 aa, Setaria italica
  Transcript Sequence Number=SeqID_6190
TVEPSSSYLNVAKTIVSSHKSSLLENNFAQKSIKVQCSVHHAFPKKIIVKKKQK

SEQ ID NO: 72165 - protein, 53 aa, Setaria italica
  Transcript Sequence Number=SeqID_6191
  Gene Ontology: Mol. function=thiopurine S-methyltransferase activity; Cellular component=cytoplasm; Biological process=metabolic process
  Homolog annotation: Hit_ID=B6SUY9; Match level="QueryCoverage=90%, HitCoverage=20%, E-value=1e-09, Identity=56%"; Hit description=S -adenosylmethionine-dependent methyltransferase/ methyltransferase/ thiopurine S-methyltransferase
PPFNTTVLDYEEVLKPLGFVITCIQDNDVAVKPRKGKEKIARWKRMANPNHTA

SEQ ID NO: 72166 - protein, 147 aa, Setaria italica
  Transcript Sequence Number=SeqID_6192
  Gene Ontology: Mol. function=thiopurine S-methyltransferase activity; Cellular component=cytoplasm; Biological process=metabolic process
  Homolog annotation: Hit_ID=B6SUY9; Match level="QueryCoverage=97%, HitCoverage=60%, E-value=1e-35, Identity=56%"; Hit description=S -adenosylmethionine-dependent methyltransferase/ methyltransferase/ thiopurine S-methyltransferase
  Pfam annotation: Domain name=TPMT; Domain location=28-147; Score= -1.0; E_value=1.6e-08; Accession=PF05724.3; Description=Thiopurine S -methyltransferase (TPMT)
AAVAAGQVLDGSNPAVARVRQLIGGPEYSPDGWSRCWEEGVTPWDLGQPTPAVVELAKSGTLPGDAATVLVPGCGAGYDVVALSGPGRFVVGLDICETAVAKAKQWSAAADDGSLFAFVAADFFTWEPPELFDLIFDYTFFCAFHPS

SEQ ID NO: 72167 - protein, 87 aa, Setaria italica
  Transcript Sequence Number=SeqID_6193
  Gene Ontology: Mol. function=4 iron, 4 sulfur cluster binding; Biological process=protein folding
  Homolog annotation: Hit_ID=B6SQG7; Match level="QueryCoverage=100%, HitCoverage=26%, E-value=1e-13, Identity=48%"; Hit description =Electron transporter/ heat shock protein binding protein
ASVRWEKRQAKILEKVRTRMVNQENSDTGRSWSDIWGPPPRDENNEEEASERAKRAAAAARRWREFSRRGADRPPTYKLPEAVGNKD

SEQ ID NO: 72168 - protein, 236 aa, Setaria italica
  Transcript Sequence Number=SeqID_6194
  Gene Ontology: Mol. function=thiopurine S-methyltransferase activity; Cellular component=cytoplasm; Biological process=metabolic process
  Homolog annotation: Hit_ID=B6SUY9; Match level="QueryCoverage=97%, HitCoverage=98%, E-value=4e-66, Identity=56%"; Hit description=S -adenosylmethionine-dependent methyltransferase/ methyltransferase/ thiopurine S-methyltransferase
  Pfam annotation: Domain name=Methyltransf_11; Domain location=74-172; Score=33.6; E_value=8.1e-07; Accession=PF08241.4; Description =Methyltransferase domain
  Pfam annotation: Domain name=Methyltransf_12; Domain location=74-170; Score=34.6; E_value=4e-07; Accession=PF08242.4; Description =Methyltransferase domain
  Pfam annotation: Domain name=TPMT; Domain location=32-229; Score =188.7; E_value=1.6e-53; Accession=PF05724.3; Description=Thiopurine S-methyltransferase (TPMT)
  Pfam module annotation: Pfam domain module=Methyltransf _11::Methyltransf_12::TPMT; Domain location=74-172::74-170::32-229
MASTAAVAAGQVLDGSNPAVARVRQLIGGPEYSPDGWSRCWEEGVTPWDLGQPTPAVVELAKSGTLPGDAATVLVPGCGAGYDVVALSGPGRFVVGLDICETAVAKAKQWSAAADDGSLFAFVAADFFTWEPPELFDLIFDYTFFCAFHPSMRPAWAKRVADLLKPNGELITLMYLAQGQEAGPPFNTTVLDYEEVLKPLGFVITCIQDNDVAVKPRKGKEKIARWKRMANPNHTA

SEQ ID NO: 72169 - protein, 106 aa, Setaria italica
  misc_feature (64)..(64): Xaa can be any naturally occurring amino acid
  Transcript Sequence Number=SeqID_6195
  Gene Ontology: Mol. function=electron carrier activity; Cellular component=extracellular region; Biological process=response to oxidative stress
  Homolog annotation: Hit_ID=Q5U1R9; Match level="QueryCoverage=87%, HitCoverage=26%, E-value=9e-32, Identity=73%"; Hit description=Class III peroxidase 24
  Pfam annotation: Domain name=peroxidase; Domain location=1-106; Score= 0.7; E_value=5.9e-10; Accession=PF00141.15; Description=Peroxidase
PAVVSCADVLALAARDAVAAIGGPSWRVPTGRRDGTVSSMQEALDEIPKPSMSFKQLTDLFATXGLGVRDLVWLSGAHTIGIAHCSSFADRLYGHPGAGAGNDTTD

SEQ ID NO: 72170 - protein, 89 aa, Setaria italica
  Transcript Sequence Number=SeqID_6196
  Gene Ontology: Mol. function=protein serine/threonine kinase activity; Cellular component=cytoplasm; Biological process=protein amino acid phosphorylation
  Homolog annotation: Hit_ID=Q9ZWJ6; Match level="QueryCoverage=98%, HitCoverage=21%, E-value=6e-43, Identity=92%"; Hit description=MAP kinase 4
MSGGGMDGAPPVAEFRPTVTHGGRFLQYNIFGNLFEITNKYQPPIMPIGRGAYGIVCSVMNFETREMVAIKKIASAFDNHMDAKRTLRE

SEQ ID NO: 72171 - protein, 375 aa, Setaria italica
  Transcript Sequence Number=SeqID_6197
  Gene Ontology: Mol. function=protein serine/threonine kinase activity; Cellular component=cytoplasm; Biological process=protein amino acid phosphorylation
  Homolog annotation: Hit_ID=Q9ZWJ6; Match level="QueryCoverage=99%, HitCoverage=99%, E-value=0.0, Identity=88%"; Hit description=MAP kinase 4
  Pfam annotation: Domain name=Pkinase; Domain location=41-328; Score =322.8; E_value=6.9e-94; Accession=PF00069.17; Description=Protein kinase domain
  Pfam annotation: Domain name=Pkinase_Tyr; Domain location=35-297; Score=-14.4; E_value=9.1e-13; Accession=PF07714.9; Description =Protein tyrosine kinase
  Pfam module annotation: Pfam domain module=Pkinase::Pkinase_Tyr; Domain location=41-328::35-297
MSGGGMDGAPPVAEFRPTVTHGGRFLQYNIFGNLFEITNKYQPPIMPIGRGAYGIVCSVMNFETREMVAIKKIASAFDNHMDAKRTLREIKLLRHLDHENIIGIRDVIPPPIPQAFNDVYIGTELMDTDLHHIIRSNQELSEEHCQYFLYQILRGLKYIHSANVIHRDLKPSNLLLNANCDLKICDFGLARPSSESDMMTEYVVTRWYRAPELLLNSTDYSAAIDVWSVGCIFMELINRQPLFPGRDHMHQMRLITEVIGTPTDEELGFIRNEDARKYMRHLPQFPRRPFASLFPRVQPVALDLIERMLTFNPLQRITVEEALDHPYLERLHDIADEPICTDPFSFDFEQQALTEDQMKQLIFNEAIEMNPNFRY

SEQ ID NO: 72172 - protein, 64 aa, Setaria italica
  Transcript Sequence Number=SeqID_6198
  Gene Ontology: Mol. function=transmembrane receptor activity; Cellular component=intrinsic to membrane; Biological process =regulation of transcription, DNA-dependent
  Homolog annotation: Hit_ID=Q19PM5; Match level="QueryCoverage=92%, HitCoverage=4%, E-value=6e-14, Identity=64%"; Hit description=TIR -NBS-TIR-TIR-WRKY type disease resistance protein
  Pfam annotation: Domain name=WRKY; Domain location=41-64; Score=-5.7; E_value=0.0041; Accession=PF03106.7; Description=WRKY DNA -binding domain
MSLLTPRYRKSQTKKVVCIPAPVAPPPGVGGRPSTSGEVVPSDLWAWRKYGQKPIKGSPYPRGY

SEQ ID NO: 72173 - protein, 53 aa, Setaria italica
  Transcript Sequence Number=SeqID_6199
LYCTDLRGPLLLDRENRKSPWRMVNPPRWIMDLAVSYLVYILLPASQFAQPQM

SEQ ID NO: 72174 - protein, 302 aa, Setaria italica
  Transcript Sequence Number=SeqID_6200
  Gene Ontology: Mol. function=aspartic-type endopeptidase activity; Biological process=proteolysis
  Homolog annotation: Hit_ID=B9S302; Match level="QueryCoverage=92%, HitCoverage=50%, E-value=5e-84, Identity=52%"; Hit description=Basic 7S globulin 2 small subunit, putative
  Pfam annotation: Domain name=Asp; Domain location=47-300; Score= -186.9; E_value=0.017; Accession=PF00026.15; Description=Eukaryotic aspartyl protease
KDAVRIETMHRRAAARAGGERAYSPRRALSERLVATVESGVAVGSGEYLMDVYVGTPPRRFQMIMDTGSDLNWLQCAPCLDCFEQRGPVFDPAASSSYRNVTCGDQRCGLVAPPEAPRACHRPGEDPCPYYYWYGDQSNTTGDLALESFTVNLTAPGASRRVDGVVFGCGHRNRGLFHGAAGLLGLGRGPLSFASQLRAVYGHTFSYCLVDHGSDVASKVVFGDDDALLLAHPRLNYTAFAPASSPADTFYYVQLKGVLVGGELLNISSDTWGVSKDGSGGTIIDSGTTLSYFAEPTYQVIR

SEQ ID NO: 72175 - protein, 108 aa, Setaria italica
  Transcript Sequence Number=SeqID_6201
  Homolog annotation: Hit_ID=Q43351; Match level="QueryCoverage=100%, HitCoverage=37%, E-value=6e-37, Identity=73%"; Hit description=H1 -1flk (Fragment)
RTAELVHQSSLDAASSLLVTALNEGRDVIMDGTLSWEPFVEQTIAMARDVHRQRYRMGRGYKVSDDGTITEEYWEPVEAEDSSTEEENEATGRKPYRIELVGVVCDAY

SEQ ID NO: 72176 - protein, 137 aa, Setaria italica
  Transcript Sequence Number=SeqID_6202
  Gene Ontology: Mol. function=hydrolase activity, hydrolyzing O -glycosyl compounds; Cellular component=anchored to membrane; Biological process=carbohydrate metabolic process
  Homolog annotation: Hit_ID=Q7XVG8; Match level="QueryCoverage=100%, HitCoverage=33%, E-value=5e-66, Identity=86%"; Hit description =OSJNBa0073L04.8 protein
  Pfam annotation: Domain name=Glyco_hydro_17; Domain location=1-132; Score=-83.2; E_value=3.2e-06; Accession=PF00332.10; Description =Glycosyl hydrolases family 17
PLEYVLFQPNAGVADPRTGLRYDNMLYAQVDAVYAAIQALGYTDVEVKVSETGWPSRGDPDEPGATPEYAGTYIRNLLQRIEMKQGTPLRPATPVDVYVFALFNENLKPGPASERNYGLFYPDGTPVYNVGLHGYLP

SEQ ID NO: 72177 - protein, 184 aa, Setaria italica
  Transcript Sequence Number=SeqID_6203
  Gene Ontology: Mol. function=small conjugating protein ligase activity; Cellular component=cellular_component; Biological process =ubiquitin-dependent protein catabolic process
  Homolog annotation: Hit_ID=Q53QR2; Match level="QueryCoverage=100%, HitCoverage=80%, E-value=2e-90, Identity=85%"; Hit description =Ubiquitin carrier protein
  Pfam annotation: Domain name=UQ_con; Domain location=34-170; Score =193.8; E_value=4.8e-55; Accession=PF00179.18; Description=Ubiquitin -conjugating enzyme
KMINLFKIKGQKKEEAASAAGKAPVKKQSAGELRLHKDISELNLPKTTSISFPNGKDDLMNFEIIIRPDEGYYMGGTFVFTFQVSPSYPHEPPKVKCKTKVYHPNIDLEGNVCLNILREDWKPVLNINTVIYGLNLLFTQPNDEDPLNHEAAVVLRDNPKMFEANVKRAMAGGYVGQHYFPRCA

SEQ ID NO: 72178 - protein, 54 aa, Setaria italica
  Transcript Sequence Number=SeqID_6204
RYKRRPNNKKNDDTNIKILKIKQHSSRYLQKKMAAIILFSCRSCQHQNRQRNNS

SEQ ID NO: 72179 - protein, 208 aa, Setaria italica
  Transcript Sequence Number=SeqID_6205
NAEPEKKPTDEKCILPKDVPSECCSCSKFSSCKTNKCECRGSGAHCGPGCGCKDSKCSNRDSSDNTEIVNQGIMLLENAFSEKDAQDAKTRKPLADIGNNEVNQTAETKKKPRKNWRKSTVQLVTVPLPPSVPETTEAAPRDRADIPLKLPRAMSSASAESNPPPLTDRNAAKPDESVSTGTKESTAATRPPSQLRKNAATEKENQLR

SEQ ID NO: 72180 - protein, 73 aa, Setaria italica
  misc_feature (18)..(18): Xaa can be any naturally occurring amino acid
  Transcript Sequence Number=SeqID_6206
  Gene Ontology: Mol. function=peptidyl-prolyl cis-trans isomerase activity; Biological process=protein folding
  Homolog annotation: Hit_ID=B6TSE8; Match level="QueryCoverage=98%, HitCoverage=31%, E-value=4e-25, Identity=79%"; Hit description =Peptidyl-prolyl cis-trans isomerase A
LRVTKGDDTLRKLERLPXRREGIFVMPIERIDILSTYYYDIDMESCEAEKSILRRRLSESASEVERWRRKCFA

SEQ ID NO: 72181 - protein, 234 aa, Setaria italica
  misc_feature (88)..(88): Xaa can be any naturally occurring amino acid
  Transcript Sequence Number=SeqID_6207
  Gene Ontology: Mol. function=peptidyl-prolyl cis-trans isomerase activity; Biological process=protein folding
  Homolog annotation: Hit_ID=B6TSE8; Match level="QueryCoverage=88%, HitCoverage=90%, E-value=2e-95, Identity=83%"; Hit description =Peptidyl-prolyl cis-trans isomerase A
  Pfam annotation: Domain name=Pro_isomerase; Domain location=40-200; Score=34.8; E_value=1.3e-11; Accession=PF00160.13; Description =Cyclophilin type peptidyl-prolyl cis-tr
MAAMLRHAAAAAAALLAVAVVCADGASTFYSSDPNLGSARVVFQTNFGDIEFGFFPHVAPKTVDHIFKLVRLGCYNTNHIFRVDKGFXVAQVAAVVGGRTAPMNEEQKREAEKTIVGEFSSVKHVRGILSMGRHSDPDSGGSSFSFLLGDAPHLDGQYAVFGRVTKGDDTLRKLERLPTRREGIFVMPIERIDILSTYYYDIDMESCEAEKSILRRRLSESASEVERWRRKCFA

SEQ ID NO: 72182 - protein, 124 aa, Setaria italica
  misc_feature (92)..(92): Xaa can be any naturally occurring amino acid
  misc_feature (117)..(117): Xaa can be any naturally occurring amino acid
  Transcript Sequence Number=SeqID_6208
  Gene Ontology: Mol. function=zinc ion binding
  Homolog annotation: Hit_ID=B6UF27; Match level="QueryCoverage=100%, HitCoverage=55%, E-value=1e-55, Identity=83%"; Hit description =Integrin beta-1-binding protein 2
  Pfam annotation: Domain name=CHORD; Domain location=14-78; Score =153.4; E_value=7.1e-43; Accession=PF04968.4; Description=CHORD
MSTATEAANSGTAARVRCQRIGCDAMFTDDDNPEGSCQYHPSAPLFHDGMKEWSCCKQRSHDFSLFLAIPGCTTGKHTTEKPVTKAVSANPXSTTPLQYSKQGVGADGCARCRQGFXCSDHGSQ

SEQ ID NO: 72183 - protein, 233 aa, Setaria italica
  Transcript Sequence Number=SeqID_6209
  Gene Ontology: Mol. function=zinc ion binding
  Homolog annotation: Hit_ID=B6UF27; Match level="QueryCoverage=100%, HitCoverage=100%, E-value=1e-105, Identity=81%"; Hit description =Integrin beta-1-binding protein 2
  Pfam annotation: Domain name=CHORD; Domain location=14-86; Score =134.5; E_value=3.4e-37; Accession=PF04968.4; Description=CHORD
  Pfam annotation: Domain name=CHORD; Domain location=165-229; Score =138.5; E_value=2.1e-38; Accession=PF04968.4; Description=CHORD
  Pfam module annotation: Pfam domain module=CHORD::CHORD; Domain location=14-86::165-229
MSTATEAANSGTAARVRCQRIGCDAMFTDDDNPGSCQVYNPEGSCQYHPSAPLFHDGMKEWSCCKQRSHDFSLFLAIPGCTTGKHTTEKPVTKAVSANPPKATPIQYSKQGVGADGCARCRQGFFCSDHGSQPKVQKPAATDDTKKEPVEKSSVPPPKKRIDINEPRTCKNKGCGKSYKEKDNHDSACNYHPGPAVFHDRMRGWKCCDIHVKEFDEFMEIPPCTKGWHNADAV

SEQ ID NO: 72184 - protein, 198 aa, Setaria italica
  Transcript Sequence Number=SeqID_6210
MSVSTRWVCELFRASLETRIPLGIPSFSRGWKPTWATHHGPNRLVVWEPMRWGRLTASTSFPRGEPSSPRGSWRRILECRHRRSNTRKLAPTHQAPAAPSKRHRPSAFPSGAAAPTPSRPVPPLRLPVNDNAAVHSPSPVLSATNFLIHIDTTSTSDQALPPLRVPIQALPPPSVSPSLPRSNSAISICFDKTLFLLG

SEQ ID NO: 72185 - protein, 44 aa, Setaria italica
  Transcript Sequence Number=SeqID_6211
  Gene Ontology: Mol. function=sequence-specific DNA binding; Cellular component=nucleus; Biological process=regulation of transcription, DNA-dependent
  Homolog annotation: Hit_ID=Q69T58; Match level="QueryCoverage=93%, HitCoverage=5%, E-value=1e-12, Identity=80%"; Hit description =Homeobox-leucine zipper protein ROC8
MDFGDDVMDGNDGQRRKKRYHRHTPRQIQQLEAMFKECPAPGRE

SEQ ID NO: 72186 - protein, 83 aa, Setaria italica
  Transcript Sequence Number=SeqID_6212
  Gene Ontology: Mol. function=lyase activity
  Homolog annotation: Hit_ID=Q656L2; Match level="QueryCoverage=95%, HitCoverage=15%, E-value=1e-13, Identity=53%"; Hit description =Putative ribosomal RNA apurinic site specific lyase
RFPDTADLPRGAAFPHLRELGLCSVVIESRDMDFILARSPVLEILFLQGHMCPPLHLRLVSHSLRCVQIHWSHVETIAVVDAP

SEQ ID NO: 72187 - protein, 150 aa, Setaria italica
  misc_feature (24)..(24): Xaa can be any naturally occurring amino acid
  Transcript Sequence Number=SeqID_6213
GQFQGKVMKSSNIADDKIKGVLEXNIDQNKVETDVSKLVGNISLSGIKLNQLMLAPQSTGFLSVSRDSVMLNATGRPDENFSIEVNGPLFSTTNEAIQDVRLLSVFLQKGQLRSNICYHPENLSSLEVRNLPLDELEFASLRWILFLVRS

SEQ ID NO: 72188 - protein, 166 aa, Setaria italica
  misc_feature (35)..(35): Xaa can be any naturally occurring amino acid
  misc_feature (150)..(150): Xaa can be any naturally occurring amino acid
  Transcript Sequence Number=SeqID_6214
VYLMVTSSSVAFDLNTRVQTSYIDDYLLNKGTYQXEQIMPLIVEGVDLDLRMRGFEFAHIASSIPFDSPRPLHLKASGRVKFQGKVMKSSNIADDKIKGVLESNIDQNKVETDVSKLVGNISLSGIKLNQLMLAPQSTGFLSVSRDSVMXPDENFSIEVNGPLFFH

SEQ ID NO: 72189 - protein, 103 aa, Setaria italica
  Transcript Sequence Number=SeqID_6215
  Gene Ontology: Cellular component=endoplasmic reticulum membrane; Biological process=vesicle-mediated transport
  Homolog annotation: Hit_ID=A9SK71; Match level="QueryCoverage=80%, HitCoverage=69%, E-value=6e-15, Identity=51%"; Hit description=Qc -SNARE, plant SFT1-family
  Pfam annotation: Domain name=SNARE; Domain location=32-94; Score=7.0; E_value=0.036; Accession=PF05739.11; Description=SNARE domain
MAHPMYGSGPLRSRNAASSDEIQLRIDPVQPGLDEEIDGLHSRVRMLKGVAQEINSEAKFQNDFLNQLQMTLAKAQAGVKNNMRRLNKSIIQQGSNHVLHVVL

SEQ ID NO: 72190 - protein, 121 aa, Setaria italica
  Transcript Sequence Number=SeqID_6216
  Gene Ontology: Cellular component=endoplasmic reticulum membrane; Biological process=vesicle-mediated transport
  Homolog annotation: Hit_ID=A9SK71; Match level="QueryCoverage=68%, HitCoverage=69%, E-value=7e-15, Identity=51%"; Hit description=Qc -SNARE, plant SFT1-family
  Pfam annotation: Domain name=SNARE; Domain location=32-94; Score=8.3; E_value=0.027; Accession=PF05739.11; Description=SNARE domain
MAHPMYGSGPLRSRNAASSDEIQLRIDPVHGDLDEEIDGLHSRVRMLKGVAQEINSEAKFQNDFLNQLQMTLAKAQAGVKNNMRRLNKSIIQQGSNHVLHVVLFALFCFLVVYLLSKFSRR

SEQ ID NO: 72191 - protein, 136 aa, Setaria italica
  misc_feature (7)..(7): Xaa can be any naturally occurring amino acid
  misc_feature (13)..(13): Xaa can be any naturally occurring amino acid
  misc_feature (16)..(16): Xaa can be any naturally occurring amino acid
  Transcript Sequence Number=SeqID_6217
  Gene Ontology: Mol. function=nucleic acid binding
  Homolog annotation: Hit_ID=B6T9K3; Match level="QueryCoverage=63%, HitCoverage=34%, E-value=3e-42, Identity=80%"; Hit description=RNA -binding motif protein, X-linked 2
  Pfam annotation: Domain name=zf-CCCH; Domain location=16-41; Score =25.8; E_value=0.00017; Accession=PF00642.16; Description=Zinc finger C-x8-C-x5-C-x3-H type (and similar)
  Pfam annotation: Domain name=zf-CCCH; Domain location=69-94; Score =30.2; E_value=8.3e-06; Accession=PF00642.16; Description=Zinc finger C-x8-C-x5-C-x3-H type (and similar)
  Pfam module annotation: Pfam domain module=zf-CCCH::zf-CCCH; Domain location=16-41::69-94
KKEEEGXEERQQXREXARGVCYAFQKGECNRGASCRYSHDEQRNANTGWGSKEDSGAPWEHDKHHDVPKSRGICYAFQKGECNRGASCKFSHDEQKNANARWSSRDGESSRSERYEDRDSRSRRDDRRAEDRDRYR

SEQ ID NO: 72192 - protein, 197 aa, Setaria italica
  Transcript Sequence Number=SeqID_6218
KVIELQFLFANQASTIQEAAKNYLHRQQGMANTELAPLNMLLFDYIDKAAVLADRLQLPHQGTEAWSDDRQPKPKNKEAPMIKVADSFARILEDIPAEGTNQDGGESISFQEMLPDPTSDIEGTACADTSRTDGAVNDTDTTSAAAMPNNTERSSPIDNTLIGAFFTRPEPILHSEEPPLEEPNPPAHMESAKCRRP

SEQ ID NO: 72193 - protein, 107 aa, Setaria italica
  misc_feature (101)..(101): Xaa can be any naturally occurring amino acid
  Transcript Sequence Number=SeqID_6219
  Homolog annotation: Hit_ID=Q8SAW5; Match level="QueryCoverage=100%, HitCoverage=9%, E-value=1e-42, Identity=78%"; Hit description =Putative myosin-like protein
  Pfam annotation: Domain name=DUF869; Domain location=1-106; Score= -252.2; E_value=0.0034; Accession=PF05911.3; Description=Plant protein of unknown function (DUF869)
EKEINSLKYELHVVSKELDIRNEEKNMSVRSADVATKQHMEDVKKISKLEAECQRLRGLVRKKLPGPAALAQMKMEVDSWGRDPGDNRLRRSPSRSSTLQXPMSPSP

SEQ ID NO: 72194 - protein, 121 aa, Setaria italica
  Transcript Sequence Number=SeqID_6220
  Gene Ontology: Mol. function=protein serine/threonine kinase activity; Cellular component=plasma membrane; Biological process =protein amino acid phosphorylation
  Homolog annotation: Hit_ID=B6SKD8; Match level="QueryCoverage=61%, HitCoverage=18%, E-value=5e-20, Identity=67%"; Hit description =Serine/threonine-protein kinase NAK
  Subcellular localization annotation: CTP_CleavageSite=31; ConfidenceScore=5.74e-01
SQPAAGAKTPPPAKSPPASDSSGGGGGKRSKASSASASTPTRSIQELSEERGAQRLRVFDLDELGSATNGFSRALKVGEGGFGSVYRAFFRSAGGGRVVLAVKRLNQRSLQGHKQWLAEVQ

SEQ ID NO: 72195 - protein, 55 aa, Setaria italica
  Transcript Sequence Number=SeqID_6221
KELPGEAFSITKNHRDIRKSATHHHIEHRRKQHHRRPPPTLHSYSMKTSTTSEPR

SEQ ID NO: 72196 - protein, 55 aa, Setaria italica
  Transcript Sequence Number=SeqID_6222
PPVSDSVAGTGGVEPGDGAGDNGGAGRSGASRAAAAGGRFLGAAVGVALAILVAA

SEQ ID NO: 72197 - protein, 133 aa, Setaria italica
  Transcript Sequence Number=SeqID_6223
  Gene Ontology: Mol. function=protein serine/threonine kinase activity; Cellular component=MHC class I protein complex; Biological process=protein amino acid phosphorylation
  Homolog annotation: Hit_ID=Q7XQQ4; Match level="QueryCoverage=95%, HitCoverage=25%, E-value=3e-27, Identity=51%"; Hit description =OSJNBa0084A10.1 protein
  Pfam annotation: Domain name=Hin1; Domain location=2-115; Score= -12.3; E_value=0.02; Accession=PF07320.5; Description=Harpin-induced protein 1 (Hin1)
MSMNATVRLRFRNRGTFFSLHVTATPFLLFYGELTVASGEMKEFYQPRKSGRMVTVSVVGKQVPLYGAGVSLHSKPNNGRLGPAVVPVRLAFVLRARAHILGLLLHSKFYRRAHCRLDIREAHLGRPVRGVAA

SEQ ID NO: 72198 - protein, 90 aa, Setaria italica
  Transcript Sequence Number=SeqID_6224
  Subcellular localization annotation: CTP_CleavageSite=72; ConfidenceScore=5.67e-01
MKIEVTVAAAAVTAPAPAKSKPRHQRSVAPTPAPAMAPEPSSVPSTDGLPTVSTPTAAPAPKSSGAATIGVLGAKASVALAVGMALALVI

SEQ ID NO: 72199 - protein, 221 aa, Setaria italica
  misc_feature (171)..(171): Xaa can be any naturally occurring amino acid
  Transcript Sequence Number=SeqID_6225
  Gene Ontology: Mol. function=oxidoreductase activity; Cellular component=nucleus; Biological process=cell redox homeostasis
  Homolog annotation: Hit_ID=P52572; Match level="QueryCoverage=100%, HitCoverage=100%, E-value=1e-109, Identity=85%"; Hit description=1 -Cys peroxiredoxin PER1
  Pfam annotation: Domain name=1-cysPrx_C; Domain location=152-216; Score=108.8; E_value=1.8e-29; Accession=PF10417.1; Description=C -terminal domain of 1-Cys peroxiredoxin
  Pfam annotation: Domain name=AhpC-TSA; Domain location=6-142; Score =153.2; E_value=8.1e-43; Accession=PF00578.13; Description=AhpCTSA family
  Pfam annotation: Domain name=Redoxin; Domain location=5-163; Score =31.0; E_value=4.9e-06; Accession=PF08534.2; Description=Redoxin
  Pfam module annotation: Pfam domain module=1-cysPrx_C::AhpC -TSA::Redoxin; Domain location=152-216::6-142::5-163
MPGLTIGDTVPNLELDSTHGRIRIHDFIGDGYVIIFSHPADFTPVCTTEMAAMAGYAQEFKKRGVKLLGISCDDVASHKEWIKDIEAYKPGTNLTYPILADPDRSAIKQLNMVDPDEKDAQGVNLPSRTLHIVGPDRTVKLSFLYPACTGRNMDEVLRAVDSLLTAARHTXKVATPANWKPGDRVVIGPSVSDEEARKLFPDGFETADLPSKKGYLRFTKV

SEQ ID NO: 72200 - protein, 34 aa, Setaria italica
  Transcript Sequence Number=SeqID_6226
MSSSVLRAAVDRAIRRQAVTLTDAAASRIRQLLT

SEQ ID NO: 72201 - protein, 109 aa, Setaria italica
  Transcript Sequence Number=SeqID_6227
  Gene Ontology: Mol. function=structural molecule activity; Cellular component=mitochondrion; Biological process=iron-sulfur cluster assembly
  Homolog annotation: Hit_ID=B6SL54; Match level="QueryCoverage=100%, HitCoverage=83%, E-value=4e-38, Identity=82%"; Hit description=HESB -like domain-containing protein 2
  Pfam annotation: Domain name=Fe-S_biosyn; Domain location=19-108; Score=128.3; E_value=2.4e-35; Accession=PF01521.12; Description=Iron- sulphur cluster biosynthesis
MSSSVLRAAVDRAIRRQAVTLTDAAASRIRQLLSLRQRPYLRLGVKARGCNGLSYTLNYADEKGKFDELVEEKGVKVLIDPKALMHVIGTKMDYVDDPLKSEFVFINPN

SEQ ID NO: 72202 - protein, 130 aa, Setaria italica
  Transcript Sequence Number=SeqID_6228
  Gene Ontology: Mol. function=structural molecule activity; Cellular component=mitochondrion; Biological process=iron-sulfur cluster assembly
  Homolog annotation: Hit_ID=B6SL54; Match level="QueryCoverage=100%, HitCoverage=100%, E-value=3e-50, Identity=83%"; Hit description=HESB- like domain-containing protein 2
  Pfam annotation: Domain name=Fe-S_biosyn; Domain location=19-108; Score=128.3; E_value=2.4e-35; Accession=PF01521.12; Description=Iron- sulphur cluster biosynthesis
MSSSVLRAAVDRAIRRQAVTLTDAAASRIRQLLSLRQRPYLRLGVKARGCNGLSYTLNYADEKGKFDELVEEKGVKVLIDPKALMHVIGTKMDYVDDPLKSEFVFINPNSKGECGCGESFMTTSSKGSTS

SEQ ID NO: 72203 - protein, 331 aa, Setaria italica
  Transcript Sequence Number=SeqID_6229
  Gene Ontology: Mol. function=catalytic activity; Cellular component =peroxisome; Biological process=metabolic process
  Homolog annotation: Hit_ID=Q69RG7; Match level="QueryCoverage=99%, HitCoverage=59%, E-value=1e-77, Identity=52%"; Hit description=4 -coumarate--CoA ligase-like 7
  Pfam annotation: Domain name=AMP-binding; Domain location=79-331; Score=-111.9; E_value=0.011; Accession=PF00501.20; Description=AMP -binding enzyme
  Subcellular localization annotation: CTP_CleavageSite=49; ConfidenceScore=5.30e-01
MATPPPAASADGCATAPGAVDGRSGYCKETKTFRSLRPPVPLPPTDGPLSFTVFAFSLLPSPLPAHPALLDAATGETVSFPAFRSQVRALAGGLRSRVRLRRGDVAFVLAPARLDVPVLYFALLSFGAVVSPANPALTAAEVARLVALSDASVAFAVSSTAAKLPAGLPTVLLDSDHFRSFLHNEDRGEVLALETAVVHQSETATIQYSSGTTGRVKAAALSHRNFTAMLAGAHALAHKPRHGRDRMLLGAPMFHSLGFYCALKGIALGQTTVLVTDTVARRGVKGVVEAAERWAVSEMTASPPVVIGMAKERCDLEALERVVCGGAPLPT

SEQ ID NO: 72204 - protein, 108 aa, Setaria italica
  misc_feature (95)..(95): Xaa can be any naturally occurring amino acid
  Transcript Sequence Number=SeqID_6230
  Homolog annotation: Hit_ID=UPI0001A8937A; Match level="QueryCoverage =99%, HitCoverage=15%, E-value=5e-39, Identity=76%"; Hit description =integral membrane single C2 domain protein
KTLNPKWLEEFKIPITSWEALNLLSLQVRDKDPIFDDTLGDCSISINKLRGGQRHDIWISLKNIKTGRIHIAVTVLEEENEKVLNDEEEQGGTPXGKASTPRSSFSSN

SEQ ID NO: 72205 - protein, 99 aa, Setaria italica
  Transcript Sequence Number=SeqID_6231
  Gene Ontology: Mol. function=sequence-specific DNA binding; Cellular component=nucleus; Biological process=regulation of transcription, DNA-dependent
  Homolog annotation: Hit_ID=C4N0X4; Match level="QueryCoverage=78%, HitCoverage=15%, E-value=2e-13, Identity=53%"; Hit description=WRKY6- 1 transcription factor
  Subcellular localization annotation: CTP_CleavageSite=82; ConfidenceScore=5.45e-01
DDRSILITTYEGTHNHPLPPAAMAMASTTSAAASMLLSGSMPSADNSFLARAVLPCSSSMATISASAPFPTVTLDLTHGPPTAAAAAARPPAPLPLLPP

SEQ ID NO: 72206 - protein, 229 aa, Setaria italica
  Transcript Sequence Number=SeqID_6232
  Homolog annotation: Hit_ID=Q9FZI9; Match level="QueryCoverage=85%, HitCoverage=20%, E-value=6e-25, Identity=38%"; Hit description =F17L21.26
PPLRCAAATATRAHVSVVVPDSACLPLASLPPATTVAGDLVKVAAEERDVPVERDLLRKLLEPKVISPRAVRPVCSTIYVERIHRTDATCTAVVSKTAAEVEVELEADALPAVVSDSSNRVRLVNDAYKEMVGQSECPWLDAVAAASRRISGEVALVVGEPASLPEPHGVFTCTARIEWEYGGKCTSILAPCDVSRLQCESRDYLFTWRFRTVDADASVGRRSGETSDS

SEQ ID NO: 72207 - protein, 274 aa, Setaria italica
  Transcript Sequence Number=SeqID_6233
  Homolog annotation: Hit_ID=B6TS32; Match level="QueryCoverage=96%, HitCoverage=71%, E-value=1e-41, Identity=40%"; Hit description=F-box domain containing protein
APPLDPGRDAASGALGCPPLVVWDPVTDQRSDLPPLQWAPYPYSWNAAVLCAAGAACNHLDCCGGHFLVVVVGTNSNEMFAHVYSSEADAWSEPASARHPNDSVDFAPSALVGNVLYFAFQMGTAVLEYDLGTKEMAVIRLPPPLHFNWQRIALTTRTDGRLGFATADRSTIYLWSREACPGGDAHWAQTRVIELDTLLPAGALSTFSDVVGFVDAIGLIFVRTGDGLFTIDLKSSQVTKVSKDTGFSGIFPYMNFHTPALGVPSAGEGPSSGA

SEQ ID NO: 72208 - protein, 549 aa, Setaria italica
  Transcript Sequence Number=SeqID_6234
  Gene Ontology: Mol. function=actin binding; Cellular component =integral to membrane; Biological process=actin cytoskeleton organization and biogenesis
  Homolog annotation: Hit_ID=Q8S0F0; Match level="QueryCoverage=91%, HitCoverage=53%, E-value=0.0, Identity=82%"; Hit description=Formin -like protein 1
  Pfam annotation: Domain name=FH2; Domain location=89-493; Score =580.3; E_value=2.1e-171; Accession=PF02181.15; Description=Formin Homology 2 Domain
  Subcellular localization annotation: CTP_CleavageSite=19; ConfidenceScore=5.44e-01
NPFVHPAHPPTSTYPPAPPAAAGPPPPPPPPPPPVGYWESRVRKPDTSKETRSPALSPPPQSATFRIVPAPTDAFPSRLPESSDQGDKSEDTTPRPKLKPLHWDKVRASSDRVMVWDQLKSSSFQVNEEMIETLFICNPANAAAKEATRRPVLPTPKAENKVLDPKKAQNIAILLRALNVTKEEVCDALCEGNTDSFGAELLETLLKMAPTKEEEIKLREFKEENSPIKLNHAEKFLKAVLDVPFAFKRVDAMLYIANFDSEVNYLKNSFETLETACDELRSSRLFLKLLEAVLKTGNRMNVGTNRGDAHAFKLDTLLKLVDVKGTDGHTTLLHFVVQEIIRTEGARLSASTQTTPRTQANPLREEHECKKLGLQVVAGLANELSNVKKAAAMDSDVLSSYVTKLAGGIEKITEVLRLNEEVKSRDDAWQFHDRMQKFLKKADDEIIRVQAQESVALSLVKEITEYFHGDSAKEEAHPFRIFMVVRDFLSVLDQVCKEVGRINDRTIASSVRHFPVPVNPMMPQLFPRIHALRAGFSDDESSAASVSSP

SEQ ID NO: 72209 - protein, 105 aa, Setaria italica
  misc_feature (1)..(1): Xaa can be any naturally occurring amino acid
  Transcript Sequence Number=SeqID_6235
  Gene Ontology: Mol. function=endonuclease activity
  Homolog annotation: Hit_ID=B9S769; Match level="QueryCoverage=91%, HitCoverage=11%, E-value=3e-16, Identity=41%"; Hit description =Pentatricopeptide repeat-containing protein, putative
XFGAFRLKSGDIVLKVSGGNIDGVERIVNSLQTQSLTCKVKRKGRFFWIGFQGSNADSFWKIIEPHVLDSFTGSAMQESHRIGSDGSRDSDTDYEDDTQRYDTET

SEQ ID NO: 72210 - protein, 405 aa, Setaria italica
  Transcript Sequence Number=SeqID_6236
  Gene Ontology: Mol. function=oxidoreductase activity; Cellular component=chloroplast envelope; Biological process=oxidation reduction
  Homolog annotation: Hit_ID=B6UCW6; Match level="QueryCoverage=100%, HitCoverage=100%, E-value=0.0, Identity=90%"; Hit description =Aldo/keto reductase
  Pfam annotation: Domain name=Aldo_ket_red; Domain location=54-397; Score=127.1; E_value=5.6e-35; Accession=PF00248.13; Description =Aldoketo reductase family
  Subcellular localization annotation: CTP_CleavageSite=42; ConfidenceScore=5.29e-01
MQQMAMSAFVVTSPSSHDYALSALHARHSQRLHTRRIRSQVRALAQTQLQYNKLGDSDLLISEVALGTMTFGEQNTEKEAHGILSYSFDQGVNILDTAEMYPVPPNKETQGRTDLYIGRWMQSKPREKIILATKVAGYSERSTFLRDNAEVVRVDAANIKESVEKSLKRLSTDYIDLLQIHWPDRYVALFGEFSYNSTKWRPSIPFEDQLKAFQELIDEGKVRYIGVSNETSYGVMEFVHAAKAQGLPKIVSIQNSYSLLVRCRFEVDLVEVCHPNNCNVRLLAYSPLAGGVLTGKYLDANADTSKRSRLNLFPGYMARYNASLAKEATNEYVKLAKNHGLTPVQLALGFVRDRPFTASSIIGATTMDQLKENIDAFTSAPRPLPQEVLDGIEDLFKRYKDPAIL

SEQ ID NO: 72211 - protein, 67 aa, Setaria italica
  Transcript Sequence Number=SeqID_6237
  Homolog annotation: Hit_ID=B9S8E5; Match level="QueryCoverage=74%, HitCoverage=4%, E-value=3e-10, Identity=64%"; Hit description =Replication factor C / DNA polymerase III gamma-tau subunit, putative
  Subcellular localization annotation: CTP_CleavageSite=17; ConfidenceScore=5.11e-01
SSSLRRGRHFCRNDIPRRLEPKSRSLLCWRTSRTRRKLSSIKVRNRRSRAISRLILCGRCISTKSPR

SEQ ID NO: 72212 - protein, 237 aa, Setaria italica
  Transcript Sequence Number=SeqID_6238
  Gene Ontology: Mol. function=DNA-directed DNA polymerase activity; Cellular component=DNA polymerase III complex; Biological process =DNA replication
  Homolog annotation: Hit_ID=A6N174; Match level="QueryCoverage=81%, HitCoverage=100%, E-value=3e-71, Identity=79%"; Hit description =Nucleoside-triphosphatase/ nucleotide binding protein (Fragment)
RSAIILEIRYESKDGARASHAPSMFPYPENDSSNTTMRRSFSKHSLLSSGGENLMRRLKKDSVVKGASSSKTRWMQSDPHILTEGEIIEVGPSHMHWHAQTNNGVLDVNERRKENVWEEEASSSLNQESITSWKGRSGNKQRQQNSIVKGKVSLAHVIGRAEACSQRGGWSRRKAISIAEKLEQENLRLESKSRNLLCWRTSRTRRKLSSIKVRNRRSRAISRLILCGRCISTKSPR

SEQ ID NO: 72213 - protein, 51 aa, Setaria italica
  Transcript Sequence Number=SeqID_6239
LRAEFHEIFSFLQLIQLFRRKLSSIKVRNRRSRAISRLILCGRCISTKSPR

SEQ ID NO: 72214 - protein, 379 aa, Setaria italica
  Transcript Sequence Number=SeqID_6240
  Gene Ontology: Mol. function=nucleoside-triphosphatase activity; Cellular component=DNA replication factor C complex; Biological process=defense response
  Homolog annotation: Hit_ID=Q2R2B4; Match level="QueryCoverage=98%, HitCoverage=36%, E-value=1e-176, Identity=82%"; Hit description =BRCA1 C Terminus domain containing protein, expressed
  Pfam annotation: Domain name=AAA; Domain location=196-379; Score =28.5; E_value=7.4e-08; Accession=PF00004.21; Description=ATPase family associated with various cellular activities (AAA)
  Pfam annotation: Domain name=BRCT; Domain location=2-70; Score=46.6; E_value=9.8e-11; Accession=PF00533.18; Description=BRCA1 C Terminus (BRCT) domain
  Pfam module annotation: Pfam domain module=AAA::BRCT; Domain location= 196-379::2-70
NNLVISGTLDSLEREEATDLIKRYGGRVTGSISKKTSYLFADEDIGGVKSNKAKDLCVPFLTEDGLFDLIRKSKPAKAPVDGHQSSNGSEKLQKLQTKSSPAKVEKRAEASPVGKSIASKSNVANASAENRKAKNIDRGSMQWTEKYRPKVPNDIVGNQSMVKQLHDWLKSWDTQFLHSGQKGKGKKQADNGAKKAVLLSGPPGIGKTTTAKVVSQMLGLQAIEVNASDSRGKADSKIEKGVGGSTSNSVKELISNATLNYSDNRLKHPKAVLIMDEVDGMSAGDRGGVADLIASIKISKIPIICICNDRYSQKLKSLVNYCLMLNFRKPTKQQMSKRLMEIAKKEGIQAQENAMEELAERVHGDIRMALNHLQYMSPP

SEQ ID NO: 72215 - protein, 48 aa, Setaria italica
  Transcript Sequence Number=SeqID_6241
NFCKQTDSGYQLKLQNITQMYLNLSIRNSIFKLQSKECGKGSASVNKI

SEQ ID NO: 72216 - protein, 52 aa, Setaria italica
  Transcript Sequence Number=SeqID_6242
QDNICSQFIVFNPVGGFKSQTNKLIQTQFITLHGLSIAFSIYKIKLTLLSNK

SEQ ID NO: 72217 - protein, 96 aa, Setaria italica
  Transcript Sequence Number=SeqID_6243
  Gene Ontology: Mol. function=protein tyrosine kinase activity; Cellular component=integral to membrane; Biological process=protein amino acid phosphorylation
  Homolog annotation: Hit_ID=B6T5E9; Match level="QueryCoverage=77%, HitCoverage=22%, E-value=1e-23, Identity=62%"; Hit description =BRASSINOSTEROID INSENSITIVE 1-associated receptor kinase 1
LSFRGYCADGPERMLVYDYMANSAECLLDWRRRASIAIGAARALLYLHEHATPQIIYGSIKVTNVLLDSDFQAHVQRQYPTCYDYWCWYIYGLNPG

SEQ ID NO: 72218 - protein, 195 aa, Setaria italica
  misc_feature (15)..(15): Xaa can be any naturally occurring amino acid
  misc_feature (185)..(185): Xaa can be any naturally occurring amino acid
  Transcript Sequence Number=SeqID_6244
  Gene Ontology: Mol. function=protein tyrosine kinase activity; Biological process=protein amino acid phosphorylation
  Homolog annotation: Hit_ID=B6T5E9; Match level="QueryCoverage=100%, HitCoverage=52%, E-value=3e-80, Identity=76%"; Hit description =BRASSINOSTEROID INSENSITIVE 1-associated receptor kinase 1
  Pfam annotation: Domain name=Pkinase; Domain location=1-194; Score= -39.9; E_value=4.1e-06; Accession=PF00069.17; Description=Protein kinase domain
  Pfam annotation: Domain name=Pkinase_Tyr; Domain location=1-191; Score=-81.5; E_value=2.6e-08; Accession=PF07714.9; Description =Protein tyrosine kinase
  Pfam module annotation: Pfam domain module=Pkinase::Pkinase_Tyr; Domain location=1-194::1-191
VEFASEVEILGRIRXKNLLSFRGYCADGPERILVYDYMANSSLYAHLHGPLSAECLLDWRRRASIAIGAARALLYLHHHATPQIIHGSIKATNVLLDSDFQAHVGDFGLIRLIPDGMDHEKITSENQRGYLAPEYIMFGKPTAGCDVYSFGIILLELASGKRPIEKSGSVKTYGIRNWVLPLAKXGRYDEIADSK

SEQ ID NO: 72219 - protein, 130 aa, Setaria italica
  misc_feature (10)..(10): Xaa can be any naturally occurring amino acid
  misc_feature (22)..(22): Xaa can be any naturally occurring amino acid
  Transcript Sequence Number=SeqID_6245
  Gene Ontology: Mol. function=protein tyrosine kinase activity; Biological process=protein amino acid phosphorylation
  Homolog annotation: Hit_ID=B6T5E9; Match level="QueryCoverage=88%, HitCoverage=33%, E-value=1e-43, Identity=68%"; Hit description =BRASSINOSTEROID INSENSITIVE 1-associated receptor kinase 1
  Pfam annotation: Domain name=Pkinase_Tyr; Domain location=1-128; Score=-168.3; E_value=0.015; Accession=PF07714.9; Description =Protein tyrosine kinase
GQVWDGSQIXVKRLKNTKNGTXVEFASEVKILGRIRHINLLSFRGYCADGPERMLVYDYMANSAECLLDWRRRASIAIGAARALLYLHEHATPQIIYGSIKVTNVLLDSDFQAHVQRQYPTCYDYWCWCD

SEQ ID NO: 72220 - protein, 42 aa, Setaria italica
  Transcript Sequence Number=SeqID_6246
  Gene Ontology: Mol. function=actin binding; Cellular component=F -actin capping protein complex; Biological process=actin cytoskeleton organization and biogenesis
  Homolog annotation: Hit_ID=Q8H358; Match level="QueryCoverage=78%, HitCoverage=11%, E-value=3e-11, Identity=87%"; Hit description =Putative alpha subunit of F-actin capping protein
MLSFLYTQESYLNLSDATFKDLRRKLPVTRTLFPWHNTFSER

SEQ ID NO: 72221 - protein, 209 aa, Setaria italica
  misc_feature (73)..(73): Xaa can be any naturally occurring amino acid
  misc_feature (180)..(180): Xaa can be any naturally occurring amino acid
  Transcript Sequence Number=SeqID_6247
  Gene Ontology: Mol. function=actin binding; Cellular component=F -actin capping protein complex; Biological process=actin cytoskeleton organization and biogenesis
  Homolog annotation: Hit_ID=B6U122; Match level="QueryCoverage=77%, HitCoverage=59%, E-value=1e-71, Identity=74%"; Hit description=F -actin capping protein alpha subunit
  Pfam annotation: Domain name=F-actin_cap_A; Domain location=15-206; Score=59.6; E_value=1.2e-14; Accession=PF01267.9; Description=F -actin capping protein alpha subunit
MSDEGGAGEPLSDRQKREIAVWFLSNAPAGEIHYVAKDVRALLGDDAVYEAAAAEAFPEYNKAHLVSLELPDXSGDIIITTFGELDKNNYLDPRTAQVATVDHIKQTCTKLRPAADEELPSAYIEEFSCADYGKDIEGPGADFGFAVAISAAKRSPQNFCNELACSIHVFCLFLVLKEIXCFLILAHMDQCVWFCIIGRLQLLWTLFSL

SEQ ID NO: 72222 - protein, 306 aa, Setaria italica
  misc_feature (46)..(46): Xaa can be any naturally occurring amino acid
  Transcript Sequence Number=SeqID_6248
  Gene Ontology: Mol. function=actin binding; Cellular component=F -actin capping protein complex; Biological process=actin cytoskeleton organization and biogenesis
  Homolog annotation: Hit_ID=B6U122; Match level="QueryCoverage=100%, HitCoverage=100%, E-value=1e-153, Identity=85%"; Hit description=F -actin capping protein alpha subunit
  Pfam annotation: Domain name=F-actin_cap_A; Domain location=15-297; Score=432.3; E_value=7.5e-127; Accession=PF01267.9; Description=F -actin capping protein alpha subunit
MSDEGGAGEPLSDRQKREIAVWFLSNAPAGEIHYVAKDVRALLGDXAVYEAAAAEAFPEYNKAHLVSLELPDRSGDIIITTFGELDKNNYLDPRTAQVATVDHIKQTCTKLRPAADEELPSAYIEEFRSALDVELSKYVAEAYPKGVCAVYCTSGKDIEGPGADFGFAVAISAAKRSPQNFCNGSWRSIWTMEFNYELQFVDIKGKIQVDAHYFEEGNVQLDTNIDRKDSTIMQSPDDSAVSIASIIRHHESEYLSSLEESYLNLSDATFKDLRRKLPVTRTLFPWHNTLAFSLTRDLAKELALGK

SEQ ID NO: 72223 - protein, 73 aa, Setaria italica
  misc_feature (4)..(4): Xaa can be any naturally occurring amino acid
  Transcript Sequence Number=SeqID_6249
GHAXVGGGGGRAVLVRGAVHRHHPRTPPLPADGVAHACVCVAATSSEASPACLQLQTGIMLRTTTRAARSEIR

SEQ ID NO: 72224 - protein, 362 aa, Setaria italica
  Transcript Sequence Number=SeqID_6250
  Gene Ontology: Mol. function=protein heterodimerization activity; Cellular component=microtubule; Biological process=positive regulation of microtubule depolymerization
  Homolog annotation: Hit_ID=Q7XKB3; Match level="QueryCoverage=60%, HitCoverage=23%, E-value=3e-40, Identity=42%"; Hit description =OSJNBa0064G10.18 protein
INGKESGKLVPITDSRRSRMVDESGCRRITDDVRYKKIIPESYLRANPDIDYTRRAQESPKDREHIFLSKPISSQRKFIRESSGAGDNSRSGSVCTEKIESNEAGSWYGVSCFDKWNSDAAWNPEFADIDRNGVIGTSKWRESSERHAVRHRPYSSHYDSIQCEPTLYGSRLHPSLPGKLIGSASDEDDMYGLMENHQDFIHVMKSRLTKLEVVYRCWQRNDIKGSIDATWRILDFAVTTGVINALMENSNCISLDICASILRLSSSLLESKYDWHVNIALGMILSLVKSFGATISSALSATPPVGVDLEAEQRLERCSLCFQELKKVNASLKSLTRRQGEVGRSAQELSIFLQDILQLSSM

SEQ ID NO: 72225 - protein, 71 aa, Setaria italica
  Transcript Sequence Number=SeqID_6251
ADCCRFGVGESTSTTPSGMRCRGHSVRRKNKRSYVLELGDICIMRLCSVFEWTTYFISYATYEHLSVRFVS

SEQ ID NO: 72226 - protein, 122 aa, Setaria italica
  Transcript Sequence Number=SeqID_6252
  Subcellular localization annotation: CTP_CleavageSite=80; ConfidenceScore=5.93e-01
EPSAVRRPFPCSPHPRPPPPPSPTSSSARRRPKTPKASATASQPVSARLPARSPLRTRGHGAEPVTDASAPLLRAPRPWRAAPAESGRRATSREVSGAVAAAAAAAAAAAAAAAAGRRVAAG

SEQ ID NO: 72227 - protein, 147 aa, Setaria italica
  Transcript Sequence Number=SeqID_6253
MQGSKTKSGLAEAKSNGKPEKEKKGGAGTPPTPKDSKPRKPAVPKASAAHGTPRAADKSPGSADRKAPTPKAASKLATPPEKQGKATKPAQEQQAVKPPQELQAQLAAVQEELVKAKEQLVEKEKEKGKVLEELGIAKKVADEANNQ

SEQ ID NO: 72228 - protein, 895 aa, Setaria italica
  Transcript Sequence Number=SeqID_6254
  Gene Ontology: Mol. function=two-component sensor activity; Cellular component=membrane; Biological process=signal transduction
  Homolog annotation: Hit_ID=Q5JLC8; Match level="QueryCoverage=97%, HitCoverage=47%, E-value=0.0, Identity=73%"; Hit description =Putative THO complex 2
LINTVRSILPAKAWNSLSPDLYATFWGLTLYDLHFPKDRYDTEIKKLHDNLKQLEDSSDNSSIAISRRKKDKERIQDLLDKLNSESQKHQQHIASVVQRLAREKDKWLSSSPDALKINMEFLQRCIFPRCVFSTQDAVYCATFVQTLHSLGTPFFNTVNHIDVLVCKTLQPMICCCTEFEAGRLGRFFHDTLKMAYYWKSDESVYERECVNKPGFAVYFRYPNSQRVSYSQFVRVHWKWSSRITKVLNQCMESKEYMEIRNALIVLTKISSVFPVIRKSGVNLEKRVAKLKGDEREDLKVLATGVAAALAARKSSWLSEEEFGMGHIDLKPATARSAHGNQSTDPSMAKDQNARAKSIESRHEKSEAAMKPDVQQKKSSVSANGSDNQIPSSSIQGKSSGTVRVADEPPKPVSDEGVKVSARPTSESETRAPQKRAAHSTGKILKHDVAKEDAKTGKSSSRNVNQQASTAPVDREPLSQAADFVQDTNSTSSNGNLHPAPRKVSSSSQRNAALNGAANPSGEANELTDSTLRQQKRLAPAEEQDRSSKRRKGETEPRDSDLSEHHVDKEKSLDSRAVDKFRSVDHEKSTNEEQNLSRAEKIREKFDDKYDRDPREKLDRAERRRGEDAIDRSTDRLSDRRERSIERMQERVTDKAPEKGREDRNKDERNKGKYAEPSVDRTHSTDERFRGQSLPPPPPLPTSFVPQSVGANRREEDADRRGGSARHIQRSSPRRDEKERRQSEENASSFQDDGKHRREEDLRDRKREDRDVPSNKVDDRDREKGTTTKEDSDPSSASKRRKVKREQPSLEAGEYAPSAPQLPSHGTGSSQLSDVRERERKGVISQHRSSHTDDLPRTHGKDTTSKPSRREAEQMHDREWEEEKRPRTETKRKHRK

SEQ ID NO: 72229 - protein, 106 aa, Setaria italica
  misc_feature (1)..(41): Xaa can be any naturally occurring amino acid
  Transcript Sequence Number=SeqID_6255
XXXXXXXXXXXXXXXXXXXXXXXXXXXXXXXXXXXXXXXXXLGTKSLINIINPIGSTNHKRHESQQNEIGEKEFLLGQYQLSSINKTFGNLIAMAPEANRSQAATS

SEQ ID NO: 72230 - protein, 309 aa, Setaria italica
  Transcript Sequence Number=SeqID_6256
  Gene Ontology: Mol. function=SNAP receptor activity; Cellular component=membrane; Biological process=intracellular protein transport
  Homolog annotation: Hit_ID=Q6X9V9; Match level="QueryCoverage=92%, HitCoverage=89%, E-value=1e-121, Identity=78%"; Hit description =Syntaxin
  Pfam annotation: Domain name=SNARE; Domain location=216-278; Score =79.1; E_value=1.6e-20; Accession=PF05739.11; Description=SNARE domain
  Pfam annotation: Domain name=Syntaxin; Domain location=40-147; Score =87.4; E_value=5.1e-23; Accession=PF00804.17; Description=Syntaxin
  Pfam module annotation: Pfam domain module=SNARE::Syntaxin; Domain location=216-278::40-147
MNSLFSSSWKRGGGGDGGDIESGADGVEMSAPPGAAAGASLDKFFEDVESIKDELRDLERIQRSLHEANEGSKSLHDAAAVRELRSRMDGDVASAIKKAKVVKLRLESLDRANAANRSVPGCGPGSSTDRTRTSVVAGLRKKLRDSMEAFSSLRSRIAAEYRDTVARRYFTVTGSQPDEATLDALAESGEGERFLQRAIAEQGRGEVLGVVAEIQERHGAVAELERSLLELQQVFNDMAVLVAAQGEQLDDIEGNVGRARSFVDRGREQLQVARKHQKSTRKWTFIAILIVLVIVLVIVLPIVLNNTKK

SEQ ID NO: 72231 - protein, 78 aa, Setaria italica
  Transcript Sequence Number=SeqID_6257
  Gene Ontology: Mol. function=tRNA (guanine-N7-)-methyltransferase activity
VLIQSDVLEVAADMRERFDGYSDILEHVDCVDKDLHCDNEGWLLDNPMGIRTEREIHAELEGATIYRRMYQKIRDASH

SEQ ID NO: 72232 - protein, 75 aa, Setaria italica
  misc_feature (68)..(68): Xaa can be any naturally occurring amino acid
  Transcript Sequence Number=SeqID_6258
  Gene Ontology: Mol. function=protein dimerization activity; Cellular component=nucleus; Biological process=regulation of transcription, DNA-dependent
  Homolog annotation: Hit_ID=Q7XRI2; Match level="QueryCoverage=68%, HitCoverage=2%, E-value=4e-21, Identity=90%"; Hit description =P0076O17.10 protein
MAAAMDVANPGAAASSGMSSDALYRELWHACAGPLVTVPRQGERVYYFPQGHMEQLEASTHQQLDQYXLPMFNPT

SEQ ID NO: 72233 - protein, 85 aa, Setaria italica
  Transcript Sequence Number=SeqID_6259
VFVTMDCTGCLTPGVGSCDHFYRNCMAFAAYSYSPTCHHLRVRNNNGMYPRVPTFCYVIERFHGDQLNGWYYVVANEITSKKRFL

SEQ ID NO: 72234 - protein, 462 aa, Setaria italica
  misc_feature (9)..(9): Xaa can be any naturally occurring amino acid
  misc_feature (20)..(20): Xaa can be any naturally occurring amino acid
  Transcript Sequence Number=SeqID_6260
  Gene Ontology: Mol. function=acid phosphatase activity; Cellular component=chloroplast
  Homolog annotation: Hit_ID=Q8VXF4; Match level="QueryCoverage=97%, HitCoverage=71%, E-value=0.0, Identity=72%"; Hit description =Putative metallophosphatase
  Pfam annotation: Domain name=Metallophos; Domain location=195-411; Score=58.1; E_value=3.4e-14; Accession=PF00149.20; Description =Calcineurin-like phosphoesterase
  Subcellular localization annotation: CTP_CleavageSite=81; ConfidenceScore=5.15e-01
PGSHGSGPXGPVICSAPIKXQFANYSSDYGNSGKGTLKFQLINQRQDFSFALFTGGLSNPKLIAVSNAIAFANPKAPVYPRLAQGKSWNEMTVTWTSGYDISEAYPFVEWGMKGRPAVRTAAGTITFDRESICGEPARSVGWRDPGFIHTAFLTDLWPNKEYYYKIGHMLPDGNVTWGKFSSFRAPPYPGQKSLQRVVIFGDMGKAERDGSNEYSNYQPGSLNTTDTLIKDLDNIDIMFHIGDISYANGYISQWDQFTQQVEAITSRVPYMIASGNHERDWPNSGSFFNGTDSGGECGVLAETMYYTPTENRANYWYSTDYGMFRFCIADSEHDWREGTEQYKFIENCFATVDRKNQPWLIFIAHRVLGYSSGYFYGIDGAFAEPTSRQSLQKLWQKYRVDMAFYGHVHNYERTCPVYEEQCMSSEKSHYSGTMNGTIHVVVGGGGSHLSNFTTEVPAWSIY

SEQ ID NO: 72235 - protein, 571 aa, Setaria italica
  misc_feature (98)..(98): Xaa can be any naturally occurring amino acid
  Transcript Sequence Number=SeqID_6261
  Homolog annotation: Hit_ID=B9RMQ4; Match level="QueryCoverage=57%, HitCoverage=16%, E-value=2e-12, Identity=24%"; Hit description=ATP binding protein, putative
  Pfam annotation: Domain name=EzrA; Domain location=157-565; Score= -390.9; E_value=0.069; Accession=PF06160.4; Description=Septation ring formation regulator, EzrA
DSLQELLCDSLKNSNEFGGGDSAEEPIESQYGRLIEHLKNLLHDHHTMLSTNADLESRLLSKCEEVEELNMRYSSLTKNLNDVCVMNEELKSASLRQXNRPTTKNELHSRCLAVAEKLVSHSVNHSSAGVQLISDSGEGFNKEDHILTTLLPCIEDGVASCIEKFENAAEEIRLSKICLQDINIFDQISFDKWSYPLPTLFNAEILPKLSDLQDRINQLNALNIQLETEVPVLRDGMKKLDEALGTSRTELQKKVSELEQFDQKLTSVKEKLSIAVAKGKGLIVQRDSLKQSLLEKSGEVEKLTQELQLKETLLKELEAKLKSYTEADRIEALESELSYIRNSATALRDSFLLKDSVLQRIEEVLEDLDLPEQFHSRDIVEKIELLSKMAVGTSFTLPDGDKRSSVDGHSESGVAMDVINDEQNSNSNPASDELKSKYEELHRKFYELAEHNNMLEQSLVERNSLIQKWEEVLGQISIPPQFRMLEAEDKIEWLGNRLLEVEQERDSLQLKIEHLEDSSEMLIADLEESHKRISELSAEVVAIKAEKDFFSQSLEKLRFEFLGLSEKAVQD

SEQ ID NO: 72236 - protein, 115 aa, Setaria italica
  Transcript Sequence Number=SeqID_6262
  Gene Ontology: Mol. function=signal transducer activity; Cellular component=plasma membrane; Biological process=response to light stimulus
  Homolog annotation: Hit_ID=B9S8R5; Match level="QueryCoverage=48%, HitCoverage=8%, E-value=1e-16, Identity=66%"; Hit description =Protein binding protein, putative
  Pfam annotation: Domain name=NPH3; Domain location=1-104; Score= -95.7; E_value=0.00033; Accession=PF03000.6; Description=NPH3 family
RIVGYFLAEEEIGGFASSSAAIEVEEEAGAEVSRPSAVAMVQVGKLVDSYLAEVASDANLKPAKFCELALSLPDHARIYNDGVYRAVDIYLKAHRQLPAVHHAHHPVSLLRRQPW

SEQ ID NO: 72237 - protein, 62 aa, Setaria italica
  Transcript Sequence Number=SeqID_6263
RLIHGFHDAKKRSTPNSVRQFQDKTPLQNSAQFSAKLMLAPHQDSTKLQAKAQLINLPDLGL

SEQ ID NO: 72238 - protein, 79 aa, Setaria italica
  Transcript Sequence Number=SeqID_6264
DRNCIVNLYHGTSKRWCKTREQLVLASTMVQASTSCSLVLHHLLLFAQTAGRVGQFGCQLLEAMANKLSVKYTKSEWCF

SEQ ID NO: 72239 - protein, 60 aa, Setaria italica
  misc_feature (1)..(11): Xaa can be any naturally occurring amino acid
  Transcript Sequence Number=SeqID_6265
XXXXXXXXXXXLLGLLLTNYVVYAFLRLQGYNLLLQTLTRNTTQTWYVTESFLAIVASIS

SEQ ID NO: 72240 - protein, 86 aa, Setaria italica
  misc_feature (1)..(13): Xaa can be any naturally occurring amino acid
  Transcript Sequence Number=SeqID_6266
XXXXXXXXXXXXXLVLVTPKRERSELDELFDCTEKRRKTKFHRHTTTRARVLRLQGYNLLLQTLTRNTTQTWYVTESFLAIVASIS

SEQ ID NO: 72241 - protein, 108 aa, Setaria italica
  Transcript Sequence Number=SeqID_6267
  Subcellular localization annotation: CTP_CleavageSite=44; ConfidenceScore=5.11e-01
ANSKRWCKTREQLVLASTMVQIYNTVRPWYKFTIQSGRPAGRSRAAAANTRRSATRGCRISGSDTSITWVPRAGGASPWPSCRCRPPRRRGRRRATPAAAAAASAPSP

SEQ ID NO: 72242 - protein, 134 aa, Setaria italica
  Transcript Sequence Number=SeqID_6268
MPGGRRRGPLWSLPVARSDALGKLGPAFGIGAGCGVGIGFGLVGGAGIGAGFPGLQLGFGAGAGCGIGIGFGYGFGKGVAYDESGRYSNIRRPFQNSRSLAYDEQFDIMFDELMESTRKLIKATSKELDKWRRM

SEQ ID NO: 72243 - protein, 102 aa, Setaria italica
  misc_feature (74)..(74): Xaa can be any naturally occurring amino acid
  Transcript Sequence Number=SeqID_6269
  Gene Ontology: Mol. function=oxidoreductase activity, acting on the CH-OH group of donors, NAD or NADP as acceptor; Cellular component =chloroplast; Biological process=malate metabolic process
  Homolog annotation: Hit_ID=B9FMV0; Match level="QueryCoverage=100%, HitCoverage=19%, E-value=2e-53, Identity=99%"; Hit description=Malic enzyme
  Pfam annotation: Domain name=malic; Domain location=1-102; Score =109.0; E_value=1.6e-29; Accession=PF00390.11; Description=Malic enzyme, N-terminal domain
VEELLPVVYTPTVGEACQKYGSIYRRPQGLYISLKDKGKILEVLKNWPERSIQVIVVTDGERILGLGDLGCQGXMGIPVGKLSLYTALGGVRPSACLPITID

SEQ ID NO: 72244 - protein, 552 aa, Setaria italica
  misc_feature (184)..(184): Xaa can be any naturally occurring amino acid
  Transcript Sequence Number=SeqID_6270
  Gene Ontology: Mol. function=oxidoreductase activity, acting on the CH-OH group of donors, NAD or NADP as acceptor; Cellular component =chloroplast; Biological process=malate metabolic process
  Homolog annotation: Hit_ID=Q6T5D1; Match level="QueryCoverage=100%, HitCoverage=96%, E-value=0.0, Identity=83%"; Hit description=Malic enzyme
  Pfam annotation: Domain name=Malic_M; Domain location=268-521; Score =487.0; E_value=2.7e-143; Accession=PF03949.7; Description=Malic enzyme, NAD binding domain
  Pfam annotation: Domain name=malic; Domain location=77-266; Score =318.1; E_value=1.8e-92; Accession=PF00390.11; Description=Malic enzyme, N-terminal domain
  Pfam module annotation: Pfam domain module=Malic_M::malic; Domain location=268-521::77-266
HLVTPWAFSVASGYTLLRDPRHNKGLAFSEAERDAHYLRGLLPPALASQELQEKKIMHNLRQYTVPLQRYIAMMDLQERNERLFYKLLIDNVEELLPVVYTPTVGEACQKYGSIYRRPQGLYISLKDKGKILEVLKNWPERSIQVIVVTDGERILGLGDLGCQGDGDPRWQAVSLHRPRRRSPXACLPITIDVGTNNETLLNDEFYIGLRQRRATGQEYHELLEEFMTAVKQNYGEKVLTQFEDFANHNAFDLLAKYSKSHLVFNDDIQGTASVVLAGLLAALKVVGGTLADHTYLFLGAGEAGTGIADLIALEMSKHSETPIDDCRKKIWLVDSKGLIVESRKESLQHFKQPWAHDHEPLKTLLEAVESIKPTVLIGTSGVGRTFTKEVVEAMASFNERPVIFALSNPTSHSECTAEEAYTWSQGRAVFASGSPFDAVEHEGKVYVPGQSNNAYIFPGFGLGVVISGAIRVHDDMLLAASEALAEQVTDEHFAKGLIFPPFTNIRTISARIAAKVAEKAYELGLASRLPRPDDLVKYAQSCMYTPTYRSYR

SEQ ID NO: 72245 - protein, 50 aa, Setaria italica
  Transcript Sequence Number=SeqID_6271
DPAVAGIDEKKLSTSIEKIERLVRRNLKRTPKAAQASRRATQRRNLMSMR

SEQ ID NO: 72246 - protein, 175 aa, Setaria italica
  Transcript Sequence Number=SeqID_6272
  Gene Ontology: Cellular component=vacuole
  Homolog annotation: Hit_ID=B6U3F4; Match level="QueryCoverage=74%, HitCoverage=65%, E-value=1e-52, Identity=76%"; Hit description =Lipase/lipooxygenase, PLAT/LH2
  Pfam annotation: Domain name=ATS3; Domain location=28-152; Score =202.6; E_value=1.1e-57; Accession=PF06232.3; Description=Embryo -specific protein 3, (ATS3)
  Subcellular localization annotation: CTP_CleavageSite=21; ConfidenceScore=5.05e-01
LSPTTTRPLPRPTATTTTTTPLEAGSGEVAGSGDIGGVAGRACTYTVQIKTSCSSPRRSPDAVSLAFGDTYRNEVYAARVTPARGFERCAKDTFRVTGPCGYGVCYLYLRRTGGVGWTPEWVRVYEPTSSTPSTFYYGDPLSNGVWYGTNRCLRRGAGGGASSEPVVAAAQALRL

SEQ ID NO: 72247 - protein, 69 aa, Setaria italica
  Transcript Sequence Number=SeqID_6273
LAYEVSCGGYDYHLPLLGHLFCTVSLLFVFASSSFQLDESKPCVSFGCYMNFPMLLLYKIQKLVSCFVM

SEQ ID NO: 72248 - protein, 45 aa, Setaria italica
  Transcript Sequence Number=SeqID_6274
FYTIVAYNELNETQHHIRLNHKYFTLKNKQLKVKASKKEQQLTIC

SEQ ID NO: 72249 - protein, 144 aa, Setaria italica
  misc_feature (60)..(60): Xaa can be any naturally occurring amino acid
  Transcript Sequence Number=SeqID_6275
  Gene Ontology: Mol. function=catalytic activity; Cellular component =endoplasmic reticulum membrane; Biological process=metabolic process
  Homolog annotation: Hit_ID=B9RJ88; Match level="QueryCoverage=99%, HitCoverage=20%, E-value=5e-57, Identity=74%"; Hit description=Long -chain-fatty-acid CoA ligase, putative
IDRKKDIVKLQHGEYVSLGKVEAALSVCPYVDQIMIHADPFHSYCVALVVAAHSELKGWXASKQGITYRDFADLCQKQQIVKEVLQSLAKAAKQARLEKFEIPAKIKLIPEPWTPESGLVTAALKLKREIIKKAYEKDLAQLYS

SEQ ID NO: 72250 - protein, 63 aa, Setaria italica
  Transcript Sequence Number=SeqID_6276
SQDKRTFFLRIQCDFIINTCRKHHMRLHRSALEMAGYLLSIKIQEKPQAHNFKFKVTKKTQSS

SEQ ID NO: 72251 - protein, 229 aa, Setaria italica
  Transcript Sequence Number=SeqID_6277
  Gene Ontology: Mol. function=catalytic activity; Cellular component =endoplasmic reticulum membrane; Biological process=metabolic process
  Homolog annotation: Hit_ID=B9RJ88; Match level="QueryCoverage=100%, HitCoverage=32%, E-value=2e-79, Identity=62%"; Hit description=Long -chain-fatty-acid CoA ligase, putative
KRGVPVDVGGEPGCAVRNHRFERPVESHWEGVSTLAELFEQSCEQFAYMPLYGTRKLIARELEVAPDGRSFEKLHLGNYEWKSYADAFKTVCNFASGLLRVGHLKDERVAIFADTRAEWQIALQACFRQNIAVVTIYSSLGEGALCHSLNETEVTTVICGQKELKKLIDISGQLDTVTRVVYINEEGISDEVSLARNSTSWIIESFDEVGRLGTEAPVEANMPLPSDVA

SEQ ID NO: 72252 - protein, 234 aa, Setaria italica
  Transcript Sequence Number=SeqID_6278
  Gene Ontology: Mol. function=catalytic activity; Cellular component =endoplasmic reticulum membrane; Biological process=metabolic process
  Homolog annotation: Hit_ID=Q9CAP8; Match level="QueryCoverage=92%, HitCoverage=31%, E-value=1e-98, Identity=76%"; Hit description=Long chain acyl-CoA synthetase 9
IVNVPFGPLFGSFLLVLCSYIKLIDWAEGGYLTTDSPMPRGEIVIGGPNVTKGYFKNEAKTNEVYKDDERGMRWFYSGDIGRFHPDGCLEIIDRKKDIVKLQHGEYVSLGKVEAALIVSPYVENIMVHADPFHNYCVALVVAAHNELENWASQQGIKYIDFSDLCQKQEAVKEVLGSIAKAGKQARFEKFEIPAKIKLIPEPWTPESGLVTAALKLKREVIRKTYENDLAQLYA

SEQ ID NO: 72253 - protein, 62 aa, Setaria italica
  Transcript Sequence Number=SeqID_6279
  Gene Ontology: Mol. function=catalytic activity; Cellular component =endoplasmic reticulum membrane; Biological process=metabolic process
  Homolog annotation: Hit_ID=Q9CAP8; Match level="QueryCoverage=96%, HitCoverage=8%, E-value=1e-17, Identity=66%"; Hit description=Long chain acyl-CoA synthetase 9
LYWCTLLQAAKQARLEKFEIPAKIKLIPEPWTPESGLVTAALKLKREIIKKAYEKDLAQLYS

SEQ ID NO: 72254 - protein, 625 aa, Setaria italica
  misc_feature (56)..(56): Xaa can be any naturally occurring amino acid
  misc_feature (344)..(344): Xaa can be any naturally occurring amino acid
  Transcript Sequence Number=SeqID_6280
  Gene Ontology: Mol. function=catalytic activity; Cellular component =endoplasmic reticulum membrane; Biological process=metabolic process
  Homolog annotation: Hit_ID=Q9CAP8; Match level="QueryCoverage=99%, HitCoverage=87%, E-value=0.0, Identity=68%"; Hit description=Long chain acyl-CoA synthetase 9
  Pfam annotation: Domain name=AMP-binding; Domain location=109-598; Score=323.6; E_value=4.1e-94; Accession=PF00501.20; Description=AMP -binding enzyme
MNPYFVGFLVPVAVSLLLRKRRKAERKRGVQVEVGGEPGYAVRNYRFEQPVETHWXGVSTLAELFERSCKEYVYMPLLGTRKLISRETESAPGGRSFEKLHLGEYEWKCYAEAFKSVCNFSSGLIRLGHQKNERVAIFAETRAEWQVALQACFRQNITVVTIYASLGEEALCHSLNETEVTTVICGQKELTVVCGQLKKLIDISGQLDTVTRVVYINEEGISDEVSLARNCTSWIIESFEEVESLGLERPVEANMPLPSDVAVIMYTSGSTGLPKGVMMTHRNVLATLSAVMTIVPVLGSKDIYLAYLPLAHILELAAEALMAAVGASIGYGSPLTLTDTSSKXKKGTLGDASALKPTLMTAVPAILDRVRDGVRKKVDGTGGAAKKLFDIGYNRRLAAINGSWFGAWGLEKHLWDTLVFGKVRAILGGKIRFVLSGGAPLSGDTQRFINICLGAPIGQGYGLTETCAGGTFSEYDDTSVGRVGAPLPCSYIKLIDWPEGGYLTTDSPMPRGEIVIGGPNVTKGYFKNEAKTNEVYKDDEKGMRWFYSGDIGRFHPDGCLEIIDRKKDIVKLQHGEYVSLGKVEAALIVSPYVENIMVHADPFHNYCVALVVAAHNELENFRQTN

SEQ ID NO: 72255 - protein, 828 aa, Setaria italica
  Transcript Sequence Number=SeqID_6281
  Gene Ontology: Mol. function=polyribonucleotide nucleotidyltransferase activity; Cellular component=cytoplasm; Biological process=mRNA catabolic process
  Homolog annotation: Hit_ID=Q6KAI0; Match level="QueryCoverage=95%, HitCoverage=81%, E-value=0.0, Identity=87%"; Hit description =Putative polyribonucleotide nucleotidyltransferase
  Pfam annotation: Domain name=PNPase; Domain location=236-317; Score =71.7; E_value=2.8e-18; Accession=PF03726.6; Description =Polyribonucleotide nucleotidyltransferase, RNA binding domain
  Pfam annotation: Domain name=RNase_PH; Domain location=320-453; Score= 138.4; E_value=2.3e-38; Accession=PF01138.13; Description=3' exoribonuclease family, domain 1
  Pfam annotation: Domain name=RNase_PH; Domain location=7-139; Score =112.6; E_value=1.4e-30; Accession=PF01138.13; Description=3' exoribonuclease family, domain 1
  Pfam annotation: Domain name=RNase_PH_C; Domain location=142-206; Score=39.9; E_value=9.9e-09; Accession=PF03725.7; Description=3' exoribonuclease family, domain 2
  Pfam annotation: Domain name=RNase_PH_C; Domain location=456-533; Score=65.8; E_value=1.6e-16; Accession=PF03725.7; Description=3' exoribonuclease family, domain 2
  Pfam annotation: Domain name=S1; Domain location=618-690; Score=61.5; E_value=3.1e-15; Accession=PF00575.15; Description=S1 RNA binding domain
  Pfam module annotation: Pfam domain module=PNPase::RNase_PH::RNase _PH::RNase_PH_C::RNase_PH_C::S1; Domain location=236-317::320-453::7 -139::142-206::456-533::618-690
REEFEIGGRTIAFETGKMARFANGSVVISMEDTHVLSTVAAAKSNEPVRDFLPLTVDYQEKQYAQGVIPTTYMRREGAPKERELLCGRIIDRPIRPLFPPGFYHEVQIMVNVLSSDGKQDPDVMAANASSAALMLSDIPWNGPIGVIRVGRIDGNFVLNPTVDELGLSDLNLVYACSRDKTLMIDVQAREITERDLQAGMKLAHSEAIKCIDPQIRLAKRAGKEKKEYKISLISDTSYEKIRTLSEAPIEEVFTDSSYGKFERGEALEKITQSVKAKLEEENDEDSLKFLSKAVDTVRKQVIRKRIIEEGLRVDGRQLDEVRPLFCEANTYPVLHGSALFSRGDTQVLCTVTLGAPGDAQRLDSIVGPPTKRFMLHYSFPPFSINEVAKRGGLNRREVGHGTLAPIRLLVVLPPESDFPYTVRVNSEVMASDGSTSMASVCGGSMALMDAGIPVREHVAGVSVGLVSQVDPTTGDISNYRILTDILGLEDHLGDMDFKIAGTRKGITAIQLDIKPAGIPLDIVCESLEPARKARTQILDRMDQEISIARAMNDGSAPRLATLSFSSDSLRKLLFHRKKIEQETGARVSVSDGTVTIVAKTQPIMDKAIEKVEFLVGREIEVGRTYKGTVSSVKEYGAFVEFNGGQQGLLHISELSHEPVSKVSDIVTVGQSLSLMCIGQDVRGNIKLSLKATLPQPRKKKDLESKGPLPSQEVGWAAVENMPSVGADAEPSSSKHEDGTAEEAPAFSTPSVIIRSEADCDAQDAANGPKKRARVSKSSPRPYKAPSERQKVRTATAKKAPGATKKTDKKVKIEESGSNSLETSGSEEV

SEQ ID NO: 72256 - protein, 115 aa, Setaria italica
  Transcript Sequence Number=SeqID_6282
  Homolog annotation: Hit_ID=B6TW34; Match level="QueryCoverage=83%, HitCoverage=48%, E-value=1e-35, Identity=79%"; Hit description =Lachrymatory factor synthase
MKEAAAVEQQQQQWRGVVEAPLPSTPASAAWPHIASFCALDRYLPGIDVCELAAGEDGRPGCVRYVASLAPAAASGDDAEREVASWAREELLEIDGAARRLAYAIVGNSSWGSAD

SEQ ID NO: 72257 - protein, 88 aa, Setaria italica
  Transcript Sequence Number=SeqID_6283
  Gene Ontology: Mol. function=nucleoside-triphosphatase activity; Cellular component=signal recognition particle; Biological process =SRP-dependent cotranslational protein targeting to membrane
  Homolog annotation: Hit_ID=B9SWF9; Match level="QueryCoverage=98%, HitCoverage=15%, E-value=3e-14, Identity=48%"; Hit description =Signal recognition particle protein, putative
  Pfam annotation: Domain name=SRP_SPB; Domain location=1-55; Score =0.6; E_value=3.9e-06; Accession=PF02978.11; Description=Signal peptide binding domain
FMESMINVMTPEERERPELLAESRERRKRVAKDSGKTEQQVGQLVAQLFQMRTRMQKMMGAMQEKDSPDMDKLMESIKAEEQAAAGTG

SEQ ID NO: 72258 - protein, 133 aa, Setaria italica
  Transcript Sequence Number=SeqID_6284
  Gene Ontology: Mol. function=nucleoside-triphosphatase activity; Cellular component=signal recognition particle; Biological process =SRP-dependent cotranslational protein targeting to membrane
  Homolog annotation: Hit_ID=B9SWF9; Match level="QueryCoverage=100%, HitCoverage=23%, E-value=2e-57, Identity=81%"; Hit description =Signal recognition particle protein, putative
  Pfam annotation: Domain name=SRP54; Domain location=1-133; Score =144.9; E_value=2.6e-40; Accession=PF00448.14; Description=SRP54-type protein, GTPase domain
AGLQGVGKTTVCAKLAFYLKKLGKSCMLVAADVYRPAAIDQLTILGEQVGVPVYSEKMGAKPPQITKNAVEEAKSKNIDAIVVDTAGRLQIDKAMMDELKEVKKAVNPTEVLLVVDAMTGQEAAALVTTFNIE

SEQ ID NO: 72259 - protein, 98 aa, Setaria italica
  Transcript Sequence Number=SeqID_6285
  Gene Ontology: Mol. function=nucleoside-triphosphatase activity; Cellular component=signal recognition particle; Biological process =SRP-dependent cotranslational protein targeting to membrane
  Homolog annotation: Hit_ID=A2Q2E3; Match level="QueryCoverage=73%, HitCoverage=34%, E-value=5e-17, Identity=62%"; Hit description =Signal peptide binding (SRP54) M-domain
FTWSCSENESRERRKRVAKDSGKTEQQVGQLVAQLFQMRTRMQKMMGAMQEKDSPDMDKLMESIKAEEQAAAGTGRRRRKYGNLRQRQLDAMRGFRRR

SEQ ID NO: 72260 - protein, 550 aa, Setaria italica
  misc_feature (128)..(128): Xaa can be any naturally occurring amino acid
  misc_feature (195)..(195): Xaa can be any naturally occurring amino acid
  misc_feature (241)..(241): Xaa can be any naturally occurring amino acid
  Transcript Sequence Number=SeqID_6286
  Gene Ontology: Mol. function=nucleoside-triphosphatase activity; Cellular component=signal recognition particle; Biological process =SRP-dependent cotranslational protein targeting to membrane
  Homolog annotation: Hit_ID=Q53LU9; Match level="QueryCoverage=95%, HitCoverage=87%, E-value=0.0, Identity=72%"; Hit description=Signal recognition particle protein, putative
  Pfam annotation: Domain name=CbiA; Domain location=173-351; Score= -21.8; E_value=0.0036; Accession=PF01656.15; Description=Cobyrinic acid a,c-diamide synthase
  Pfam annotation: Domain name=SRP54; Domain location=171-366; Score =372.4; E_value=8.4e-109; Accession=PF00448.14; Description=SRP54 -type protein, GTPase domain
  Pfam annotation: Domain name=SRP54_N; Domain location=73-157; Score =104.3; E_value=4.1e-28; Accession=PF02881.11; Description=SRP54-type protein, helical bundle domain
  Pfam annotation: Domain name=SRP_SPB; Domain location=397-497; Score =146.7; E_value=6.9e-41; Accession=PF02978.11; Description=Signal peptide binding domain
  Pfam module annotation: Pfam domain module=CbiA::SRP54::SRP54_N::SRP _SPB; Domain location=173-351::171-366::73-157::397-497
  Subcellular localization annotation: CTP_CleavageSite=69; ConfidenceScore=5.74e-01
MDATALALHSPPAAVVTRCSPEKLAFASLHLRCSSTGSFHLRASRNPALRALSLGWRRRRRRGNGLVVRAEMFGQLTTGLESAWNKLRGVDVLTKENITEPMRDIRRSLLEADVSLPVVRRFVSSISXKALGADTIKGVRPDQQLVKIVHDELVQLMGGEVSDLVFAKSGPTVILLAGLQGVGKTTVCAKLAFYXRLGKSCMLVAADVYRPAAIDQLTILGEQVGVPVYSEGTDAKPSQIXAKNGLKEAKSQKTDVIVVDTAGRLQVDKAMMNELKEVKKAVNPTEVLLVVDAMTGQEAAGLVSSFNDEIGITGAILTKLDGDSRGGAALSVKEVSGKPIKFVGRGERLEDLELFYPDRMAQRILGMGDVLSFVEKAQEVMRQEDAEELQKKILSAKFNFNDFLKQTQMIAKMGSMSRVIGMIPGMNKVTPAQIREAEKSLAFVESMINAMTAEEREKPELLAESRERRIRVAEESGKTEQEVSQLVAQLFQMRAQMQKLMGMVQGQEAIAGMGDLMDSLKAEEKAPPGTARRRRRNIKPKQRNLDAVLS

SEQ ID NO: 72261 - protein, 37 aa, Setaria italica
  Transcript Sequence Number=SeqID_6287
ATTLPGHRQFFCGFRDAGAAAYGTSSGLAAKAVKAAR

SEQ ID NO: 72262 - protein, 67 aa, Setaria italica
  Transcript Sequence Number=SeqID_6288
HACLPFNKGHNRMQQALIQKLHTLQKSFVLISFCSISLALFLFFSFYLLVPIHSEALISYCMIDIFR

SEQ ID NO: 72263 - protein, 88 aa, Setaria italica
  Transcript Sequence Number=SeqID_6289
FEKESRIMREPTHKQTHKQKRQRQRGWLVQLGDGTRRVHDFLKRLHGYRAVHRCSQMTGKERKKGNGVPPTRKSPLFQDIQLKNNTRP

SEQ ID NO: 72264 - protein, 58 aa, Setaria italica
  misc_feature (49)..(49): Xaa can be any naturally occurring amino acid
  Transcript Sequence Number=SeqID_6290
  Gene Ontology: Mol. function=DNA binding
  Subcellular localization annotation: CTP_CleavageSite=23; ConfidenceScore=5.06e-01
MAAPFFSTPFQPYVYQSQQGSVTAFQISGGDVQVLQVMLKSQEKLTAKXGTMCYMSGN

SEQ ID NO: 72265 - protein, 92 aa, Setaria italica
  Transcript Sequence Number=SeqID_6291
  Gene Ontology: Mol. function=nucleic acid binding; Cellular component= nucleus
  Homolog annotation: Hit_ID=B6TFI3; Match level="QueryCoverage=100%, HitCoverage=36%, E-value=3e-41, Identity=90%"; Hit description =Arginine/serine-rich splicing factor RSP41
  Pfam annotation: Domain name=RRM_1; Domain location=4-66; Score=60.0; E_value=9.3e-15; Accession=PF00076.14; Description=RNA recognition motif. (a.k.a. RRM, RBD, o
MRPVFCGNFDYDTRQYDLEGLFSKDGPIRRIDMKSGYAFIYFEDERDAEDAIRRLDNVSFGHSRRRLSVEWSRQVEPVSRSRDRPTGDVKPT

SEQ ID NO: 72266 - protein, 89 aa, Setaria italica
  Transcript Sequence Number=SeqID_6292
  Gene Ontology: Cellular component=exocyst; Biological process =exocytosis
  Homolog annotation: Hit_ID=B6SWM6; Match level="QueryCoverage=95%, HitCoverage=14%, E-value=8e-27, Identity=70%"; Hit description=Exo70 exocyst complex subunit family protein
VNKRIIGKAIVAMRRQLHAQTPGAFDSFRDEYLLAIAENRTLILLEFADGFTTIMSHEKLVYMLGMYEALSDAAPSLLLLFSGARKELV

SEQ ID NO: 72267 - protein, 69 aa, Setaria italica
  Transcript Sequence Number=SeqID_6293
  Homolog annotation: Hit_ID=Q53NA2; Match level="QueryCoverage=86%, HitCoverage=13%, E-value=8e-18, Identity=63%"; Hit description =D8Ertd354e protein, putative
VYSFVGVSFNGWYYEGTNNTLVYWVRKHVFVKVWHSTRVGILLYVLFAQILFWALVSGVLHRAGLYWKL

SEQ ID NO: 72268 - protein, 92 aa, Setaria italica
  Transcript Sequence Number=SeqID_6294
  Subcellular localization annotation: CTP_CleavageSite=78; ConfidenceScore=5.49e-01
EKLIITLPIAVPADGTPSSPGTPPSPTPSPPPGPPRWPPSSYSRPPPPPKPRTSPPLPPPPRRPPGYSESTQPLAPPRAPAYSSERPPPQPP

SEQ ID NO: 72269 - protein, 110 aa, Setaria italica
  Transcript Sequence Number=SeqID_6295
EIPVKNRPTFATHTSSNFQTATPYCHTFYNCYRSQAHNRLLYTFVCVCVCLQQSDYNKTSKKKRSSKNSFPALLKLELRINKKCSHNDHSLTVSKIYQPYILYLRHVLRL

SEQ ID NO: 72270 - protein, 531 aa, Setaria italica
  misc_feature (161)..(161): Xaa can be any naturally occurring amino acid
  Transcript Sequence Number=SeqID_6296
  Gene Ontology: Mol. function=nucleoside-triphosphatase activity; Cellular component=cell wall
  Homolog annotation: Hit_ID=B9S6F2; Match level="QueryCoverage=99%, HitCoverage=86%, E-value=0.0, Identity=68%"; Hit description=Protein MSP1, putative
  Pfam annotation: Domain name=AAA; Domain location=292-497; Score =167.6; E_value=3.7e-47; Accession=PF00004.21; Description=ATPase family associated with various cellular activities (AAA)
  Pfam annotation: Domain name=AAA_3; Domain location=292-429; Score= -16.5; E_value=0.024; Accession=PF07726.3; Description=ATPase family associated with various
  Pfam annotation: Domain name=AAA_5; Domain location=292-420; Score= -3.1; E_value=0.0017; Accession=PF07728.6; Description=ATPase family associated with various
  Pfam annotation: Domain name=Mg_chelatase; Domain location=292-426; Score=-140.3; E_value=0.0061; Accession=PF01078.13; Description =Magnesium chelatase, subunit ChlI
  Pfam module annotation: Pfam domain module=AAA::AAA_3::AAA_5::Mg _chelatase; Domain location=292-497::292-429::292-420::292-426
NSSPLAKQVFELMRKQEETRLAELEVEKVQHAINEKLRDIERKQKDAEDYRNNLQQQAQAKAQSLRYEDELARKRMQAEREVQRRQDAELVKMQEASAIRKEEARRATEQKILEEMIQTEKEKAKADQETDRIKALADAEARAHEARELEEITRRTMVEKXKGEKEKWLAAINTTFSHVEGGFRMLLTDRSKLMMGIGGVTALAAGVYTTREGARVTWGYINRILGQPSLIRESSMPKFPLPMSRLLKPSSASLSSGAGFENVILHPSLKRRIEHLARATANTKSHGAPFRNMLFYGPPGTGKTLVAREMARKSGLDYAMMTGGDVAPLGSEAVTKIHQIFDWAKKSKKGMLVFIDEADAFLCERNSIHMSEAQRSALNALLFRTGDQSRDIVLVLATNRPGDLDAAITDRIDEVIEFPLPGEEERFQLLKLYLNQYILKEEGKGSSLGALFKKQQRKIQVKDISDDLLKEAARKINGFSGREIAKLMASVQAAVYGRPDCILDPQLFSEVVEYKVTEHHQRIKLASEGMP

SEQ ID NO: 72271 - protein, 92 aa, Setaria italica
  Transcript Sequence Number=SeqID_6297
  Homolog annotation: Hit_ID=B9SRQ3; Match level="QueryCoverage=79%, HitCoverage=5%, E-value=3e-10, Identity=43%"; Hit description =Protein binding protein, putative
MAEGSCSHRRSGFSPGLAVLLSGDEAKISPQKTHLVSYHDEIGHQAVERTIERILDLPHKSVVRPPGLIDAAFVRSVLRNQARKFDLDWEQM

SEQ ID NO: 72272 - protein, 293 aa, Setaria italica
  Transcript Sequence Number=SeqID_6298
  Gene Ontology: Mol. function=exonuclease activity; Cellular component= intracellular; Biological process=regulation of transcription, DNA -dependent
  Homolog annotation: Hit_ID=Q8LAA0; Match level="QueryCoverage=77%, HitCoverage=83%, E-value=1e-68, Identity=56%"; Hit description =Exonuclease domain-containing protein
  Pfam annotation: Domain name=Exonuc_X-T; Domain location=100-249; Score=117.1; E_value=5.9e-32; Accession=PF00929.16; Description =Exonuclease
  Subcellular localization annotation: CTP_CleavageSite=32; ConfidenceScore=5.67e-01
MAAEAAPPLSSPSATAANPGRNPKRKRKPKPKAAGPSALNPNWAQLQSKLPQRPAATHLGKRKHASGPPSPSRAPAEPSPPPEAVVKLEPTSDDASLTKAVAIDCEMVGVGSDGSKSALGRVTLVNSFGNVVYDEYVRTVERIVDYRTRISGIRPKHMNKAKEFWVVQKEVAELIKGRILVGHALHNDLKVLLLSHPKKDTRDTSEYEIFRRERKRRSLKDLANEVLGAKIQQSEHCPIEDARAAMFIYNKHKKTWEKNMKEQFRFKKKLKKRGKKKPAESNANDPNVPTVLL

SEQ ID NO: 72273 - protein, 453 aa, Setaria italica
  Transcript Sequence Number=SeqID_6299
  Homolog annotation: Hit_ID=O64609; Match level="QueryCoverage=96%, HitCoverage=92%, E-value=1e-116, Identity=49%"; Hit description =F17O7.19 protein
  Pfam annotation: Domain name=NHL; Domain location=34-61; Score=1.5; E_ value=13; Accession=PF01436.13; Description=NHL repeat
  Pfam annotation: Domain name=NHL; Domain location=94-121; Score=29.1; E_value=1.7e-05; Accession=PF01436.13; Description=NHL repeat
  Pfam module annotation: Pfam domain module=NHL::NHL; Domain location =34-61::94-121
SRWTRCSTASSARSMVRYEGGYAVDTVFDGSKLGIEPHAVEVTPAGDLLVLDSINSNIYRVQLPLSRYSRPKLLAGSPEGLSGHVDGRLREARMNHPKGFTVDDRGNIYVADAMNMAIRKISDTGVTTIAGGKSIRGGHIDGPSDDAKFSTDFEIQYISSSCSLMVIDRGNQAIREIPLHDDDCAYHYEAGFPLGIALLFAAGFFGYMLALLQRRVLGMASTTDEPQIPPRPSIASIPPYQKPMNPYVRPPLIPREHEAAKQETEEGFFTSVGKLIGGAKSSVAEILGSKKKRLNSQYHHQQRRANPWPVQDSYAIPHDETPPPLDTRAPTPQKNYAFMTKEPEKIHHHVRHGHPYFNGWDSHHHHPQQQQPEQQLYHQQQHLQQHRQYSTGPQTFYEQSCEATNEIVFGAVQEVDSNRRMVEIKAVNYGDTFYEQYGMRYRNNYIGYNSNNY

SEQ ID NO: 72274 - protein, 92 aa, Setaria italica
  Transcript Sequence Number=SeqID_6300
ALADAASWSCPDCSPDSSPAPAPAGPGNNLVAAIRAIEADQTLSDQEKARRRQALLAGSAPAAADEEDDDDAADDALEIVGKNFSCVFCMKL

SEQ ID NO: 72275 - protein, 89 aa, Setaria italica
  misc_feature (53)..(53): Xaa can be any naturally occurring amino acid
  misc_feature (65)..(65): Xaa can be any naturally occurring amino acid
  Transcript Sequence Number=SeqID_6301
  Gene Ontology: Mol. function=protein kinase activity; Cellular component=transcription factor complex; Biological process=protein amino acid phosphorylation
  Homolog annotation: Hit_ID=Q86GI5; Match level="QueryCoverage=96%, HitCoverage=41%, E-value=7e-15, Identity=48%"; Hit description =Casein kinase I2
NIDGIPHLKWYGVEGEYNVMVIDLLGPSLEDLFNCSAEVLIFANMKLVILLWXLLHAFEKIVSTXVLCKSYPSEFVSYFHYCRSLLSSE

SEQ ID NO: 72276 - protein, 251 aa, Setaria italica
  Transcript Sequence Number=SeqID_6302
  Gene Ontology: Mol. function=protein serine/threonine kinase activity; Cellular component=cytoplasm; Biological process=protein amino acid phosphorylation
  Homolog annotation: Hit_ID=Q56YA9; Match level="QueryCoverage=84%, HitCoverage=65%, E-value=2e-66, Identity=61%"; Hit description =Putative casein kinase I
LESVGYLLLYFLRGSLPWQGLKAGTKKQKYDKISEKKMLTSAEVLCKSYPSEFVSYFHYCRSLRFEDRPDYSFLKKLFRDVFVREGYQFDYVFDWTALKYPQMSSNNKLVQQPSARIAGAGPSAERTDKASVGQEIRDRFTGAVEAFARRNPGSGRHGDHSRHKSHADSFGTSNEAVADSEKSRFLSRGGSSSKMPAGSSSRPTSSGDCSDQNRRWVSGSSGGSGRPSTAQRLHHSGGAENSRSSRAPRGP

SEQ ID NO: 72277 - protein, 61 aa, Setaria italica
  Transcript Sequence Number=SeqID_6303
MDTIFWMFTEHTKILASWYICFSLQCTRFDGNRRTYHVWHVPGCRLGEIALLVPGRELVED

SEQ ID NO: 72278 - protein, 75 aa, Setaria italica
  Transcript Sequence Number=SeqID_6304
  Gene Ontology: Mol. function=protein serine/threonine kinase activity; Biological process=protein amino acid phosphorylation
  Homolog annotation: Hit_ID=B9S7L3; Match level="QueryCoverage=85%, HitCoverage=13%, E-value=1e-26, Identity=79%"; Hit description =Casein kinase, putative
KVYMLLQGGNGIPHLKWYGVEGEYNVMVIDLLGPSLEDLFNCCNRKLSMKTVLMLADQLVSFIDSILGLALNPKS

SEQ ID NO: 72279 - protein, 102 aa, Setaria italica
  Transcript Sequence Number=SeqID_6305
  Gene Ontology: Mol. function=calcium ion binding; Cellular component =flagellin-based flagellum
  Homolog annotation: Hit_ID=B6SNK9; Match level="QueryCoverage=84%, HitCoverage=50%, E-value=1e-33, Identity=87%"; Hit description =Calmodulin
  Pfam annotation: Domain name=efhand; Domain location=21-49; Score =40.6; E_value=6.4e-09; Accession=PF00036.24; Description=EF hand
  Pfam annotation: Domain name=efhand; Domain location=57-85; Score =39.6; E_value=1.2e-08; Accession=PF00036.24; Description=EF hand
  Pfam module annotation: Pfam domain module=efhand::efhand; Domain location=21-49::57-85
LMARKTAGAGGDGDGADPDEELREAFKVFDKDQNGYISATELRHVMINLGEKLTDEEVEQMIREADLDGDGQVNYDEFVRMMMLSDGHGGGHAGAAAVTQHQ

SEQ ID NO: 72280 - protein, 219 aa, Setaria italica
  Transcript Sequence Number=SeqID_6306
  Gene Ontology: Cellular component=chloroplast
  Homolog annotation: Hit_ID=Q41822; Match level="QueryCoverage=100%, HitCoverage=100%, E-value=4e-80, Identity=72%"; Hit description =Protein Iojap
  Pfam annotation: Domain name=DUF143; Domain location=107-204; Score =100.8; E_value=4.7e-27; Accession=PF02410.7; Description=Domain of unknown function DUF143
  Subcellular localization annotation: CTP_CleavageSite=51; ConfidenceScore=5.65e-01
MGGAAISSHGLACAPPAAVPLNPRARRASAAGHRSSPQLLLRSDLPPPAVLCRARSQSSSSSNVNFGRGDDADKLLEDLLKQHGEVVYSSGASPAAEADDDAECLSFAVSLAKAASEIKAADIRVLCVKRLVYWTRFFIILTAFSNAQIDAISSKMRDIGEKQFSKVASGDTKPNSWTLLDFGDVVVHIFLPQQRAFYNLEEFYGNATPIELPFDTQWQ

SEQ ID NO: 72281 - protein, 96 aa, Setaria italica
  Transcript Sequence Number=SeqID_6307
  Gene Ontology: Mol. function=phosphoenolpyruvate carboxylase activity; Cellular component=cytoplasm; Biological process=carbon utilization by fixation of carbon dioxide
  Homolog annotation: Hit_ID=Q8S2Z8; Match level="QueryCoverage=93%, HitCoverage=9%, E-value=4e-47, Identity=98%"; Hit description =Putative C4 phosphoenolpyruvate carboxylase
REFVGAEFWRQLPANEPYRVVLGYVRDKLYSTRERSRHLLTSGFSDIPEDSAFKNVEEFLEPLELCYKSLCDCGDKTIADGSLLDFMRQVSTFGLS

SEQ ID NO: 72282 - protein, 79 aa, Setaria italica
  Transcript Sequence Number=SeqID_6308
  Gene Ontology: Mol. function=binding
GLKLLAFLIEWKYENVLERKEQTHGLSEELLCVMAVINLGISPSKSVKAVVYHVLSRFSSLILDLPASHSSEQQDISTD

SEQ ID NO: 72283 - protein, 88 aa, Setaria italica
  Transcript Sequence Number=SeqID_6309
SSACIKRSTAHVCRLHSKPGTNLHYNCQSSVVLDLDQWLRATFLHHSRPCCLLCLTQLACYLNCLQLFNLTSFMLSSLNYLFTSSTIA

SEQ ID NO: 72284 - protein, 359 aa, Setaria italica
  Transcript Sequence Number=SeqID_6310
  Gene Ontology: Mol. function=nucleoside-triphosphatase activity; Biological process=maintenance of fidelity during DNA-dependent DNA replication
  Homolog annotation: Hit_ID=Q259B3; Match level="QueryCoverage=96%, HitCoverage=38%, E-value=1e-171, Identity=82%"; Hit description =H0901F07.7 protein
  Pfam annotation: Domain name=MutS_V; Domain location=1-181; Score= -91.9; E_value=2.9e-08; Accession=PF00488.13; Description=MutS domain V
  Subcellular localization annotation: CTP_CleavageSite=38; ConfidenceScore=5.03e-01
GGKTASMKTLGLSSLMSKAGMFFPAKGRPRIPWFNQVLADIGDHQSLEHSLSTFSGHISRLRKIVEVVSEDSLVLIDEIGSGTDPSEGVALSTSILKYLASKVNLAIVTTHYADLSRLQSVDSRFENAAMEFCVKTLQPTYRILWGSTGNSNALSIAKSIGFDQKVLDRAQEWVEKLLPDKQKERQGLLYDSLLDERNILESQANEAASVLSQVEGLYNEIRSEADDLESRLAALRTRETQKVQQELKVVKSQMDTIIKNFEVQLKNSKLEQYNSLMRKAEAATASVVAAHQPDEITFSDDENQTLFVPQIGDKVYIQGLGGGTMATVIETLGEDGSCMVQYGKIKVQVKRSKMKLVQR

SEQ ID NO: 72285 - protein, 114 aa, Setaria italica
  Transcript Sequence Number=SeqID_6311
  Pfam annotation: Domain name=A_thal_3526; Domain location=1-53; Score= 109.6; E_value=1e-29; Accession=PF09713.2; Description=Plant protein 1589 of unknown function (A
QHLIEKCICYSMNKEECMVTLEKHANIQPVITSTVWKELEKENREFFETYRKENREFFETYKKDRPGEESTQKNPSDEKPSAPKSSEPQTTTTTTRSSLPLPRAQTTTTTRTRS

SEQ ID NO: 72286 - protein, 106 aa, Setaria italica
  Transcript Sequence Number=SeqID_6312
  Gene Ontology: Mol. function=voltage-gated potassium channel activity; Cellular component=integral to membrane; Biological process=potassium ion transport
  Homolog annotation: Hit_ID=Q06XL5; Match level="QueryCoverage=67%, HitCoverage=8%, E-value=6e-21, Identity=66%"; Hit description =Inwardly rectifying potassium channel AKT2
  Subcellular localization annotation: CTP_CleavageSite=83; ConfidenceScore=5.82e-01
MKSSSTSNTGGSGSGTDSGRSGPGSRSSGSGSGSFNLRNLSKVILPPLGGPSSGHGQSHGGSDKRVISPLDSRYRCWETFMVVLVAYSAWVYPFEVAFMNASPKGG

SEQ ID NO: 72287 - protein, 134 aa, Setaria italica
  misc_feature (99)..(99): Xaa can be any naturally occurring amino acid
  misc_feature (112)..(112): Xaa can be any naturally occurring amino acid
  misc_feature (124)..(124): Xaa can be any naturally occurring amino acid
  Transcript Sequence Number=SeqID_6313
  Gene Ontology: Mol. function=metal ion binding
  Homolog annotation: Hit_ID=B9SU90; Match level="QueryCoverage=88%, HitCoverage=16%, E-value=1e-33, Identity=59%"; Hit description=Zinc finger protein, putative
  Pfam annotation: Domain name=zf-C3HC4; Domain location=88-124; Score =17.1; E_value=0.0011; Accession=PF00097.17; Description=Zinc finger, C3HC4 type (RING finger)
WLLSDDHGDRPRPLPKIKELQGATDITERKGRPSWDYVEKEGWKWVVPPPISRKPVLSGDPETDKQIRRATKRAHMSVAERLLKEFGCSICRAVIKEPXTTPCAHNFCKTCXLGAYDSQASMRXRSRGGRTRKG

SEQ ID NO: 72288 - protein, 239 aa, Setaria italica
  Transcript Sequence Number=SeqID_6314
  Gene Ontology: Mol. function=metal ion binding; Cellular component =nucleus; Biological process=regulation of transcription from RNA polymerase II promoter
  Homolog annotation: Hit_ID=B9SU90; Match level="QueryCoverage=100%, HitCoverage=31%, E-value=1e-107, Identity=79%"; Hit description=Zinc finger protein, putative
  Pfam annotation: Domain name=YDG_SRA; Domain location=1-141; Score =241.6; E_value=2e-69; Accession=PF02182.9; Description=YDGSRA domain
DRLECRQWGAHFPHVAGIAGQSTHGAQSVALSGGYEDDEDHGEWFLYTGSGGRDLSGNKRTNKEQSSDQKFEKLNAALRISCLKGYPVRVVRSHKEKRSSYAPESGVRYDGVYRIEKCWRKIGIQGKFKVCRYLFVRCDNEPAPWTSDDHGDRPRPLPKIKELQGATDITERKGRPSWDYVEKEGWKWVVPPPISRKPVLSGDPETDKQIRRATKRAHMSVAERLLKEFGCSICRAVIK

SEQ ID NO: 72289 - protein, 112 aa, Setaria italica
  Transcript Sequence Number=SeqID_6315
  Subcellular localization annotation: CTP_CleavageSite=40; ConfidenceScore=5.00e-01
MAECRSLIEFLRAFEHHRKAADGSASASACSRSRRASSARAAAAGAFCDSTPMAVVDAVMLLAVVAALGFLVAPYLKLLLAEAGALLHPAASCLSAAAFFGAALAVAAAAVA

SEQ ID NO: 72290 - protein, 1034 aa, Setaria italica
  misc_feature (97)..(97): Xaa can be any naturally occurring amino acid
  misc_feature (159)..(159): Xaa can be any naturally occurring amino acid
  Transcript Sequence Number=SeqID_6316
  Gene Ontology: Biological process=protein localization
  Homolog annotation: Hit_ID=A2QIW3; Match level="QueryCoverage=24%, HitCoverage=10%, E-value=7e-12, Identity=23%"; Hit description =Function: promotes endosomal cycling of TGN
  Pfam annotation: Domain name=DUF1162; Domain location=57-397; Score =41.8; E_value=7.8e-10; Accession=PF06650.4; Description=Protein of unknown function (DUF1162)
  Subcellular localization annotation: CTP_CleavageSite=26; ConfidenceScore=5.24e-01
AYFYVNPALFNFSVTLISYGSKSMAVSSSDWVKRMRKQTSGAQYLDMLLEFVPGNFHSSLRLLRQDKGLLEVALFTRYTLHNISDYPLQCTPSHQKXLPAPESGMNNINLPPRHGCVLPSMSMNSWFIKSSKLRISLHSEKGSEAIIDLEALSGFTEFXSIEIQDNIAPHRMAAFGVSLQPVMYNLPVPSQVVLIVPRYVVSNESGAAIAVRQCFVEHEIDGLTVEAKQRATLQTWKPGKKREINYFDLFVKKHRDVFEDSRIFIQFCPKEPGFSWSGPICVSSIGRFFLKFRRSDGMLTDGIKRDPINDGKLKLFASVDVVQETTSFVLHFTKPPKVTLPYRIENYLNEASIMYFQKDSVESDVLCPQESEQYAWDDLSLPRKLIVRIVDTPALREIKIDKISPWKPFLKMRQNTRLNLDFSFSDGLSSRKQRFDESFGLRVFKIGYEVYADGLTRVLRICEHADNPKIEKIQRPIASLQFRISYVCIHLLDKGQSGENVQLPSTIVTAKLQHVSADSVVTDSFKHGSVAIHSVNVDEKWDGASFGSILRRNKLQDAALDENILRIVFVLNSTNSNVKQIQYCSIILQPVDLKIDEETLMKLVPFWRASLAPSGTPSTQFYFRHFEVHPIKIIASFRPGSRRTTYSSAQEALRALLHSFIKVPEVSNSAVELNGVLLNHALVTFRELLLKCAQHYSWYVLRAIYVTKGSSLLPPSFTSIFDDSASSVLDVFFDPSDGLLNVPGLTIGMFKFISQNMKSGGFSGTKRYLGDLGKTVKTAGSNALFAAVTEISDSVVRGAETNGLNGMVTGFHQGIMRLAMEPSVLGQALMEGGPDRKIKLDHSPGIDELYIEGYLQAMLDVMYKQEYLRVRVVDDQVILKNLPPNSALINEIVDNVKSFLVSKALLKGDSSTLRPLRHLRNEREWRIAPTVLTLCEHLFVSFAVRVLHREASKAIGEVMARAKKPATGGEGEGDSSPSGGVLLKRNRLWTVGRFAVSGMVAYVDGRLCRHIPNPIARRIVSGFLLSFIENRGNE

SEQ ID NO: 72291 - protein, 90 aa, Setaria italica
  Transcript Sequence Number=SeqID_6317
  Homolog annotation: Hit_ID=B9STU6; Match level="QueryCoverage=85%, HitCoverage=4%, E-value=4e-09, Identity=45%"; Hit description =Mom(Plant), putative
GSTHAFNIALCWRAASLLKHKISRTESLTLAAKNFYECTEELAEYVYAKLRILKKKFARRAGETSKQNHTTSVSNISTCEQETSVELMMN

SEQ ID NO: 72292 - protein, 209 aa, Setaria italica
  Transcript Sequence Number=SeqID_6318
  Subcellular localization annotation: CTP_CleavageSite=56; ConfidenceScore=5.80e-01
PKFISPSAAQARAHTPPIRQTAQASQQVPMRTSVGGPSASSIALSSTCRPSVPRLRVQAPQVEQSSSLSQLSRSSLPSSQVVQPPPLIPGNLFRTTSATLSHMPPPRGSYGGQSELAPRAPAPHLQFKSPRANSMPPGNQQQLPTTRVEATSPRTQPVLAANSSPPDSHLGPVATSGMSSLHSALPASSLPSSSHTNHLVQRVLPAPNP

SEQ ID NO: 72293 - protein, 1123 aa, Setaria italica
  misc_feature (938)..(938): Xaa can be any naturally occurring amino acid
  Transcript Sequence Number=SeqID_6319
  Gene Ontology: Mol. function=carbonate dehydratase activity
  Homolog annotation: Hit_ID=B9I6P2; Match level="QueryCoverage=90%, HitCoverage=50%, E-value=1e-51, Identity=33%"; Hit description =Chromatin remodeling complex subunit
KNKSPSLSHCLLSWGASFLFNRLEEFQNPSYSCKGSDAAELFVDNVASEFSTKLPNKVELSTEIDNTVISQAYLRGSFYSRNIVVVGEREGITSVDGDLPKFWAYWSSLLHGRSPRWQHVSEPSQRSRRKIQNVEDQSKNTEEQLEVPSEETDEARIKRRRTGEVMDSSPKVPPCKNKDTILSGNNTPSSSHQISVEDTWQELERNNLHGTQKGLHVQLKPELSKLYKLLQLPENVKSLCEEFLEYILKNHQISQEPKGILHAFNIALCWRAASLLKHKISRTESLTLAAKNLNYECTEELAEYVYAKLRILKKKFARRAGETSKQNHTTSVSNISTCEQETSVELRNDELIPSTSIDSNFETGSNREATGDFWTEDMVSGEKELLSDPGTRREECLSRDELLSRIMDNRIKLVDKVFYLRGKSIQDRHSNEVSFLDRHRQKEVAKLREACSLVVEHLRRSQNHIVQEDRDGKIKQVIKWFTMLLYAFLEHMKCQRNRLDTQQSATWTKESHLKEETLQAAKSGQLDHTFDQHIPLPDSEFAMEEFSHFREVGGSCHVHAAAPTPPSLDDNSAMEITFVRSVNTSEVNEEEARNRPAEVLIQGPASEVVGLSVNGICDVSDGIDSQRDASLAVHSLEPPGGDNRSTHVEESTPGVPLQDGTSEHLGDAAVEVDTENRNTALTDSPQFDTPALTATSRQATLPVSGEVEIQNNLVTQCAQQSLVSSQLSQGESEQADLSGVPSAQPLQSERQQSIPVSNNLHERAQPDQSQPSHQTDAAPGSVQSAELFPVTSMMFNHPPIDAEPLKNELHRLRLYMDTVHKTHELKKTQLRMECSQEIEKVKRKYDLLIEEHDSTHLQQKKTLDNFYEKVLCNQSLAEDFRAKFISPSAAQARAHTPPIRQTAQASQQVPMRTSVGGPSASSIALSSTCRPSVPRLKXPSTVVTTSATLSHMPPPRGSYGGQSELAPRAPAPHLQFKSPRANSMPPGNQQQLPTTRVEATSPRTQPVLAANSSPPDSHLGPVATSGMSSLHSALPASSLPSSSHTNHLVQRVLPAPNPALQVVAPPGPSTATPSITAGMQGSLSLDAWLTARLGLSGDAPRATAPATNGSDIDVVCLSDDESE

SEQ ID NO: 72294 - protein, 110 aa, Setaria italica
  Transcript Sequence Number=SeqID_6320
HVLGNDSSSTSAQQRSSLVQVATLDTENQQPDQFATLMDVCPGEPTASNDMVDVVPVPASNGIEMHGADGQSNSRLQGSSSISNFERFGARDDLHVSSPSNTEPIPSTAG

SEQ ID NO: 72295 - protein, 106 aa, Setaria italica
  misc_feature (25)..(25): Xaa can be any naturally occurring amino acid
  Transcript Sequence Number=SeqID_6321
  Gene Ontology: Mol. function=methyltransferase activity; Biological process=metabolic process
  Homolog annotation: Hit_ID=B9SLV0; Match level="QueryCoverage=98%, HitCoverage=36%, E-value=3e-36, Identity=68%"; Hit description =Methyltransferase, putative
FVEVFAEIFRVLKPGGVCIVSFSNXRMFYEKAIAAWREGTAYSRVQLVTQYFQCVEGFTQPEVIRKLPSAGGSASVSPLDAVMRLFGMASSDPFYAVISYRNFKPM

SEQ ID NO: 72296 - protein, 90 aa, Setaria italica
  Transcript Sequence Number=SeqID_6322
  Gene Ontology: Mol. function=nucleotide binding; Cellular component =chloroplast
  Homolog annotation: Hit_ID=C1K241; Match level="QueryCoverage=95%, HitCoverage=19%, E-value=6e-45, Identity=94%"; Hit description =Chloroplast ribulose-1,5-bisphosphate carboxylase/oxygenase activase
RRTPRVPIVVTGNDFSTLYAPLIRDGRMDKFYWAPTREDRIGVCKGIFRTDGVPDEAVVKLVDTFPGQSIDFFGALRARVYDDEVRRWVA

SEQ ID NO: 72297 - protein, 116 aa, Setaria italica
  Transcript Sequence Number=SeqID_6323
  Gene Ontology: Mol. function=nucleotide binding; Cellular component =chloroplast
  Homolog annotation: Hit_ID=Q9ZT00; Match level="QueryCoverage=46%, HitCoverage=12%, E-value=2e-21, Identity=85%"; Hit description =Ribulose bisphosphate carboxylase/oxygenase activase, chloroplastic
IENISRKLVNSKDGPPTFQQPKMTLEKLLEYGHMLVAEQENVKRVQLADKYLSKQPGSSGPGKLVLFFPPNSCTSPGRHAWTPARCIEAVHQRHVVEAPTSTTVAPEHAAAVAHPW

SEQ ID NO: 72298 - protein, 117 aa, Setaria italica
  Transcript Sequence Number=SeqID_6324
ERRAASGGGASVTDHSCLPFLARSPKEEEEEAAPRRRDGGRLLLHRRSSSLHPGQLPREEAQADASDDGGGRELLPCQELQRRQQVQGHGRPDPHPANHHRRAAAAPLAARPPRPRL

SEQ ID NO: 72299 - protein, 108 aa, Setaria italica
  misc_feature (59)..(59): Xaa can be any naturally occurring amino acid
  Transcript Sequence Number=SeqID_6325
  Gene Ontology: Mol. function=nucleotide binding; Cellular component =chloroplast
  Homolog annotation: Hit_ID=Q9ZT00; Match level="QueryCoverage=64%, HitCoverage=15%, E-value=3e-25, Identity=77%"; Hit description =Ribulose bisphosphate carboxylase/oxygenase activase, chloroplastic
MSKKIFSLLKVSSKQVRWWVAETGIENISRKLVNSKDGPPTFQQPKMTLEKLLEYGHMXLVAEQENVKRVQLADKYLSKQPGSSGPGMTSWRREDLCFSNQSSGGAWI

SEQ ID NO: 72300 - protein, 434 aa, Setaria italica
  misc_feature (17)..(17): Xaa can be any naturally occurring amino acid
  misc_feature (128)..(128): Xaa can be any naturally occurring amino acid
  misc_feature (235)..(235): Xaa can be any naturally occurring amino acid
  misc_feature (262)..(262): Xaa can be any naturally occurring amino acid
  misc_feature (359)..(359): Xaa can be any naturally occurring amino acid
  Transcript Sequence Number=SeqID_6326
  Gene Ontology: Mol. function=nucleotide binding; Cellular component =chloroplast
  Homolog annotation: Hit_ID=Q9ZT00; Match level="QueryCoverage=100%, HitCoverage=100%, E-value=0.0, Identity=86%"; Hit description =Ribulose bisphosphate carboxylase/oxygenase activase, chloroplastic
  Pfam annotation: Domain name=AAA; Domain location=155-355; Score =74.1; E_value=5.1e-19; Accession=PF00004.21; Description=ATPase family associated with various cellular activities (AAA)
  Subcellular localization annotation: CTP_CleavageSite=48; ConfidenceScore=5.60e-01
MAAAFSSTVGAPASTPXSFLGKKLRSTQATAAVNYHVKSSSANRFKVMAAKDVDETKQTDKDRWRGLVNDISDDQQDITRGKGFVDSLFQAPMGDGTHEAVLSSYEYLSQGLRDYTGWDNMKDGFYIXPRPFMDKLVVHLSKNFMTLPNIKVPLILGIWGGKGQGKSFQCELVFAKMGITPIMMSAGELESGNAGEPAKLIRQRYREAADIIKKGKMCCLFINDLDAGAGRMGGXTTQYTVNNQMVNATLMNIADNPTNVQXSPAMYNKEENPRVPIIVTGNDFSTLYAPLIRDGRMEKFYWAPTREDRIGVCKGIFRTDGVPEADVVKLVDTFPGQSIDFFGALRARVYDDEVRKWVXETGIENIGKKLVNSKDGPPTFDQPKMTIEKLLEYGHMLVEEQENVKRVQLADKYLSEAALGEANEDAMKTGAFFK

SEQ ID NO: 72301 - protein, 67 aa, Setaria italica
  Transcript Sequence Number=SeqID_6327
  Homolog annotation: Hit_ID=A9UIE7; Match level="QueryCoverage=80%, HitCoverage=51%, E-value=1e-11, Identity=66%"; Hit description =Thionin-like protein
PAQEVCVDTTKEVPRDDTCICSKNCACAGMCILQGEGDVKTCFVDCVLKNDCQCPPKDQGAEKKTDG

SEQ ID NO: 72302 - protein, 78 aa, Setaria italica
  Transcript Sequence Number=SeqID_6328
  Homolog annotation: Hit_ID=A9UIE7; Match level="QueryCoverage=100%, HitCoverage=78%, E-value=1e-17, Identity=56%"; Hit description =Thionin-like protein
MASAAKTKMVAIGIMMAILFVGIASATPAQEVCVDTTKEVPRDDTCICSKNCACAGMCILQGEGDVKTCFVDCVLKND

SEQ ID NO: 72303 - protein, 66 aa, Setaria italica
  Transcript Sequence Number=SeqID_6329
  Subcellular localization annotation: CTP_CleavageSite=31; ConfidenceScore=5.03e-01
LDAQIQPFQFYRNIQDSFRFLAFKISSFVLQASILKPVEPPWPPLMKSTTTSISLAAFSLPGLSRK

SEQ ID NO: 72304 - protein, 120 aa, Setaria italica
  Transcript Sequence Number=SeqID_6330
  Gene Ontology: Mol. function=glutathione transferase activity; Biological process=response to stress
  Homolog annotation: Hit_ID=Q9FQB0; Match level="QueryCoverage=99%, HitCoverage=50%, E-value=3e-51, Identity=79%"; Hit description =Glutathione S-transferase GST 29
  Pfam annotation: Domain name=GST_C; Domain location=2-87; Score=11.5; E_value=0.0073; Accession=PF00043.17; Description=Glutathione S -transferase, C-terminal domain
PFWLSLWTEGEVQEGFVKEIKENLKLLEGQVKGKRFFGGDAVGYLDIAASGFAHWLPVLEEVAGVSLVTDEEFPDLCRWGQEYASHEVVKQCLPDREKLLARFTANKDLFVATAKSMAPK

SEQ ID NO: 72305 - protein, 113 aa, Setaria italica
  Transcript Sequence Number=SeqID_6331
  Gene Ontology: Mol. function=transcription regulator activity; Cellular component=nucleus; Biological process=regulation of transcription
  Homolog annotation: Hit_ID=Q10D98; Match level="QueryCoverage=95%, HitCoverage=17%, E-value=2e-43, Identity=71%"; Hit description =NOT2/NOT3/NOT5 family protein, expressed
  Pfam annotation: Domain name=NOT2_3_5; Domain location=2-105; Score =87.5; E_value=4.7e-23; Accession=PF04153.10; Description=NOT2  NOT3 NOT5 family
WVWYYIVTNPFLLQPLVFQKLHMLTLFYIFYSMPKDEAQLYAAYELCNRGWFYHKELRSWFTRIPNVEPLVKTPLYERGSYGRFDPQIWDTVRKDNFLLQYELVEKRPALPSV

SEQ ID NO: 72306 - protein, 618 aa, Setaria italica
  Transcript Sequence Number=SeqID_6332
  Gene Ontology: Mol. function=transcription regulator activity; Cellular component=nucleus; Biological process=regulation of transcription
  Homolog annotation: Hit_ID=Q10D98; Match level="QueryCoverage=97%, HitCoverage=96%, E-value=0.0, Identity=73%"; Hit description =NOT2/NOT3/NOT5 family protein, expressed
  Pfam annotation: Domain name=NOT2_3_5; Domain location=466-605; Score= 210.1; E_value=5.7e-60; Accession=PF04153.10; Description=NOT2  NOT3 NOT5 family
  Subcellular localization annotation: CTP_CleavageSite=12; ConfidenceScore=5.57e-01
MSGLLNSNLNSSASNLTDSTGRPFTASFSGQSGSIPGFHHSGLHNIHGSFNLPSMPGPLAQRNGAMSGLPSSGVQQPGGSISGRFTSNNLPVAMSQIPHAHSGVSGRGMNVGAGPAFSSSMSIGGNIQSLSSSLGAGGSRNSVPGMSVSPSLGNLGPRITSSVGNIVGGSNIGRNISSGGLSVPSIASRMNLSGNAASGSLNVQGSSRIMNGLLQQASPQLINMFGSSYPTSGGSLSQNQIQAGNNSLSSMGMLHDANDTAPFDINDFPQLTGRPNSAGGPQGQYGSLRKQGVGVNTIVQQNQEFSIQNEDFPALPGFKGNSSDYAMELHHKEQLHENVPVMQTQQYPMARSVGFNLGSSYPPNRQQHLQGANSVQNAGTQNIGLRPLSQTPSLASYDQLLQQYQQPQTQNHFRMQQMPSAAHSFRDQIQKIQGGPSPPDPYGLLGLLGVIRMNDAELVSLALGIDLTTLGLNLNSPDNLYKTFGSPWSNEPAKGDPDFHIPACYFSEQSSPLQPLVFQKLHMLTLFYIFYSMPKDEAQLYAAYELCNRGWFYHKELRSWFTRIPNVEPLVKTPLYERGSYGRFDPQIWDTVRKDNFLLQYELVEKRPALPSVAQNVR

SEQ ID NO: 72307 - protein, 80 aa, Setaria italica
  Transcript Sequence Number=SeqID_6333
  Gene Ontology: Mol. function=serine-type endopeptidase activity; Cellular component=plasma membrane
  Homolog annotation: Hit_ID=Q9XI10; Match level="QueryCoverage=92%, HitCoverage=8%, E-value=6e-09, Identity=45%"; Hit description =F8K7.10 protein
  Pfam annotation: Domain name=PD40; Domain location=25-72; Score=27.0; E_value=7.9e-05; Accession=PF07676.4; Description=WD40-like Beta Propeller Repeat
GRQNHTNLYIMEDAEEGEWGEGTVTQLTDGPWVDTHCSWSPSGDWIVFSSSRDKDPDAQPGTLDAGYFSIYIVNAAERDP

SEQ ID NO: 72308 - protein, 348 aa, Setaria italica
  Transcript Sequence Number=SeqID_6334
  Gene Ontology: Mol. function=amino acid transmembrane transporter activity; Cellular component=integral to membrane; Biological process=amino acid transport
  Homolog annotation: Hit_ID=Q96241; Match level="QueryCoverage=100%, HitCoverage=65%, E-value=1e-138, Identity=68%"; Hit description =Amino acid transport protein AAT1
  Pfam annotation: Domain name=AA_permease; Domain location=10-347; Score=-44.8; E_value=0.00018; Accession=PF00324.13; Description =Amino acid permease
  Pfam annotation: Domain name=Trp_Tyr_perm; Domain location=13-308; Score=-275.7; E_value=0.054; Accession=PF03222.5; Description =Tryptophantyrosine permease family
  Pfam module annotation: Pfam domain module=AA_permease::Trp_Tyr_perm; Domain location=10-347::13-308
DMRRDLTWWDLVWFGVGAVIGAGIFVLTGQEAHDAVGPAIVVSYVISGVSAMLSVFCYTEFGVEIPVAGGSFAYLRVELGDFMAFVAAGNILLEYCIGGAAVARAWTSYFATLLNHKPNDFRIHASSLSAEYSELDPIAVVVIALVCVFAVVSTKGTSRFNYVLSIVHIAVIIFIIVAGLTRADTANMRDFMPYGVRGIFSASAVLFFAYIGFDAVSTMAEETKNPARDIPIGLVGAMTLTTALYCVLAVTLCLMQPYGAIDKDAPFSVAFADRGMDWAKYIVAFGALKGMTTVLLVGAVGQARYLTHIARTHMMPPWLAQVHPRTGTPVNATVAMLAATAVIAFFTD

SEQ ID NO: 72309 - protein, 42 aa, Setaria italica
  Transcript Sequence Number=SeqID_6335
ASFVIQRKILVTSAVGSDNIKRYIQEPKDTIGHRRTGGSWYL

SEQ ID NO: 72310 - protein, 157 aa, Setaria italica
  Transcript Sequence Number=SeqID_6336
  Gene Ontology: Mol. function=protein binding; Cellular component=cis -Golgi network; Biological process=ER to Golgi vesicle-mediated transport
  Homolog annotation: Hit_ID=A8IA96; Match level="QueryCoverage=91%, HitCoverage=95%, E-value=2e-45, Identity=58%"; Hit description =Component of TRAPP complex
  Pfam annotation: Domain name=Sedlin_N; Domain location=11-147; Score=- 48.6; E_value=0.044; Accession=PF04628.5; Description=Sedlin, N -terminal conserved region
  Pfam annotation: Domain name=Sybindin; Domain location=6-148; Score =227.9; E_value=2.7e-65; Accession=PF04099.4; Description=Sybindin -like family
  Pfam module annotation: Pfam domain module=Sedlin_N::Sybindin; Domain location=11-147::6-148
MALAAIYSLFIINKSGGLIYYKDYCSAGRMDTNDSLRLASLWHSMHAISQQLSPIPGCTGIDLLQAHNFNLHCFQSLTDYHDPCLPHMGYGTKIFVVCETGAQNMETLLKVIYELYTDFVLKNPFYEMEMPIRCELFDLNLAQVIQKHRVALLGGKT

SEQ ID NO: 72311 - protein, 143 aa, Setaria italica
  Transcript Sequence Number=SeqID_6337
  Gene Ontology: Mol. function=protein binding; Cellular component=cis -Golgi network; Biological process=ER to Golgi vesicle-mediated transport
  Homolog annotation: Hit_ID=A8IA96; Match level="QueryCoverage=91%, HitCoverage=94%, E-value=3e-48, Identity=64%"; Hit description =Component of TRAPP complex
  Pfam annotation: Domain name=Sedlin_N; Domain location=11-135; Score=- 27.6; E_value=0.00088; Accession=PF04628.5; Description=Sedlin, N -terminal conserved region
  Pfam annotation: Domain name=Sybindin; Domain location=6-136; Score =251.8; E_value=1.7e-72; Accession=PF04099.4; Description=Sybindin -like family
  Pfam module annotation: Pfam domain module=Sedlin_N::Sybindin; Domain location=11-135::6-136
MALAAIYSLFIINKSGGLIYYKDYVSAGRMDTNDSLRLASLWHSMHAISQQLSPTPGCTGIDLLQAHNFDLHCFQSLTGTKFFVVCETGAPNMEMLLKVIYELYTDFVLKNPFYEMEMPIRCELFDLNLAQLIQKDRVALLGR

SEQ ID NO: 72312 - protein, 141 aa, Setaria italica
  Transcript Sequence Number=SeqID_6338
KPYFDLPSEQANESSSSGGTNSIYAEPIPVTSHLQRSALLRRHESFTEGAPFLSDFLQDARPSRFRPYFVTENMANEEITDPVLEGETSEKSNSKASSVQDSDSASSVADQESQKDVLEDFSNQGQQSSFSQTDEHAHIAR

SEQ ID NO: 72313 - protein, 145 aa, Setaria italica
  Transcript Sequence Number=SeqID_6339
  Gene Ontology: Mol. function=protein kinase activity; Biological process=protein amino acid phosphorylation
  Homolog annotation: Hit_ID=B9RBL3; Match level="QueryCoverage=73%, HitCoverage=13%, E-value=6e-25, Identity=54%"; Hit description =Leucine-rich repeat protein, putative
VLILLVGSIITKLLRLVEEKRYLQNNAAETEDSEDDVYSFGCILLEALMGPKLHEKGGPFVLNDLVASISCQEEREEVLDSVVIGTSSQDSLSIVVSIMIKCLSAQSSTRPSIEEVLWNLQYAAQVQLKLLICSHCISNNRPRRA

SEQ ID NO: 72314 - protein, 316 aa, Setaria italica
  Transcript Sequence Number=SeqID_6340
  Gene Ontology: Mol. function=protein kinase activity; Cellular component=integral to membrane; Biological process=protein amino acid phosphorylation
  Homolog annotation: Hit_ID=Q53M68; Match level="QueryCoverage=97%, HitCoverage=53%, E-value=1e-116, Identity=70%"; Hit description =Leucine Rich Repeat family protein, expressed
  Pfam annotation: Domain name=LRR_1; Domain location=113-132; Score =7.2; E_value=13; Accession=PF00560.25; Description=Leucine Rich Repeat
  Pfam annotation: Domain name=LRR_1; Domain location=134-156; Score =9.0; E_value=5.6; Accession=PF00560.25; Description=Leucine Rich Repeat
  Pfam annotation: Domain name=LRR_1; Domain location=158-180; Score =13.7; E_value=0.72; Accession=PF00560.25; Description=Leucine Rich Repeat
  Pfam annotation: Domain name=LRR_1; Domain location=18-40; Score =15.5; E_value=0.22; Accession=PF00560.25; Description=Leucine Rich Repeat
  Pfam annotation: Domain name=LRR_1; Domain location=182-204; Score =8.9; E_value=5.9; Accession=PF00560.25; Description=Leucine Rich Repeat
  Pfam annotation: Domain name=LRR_1; Domain location=206-225; Score =6.1; E_value=21; Accession=PF00560.25; Description=Leucine Rich Repeat
  Pfam annotation: Domain name=LRR_1; Domain location=42-64; Score=4.7; E_value=38; Accession=PF00560.25; Description=Leucine Rich Repeat
  Pfam annotation: Domain name=LRR_1; Domain location=66-88; Score =12.9; E_value=1; Accession=PF00560.25; Description=Leucine Rich Repeat
  Pfam annotation: Domain name=LRR_1; Domain location=90-111; Score =10.1; E_value=3.6; Accession=PF00560.25; Description=Leucine Rich Repeat
  Pfam annotation: Domain name=SKG6; Domain location=259-294; Score =10.3; E_value=0.049; Accession=PF08693.2; Description=Transmembrane alpha-helix domain
  Pfam module annotation: Pfam domain module=LRR_1::LRR_1::LRR_1::LRR _1::LRR_1::LRR_1::LRR_1::LRR_1::LRR_1::SKG6; Domain location=113 -132::134-156::158-180::18-40::182-204::206-225::42-64::66-88::90 -111::259-294
VSLGLWGPLPDKIHRLSSLEVLDLSSNFLYGSIPPKLSVMSKLHTVTLDRNYFNESVPDWLDSFSNLTVLRLQSNRLKGSIPASIGKAAMLTELALAGNSISGDVPNLAYLNKLEMLDLRDNQLDGDLPEMPTALVTILLSKNSLKGEIPKQFGELNRLQHLDLSFNFLVGSPPEGLFALPNISYLNLAANMLSGSLSSSLTCSSTLGFVDLSTNRLTGDLPACLNGNMNNKVVKFDGNCFSVGPAHQHEAKYCQQSHKGSNKDVGLVVTVVGILFIVLVLSLVLMASNRRSCQKVLAEQQFLQKHKQVLISNFLV

SEQ ID NO: 72315 - protein, 432 aa, Setaria italica
  misc_feature (394)..(394): Xaa can be any naturally occurring amino acid
  Transcript Sequence Number=SeqID_6341
  Gene Ontology: Mol. function=protein kinase activity; Cellular component=plasma membrane; Biological process=protein amino acid phosphorylation
  Homolog annotation: Hit_ID=B9RBL3; Match level="QueryCoverage=97%, HitCoverage=54%, E-value=1e-106, Identity=47%"; Hit description =Leucine-rich repeat protein, putative
  Pfam annotation: Domain name=Pkinase; Domain location=140-409; Score =18.2; E_value=1.4e-09; Accession=PF00069.17; Description=Protein kinase domain
  Pfam annotation: Domain name=Pkinase_Tyr; Domain location=140-409; Score=-41.7; E_value=5.9e-11; Accession=PF07714.9; Description =Protein tyrosine kinase
  Pfam annotation: Domain name=SKG6; Domain location=44-79; Score=10.3; E_value=0.049; Accession=PF08693.2; Description=Transmembrane alpha -helix domain
  Pfam module annotation: Pfam domain module=Pkinase::Pkinase _Tyr::SKG6; Domain location=140-409::140-409::44-79
VNYLVPCFVLNGNMNNKVVKFDGNCFSVGPAHQHEAKYCQQSHKGSNKDVGLVVTVVGILFIVLVLSLVLMASNRRSCQKVLAEQQFLQKHKQDNSTSGMSSELLVNARCISQAVKLGTQIQPSYRIFSLEELKEATKSFERSAFLGEGAIGKLYKGKLENGTLIAIRCLALHQRYSIRNLKLRLDLLAKLRHPNLVCLLGHCIDSAVDESSVKRVFLVYEYVPGGTLSSYLSGSSPEKTLKWCDRLQLLIAIAKAVHFLHTGIIPGSLYNRLKSSSILLDEHLVSKLSDYGLSIITEEIYKHEVVEEKRYLQNNAAETEDSEDDVYSFGCILLEALMGPKLHEKGGPFVLNDLVASISCQEEREEVLDSVVIGTSSQDSLSIVVSIMIKCLSXQSSTRPSIEEVLWNLQYAAQVQVTTDGDQRSEVSSQAC

SEQ ID NO: 72316 - protein, 276 aa, Setaria italica
  misc_feature (119)..(119): Xaa can be any naturally occurring amino acid
  Transcript Sequence Number=SeqID_6342
  Gene Ontology: Mol. function=protein dimerization activity
  Homolog annotation: Hit_ID=Q2QPA8; Match level="QueryCoverage=72%, HitCoverage=24%, E-value=7e-31, Identity=42%"; Hit description=HAT family dimerisation domain containing protein
  Pfam annotation: Domain name=hATC; Domain location=107-197; Score =54.0; E_value=5.7e-13; Accession=PF05699.6; Description=hAT family dimerisation domain
SFFCLVDGDVKPSMGFLYGELLKVNREIKEAYGNVQSRYNEVIAIIDKKMKGRLDSPLHLTAYLLNPYYSYGNLSIFDKATITEGFISCVETFYHHDEKQDEAVNTELKKFQNREGNFXKKLARSCEKFDYNPASWWRLYETEAPALQKLATRILSLTSSSSGCEGNWSTFEMIHTKKRNRLTTTRLNKLVFVQFNSKLINKKERIMSKKTTDVLLSSETTEAQGFLYEDGDNCATVVYRDEEDEEMEGTGIPWSVIGDAVGADQQLELRRSARVR

SEQ ID NO: 72317 - protein, 84 aa, Setaria italica
  Transcript Sequence Number=SeqID_6343
KLVKVSKVSLALQTDYPFLTLKHLMPNLKIFNFKYNIVDMYLILILATSDWSICGMVLSIPIFNVLEHVEAAVIYICQPKKRKK

SEQ ID NO: 72318 - protein, 65 aa, Setaria italica
  Transcript Sequence Number=SeqID_6344
  Subcellular localization annotation: CTP_CleavageSite=39; ConfidenceScore=5.02e-01
VSIQVALSTTSVNNSRFGGPFNACKLSTYSLFIAHLFVLISIIQELVLISLFQYFAHFRGASKVS

SEQ ID NO: 72319 - protein, 62 aa, Setaria italica
  Transcript Sequence Number=SeqID_6345
MKMAVADIYDCGFYMLKYIEYWDGKTMPQIDQSEVANIRIKYMSTMLYLKLNILNWHQVLKG

SEQ ID NO: 72320 - protein, 93 aa, Setaria italica
  Transcript Sequence Number=SeqID_6346
  Gene Ontology: Cellular component=chloroplast
LSTDWRCACLYHHQGEYLYIGAALWIVVFCIIEMQKPDKPHNFEPEIYMMERSARDKLIADYNSMDIWDFNEKYGELWDFTVNTSREDIVKSS

SEQ ID NO: 72321 - protein, 139 aa, Setaria italica
  Transcript Sequence Number=SeqID_6347
  Gene Ontology: Cellular component=chloroplast
CGVTNPANNCDDDALSEDKKGFWEDVSEWYQEAEPPQGFQALISWAFPPAIILGMAFNVPGEYLYIGAALWIVVFCIIEMQKPDKPHNFEPEIYMMERSARDKLIADYNSMDIWDFNEKYGELWDFTVNTSREDIVKSS

SEQ ID NO: 72322 - protein, 223 aa, Setaria italica
  Transcript Sequence Number=SeqID_6348
  Gene Ontology: Cellular component=chloroplast
  Subcellular localization annotation: CTP_CleavageSite=53; ConfidenceScore=5.32e-01
NVVSGISASPSAAAGARHRHGAVKQLRIKVAQPQQQRLHGRRRQSGGRGGAVVARAGPGALSEIEPDLNEDPIDRWATPGISPEDFEFGVYDGHHTYHEGQDKKGFWEDVSEWYQEAEPPQGFQALISWAFPPAIILGMAFNVPGEYLYIGAALWIVVFCIIEMQKPDKPHNFEPEIYMMERSARDKLIADYNSMDIWDFNEKYGELWDFTVNTSREDIVKSS

SEQ ID NO: 72323 - protein, 86 aa, Setaria italica
  Transcript Sequence Number=SeqID_6349
QLIQESKIDSTGNRQLIYSIVLRHHLCLVLHYHGSSRENAENHTLSLTCARARRLHTRYNGPLPGSRVPPFHGFVLVFFTRRTNSR

SEQ ID NO: 72324 - protein, 79 aa, Setaria italica
  Transcript Sequence Number=SeqID_6350
  Homolog annotation: Hit_ID=UPI0001A7B041; Match level="QueryCoverage =100%, HitCoverage=3%, E-value=2e-28, Identity=75%"; Hit description =EMB2016 (embryo defective 2016)
MGRPEPVVLFAQTILHSQLDEYVDEVLFSEPVVITACEFLEQNAAPSTPNISLVGATSPPSFALEVFVHCDGESRFRRL

SEQ ID NO: 72325 - protein, 107 aa, Setaria italica
  Transcript Sequence Number=SeqID_6351
THECTYMHTWIQIKLHCDSFYAPSNFSCGIYRMFLQSGNSLFILTSVSLFIVYLLYLKTHVSRGIISTLSSPLYHVLVESIVCSFNPAIHSFMNKPKIIMSNAVKGL

SEQ ID NO: 72326 - protein, 100 aa, Setaria italica
  Transcript Sequence Number=SeqID_6352
CFFKTIRFLLNSLYLSKIIGYLCIRDSPFLFVLLVTWTQHGSACANVPQQEIRTHNAADGAFQRKCIDNIATKFGFGIYVLFFCLCIHKGKVNGSPFHHS

SEQ ID NO: 72327 - protein, 52 aa, Setaria italica
  Transcript Sequence Number=SeqID_6353
AVVFIICRLDLLNWLPGLCFHLVDSYATFKYINTKRYHVALLHLHFLYEIRN

SEQ ID NO: 72328 - protein, 214 aa, Setaria italica
  Transcript Sequence Number=SeqID_6354
  Gene Ontology: Mol. function=hydrolase activity, hydrolyzing O -glycosyl compounds; Cellular component=extracellular region; Biological process=cell wall organization and biogenesis
  Homolog annotation: Hit_ID=B6U0J0; Match level="QueryCoverage=100%, HitCoverage=39%, E-value=1e-109, Identity=88%"; Hit description =Endoglucanase 1
  Pfam annotation: Domain name=Glyco_hydro_9; Domain location=1-214; Score=-129.8; E_value=7.9e-09; Accession=PF00759.11; Description =Glycosyl hydrolase family 9
ELLWAALWLHRATGRADYLDYVVDNAHSFGGTGWAINEFSWDVKYAGVQILATRLLLRGEHAARHRSTLEQYRAKAEHYVCACLGRNADGGADANVERSPGGMLYIRQWNNMQYVTSAAFLLSAYSDYMAEAGVVTVQCGGGEAVAAEEVFALARAQVDYVLGTNPRGVSYLVGYGPKYPNRVHHRAASIVPYKHSKEFIGCTQGFDHWFGRRS

SEQ ID NO: 72329 - protein, 180 aa, Setaria italica
  Transcript Sequence Number=SeqID_6355
  Gene Ontology: Mol. function=hydrolase activity, hydrolyzing O -glycosyl compounds; Cellular component=extracellular region; Biological process=cell wall organization and biogenesis
  Homolog annotation: Hit_ID=Q6H3Z9; Match level="QueryCoverage=96%, HitCoverage=31%, E-value=9e-62, Identity=69%"; Hit description =Endoglucanase 22
  Pfam annotation: Domain name=Glyco_hydro_9; Domain location=1-180; Score=-238.6; E_value=0.0011; Accession=PF00759.11; Description =Glycosyl hydrolase family 9
DLDAGVQILAARLLLKGEHSPRHRETLERYRAKAEHYVCACMGRNAAGGAEANVERSPGGMLYVRQWNNLQYVSSAAFLLTAYSRYLSDSAGPLLLRCPRGAAAPADLLALARSQADYILGRNPLGLSYMVGYGRRYPVRVHHRGASIVAHKANNRFIGCMQGFDDWFGRGRANPKCSPA

SEQ ID NO: 72330 - protein, 548 aa, Setaria italica
  misc_feature (144)..(144): Xaa can be any naturally occurring amino acid
  misc_feature (401)..(401): Xaa can be any naturally occurring amino acid
  misc_feature (467)..(467): Xaa can be any naturally occurring amino acid
  Transcript Sequence Number=SeqID_6356
  Gene Ontology: Mol. function=hydrolase activity, hydrolyzing O -glycosyl compounds; Cellular component=extracellular region; Biological process=cell wall organization and biogenesis
  Homolog annotation: Hit_ID=B6U0J0; Match level="QueryCoverage=88%, HitCoverage=88%, E-value=0.0, Identity=72%"; Hit description =Endoglucanase 1
  Pfam annotation: Domain name=Glyco_hydro_9; Domain location=39-513; Score=828.2; E_value=4.9e-246; Accession=PF00759.11; Description =Glycosyl hydrolase family 9
MSGAGAASSCRRRQLGVAVLLLLVALAAVLGGAEGKAHNYEDALQKSLLYFEAQRSGRLPHSQRVAWRHHSGLTDGLEQGVDLVGGYYDAGDHVKFGLPMAFTVTMLSWSLIEYGGDVAAAGELGHALEAVKWGTDYFIKAHTXPDELWAEVGDGDTDHYCWQRPEDMTTSRQAYKVDRDHPGSDVAGETAAAMAAASIVFRDSNPHYAHLLLHHAQQLFEFGDRYQGTYDSSIAEVRSYYASVSGYRDELLWAALWLHRATGRAEYLRYAVDNAHSFGGVGWAMTEFSWDVKYAGVQVLAAKLLLEGDPQALPHRAALEQYKAKAEHYLCACMGRNAAGGAEANVERSPGGMLYVRQWNNMQYVTSAAFLLSAYSGYLSSSSSGGESVASCAGGGTASAXAEVLALARSQVDYILGSNPLGLSYMVGYGRRYPVRVHHRGASIVAHKANNRFIGCMQGFDDWFGRXAANPNVLAGAIVGGPDRRDRFRDHRENYMQTEACTYNTAPMVGMFAMLNRLARAESAAAAAVQPQQQPASSSPAADRSVNR

SEQ ID NO: 72331 - protein, 170 aa, Setaria italica
  Transcript Sequence Number=SeqID_6357
  Gene Ontology: Mol. function=metal ion binding; Cellular component =nucleus; Biological process=regulation of transcription, DNA -dependent
  Homolog annotation: Hit_ID=Q75LH6; Match level="QueryCoverage=99%, HitCoverage=17%, E-value=4e-65, Identity=71%"; Hit description =Squamosa promoter-binding-like protein 6
YPFHVAAATNDAEDVLDVLTDDPGLVGISAWSNARDETGFTPEDYARQRGNDAYLNLVQRKIDKHLGKGHVVLGVPSSMCSVITDGVKPGDVSLEICRPMSASVPGCLLCTQQARVYPNSRARTFLYRPAMLTVMGVAVVCVCVGILLHTFPRVYAAPTFRWELLERGPM

SEQ ID NO: 72332 - protein, 509 aa, Setaria italica
  Transcript Sequence Number=SeqID_6358
  Gene Ontology: Mol. function=metal ion binding; Cellular component =nucleus; Biological process=regulation of transcription, DNA -dependent
  Homolog annotation: Hit_ID=Q75LH6; Match level="QueryCoverage=96%, HitCoverage=49%, E-value=0.0, Identity=78%"; Hit description =Squamosa promoter-binding-like protein 6
  Pfam annotation: Domain name=Ank; Domain location=324-356; Score =13.9; E_value=0.36; Accession=PF00023.22; Description=Ankyrin repeat
  Pfam annotation: Domain name=Ank; Domain location=370-409; Score=6.2; E_value=4.6; Accession=PF00023.22; Description=Ankyrin repeat
  Pfam module annotation: Pfam domain module=Ank::Ank; Domain location =324-356::370-409
GDAQCRTDKIVFKLFNKVPSDLPPVLRSQILGWLSSSPTDIESYIRPGCIILTVYLRLVESAWRELSDNMSLHLDKLLNSSTGDFWASGLVFVMVRRQLAFMHNGQIMLDRPLASSSHHYCKILRVRPVAAPYSATINFRVEGFNLLSNSSRLICSFEGRSIFQEDTGTVADDVNYEDSDIECLSFCCSIPGPRGRGFMEVEDSGFSNGFFPFIIAEKDVCSEVSELESIFESSSNKNADANDIARDQALEFLNELGWLLHRANIMSKQDEMDTPLATFNMWRFRNLGIFAMEREWCAVVKMLLDFLFIGLIDVGSRSPEEVVLSENLLHAAVRRKSVQMIRFLLRYKPNKNLKGTAQTYLFRPDAPGPSTITPLHVAAATNDAEDVLDVLTDDPGLVGISAWSNARDETGFTPEDYARQRGNDAYLNLVQRKIDKHLGKGHVVLGVPSSMCSVITDGVKPGDVSLEICRPMSASVPGCLLCTQQARVYWAKDPFVCLRSLFFVCSFKV

SEQ ID NO: 72333 - protein, 189 aa, Setaria italica
  Transcript Sequence Number=SeqID_6359
  Subcellular localization annotation: CTP_CleavageSite=60; ConfidenceScore=5.81e-01
ATPGWRTTSSTSTTRPPSSWRSPAPAPSRSPGGASPSSGDEEFYSPRGSSTKTSSSRRTLATAVQAALEARDRSRTPSPGSAVSTPSYPSSPGATLSPAPASPPAFSSPGESGRRSVKSRSESARVVVLPPVPPTPPPPPPFAPTLPPPPPPRRKPPSPSPPCSPLNDKSALRSSTDAISRNPFVHPAH

SEQ ID NO: 72334 - protein, 93 aa, Setaria italica
  Transcript Sequence Number=SeqID_6360
  Homolog annotation: Hit_ID=B6SIB6; Match level="QueryCoverage=81%, HitCoverage=80%, E-value=7e-35, Identity=97%"; Hit description=BolA -like protein
  Pfam annotation: Domain name=BolA; Domain location=12-80; Score =119.1; E_value=1.4e-32; Accession=PF01722.10; Description=BolA-like protein
MGVTKEDVEAAITSALSPSHLVVTDTSGGCGASYEIEVVSEKFEGKRLLERHRMVNTALAPHMAEIHAVSIKKALTPAQAQPQPEPAADKPQA

SEQ ID NO: 72335 - protein, 71 aa, Setaria italica
  Transcript Sequence Number=SeqID_6361
EKVPFVRLSEPCHPHTSLSKEMLDGKVQINEQNDNLNEEKVPFVANSELLDIPSQPDRVLQSIDNGSQVGG

SEQ ID NO: 72336 - protein, 481 aa, Setaria italica
  Transcript Sequence Number=SeqID_6362
  Homolog annotation: Hit_ID=Q9LPF3; Match level="QueryCoverage=84%, HitCoverage=82%, E-value=2e-20, Identity=40%"; Hit description =T12C22.5 protein
  Pfam annotation: Domain name=CHZ; Domain location=397-434; Score =41.4; E_value=3.5e-09; Accession=PF09649.2; Description=Histone chaperone domain CHZ
  Pfam annotation: Domain name=DEK_C; Domain location=15-73; Score =11.2; E_value=0.0079; Accession=PF08766.3; Description=DEK C terminal domain
  Pfam module annotation: Pfam domain module=CHZ::DEK_C; Domain location=397-434::15-73
MGSDADTSAGAAREREAEIEKAMRARVPDFKKQADSLTLEGVRRALEKDLGLEIYSLDAHKKFIKQCVDKVFAESDDENTNDNASEDAEAKDDHLSKEGSDDAKPTPVSNKTTSSADAQVVKSSETGKDPEEEKDKISSSDISEDMIKEAIEKRASYFRKNSETLTLQGVRRTLEEDLKLQKKALDAYKNFITTQLDKVLQEPANGTKKKSKKGPPMDTDRKASKGSKRAREDSNSSELENSQSEMEDSDEDARPRKKRAEKPKVIKKQKKVPDEKKLSTLKAKKVAKQDSDRSADEQGGSSAEEDNSRSSAEEDNKRKRQQAPAPAPAYGKHVEHLKSIIKSCGMTIPPTVYRRAKQAPEHKREACLIKELEDMLEKEGLSKNPSEKEIKAVKKRKERAKELEGIDTSNIITSSRRRSTSSFIPLPPPPKIEADSDDDEDDDAKDDDEDEEENLEDGDAGDNDDAEAGDGSADDAAKDSD

SEQ ID NO: 72337 - protein, 101 aa, Setaria italica
  misc_feature (93)..(93): Xaa can be any naturally occurring amino acid
  Transcript Sequence Number=SeqID_6363
  Subcellular localization annotation: CTP_CleavageSite=48; ConfidenceScore=5.24e-01
YLTGAHTIFNLTIALNRTRGIFVHSMVTKISSIYSRQRKQPQKTVFLRTTMKQEALYSCTRFTSTWQPRELAPRRREEASRPGGSPVSRGGGXRTGDGGDG

SEQ ID NO: 72338 - protein, 519 aa, Setaria italica
  misc_feature (142)..(142): Xaa can be any naturally occurring amino acid
  misc_feature (188)..(188): Xaa can be any naturally occurring amino acid
  Transcript Sequence Number=SeqID_6364
  Gene Ontology: Mol. function=microtubule-severing ATPase activity; Cellular component=microtubule; Biological process=cytoplasmic microtubule organization and biogenesis
  Homolog annotation: Hit_ID=A7YJG1; Match level="QueryCoverage=100%, HitCoverage=100%, E-value=0.0, Identity=79%"; Hit description=LUE1 protein
  Pfam annotation: Domain name=AAA; Domain location=270-461; Score =270.3; E_value=4.3e-78; Accession=PF00004.21; Description=ATPase family associated with various cellular activities (AAA)
  Pfam annotation: Domain name=AAA_5; Domain location=270-408; Score= -12.2; E_value=0.0097; Accession=PF07728.6; Description=ATPase family associated with various
  Pfam annotation: Domain name=Vps4_C; Domain location=467-517; Score =11.5; E_value=0.00045; Accession=PF09336.2; Description=Vps4 C terminal oligomerisation domain
  Pfam module annotation: Pfam domain module=AAA::AAA_5::Vps4_C; Domain location=270-461::270-408::467-517
MANPLSGLQDHLKLARDYALEGLYDTSIIFFDGAIAQINKHLTTLDDALVRTKWMNCKKAISEEVEIVKQLDAQLKSLKEAPGARRSSSPPIRSNKSFHFQPLDEYPTSSPAPFDDPDVWAPPRDAPNRRPARGQSSARKSXSQDGAWARGSSRTGTPSRSAKPNGSKGSSAVRSSTASSTGGRKGKXSSSKADSASSDAEEGKSKKGQYEGPDMDLAAMLERDVLDSTPGVRWDDVAGLSEAKRLLEEAVVLPLWMPEYFHGIRRPWKGVLMFGPPGTGKTLLAKAVATECGTTFFNVSSATLASKWRGESERMVRCLFDLARAYAPSTIFIDEIDSLCTSRGASGEHESSRRVKSELLVQIDGVNNSSTTEDGQPKIVMVLAATNFPWDIDEALRRRLEKRIYIPLPDFESRKALININLRTVQIAADVNIDEVARKTEGYSGDDLTNVCRDASMNGMRRKIAGKTRDEIKNMAKDEIAKDPVAMCDFVEALSKVQKSVSPADIEKHEKWMAEFGSA

SEQ ID NO: 72339 - protein, 98 aa, Setaria italica
  Transcript Sequence Number=SeqID_6365
  Homolog annotation: Hit_ID=B9RY40; Match level="QueryCoverage=55%, HitCoverage=10%, E-value=3e-09, Identity=55%"; Hit description=DNA binding protein, putative
SLNKAPLLDRDQVEPNLQLSATQFPSSEVEPYSKTTIAAESTIVDSAVTFDRNDSSTPLQSATTCIPPPSTVRSVSMRDMGTEMTCCSHWCSCPGWFL

SEQ ID NO: 72340 - protein, 509 aa, Setaria italica
  Transcript Sequence Number=SeqID_6366
  Gene Ontology: Mol. function=DNA binding; Cellular component=plasma membrane
  Homolog annotation: Hit_ID=B9RY40; Match level="QueryCoverage=100%, HitCoverage=100%, E-value=1e-111, Identity=46%"; Hit description=DNA binding protein, putative
  Pfam annotation: Domain name=Remorin_C; Domain location=392-503; Score=144.4; E_value=3.5e-40; Accession=PF03763.5; Description =Remorin, C-terminal region
MEYERIEKPFPTQGGGFSPKRLRAMLLGVDKRRKGQDAEEDDADAGDDYGAVPKASVKSDADAEARGGGTMCEEYKDVDVVSTISESSTSLETGGGHRSRDTHSMGSRVRVPEEDSCDSESVASNFEFHNDRADAARSAAASVVPPFSKPAPSKWDDAQKWIASPTTNRPSRAAGGAVPRKMEKPSSGIGRLPATKVVLEATEEIDTKRIDPSQEKREIGWQKAVNWAPPDPYPEVEPYSKTTIAAESTIVDSAVTFDRNDSSTPLQSATTCIPPPSTVRSVSMRDMGTEMTPIASQEPSRTGTPVRATSPNCSRPTTPRRMLGPNAIGAVISHGECSNAELSEQDLQTKTRKEIMLLGTQLGKTNIAAWASKKEEEKDASLALKTVPMDQSTQNITEVRAAAWEEAEKAKYLARFKREEIKIQAWEDHQKAKIEAEMRKIEVEVERMRARAQDKLMTQLASARHNADEKRASAELKRNRAAARTAEQVEHIRRTGRVPPSFGCWNWCS

SEQ ID NO: 72341 - protein, 73 aa, Setaria italica
  misc_feature (69)..(69): Xaa can be any naturally occurring amino acid
  Transcript Sequence Number=SeqID_6367
FFFLTFFPPERKEDQKTFIPDLTSHAYMAVRHMTHFSAYKIHADIQIMPTTCTRKAKSPPFSHVTPPFXARPS

SEQ ID NO: 72342 - protein, 102 aa, Setaria italica
  Transcript Sequence Number=SeqID_6368
  Gene Ontology: Mol. function=protein transporter activity; Cellular component=mitochondrial inner membrane; Biological process=protein transport
  Homolog annotation: Hit_ID=B6SJS3; Match level="QueryCoverage=100%, HitCoverage=51%, E-value=1e-37, Identity=79%"; Hit description =Mitochondrial import inner membrane translocase subunit tim23
  Pfam annotation: Domain name=Tim17; Domain location=1-95; Score=83.4; E_value=8.1e-22; Accession=PF02466.11; Description=Tim17Tim22Tim23 family
EPGEPAKIRANRVLNSCGSSGRRVGNTLGVIGLMYAGIESAMVAARDRDDWINSVAAGLGTGALFRAANGPRSAVVAGAVGGVLAGAAAAAKQVGKRYVPAL

SEQ ID NO: 72343 - protein, 89 aa, Setaria italica
  Transcript Sequence Number=SeqID_6369
  Gene Ontology: Biological process=response to stress
  Homolog annotation: Hit_ID=B6TUC5; Match level="QueryCoverage=96%, HitCoverage=36%, E-value=4e-25, Identity=68%"; Hit description =Universal stress protein family protein
RKRVMVVVDQSSGAKHAMMWALTHVASKGDFLTLLHVLPPQTGNGGGGGRGGGVDASALANSLGALCKACKPEVRALRLFVHAHNLFFW

SEQ ID NO: 72344 - protein, 51 aa, Setaria italica
  Transcript Sequence Number=SeqID_6370
  Gene Ontology: Biological process=response to stress
  Homolog annotation: Hit_ID=B6TTX5; Match level="QueryCoverage=100%, HitCoverage=22%, E-value=1e-18, Identity=86%"; Hit description =Universal stress protein family protein
WCSFMRSGSEAFVEECINRAECLTLAVRRQSKGVGGYLVSTRWQKNFWLLA

SEQ ID NO: 72345 - protein, 127 aa, Setaria italica
  Transcript Sequence Number=SeqID_6371
  Gene Ontology: Biological process=response to stress
  Homolog annotation: Hit_ID=B6TWU8; Match level="QueryCoverage=93%, HitCoverage=50%, E-value=2e-52, Identity=91%"; Hit description =Universal stress protein family protein
  Pfam annotation: Domain name=Usp; Domain location=18-115; Score=14.2; E_value=0.075; Accession=PF00582.18; Description=Universal stress protein family
AGANGYGGMKQGDAASAARKRVMVVVDESSGAKHAMMWALTHVANKGDFLTLLHVLPHSGSGRGEEASSLANSLGTLCKASRPEVEVEALVIQGPKLATVLSQVKKLEASVLVLSQCRPSPYCWLSW

SEQ ID NO: 72346 - protein, 232 aa, Setaria italica
  Transcript Sequence Number=SeqID_6372
  Gene Ontology: Biological process=response to stress
  Homolog annotation: Hit_ID=B6TWU8; Match level="QueryCoverage=100%, HitCoverage=100%, E-value=3e-84, Identity=72%"; Hit description =Universal stress protein family protein
  Pfam annotation: Domain name=Usp; Domain location=75-209; Score=41.7; E_value=2.8e-09; Accession=PF00582.18; Description=Universal stress protein family
MASSAGDRFLRQLSASNGGGGYDGGCGLQDQQECGGGGRRGSRRWSKKRAAAARDYGAGANGYGGMKQGDAASAARKRVMVVVDESSGAKHAMMWALTHVANKGDFLTLLHVLPHSGSGRGEEASSLANSLGTLCKASRPEVEVEALVIQGPKLATVLSQVKKLEASVLVLSQCRPSPYCWLSCLLRSSSEEFVEQCINQAECLTLAVRKQSKGVGGYLISTRWQKNFWLLA

SEQ ID NO: 72347 - protein, 84 aa, Setaria italica
  Transcript Sequence Number=SeqID_6373
  Gene Ontology: Mol. function=transferase activity, transferring pentosyl groups
  Homolog annotation: Hit_ID=B9RKG8; Match level="QueryCoverage=95%, HitCoverage=14%, E-value=1e-09, Identity=43%"; Hit description =Transferase, transferring pentosyl groups, putative
PSATLSIYKAARRIKRRASTLYNALRSVAEDAAFVAEVAALWPALPLVANLRCGLWYAPPRSFAATCYFKSTDGHAGNWSFSTA

SEQ ID NO: 72348 - protein, 96 aa, Setaria italica
  Transcript Sequence Number=SeqID_6374
DSNPASCQVYPPFLLGWTEQMCEGKSLCIFLELYFLCIFGSQLGCSVHHHRPHPLLLLPPQLRSLVDVLQAIFECSLHQSSSSTSSSLQLRFFPLP

SEQ ID NO: 72349 - protein, 120 aa, Setaria italica
  Transcript Sequence Number=SeqID_6375
  Gene Ontology: Mol. function=catalytic activity; Biological process =guanosine tetraphosphate metabolic process
  Homolog annotation: Hit_ID=B9S1Z6; Match level="QueryCoverage=55%, HitCoverage=8%, E-value=1e-27, Identity=90%"; Hit description =Guanosine-3',5'-bis(Diphosphate) 3'-pyrophosphohydrolase, putative
MVDDPRVVLIKLADRLHNMRTIYALPVPKAEAVAQETLAVWCSLASRLGVWALKAELEDLCFAVLQPQIFKKIRSELTLMWNRTGKSKSMRRSSIRSELLASMKDGHMTSIHDLFSSCNQ

SEQ ID NO: 72350 - protein, 807 aa, Setaria italica
  misc_feature (272)..(272): Xaa can be any naturally occurring amino acid
  misc_feature (405)..(405): Xaa can be any naturally occurring amino acid
  Transcript Sequence Number=SeqID_6376
  Gene Ontology: Mol. function=catalytic activity; Biological process =guanosine tetraphosphate metabolic process
  Homolog annotation: Hit_ID=B9S1Z6; Match level="QueryCoverage=98%, HitCoverage=90%, E-value=0.0, Identity=60%"; Hit description =Guanosine-3',5'-bis(Diphosphate) 3'-pyrophosphohydrolase, putative
  Pfam annotation: Domain name=HD; Domain location=91-207; Score=53.4; E_value=8.5e-13; Accession=PF01966.14; Description=HD domain
  Pfam annotation: Domain name=RelA_SpoT; Domain location=392-511; Score=137.4; E_value=4.4e-38; Accession=PF04607.9; Description =Region found in RelA  SpoT proteins
  Pfam annotation: Domain name=TGS; Domain location=752-807; Score =18.9; E_value=0.002; Accession=PF02824.13; Description=TGS domain
  Pfam module annotation: Pfam domain module=HD::RelA_SpoT::TGS; Domain location=91-207::392-511::752-807
AGAGGSGAVHGAVASTLAQVAVTAVAIASGACLSTKVDFLWPRIEQLPDTLIFEGVEVTGYQIFEDPKVQKAIVFASTAHLGQFRRTGDPYVTHCIHTGKILAALVPSTGERAVNTVVAGILHDVVDDTSESLKSIEEQFGDDVASLVSGVSKLSYINQLLRRHRQKNTGGSTLTSEEANNLRVMLLGMVDDPRVVLIKLADRLHNMRTIYALPVPKAEAVAQETLAVWCSLASRLGVWALKAELGKNLIDFAVLQPQIFTQILYEITFPHXSKFRSKSMRRSSIRSELLASMKDGHMTSIHDLFSSCNQEKTNMKDLLQAVLPFDIFLDRKRRSYFLSNLNSSSGEPISNPKIVDDAAVALASLASCEEELERELLISTSYIPGMEVTLSSRLKSLYSIYCKMXRKDVGIRQVYDARALRVIVGDKNGALHGPAVRSCYSILDIVHRLWTPIDGEFDDYIINPKGSGYQSLHTAVQASDSSPLEVQIRTQRMHEYAEHGLAAHWLYKESKVEYRSGMSKRIGQSTSYSPSSSEDESSIQDDIPSKYSSLKVGHPVLRIEGSHLLAAVIVSIDKGGKELIVAVSFSLEASEAVAKLRSSFQLKRWEAYARLHKKVSEKWWCAPGHGDWSTNLERYTLCQDGIFHKQDQFGRLLPTFIQIIDLTEEEEEEYWMVVSAIFEGKETSSLPSESNYADKSSSDPPSSTPLSDPINNKVHLLRTMLQWEEQVRRGASLAEKSLGVSTVTKPILREVAIIFWPNGKIMRMSTGSTAADAARRMGVEGKLLWVNGQLVLPQTELKDGDIVEVRV

SEQ ID NO: 72351 - protein, 107 aa, Setaria italica
  Transcript Sequence Number=SeqID_6377
  Gene Ontology: Mol. function=protein binding
  Homolog annotation: Hit_ID=Q2R0M3; Match level="QueryCoverage=91%, HitCoverage=8%, E-value=5e-21, Identity=55%"; Hit description =Leucine Rich Repeat family protein, expressed
  Pfam annotation: Domain name=LRR_1; Domain location=19-41; Score =12.8; E_value=1.1; Accession=PF00560.25; Description=Leucine Rich Repeat
  Pfam annotation: Domain name=LRR_1; Domain location=43-62; Score=5.0; E_value=34; Accession=PF00560.25; Description=Leucine Rich Repeat
  Pfam module annotation: Pfam domain module=LRR_1::LRR_1; Domain location=19-41::43-62
TGRQTELACLPQGLQHLSSIRSLTIDNCRKLEALPDWLDNLPSLQFVQLSGCPLLHHIPGGLQQRPGIIIYVEDCPSLPKQRLPCSPTQPSGNPADTKGKEIIIEDV

SEQ ID NO: 72352 - protein, 402 aa, Setaria italica
  misc_feature (388)..(388): Xaa can be any naturally occurring amino acid
  Transcript Sequence Number=SeqID_6378
  Gene Ontology: Mol. function=transferase activity
  Homolog annotation: Hit_ID=B9SKG1; Match level="QueryCoverage=100%, HitCoverage=68%, E-value=1e-94, Identity=31%"; Hit description =Pentatricopeptide repeat-containing protein, putative
  Pfam annotation: Domain name=PPR; Domain location=129-163; Score=5.2; E_value=2.2; Accession=PF01535.12; Description=PPR repeat
  Pfam annotation: Domain name=PPR; Domain location=164-198; Score =30.6; E_value=6.2e-06; Accession=PF01535.12; Description=PPR repeat
  Pfam annotation: Domain name=PPR; Domain location=199-233; Score =23.9; E_value=0.00068; Accession=PF01535.12; Description=PPR repeat
  Pfam annotation: Domain name=PPR; Domain location=234-267; Score =15.2; E_value=0.14; Accession=PF01535.12; Description=PPR repeat
  Pfam annotation: Domain name=PPR; Domain location=268-302; Score =27.9; E_value=4.3e-05; Accession=PF01535.12; Description=PPR repeat
  Pfam annotation: Domain name=PPR; Domain location=28-62; Score=46.9; E_value=7.7e-11; Accession=PF01535.12; Description=PPR repeat
  Pfam annotation: Domain name=PPR; Domain location=303-337; Score =53.8; E_value=6.5e-13; Accession=PF01535.12; Description=PPR repeat
  Pfam annotation: Domain name=PPR; Domain location=338-372; Score =31.8; E_value=2.8e-06; Accession=PF01535.12; Description=PPR repeat
  Pfam annotation: Domain name=PPR; Domain location=63-97; Score=50.6; E_value=5.9e-12; Accession=PF01535.12; Description=PPR repeat
  Pfam module annotation: Pfam domain module=PPR::PPR::PPR::PPR::PPR::PP R::PPR::PPR::PPR; Domain location=129-163::164-198::199-233::234 -267::268-302::28-62::303-337::338-372::63-97
GHCLFGWSGDAFKLFEEMRRAGCEPTVVTYNILVDVLCHEGRMVEARSLFDEMAQVGIKANTITFNVLIDGYAKTGLMDEASAAYKEMKVRGLVPDSCTFNILAAGSYKFGHAAQLVHDREMFCSDTADDLDVLVCRLCWDGRLDGAWELLRGAIEQGVPVSVAGFNALIAAYSKEGLHDAAFQLYRIMNKLGLAPSTHTFCYLVMGLCNQGRLDEAQLVVEYMVSKGYCLSTSFTIYLDASFREGDAVRALKCWDDMEKIGLQPDFIAFSAYVNGLCRLDYVNEAYQAFAEMTTRGLVPNNITYNSIISAFCRAGNMSEALKLQQKMRQSGLVPDVYTSNILIDGLCREGNLKMVDNHLLDMCSNGLIPDTVTYNTIINAYCRAQDXYGAMNFMNKMFAAG

SEQ ID NO: 72353 - protein, 180 aa, Setaria italica
  Transcript Sequence Number=SeqID_6379
  Gene Ontology: Mol. function=electron carrier activity; Biological process=chromatin modification
  Homolog annotation: Hit_ID=Q6Z690; Match level="QueryCoverage=100%, HitCoverage=21%, E-value=1e-100, Identity=94%"; Hit description =Lysine-specific histone demethylase 1 homolog 1
LGVIARQLGFPLHKVRDKCPLYLPDGRPVDPDMDARVEAAFNQLLDKVCQLRQVIADGVPHGVDLSLGMALEAFRAAHGVAAEHEERMLLDWHLANLEYANAAPLADLSMAFWDQDDPYEMGGDHCFIPGGNSQFVRALADGIPIFYGQNVRRIQYGCDGVMVHTDKQSFRGDMVLCTVP

SEQ ID NO: 72354 - protein, 69 aa, Setaria italica
  Transcript Sequence Number=SeqID_6380
SKKTLNSTVWMHYINISISKAAKLCTANTAWYNLSATIIVISNLPHRQFIHLSLFEYILHTVANTGQTL

SEQ ID NO: 72355 - protein, 373 aa, Setaria italica
  misc_feature (168)..(168): Xaa can be any naturally occurring amino acid
  Transcript Sequence Number=SeqID_6381
  Gene Ontology: Cellular component=pre-autophagosomal structure membrane; Biological process=protein transport
  Homolog annotation: Hit_ID=B9T6W4; Match level="QueryCoverage=84%, HitCoverage=90%, E-value=1e-107, Identity=60%"; Hit description=WD -repeat protein, putative
  Subcellular localization annotation: CTP_CleavageSite=3; ConfidenceScore=5.02e-01
MASSSAPSQIICASFNQDNSLFSVGTKDGFKIFDARNGRLCYENNLGGFNIVEMLFGSSLLVIVGTGEKPAMSPRRLCLFNTRTGASKKDLNFRTSILSVRLSMKRLVVVLQDRTFVYDLNKTTILEEIETVPNTKGLCAFAPNSEECYLALPASTSKGSALVYKASXKPELICQIDAHQAPLAAMVFPNGMYLATASEKGTMVRVHLVTQATKSHSFRRGTYPSTIYSLAFSPSVDLPDVLVATSSSGSLHMFFLDAARNGRRQGNTLLSSVIPGSVTDALDPANHHVIHNVVPANIKSCLAVNSVENSQNSSKLPALKTVIYIVTHDGYFREYVIGTTKSNESSWSLEREFNLLEAGLSSLKQNEQHIVID

SEQ ID NO: 72356 - protein, 336 aa, Setaria italica
  misc_feature (245)..(245): Xaa can be any naturally occurring amino acid
  Transcript Sequence Number=SeqID_6382
  Gene Ontology: Mol. function=carbohydrate binding; Biological process= carbohydrate metabolic process
  Homolog annotation: Hit_ID=B4FPM2; Match level="QueryCoverage=99%, HitCoverage=99%, E-value=1e-175, Identity=86%"; Hit description =Aldose 1-epimerase
  Pfam annotation: Domain name=Aldose_epim; Domain location=6-333; Score=454.0; E_value=2.2e-133; Accession=PF01263.12; Description =Aldose 1-epimerase
MAAEPKIIELSNGRITTRIASWGATITSLLVPDAHGNVADVVLGFDDLEPYMKGMAPYFGCIVGRVANRIKDGKFTLNGAEYSLPINNGPNSLHGGLTGFDKVMWDVVEHKDGECPSVTFQYHSKDGEEGYPGDVTVRATYSLPEATTLRLDMEAIPHDKATPINLAQHTYWNLAGHNSGDILNHTIQIWGKHITPVDENTIPTGEIMPVEGTPFDFTTEHKIGERINDVPGGYDHNYVLDCGDXEKNGVKRAAKLRDPSSSRTLNLWTDAPGMQFYTANYVTGITGKGGAVYEKHAGVCLETQGFPNAINQPNFPSVVVQPGEKYKHTMLFEFSA

SEQ ID NO: 72357 - protein, 109 aa, Setaria italica
  misc_feature (52)..(52): Xaa can be any naturally occurring amino acid
  misc_feature (74)..(74): Xaa can be any naturally occurring amino acid
  Transcript Sequence Number=SeqID_6383
  Subcellular localization annotation: CTP_CleavageSite=45; ConfidenceScore=5.65e-01
HRRRSRALFTSPSTAPRARSARQSCLRRCRRRGAPAPLRAARAGRAMAVGAXLAAVQLVVVLRHRRRAGAVQQXGRGPGDRHEVDALLVPQLLLRHHRGLLQRHGPSTR

SEQ ID NO: 72358 - protein, 196 aa, Setaria italica
  misc_feature (111)..(111): Xaa can be any naturally occurring amino acid
  Transcript Sequence Number=SeqID_6384
KNKANSLSLPAESIYEYEHTWSAIESNKRIILQSGSDHARDMLSDDDFHEVLHRRYYDLQHLATELAVTPDNQQQPEIIPETDVVDPSILGIARGVEMVLQRLKRVEQGIXDLKEEIASLRYYEYHLVTELHRKMDYVMNYNIQLEERKVPQMFYLVSLDNRSKQLVTRILPGMRSLRVHMLCEFRREMHVVEDQL

SEQ ID NO: 72359 - protein, 200 aa, Setaria italica
  Transcript Sequence Number=SeqID_6385
  Gene Ontology: Mol. function=mismatched DNA binding
  Homolog annotation: Hit_ID=Q7G278; Match level="QueryCoverage=50%, HitCoverage=15%, E-value=5e-41, Identity=79%"; Hit description=MutS domain V family protein, expressed
AAGAASSLSPSARSLRLLEWGKVCDAVASFAGTAHGRDATKKQLWEVEDVSYEQSQRLLQETEVAVWLLDNAGGAMDFSGLDTIAIESAIHCVSGGAVIKGLEAVAVASLMLFVESLQVNIKAARKLDEGSHSRLTTLTETVSTSHLLLSCIFPSPILFNHSYAENSCSELQILEVVINKSLVKSIQDIVDDDGSVKDTA

SEQ ID NO: 72360 - protein, 273 aa, Setaria italica
  misc_feature (17)..(17): Xaa can be any naturally occurring amino acid
  misc_feature (194)..(194): Xaa can be any naturally occurring amino acid
  misc_feature (210)..(210): Xaa can be any naturally occurring amino acid
  Transcript Sequence Number=SeqID_6386
  Gene Ontology: Mol. function=peptidase activity; Cellular component =nucleus; Biological process=female pregnancy
  Homolog annotation: Hit_ID=Q84P70; Match level="QueryCoverage=100%, HitCoverage=89%, E-value=1e-123, Identity=78%"; Hit description =Putative serine protease-like protein (Fragment)
  Pfam annotation: Domain name=XendoU; Domain location=16-174; Score =256.5; E_value=6.3e-74; Accession=PF09412.2; Description =Endoribonuclease XendoU
VSHIHHGLNVEPTREGXELNNLSKACARLWELDLNRLSPGKDYTIECGEGKKVYHKGDKASENLFSWLEDSVLRRPTYSRFCVLLNNYNLHQGYKESVTQHDKHEEAAFIEEISRSAPIKYLHRYLVLKEATSQDYEDFKKMLTSLWFDLCGRGGCSSSSSAFEHVFVGEIKGQKQGENEVSGFHNWIQVSLPXSSSATASQGYIFPRRXGELPDSETQLLTIQFEWHGVLKSVSSTLICVSPEFEIALYTLCFFAGGEDNHVDIGPYSVNIK

SEQ ID NO: 72361 - protein, 150 aa, Setaria italica
  Transcript Sequence Number=SeqID_6387
AFPTTPAAGSNKPVDVGHRPDDVAADVAKKLLYAACCPPVDVIREAADVVSQSDVARRIMVDAGVLQRVLRLAVSCAKTKSCRGDQEGSLDDMPTVEACLDLVRALAVSGDELRPLVADKHVHELVDAVTDVLVALEPGPGNAARASAVH

SEQ ID NO: 72362 - protein, 66 aa, Setaria italica
  Transcript Sequence Number=SeqID_6388
IWSRLTTSESIEVLEKDLAIFGFFIALGRSTQGYLSSNGLTDLDDSVNGIVRYDRCECRFCTFSIK

SEQ ID NO: 72363 - protein, 95 aa, Setaria italica
  Transcript Sequence Number=SeqID_6389
INRRQHVYIENEKGRQQPYVLTVYRKDRKLRSIIMSICTWPAYFTGSVLEPTVSNKSSLLPSATSISFTFSSCLRRSNLSGAYVDGIYTITNTQI

SEQ ID NO: 72364 - protein, 811 aa, Setaria italica
  Transcript Sequence Number=SeqID_6390
  Gene Ontology: Cellular component=integral to membrane
  Homolog annotation: Hit_ID=Q012Y1; Match level="QueryCoverage=10%, HitCoverage=15%, E-value=2e-11, Identity=40%"; Hit description=Ca2+ -binding transmembrane protein LETM1/MRS7 (ISS) (Fragment)
DGNSVSVNGAPQVDSASSMEEIRLKLNKAFQSEDISNGLVQSIHDAARSIELAFIEHSKSSKSSWFPKTWLGVDNNAWIKSLSYQAAVDSLLQAVIDVSSRGNGRDRDINVFVQRSLSRLLNPLESVIKNELSKRESTLYEWYSSDQNPLVVRQFVNIFESDPLFNSATAICCEGEPMNTSKSDLALLMLGLICLAAITKLGSTKVSCQQFSSMVPDIIGRFMDMLLEFVPLSKAYNLTKDIGLQREFLHTFGPRAAVPKLTNDHGLEISFWIDLVQKQLLRALDREKIWSRLTTSESIEVLEKDLAIFGFFIALGRSTQGYLSSNGLTDLDDSVNGIVRYLIGGSVLYYPQLSSISSYQLYVEVVCEELEWLPFYYGDVPSATTDTEGRQEVSKGEVISRVLNVCSYWMTSFIKYSSWLEDPSNVKAAKFLSKGHAMLSDCMKELDTSKNNISKDRGLPEPEEELDTGTELASFDKSLESVEEALVKLEKLLQELHVSSSNSGKEDLKAACSDLEMIRRLKKEAEFLEASFRAKAEYLEADASSGPLSPTGEEGRGKTGSRTNDIAAPQKSGSRVDNKRRPFWDFFGRPSGKNVEPALQVADQDGTVANAEKKDMESNDILRFEQLKRELIELEKRVQKSADDALKDEEMGVTNETTAPSSVASVPSSQTTKKENVITKSVEKVKETTTTVLQGTQLLAIDTGAAMGLLRRALIGDELTQKEKQALQRTLTDLASVVPIGILMLLPVTAVGHAAMLAFIQKYVPSMIPSTYAPDRLDLLRQLEKVKEMEVAEGSSEDLLETVGSRTEPVK

SEQ ID NO: 72365 - protein, 132 aa, Setaria italica
  Transcript Sequence Number=SeqID_6391
  Gene Ontology: Mol. function=metal ion binding; Biological process =metal ion transport
  Homolog annotation: Hit_ID=B6SQZ0; Match level="QueryCoverage=93%, HitCoverage=81%, E-value=8e-48, Identity=74%"; Hit description =Farnesylated protein 2
  Pfam annotation: Domain name=HMA; Domain location=13-73; Score=35.7; E_value=1.8e-07; Accession=PF00403.18; Description=Heavy-metal -associated domain
  Subcellular localization annotation: CTP_CleavageSite=28; ConfidenceScore=5.00e-01
TCSNFDLLRQTVHIKVKMDCEGCVRRVRSAVKSMRGVTSVSVIPKQSKCTVTGYVEPANVLARVRGTGKNAEMWPYTPYTLTSYPYVGGVYDKKAPAGFVRSAPQAMADPAGPEIRYMTMFSDDNANACAVM

SEQ ID NO: 72366 - protein, 151 aa, Setaria italica
  Transcript Sequence Number=SeqID_6392
  Gene Ontology: Mol. function=metal ion binding; Biological process =metal ion transport
  Homolog annotation: Hit_ID=B6SQZ0; Match level="QueryCoverage=100%, HitCoverage=100%, E-value=3e-68, Identity=83%"; Hit description =Farnesylated protein 2
  Pfam annotation: Domain name=HMA; Domain location=32-92; Score=38.2; E_value=3.3e-08; Accession=PF00403.18; Description=Heavy-metal -associated domain
MGILDHFSDLCSITETKEALKLRKKRPLQTVNIKVKMDCEGCERRVKSAVKSMRGVTRVVVNPKQSKCTVTGYVEPAKVLERVKSTGKAAEMWPYVPYTMTTYPYVGGAYDKKAPAGFVRSAPQAMADPSAPEVRYMTMFSDENVNSCTIM

SEQ ID NO: 72367 - protein, 82 aa, Setaria italica
  Transcript Sequence Number=SeqID_6393
  Subcellular localization annotation: CTP_CleavageSite=56; ConfidenceScore=5.77e-01
SLSVLYLFLTLSCSAHKTSPSHACSPSCGASSVPTVQKWHAQTASVQASRGTIFLRQNQGTSLPLVEFVSFLPTGNPFAFSC

SEQ ID NO: 72368 - protein, 479 aa, Setaria italica
  Transcript Sequence Number=SeqID_6394
  Gene Ontology: Mol. function=aminoacyl-tRNA ligase activity; Cellular component=chloroplast; Biological process=tRNA aminoacylation for protein translation
  Homolog annotation: Hit_ID=B6TJE8; Match level="QueryCoverage=100%, HitCoverage=89%, E-value=0.0, Identity=98%"; Hit description=Prolyl -tRNA synthetase
  Pfam annotation: Domain name=HGTP_anticodon; Domain location=284-387; Score=76.5; E_value=1e-19; Accession=PF03129.12; Description =Anticodon binding domain
  Pfam annotation: Domain name=ProRS-C_1; Domain location=413-479; Score=107.1; E_value=6e-29; Accession=PF09180.3; Description=Prolyl -tRNA synthetase, C-terminal
  Pfam annotation: Domain name=tRNA-synt_2b; Domain location=41-216; Score=59.0; E_value=1.8e-14; Accession=PF00587.17; Description=tRNA synthetase class II core domain (G, H, P, S and T)
  Pfam module annotation: Pfam domain module=HGTP_anticodon::ProRS-C _1::tRNA-synt_2b; Domain location=284-387::413-479::41-216
QVTPRSADFNAWYTDVIAAAELADYGPVRGTMVIRPYGYALWEAIQDYLNVKFKETGHSNMYFPQFIPYSFIEKEASHVEGFSPELALVTIGGGKELEEKLVVRPTSETIVNHMFTKWIQSYRDLPLMINQWANVTRWEMRTKPFIRTLEFLWQEGHTAHATLEEAEKEAMQMIDVYTKFAYEQAAMPVIPGRKSRVETFAGANRTYTIEAMMGDKKALQAGTSHNLGQNFSRAFGTQFMDENGQIEHVWQTSWAISTRFVGGIIMTHGDDAGLMLPPRIAPIQVIIVPIWKKGDEKAAVLEAVDSVQKILKEAGIRVKVDDSELRTPGWKFNHYEMKGIPVRIEIGPRDVTNKSVVVSRRDVPGKQGKEFGVSMEPSILVNHIKGRLDDIQASLLQKAITFRDSNIVDVSSYGELKEAIAEGKWARGPWSASDADELKVKEETSATIRCYPFEQPEGTKKCFMTGNPAEEVAIFAKSY

SEQ ID NO: 72369 - protein, 252 aa, Setaria italica
  misc_feature (105)..(105): Xaa can be any naturally occurring amino acid
  Transcript Sequence Number=SeqID_6395
  Gene Ontology: Cellular component=cytoplasm; Biological process =protein transport
  Homolog annotation: Hit_ID=Q3MQ01; Match level="QueryCoverage=99%, HitCoverage=70%, E-value=1e-101, Identity=74%"; Hit description =Autophagy protein 5
  Pfam annotation: Domain name=APG5; Domain location=1-248; Score =276.6; E_value=5.5e-80; Accession=PF04106.4; Description=Autophagy protein Apg5
IFRGYPSEILSPCEGEDSVKWSYMNSLKEATFIITGNSKSVMNMSQADQVALWQSVTKGNLDGYKNISTRLKLGPFEEDGLVQTASTERQQSSDEPESPGPGRPXVPVRFYVRGVQEDLEDIEDAMPVSDWESVSYINRPFEIRKVEGRSYITLGHALQTLLPEFFSSDPQNAEELGSAGGGSDTTNSSRSSQEAEPASASLREATKQAKVKLVRVQGIELDMDIPFLWVANNLKNPEYYLHICVYVSTRKQ

SEQ ID NO: 72370 - protein, 57 aa, Setaria italica
  misc_feature (56)..(56): Xaa can be any naturally occurring amino acid
  Transcript Sequence Number=SeqID_6396
SFARILFQFCLIVGQSYLLYLKKLLYAGELHVAAFTMMCCHFIVNKKKQKQKNLKXD

SEQ ID NO: 72371 - protein, 270 aa, Setaria italica
  Transcript Sequence Number=SeqID_6397
  Gene Ontology: Mol. function=metal ion binding; Cellular component =plasma membrane
  Homolog annotation: Hit_ID=B6TK33; Match level="QueryCoverage=70%, HitCoverage=34%, E-value=1e-103, Identity=94%"; Hit description =Copine family protein
  Pfam annotation: Domain name=Copine; Domain location=133-268; Score =249.7; E_value=7.2e-72; Accession=PF07002.8; Description=Copine
  Subcellular localization annotation: CTP_CleavageSite=69; ConfidenceScore=5.25e-01
PPPPPYPPSAPVADEYSSSSSFRRRAIAPPPAEDVVVSSSAYSRPPPAAAHAHSVSAPPLRETRAVPARAAAAGGKRPRLERKYSKIVDQYHSFDEVIEALAQAGLESSNLIIGIDFTKSNEWTGKNSFNGMSLHHIGETPNPYEQAISIIGQTLSAFDEDNLIPCYGFGDASTHDQDVFAFYPDERPCNGFQEALARYREIVPHLRLSGPTSFAPIIEMATTIVEQSGGQYHVLVIIADGQVTRSVDTEFGQLSTQEQMTVDAIVQARL

SEQ ID NO: 72372 - protein, 337 aa, Setaria italica
  Transcript Sequence Number=SeqID_6398
  Gene Ontology: Mol. function=metal ion binding; Cellular component =plasma membrane
  Homolog annotation: Hit_ID=B6TK33; Match level="QueryCoverage=93%, HitCoverage=58%, E-value=1e-176, Identity=93%"; Hit description =Copine family protein
  Pfam annotation: Domain name=Copine; Domain location=11-158; Score =269.3; E_value=8.6e-78; Accession=PF07002.8; Description=Copine
  Pfam annotation: Domain name=zf-C3HC4; Domain location=294-326; Score= 11.1; E_value=0.0055; Accession=PF00097.17; Description=Zinc finger, C3HC4 type (RING finger)
  Pfam module annotation: Pfam domain module=Copine::zf-C3HC4; Domain location=11-158::294-326
FGSIVVLVYSIIGCKPLNSFIEQAISIIGQTLSAFDEDNLIPCYGFGDASTHDQDVFAFYPDERPCNGFQEALARYREIVPHLRLSGPTSFAPIIEMATTIVEQSGGQYHVLVIIADGQVTRSVDTEFGQLSTQEQMTVDAIVQASEFPLSIILVGVGDGPWDMMKEFDDNIPARSFDNFQFVNFTAIMSKKISQSKKETEFALSALMEIPLQYKATLELGLLGRRLAKSPERVPLPPPFASYSTVSRAAPYRANSYRSVPSRPREEPTVDSTITASVTSPPAVETRVPEPQMCPVCLSKPRDMAFGCGHQTCSECGPQVADCPICRRPIDTRVKLY

SEQ ID NO: 72373 - protein, 65 aa, Setaria italica
  Transcript Sequence Number=SeqID_6399
MGKGKKEKKPLDILAGSDDDSDGGGEDSSKIQINEEYARRFEHNKRREALQHYENLKKQGLASPV

SEQ ID NO: 72374 - protein, 82 aa, Setaria italica
  misc_feature (5)..(5): Xaa can be any naturally occurring amino acid
  Transcript Sequence Number=SeqID_6400
  Gene Ontology: Cellular component=mitochondrion
  Homolog annotation: Hit_ID=B9T3N7; Match level="QueryCoverage=98%, HitCoverage=15%, E-value=5e-24, Identity=56%"; Hit description =Pentatricopeptide repeat-containing protein, putative
  Pfam annotation: Domain name=PPR; Domain location=41-75; Score=35.7; E_value=1.8e-07; Accession=PF01535.12; Description=PPR repeat
  Pfam annotation: Domain name=PPR; Domain location=6-39; Score=0.2; E _value=8.4; Accession=PF01535.12; Description=PPR repeat
  Pfam module annotation: Pfam domain module=PPR::PPR; Domain location =41-75::6-39
PHIRXKDFTLAIEAFGKVGSIDQAEKIWVNMNSTKKLSLTEQFNSILSVYCRHGVVDKASAVFKEMRASGCQPNAITYRHLV

SEQ ID NO: 72375 - protein, 49 aa, Setaria italica
  Transcript Sequence Number=SeqID_6401
ESYMYICIYNIYLHLISCTHHESDPFILLLCLVSTLMVHSATQLYKISF

SEQ ID NO: 72376 - protein, 225 aa, Setaria italica
  Transcript Sequence Number=SeqID_6402
  Homolog annotation: Hit_ID=B6T7B4; Match level="QueryCoverage=99%, HitCoverage=100%, E-value=1e-60, Identity=63%"; Hit description=MTD1
MPVDVEASMAPPPPASTCSSSSIGRDSDECPPLGKEEEGEVQSAFTGEGGGGGGLAGLEALEEALPIRRSISKFYNGKSKSFACLKEAITSSGSAKDITKADNAYSRKRKNLLAYSIMYGNSHETAAAQVYETAPPKRLASLSRNSLATLASISSRSSSSISIEENELPEQLHSPLSPDDFISTPRSGSFAPNASSAPMRSLSMMDLHCLHRSSSSVRLKEKKED

SEQ ID NO: 72377 - protein, 120 aa, Setaria italica
  Transcript Sequence Number=SeqID_6403
  Gene Ontology: Cellular component=photosystem I reaction center; Biological process=photosynthesis
  Homolog annotation: Hit_ID=P0C410; Match level="QueryCoverage=50%, HitCoverage=100%, E-value=1e-24, Identity=95%"; Hit description =Photosystem II reaction center protein K
  Pfam annotation: Domain name=PsbK; Domain location=79-120; Score =91.6; E_value=2.8e-24; Accession=PF02533.7; Description=Photosystem II 4 kDa reaction centre component
MKVEFLPFSFENANTRRYFVFGKVRRKRIWNPPFLLLFSLRKITQSKSNYLLYKNEMLVMPNILSLTCICFNSVLCPTSFFFAKLPEAYAIFNPIVDVMPVIPVLFFLLAFVWQAAVSFR

SEQ ID NO: 72378 - protein, 418 aa, Setaria italica
  misc_feature (370)..(370): Xaa can be any naturally occurring amino acid
  Transcript Sequence Number=SeqID_6404
  Gene Ontology: Mol. function=electron transporter, transferring electrons within the cyclic electron transport pathway of photosynthesis activity; Cellular component=light-harvesting complex; Biological process=...
  Gene Ontology: Biological process=photosynthetic electron transport in photosystem II
  Homolog annotation: Hit_ID=P0C367; Match level="QueryCoverage=100%, HitCoverage=88%, E-value=0.0, Identity=93%"; Hit description =Photosystem II CP43 chlorophyll apoprotein
  Pfam annotation: Domain name=PSII; Domain location=31-418; Score =757.9; E_value=7.5e-225; Accession=PF00421.11; Description =Photosystem II protein
MKILYSLRRFYHVETLFNGTFVLAGRDQETTGFAWWAGNARLINLSGKLLGAHVAHAGLIVFWAGAMNLFEVAHFVPEKPMYEQGLILLPHLATLGWGVGPGGEVLDTFPYFVSGVLHIISSAVLGFGGIYHALLGPETLEESFPFFGYVWKDRNKMTTILGIHLILLGLGAFLLVLKALYFGGVYDTWAPGGGDVRKITNLTLSPGVIFGYLLKSPFGGEGWIVSVDDLEDIIGGHVWLGSICVLGGIWHILTKPFAWARRAFVWSGEAYLSYSLAALSVFGFIACCFVWFNNTAYPSEFYGPTGPEASQAQAFTFLVRDQRLGANVGSAQGPTGLGKYLMRSPTGEVIFGGETMRFWDLRAPWLEPLXGPNGLDLSRLKKDIQPWQERRSAEYMTHAPLGSLNSVGGVATEINAVN

SEQ ID NO: 72379 - protein, 344 aa, Setaria italica
  misc_feature (27)..(27): Xaa can be any naturally occurring amino acid
  Transcript Sequence Number=SeqID_6405
  Gene Ontology: Mol. function=hydrolase activity, hydrolyzing O -glycosyl compounds; Cellular component=cytoplasm; Biological process= carbohydrate metabolic process
  Homolog annotation: Hit_ID=Q93WT3; Match level="QueryCoverage=89%, HitCoverage=98%, E-value=1e-130, Identity=80%"; Hit description=Beta- 1,3-glucanase (Fragment)
  Pfam annotation: Domain name=Glyco_hydro_17; Domain location=39-343; Score=637.6; E_value=1.2e-188; Accession=PF00332.10; Description =Glycosyl hydrolases family 17
PLNTRRRRGRWPSEALPRCSRQHWSLXAFAATATSVRAIGVCYGVIGSGLPSKSDVVQLYKSNGIANMRFYFADQEVLNALRGSGISLALDVGNDKVGDLANDPAAAASWVKDNVQAYYPDVSIRYVVVGNEVDGAASVLQAMKNVHDALTSANLAGSIKVSTAVKMDAIINSSPPSNGAFKDPSVMSPIVQFLAGNGAPLLANVYPYFAYKDNQNIDLNYALFEPSSTTVGDPNGLTYTNLFDAMVDAVHAALDKVGGGGVDVVVSESGWPSADGRGATVDNARTYNQNLINHAGKGTPRKPGPMEVYVFAMFNEDNKDGDPTEKKFGLFNPDKTPVYPINFA

SEQ ID NO: 72380 - protein, 209 aa, Setaria italica
  Transcript Sequence Number=SeqID_6406
  Gene Ontology: Mol. function=protein kinase activity; Cellular component=plasma membrane; Biological process=protein amino acid phosphorylation
  Homolog annotation: Hit_ID=Q53P27; Match level="QueryCoverage=60%, HitCoverage=22%, E-value=1e-39, Identity=72%"; Hit description =Leucine Rich Repeat family protein, expressed
RCWICSGNNFSGAIPAELGKLPALAGTLNLSRNHLSGGVPAELGRLPATVTLDLRFNNLSGEIPQSGSLASQGPTAFLNNPGLCGFPLQVPCRAAAPSASSSLSPPAPSSSAAASGGARQPIRTSLIVLISVADAAGVALIGVVAVYVYWKVRDRRRAADNAKDKGGGGDDEEEGRGQCPCPCMRADACTDSSSDCSDDDGGGDGKCSG

SEQ ID NO: 72381 - protein, 212 aa, Setaria italica
  misc_feature (70)..(70): Xaa can be any naturally occurring amino acid
  misc_feature (140)..(140): Xaa can be any naturally occurring amino acid
  misc_feature (172)..(172): Xaa can be any naturally occurring amino acid
  Transcript Sequence Number=SeqID_6407
  Homolog annotation: Hit_ID=Q9LR63; Match level="QueryCoverage=62%, HitCoverage=43%, E-value=7e-12, Identity=38%"; Hit description =F21B7.22
  Pfam annotation: Domain name=DUF789; Domain location=8-212; Score= -42.1; E_value=4e-09; Accession=PF05623.4; Description=Protein of unknown function (DUF789)
YSQLAKPTTPIVLYHDITICNERSGNKDVVPFVVTGSWYPTNPTDIAEIDAKRKTGAEESDSDLEHETAXSTVQETSKSSSGREALSDDGKSGSCHEQLLFEFLESEPPYQREALADKACLTETRQASYIRLSLACMKLXGLRTRTWLVQICGLAKQFPELRTLRSCDLSPXAWYPIYRIPTGPTLHDLDACFLIYHSLSTQFAGDSSHCPK

SEQ ID NO: 72382 - protein, 113 aa, Setaria italica
  misc_feature (71)..(71): Xaa can be any naturally occurring amino acid
  Transcript Sequence Number=SeqID_6408
  Homolog annotation: Hit_ID=Q9LR63; Match level="QueryCoverage=84%, HitCoverage=37%, E-value=4e-16, Identity=42%"; Hit description =F21B7.22
  Pfam annotation: Domain name=DUF789; Domain location=2-113; Score= -53.6; E_value=1.8e-08; Accession=PF05623.4; Description=Protein of unknown function (DUF789)
DSASTVQETSKSSSGREALSDDGKSGSCHEQLLFEFLESEPPYQREALADKICGLAKQFPELRTLRSCDLXSVAWYPIYRIPTGPTLHDLDACFLIYHSLSTQFAGDSSHCPK

SEQ ID NO: 72383 - protein, 46 aa, Setaria italica
  Transcript Sequence Number=SeqID_6409
QIEGHRSRLAMDIRMFQQDRRILQRWCSHPLQPIRRAACAALAVTH

SEQ ID NO: 72384 - protein, 107 aa, Setaria italica
  Transcript Sequence Number=SeqID_6410
  Gene Ontology: Mol. function=calcium ion binding
  Homolog annotation: Hit_ID=B9RGH6; Match level="QueryCoverage=95%, HitCoverage=30%, E-value=7e-09, Identity=35%"; Hit description =Reticulocalbin-2, putative
RTAASRLRARAHAQHHQIPFDPVVADLERRLEDREWERLAAAGLHAPGMEAAPVPEDLLSDGEAGADEDYINDAARFNVTRRVEELFPRIDVDPADGAVTGDELAAW

SEQ ID NO: 72385 - protein, 56 aa, Setaria italica
  Transcript Sequence Number=SeqID_6411
MRKSPISDEKRGVKVVKEGRRCGLCGGGTDGRPPKIALHDSVDSENEAYEGLCLQK

SEQ ID NO: 72386 - protein, 226 aa, Setaria italica
  Transcript Sequence Number=SeqID_6412
  Subcellular localization annotation: CTP_CleavageSite=52; ConfidenceScore=5.49e-01
PVCSSCWTSSSCSAGPDGSSSICCSEGRLLSSAICSVCMSTCSVPPELLALTSSLLSSQGNSSLPFPPNTGNSNSSVFSSRCKPSSATNSSPLPSSRSFVPPTIGPSSSSSCSAGTTSSPTFSPFSPSSFSTTLTPSTASCASTFKSIVKLISLSVSSLPCDCKPPLSSLDSSSSALSRTSTTTVLASSSSSSVSSSSAAASSSSSPYSSSSNHRLLARPCSLAFP

SEQ ID NO: 72387 - protein, 84 aa, Setaria italica
  Transcript Sequence Number=SeqID_6413
RYRGISPFFFHPWICNVLPCLCLLKFKTLNSENACDFVTLMPAIVTFLYICYYITYLMRICSISDTLNANCYICLDENEMRMLY

SEQ ID NO: 72388 - protein, 496 aa, Setaria italica
  misc_feature (19)..(19): Xaa can be any naturally occurring amino acid
  Transcript Sequence Number=SeqID_6414
  Gene Ontology: Mol. function=hydrolase activity; Cellular component =cell wall
  Homolog annotation: Hit_ID=B9SK25; Match level="QueryCoverage=89%, HitCoverage=82%, E-value=1e-150, Identity=57%"; Hit description =Hydrolase, putative
  Pfam annotation: Domain name=Abhydrolase_1; Domain location=182-452; Score=52.8; E_value=1.3e-12; Accession=PF00561.12; Description =alphabeta hydrolase fold
VAAAGAGWYGEEEEGRTEXGWAQQAKGFAESTAEMLLELGRGLWDVAAQSLAGAEDSELARRLRKRAAATGERLSFMNEYLPEERDPVRCWLIVAGVAFVTLLVLGVGSGNETPVELPKKLIISPPSANRIQLPDGRYLAYEEQGVSADRARFSLIAPHSFLSSRLAGIPGISASLLEEFGARLVTYDLPGFGESDPHPGRNLNSSALDMLHLANGLDIPDKFWVVGYSGGGMHAWSALRYIPDRVAGAAMFAPMANPYDSKMTKDERHKTWDSWSTKRKLMHILARRFPSLLPLFYRRSFLSGKQGQAESWLSLSLGKKDKTLLDGPEFNAFWERNVAESVRQGDARPFVEEAVLQVSDWGFSLSDIQMQKKEDRGFFELIKSFFNQVEREWVGFLGPIHIWQGMDDRVVSPSVAEFVRRVVPGATVHKLLDEGHFSYFCFCDECHRQIFSTLFGIPQGPINPAPQPSELASELAEETTAPDNVTEQEQGKSSLA

SEQ ID NO: 72389 - protein, 381 aa, Setaria italica
  misc_feature (44)..(44): Xaa can be any naturally occurring amino acid
  Transcript Sequence Number=SeqID_6415
  Gene Ontology: Mol. function=nucleic acid binding; Biological process= multicellular organismal development
  Homolog annotation: Hit_ID=Q0JF58; Match level="QueryCoverage=100%, HitCoverage=41%, E-value=0.0, Identity=85%"; Hit description=Protein argonaute 4B
  Pfam annotation: Domain name=PAZ; Domain location=1-85; Score=45.3; E_ value=2.3e-10; Accession=PF02170.14; Description=PAZ domain
  Pfam annotation: Domain name=Piwi; Domain location=231-381; Score= -58.6; E_value=1.6e-05; Accession=PF02171.9; Description=Piwi domain
  Pfam module annotation: Pfam domain module=PAZ::Piwi; Domain location= 1-85::231-381
QTFPLKLRDGSNGDGDTIEITVYDYYMKKGIELRYSGDFPCINXGKAKRPTYFPIELCHLIPLQRYTKALSTLQRTSLVEKSRQKPEERMTALNDALQRSNYDSDPMLRSCGISVAPKFTQIEGRVLQAPKLKAGNGEDIFSRNGRWNFTNKKLFETCSVDKWAVVNFSARCDIGKLIHDLIRNASAKGIQMDQPFHMFEESPSMRRAPVSRRVDDMFEQIKSKLPGAPKFLLCLLPERKNCEVYGPWKRKCLAEFGIVTQCLAPTRVNDPYLLNLLMKINAKLGGMNSLLQIETSLAIPHVSKVPTIILGMDVSHGHPGQSDRPSIAAVVSSRQWPRISKYRASVHTQSPRLEMMSSLFKPRGTEDDGLIRESLIDFYTS

SEQ ID NO: 72390 - protein, 392 aa, Setaria italica
  Transcript Sequence Number=SeqID_6416
  Gene Ontology: Mol. function=nucleic acid binding
  Homolog annotation: Hit_ID=Q0JF58; Match level="QueryCoverage=97%, HitCoverage=42%, E-value=1e-159, Identity=71%"; Hit description =Protein argonaute 4B
  Pfam annotation: Domain name=DUF1785; Domain location=227-279; Score =102.5; E_value=1.5e-27; Accession=PF08699.2; Description=Domain of unknown function (DUF1785)
  Pfam annotation: Domain name=PAZ; Domain location=280-391; Score =63.6; E_value=7.5e-16; Accession=PF02170.14; Description=PAZ domain
  Pfam module annotation: Pfam domain module=DUF1785::PAZ; Domain location=227-279::280-391
MGSHDGEADELPPPPPVPPDVVPIKAEDVVGELPPNKPVKPKRVPMVRPGIGRKGQSIQLYSNHFKVSVKSTEDFFFHYHVNLKYEDDRPVDGKGIGRKVIDKLQQTYHSELSNKDFAYDGEKSLFTVGALPQKNNEFTVVLEDAATGKTAANGSPGGNDSPGGGDRKRVRRSYQPKTLKVELTYAAKIPMSAIVQVIRGEESENSLEALRVLDIILRQHSAKQGCLIVRQSFFHNNPSNFVDLGGGVVGCRGFHSSFRGTQSGLSLNIDVSTTMIVKPGPVIDFLLSNQKIDHPNKIDWQKAKRALKNLRIKTIHGNAEFKIFGLSERNCNEQTFPLKLRDGSNGDGDTIEITVYDYYMKKGIELRYSGDFPCINAGKQSASTNEVTTSKF

SEQ ID NO: 72391 - protein, 153 aa, Setaria italica
  Transcript Sequence Number=SeqID_6417
  Gene Ontology: Mol. function=nucleic acid binding; Cellular component= cytoplasm; Biological process=stem cell maintenance
  Homolog annotation: Hit_ID=Q0JF58; Match level="QueryCoverage=90%, HitCoverage=15%, E-value=2e-63, Identity=82%"; Hit description =Protein argonaute 4B
LLFFRIRSLVVLFFKLCHLIPLQRYTKALSTLQRTSLVEKSRQKPEERMTALNDALQRSNYDSDPMLRSCGISVAPKFTQIEGRVLQAPKLKAGNGEDIFSRNGRWNFTNKKLFETCSVDKWAVVNFSARCDIGKLIHDLIRNASAKGIQMDL

SEQ ID NO: 72392 - protein, 90 aa, Setaria italica
  Transcript Sequence Number=SeqID_6418
  Gene Ontology: Mol. function=nucleoside-triphosphatase activity; Cellular component=intrinsic to membrane
  Homolog annotation: Hit_ID=B6TDW7; Match level="QueryCoverage=95%, HitCoverage=37%, E-value=1e-38, Identity=88%"; Hit description =Secretory protein
  Pfam annotation: Domain name=BSP; Domain location=1-90; Score=4.0; E _value=4.1e-07; Accession=PF04450.4; Description=Plant Basic Secretory Protein
KYVGGYSGDVKKEVTGVLYHEVTHVWQWNGQGRANGGLIEGIADYVQLKAGYAPGSWVLPGQGRRWDQGYDVTARFLDYCDSLKAGVSWR

SEQ ID NO: 72393 - protein, 459 aa, Setaria italica
  Transcript Sequence Number=SeqID_6419
  Gene Ontology: Mol. function=protein binding; Cellular component =nucleus; Biological process=ubiquitin-dependent protein catabolic process
  Homolog annotation: Hit_ID=B6UHV2; Match level="QueryCoverage=100%, HitCoverage=80%, E-value=0.0, Identity=74%"; Hit description =Transport inhibitor response 1 protein
ECLKLIAGSFTNFKSLVLVSCEGFSTAGLATIAANCRFLKELDLQESVVKHRGHHWLNCFPKTSTSLESLNFACLAGEVNAYALERLVARSPNLKRLRLNRAVPFDVLSRILGSTPKLEDLGTGSFARGNHPAGYGSLFAAFAKCSSLKSLSGFWDATGLFLQRIFSVCKDLTCLNLSYAPSIQSTNLISIIRRCTKLHVLWLLDNIGDEGLKVVATSCPDLQELRVFPDNSNATTVTEEGLVAISSGCRKLQSVLYFCNRMTNAALITIAKNCPQLTSFRLCILELSSADAVTGLPLDEGFGAIVQSCKGLRRLSMSGLLTDCVFLYIGMYAEKLEMLSVAFAGGTDDGMVYVLNGCKNLKKLEIRDSPFGDTALLAGVDRYEAMRSLWMSSCNITLGACKTLAASMPSVNVEVINEAGANINEVDEDASNAKKVEKLYLYRTIAGPRGDTPGFVSIL

SEQ ID NO: 72394 - protein, 225 aa, Setaria italica
  Transcript Sequence Number=SeqID_6420
TLFSFLSEGKDLFVSTENKMEDLFNLESDIVNLAMSIDTKKTDAEETLYDNDKLSCSHNFLAHDSKFLESRLHSIGEVSISNAELLLGSSLHPFIIEMLENTMDMFGGEYSDLTEDKKYQHTNFLFDCIVESLDSKFCNFGKCGYKAWLKLPLSLSGDLLKCQVLEDISNWRESSGTALRQVSDKEVDQMTARWDANQVEAFDVSIAIENDIIEALVGEFALDLW

SEQ ID NO: 72395 - protein, 71 aa, Setaria italica
  Transcript Sequence Number=SeqID_6421
MMVGKRSGRPAPARHHMRRTTSMTEFAPPDLLAGVPEEELEDEEAELQLLPAHAEGDHHQVQAAGEDPFRK

SEQ ID NO: 72396 - protein, 120 aa, Setaria italica
  Transcript Sequence Number=SeqID_6422
LVHHGVLGHRSITISVSINAFSGICMEGVNSKFLIPEEKLGKPINIELCATYERVAEYCNFSLYLKQEEIQMGLDHSKLLKENNATIESYIQDIYEQLEKGGGEAFGVPDQLIQVFKSST

SEQ ID NO: 72397 - protein, 70 aa, Setaria italica
  Transcript Sequence Number=SeqID_6423
  Subcellular localization annotation: CTP_CleavageSite=31; ConfidenceScore=5.15e-01
ASSSKIMAHLRQNLAMVCRTVAVHDSSITVYLVTVPSPSPCPLTPSRGYAWRESTASRRKFRWGWTTPSC

SEQ ID NO: 72398 - protein, 173 aa, Setaria italica
  Transcript Sequence Number=SeqID_6424
  Gene Ontology: Mol. function=gamma-glutamyltransferase activity; Cellular component=integral to plasma membrane; Biological process =glutathione biosynthetic process
  Homolog annotation: Hit_ID=Q5ZEJ6; Match level="QueryCoverage=100%, HitCoverage=29%, E-value=8e-66, Identity=71%"; Hit description =Putative gamma-glutamyl transpeptidase
  Pfam annotation: Domain name=G_glu_transpept; Domain location=1-168; Score=-302.4; E_value=0.016; Accession=PF01019.13; Description=Gamma- glutamyltranspeptidase
LNNEMDDFSVPAVKLAPDHLPPAPANFIAPGKRPLSSMTPLIILKNGQLAGVVGGSGGTNIIATVTQVFLNHFIVGMDPLAAVQQPRVYHKLIPNVVTYEDETAVDGEVISLSDGAKAFLEQRGHRLRSTDSGAVCQFIVHQLAEPPASGGGVFRGRLTAVSDPRKDGSPAGL

SEQ ID NO: 72399 - protein, 105 aa, Setaria italica
  Transcript Sequence Number=SeqID_6425
  Gene Ontology: Mol. function=gamma-glutamyltransferase activity; Cellular component=integral to membrane; Biological process =glutathione biosynthetic process
  Homolog annotation: Hit_ID=Q5ZEJ6; Match level="QueryCoverage=74%, HitCoverage=12%, E-value=2e-32, Identity=88%"; Hit description =Putative gamma-glutamyl transpeptidase
TARATCAWWDSDRNAVAMTTTVNYYFGGKVLSPSTGIVLNNEMDDFSVPAVKLAPDHLPPAPANFIAPGKRPLSSMTPLIILKNGQLINRSSQENNDKSIEQTEK

SEQ ID NO: 72400 - protein, 73 aa, Setaria italica
  Transcript Sequence Number=SeqID_6426
GPSSHLAVSYLQFLAIFLLKNIFSMHNCLILSNKINNMQGIFFMPNPAVELFQLCYLCTNVNKQIIPICAIPV

SEQ ID NO: 72401 - protein, 67 aa, Setaria italica
  Transcript Sequence Number=SeqID_6427
MIFSTLFLLFCFTWSLRLKRVTAESHGSAGTDQNCSTLDQVKEKLQRVGLESSNLVIGVDFTRSNEW

SEQ ID NO: 72402 - protein, 76 aa, Setaria italica
  Transcript Sequence Number=SeqID_6428
  Homolog annotation: Hit_ID=B6TM01; Match level="QueryCoverage=100%, HitCoverage=21%, E-value=2e-32, Identity=89%"; Hit description =Protein TSSC1
LPGHSHWTWTVQHNPEYDELLLSAGTDSTVNLWLAQVSSNDSGTDSPGSPKRQEEPLLNSYTDYEDSIYGIAWSSH

SEQ ID NO: 72403 - protein, 350 aa, Setaria italica
  Transcript Sequence Number=SeqID_6429
  Gene Ontology: Mol. function=protein binding; Cellular component =phagocytic vesicle
  Homolog annotation: Hit_ID=B6TM01; Match level="QueryCoverage=100%, HitCoverage=100%, E-value=0.0, Identity=90%"; Hit description =Protein TSSC1
  Pfam annotation: Domain name=WD40; Domain location=111-150; Score =12.5; E_value=1.3; Accession=PF00400.24; Description=WD domain, G -beta repeat
  Pfam annotation: Domain name=WD40; Domain location=200-238; Score =11.2; E_value=1.9; Accession=PF00400.24; Description=WD domain, G -beta repeat
  Pfam annotation: Domain name=WD40; Domain location=243-282; Score =26.4; E_value=0.00011; Accession=PF00400.24; Description=WD domain, G-beta repeat
  Pfam annotation: Domain name=WD40; Domain location=303-342; Score =10.0; E_value=2.6; Accession=PF00400.24; Description=WD domain, G -beta repeat
  Pfam module annotation: Pfam domain module=WD40::WD40::WD40::WD40; Domain location=111-150::200-238::243-282::303-342
MQGGSSGIVYGGLKYQARCIADVRADAGSTTFLAGTLSLKEENEVHLIRLSPAESELVCDGLFYHPDEIWDLKSCPFDHRVFSTVYTSGEGYGAAVWKIPEQHGQSNSPQLEQLFELTGHTGKIRRVLWWPLGKHDKLISIDDRNIYLWNIDTSNKSAKMISQGSADMLPNLRGGAWDPHNHNSIAAISDSSLHLWDLRSMDKSIAIEHAHIRDVDYNPKKQNIIATAEDEFGIRLWDLRMLKHPLKDLPGHSHWTWTVQHNPEYDELLLSAGTDSTVNLWLAQVSSNDSGTDSPGSPKRQEEPLLNSYTDYEDSIYGIAWSSHDPSLFASLSYDGRVVLESVKPYLPRK

SEQ ID NO: 72404 - protein, 363 aa, Setaria italica
  Transcript Sequence Number=SeqID_6430
  Gene Ontology: Mol. function=hydrolase activity, hydrolyzing O -glycosyl compounds; Cellular component=anchored to membrane; Biological process=carbohydrate metabolic process
  Homolog annotation: Hit_ID=B6TIF7; Match level="QueryCoverage=100%, HitCoverage=75%, E-value=0.0, Identity=87%"; Hit description=Glucan endo-1,3-beta-glucosidase A6
  Pfam annotation: Domain name=Glyco_hydro_17; Domain location=1-243; Score=138.2; E_value=2.6e-38; Accession=PF00332.10; Description =Glycosyl hydrolases family 17
  Pfam annotation: Domain name=X8; Domain location=268-357; Score =150.8; E_value=4.2e-42; Accession=PF07983.5; Description=X8 domain
  Pfam module annotation: Pfam domain module=Glyco_hydro_17::X8; Domain location=1-243::268-357
TRVKFLLVGNEILSDYSIANSTWLRLVPAMENIHLSLRKRGISSVKIGTTLAMDALADGDFPRPPSAAAFRPDIAASVVRPLLHFLNGTNSYYFVDAYPYFVWAGHNLTVPLDYALFQGGHTRYVDPVTGLTYTNLLDEMLDAVTIAMAKLGYGRVKLAVAETGWPNGCDYDQIGGNVHNAAIYNRNLAARMAKNPGTPLRPGAKMPVFVFSLYNEDLKGGPGTERHWGLYYANGTAVYPIDLTGRRPLWSYPPLPALENNTPYKGPIWCVLSAAASKKLNETAVGNALAYACGQGNGTCAAIQPGEKCYLPNTTVAHASYAFNSYWQQFRKTGATCYFNNLAEQTIKNPSHGSCKFRSSLDS

SEQ ID NO: 72405 - protein, 90 aa, Setaria italica
  misc_feature (13)..(13): Xaa can be any naturally occurring amino acid
  Transcript Sequence Number=SeqID_6431
RRHDEAVAVVREXLYLAENQIPFFVVDKVHRLAVPDAGVPATDAIAGYVRELLRGQQYSVATPVVAAPPGPGNLLHLLHMHLTPTALSPT

SEQ ID NO: 72406 - protein, 99 aa, Setaria italica
  misc_feature (11)..(11): Xaa can be any naturally occurring amino acid
  Transcript Sequence Number=SeqID_6432
  Homolog annotation: Hit_ID=Q9FFF3; Match level="QueryCoverage=59%, HitCoverage=6%, E-value=6e-11, Identity=50%"; Hit description=Low density lipoprotein B-like protein
  Subcellular localization annotation: CTP_CleavageSite=14; ConfidenceScore=5.09e-01
SLSSLSPPPEXSPAASAASPSPSAGGRARLYALAARAKYLVDTPEHIWGRLDEGLLLEAAGRYLRAQVVHGRLSRDAAAAARFPLLTHQAQLVEAFRPQ

SEQ ID NO: 72407 - protein, 234 aa, Setaria italica
  misc_feature (74)..(74): Xaa can be any naturally occurring amino acid
  misc_feature (108)..(108): Xaa can be any naturally occurring amino acid
  Transcript Sequence Number=SeqID_6433
  Homolog annotation: Hit_ID=Q7XXF8; Match level="QueryCoverage=86%, HitCoverage=24%, E-value=2e-24, Identity=35%"; Hit description =OSJNBa0095E20.14 protein
  Pfam annotation: Domain name=DUF594; Domain location=145-203; Score =72.4; E_value=1.7e-18; Accession=PF04578.5; Description=Protein of unknown function, DUF594
DFEKSILVWHIATQVYLWESSKFDDQHSTEEARNRQQQLAEAIKMASDYMMFLLVAKPDMLPSTARAAHICNSXMSIAASCWSISTQLITTMAPPSHNKHRGLRRGFXGNFRSIPNRESLVTEMMSFTGHIDGSACYCGLTLAEELLRMESSAPDLLEMVFEVWLQLLCHAAHQCARDSHPRQLNTGGEFITIVWLLTHHMETLGKTEGQNRTMSLDVTGPVRLNDHLARVNTI

SEQ ID NO: 72408 - protein, 218 aa, Setaria italica
  Transcript Sequence Number=SeqID_6434
  Gene Ontology: Cellular component=cell wall
  Homolog annotation: Hit_ID=B9RSW6; Match level="QueryCoverage=99%, HitCoverage=27%, E-value=2e-62, Identity=52%"; Hit description =Inosine-uridine preferring nucleoside hydrolase, putative
TDMDTDDVLALLYILKHNRSEFDVKAITINANEWSDAGHAVNHVYDILYMMGRDDIAVGVGGDGGISGAGDIRPNVGGYLPLIYQGMSTAGGCRYRQAIPPGRGGRLDIDTNSGVRRGFLPQGPRGYRPLRQPTAQRVMADTLSAGPTSVLLLGAHTNLALLLMTHPHLRRNVERIYVSGGAVRVAGNLFTATAANPFAEFNFFGDPFAAYQVAPLGR

SEQ ID NO: 72409 - protein, 83 aa, Setaria italica
  misc_feature (18)..(18): Xaa can be any naturally occurring amino acid
  Transcript Sequence Number=SeqID_6435
  Gene Ontology: Mol. function=nickel ion binding; Biological process =nitrogen compound metabolic process
  Homolog annotation: Hit_ID=Q7Y0S0; Match level="QueryCoverage=95%, HitCoverage=26%, E-value=2e-23, Identity=64%"; Hit description =Putative urease accessory protein D
MAEAATGAVRVQKVRGRXSALTRCFARYPLKLIAPSKMGPASCDAVWLYALTYGGGIVSGDTISCTVSVGDGCTAAITTQAST

SEQ ID NO: 72410 - protein, 109 aa, Setaria italica
  Transcript Sequence Number=SeqID_6436
VEEEGKACARHTRRAHPSPPGEKAEIFRIRTLILSPLSDDAPPPLPSNPSLSRCSVGRRASARPWSARSYLQTQPTHQHGRRPGSVGGDDATGLPSPPPTRPQLQPQPR

SEQ ID NO: 72411 - protein, 103 aa, Setaria italica
  Transcript Sequence Number=SeqID_6437
  Gene Ontology: Mol. function=glycolipid transporter activity; Cellular component=cytoplasm; Biological process=glycolipid transport
  Homolog annotation: Hit_ID=B9SS59; Match level="QueryCoverage=72%, HitCoverage=36%, E-value=1e-11, Identity=41%"; Hit description =Glycolipid transfer protein, putative
  Pfam annotation: Domain name=GLTP; Domain location=10-102; Score=5.7; E_value=1.7e-05; Accession=PF08718.3; Description=Glycolipid transfer protein (GLTP)
FFFTCLIRRLVAVHAGVLVVSADKIGPTMAVLRLDVQRNIERLQELYLLDPAKYSTLTEIVEKEVTEGTARKVDSCARAVLWLARSMDFAIALLQRLEEDSDL

SEQ ID NO: 72412 - protein, 128 aa, Setaria italica
  Transcript Sequence Number=SeqID_6438
  Gene Ontology: Mol. function=sequence-specific DNA binding; Cellular component=nucleus
  Homolog annotation: Hit_ID=B6SWM4; Match level="QueryCoverage=100%, HitCoverage=19%, E-value=1e-46, Identity=77%"; Hit description=BEL1 -related homeotic protein 30
PEDSFMSLMLKAQRPGETAGSSLLHHAVAHQSDESTQFMAYHLAELGRYSNNNVSLTLGLQHAENSLSSVPNTQTQPGFPGVRDEDIYNATAPLNVTSTSSDYESTNQMDQQQRQRFEPSPLMHDFVA

SEQ ID NO: 72413 - protein, 83 aa, Setaria italica
  Transcript Sequence Number=SeqID_6439
  Gene Ontology: Mol. function=sequence-specific DNA binding; Cellular component=nucleus
  Homolog annotation: Hit_ID=B6SWM4; Match level="QueryCoverage=97%, HitCoverage=12%, E-value=1e-23, Identity=78%"; Hit description=BEL1 -related homeotic protein 30
TRRYSNNNVSLTLGLQHAENSLSSVPNTQTQPGFPGVRDEDIYNATAPLNVTSTSSDYESTNQMDQQQRQRFEPSPLMHDFVA

SEQ ID NO: 72414 - protein, 70 aa, Setaria italica
  misc_feature (8)..(8): Xaa can be any naturally occurring amino acid
  Transcript Sequence Number=SeqID_6440
  Gene Ontology: Mol. function=sequence-specific DNA binding; Cellular component=nucleus
  Homolog annotation: Hit_ID=B6SWM4; Match level="QueryCoverage=70%, HitCoverage=7%, E-value=1e-17, Identity=93%"; Hit description=BEL1 -related homeotic protein 30
EEETDGGXKSEGVSSNPQESGANAAAELSTAEKQELQNKMAKLMAMLDEVCESTALVPYHFSNTTMFLLD

SEQ ID NO: 72415 - protein, 450 aa, Setaria italica
  Transcript Sequence Number=SeqID_6441
  Gene Ontology: Mol. function=sequence-specific DNA binding; Cellular component=nucleus; Biological process=regulation of transcription, DNA-dependent
  Homolog annotation: Hit_ID=B6SWM4; Match level="QueryCoverage=97%, HitCoverage=67%, E-value=0.0, Identity=81%"; Hit description=BEL1 -related homeotic protein 30
  Pfam annotation: Domain name=Homeobox; Domain location=192-250; Score= 2.3; E_value=0.0071; Accession=PF00046.21; Description=Homeobox domain
  Pfam annotation: Domain name=POX; Domain location=1-142; Score=262.7; E_value=8.7e-76; Accession=PF07526.3; Description=Associated with HOX
  Pfam module annotation: Pfam domain module=Homeobox::POX; Domain location=192-250::1-142
RAIRNSKYLKAAQELLDEIVSVWKSVKQKADKGPAESGKTDGKETDGGTKSEGVSSNPQESGANAAAELSTAEKQELQNKMAKLMAMLDEVDRKYKHYYHQMQLVMSSFDMVAGSGAAKPYTAVALQTISRHFRCLKDAINDQIAVIRKKLGEDDSTSGKEGKLTRLRYIDQQIRQQRAFQQYGMLQQNAWRPQRGLPENSVSILRAWLFEHFLHPYPKDSEKLMLSRQTGLTRSQISNWFINARVRLWKPMIEDMYKEEVGDVELDSNSSSDNGARSKDKAPSSEEKEDLKTSTSQACQSSQLDESKANVGGMMSLGGAPAGSFHNEVNPEDSFMSLMLKAQRPGETAGSSLLHHAVAHQSDESTQFMAYHLAELGRYSNNNVSLTLGLQHAENSLSSVPNTQTQPGFPGVRDEDIYNATAPLNVTSTSSDYESTNQMDQQQRRVVLLV

SEQ ID NO: 72416 - protein, 135 aa, Setaria italica
  Transcript Sequence Number=SeqID_6442
  Homolog annotation: Hit_ID=B6TT97; Match level="QueryCoverage=92%, HitCoverage=34%, E-value=3e-13, Identity=34%"; Hit description=F-box protein interaction domain containing protein
PAAGGGDARLAHSGGRLHYVANDGAQLKVWVLDDDDGSSPAAPRWRLKHAVRLDGVAEGGCGGDEEVRFMALHPEKDAAYLWSARRLVEYDLMRKEVTGAWEFGDGEKNRVVKAWLVPSSLYLSDCPLADAHVPC

SEQ ID NO: 72417 - protein, 84 aa, Setaria italica
  Transcript Sequence Number=SeqID_6443
  Pfam annotation: Domain name=zf-CCHC; Domain location=6-23; Score =7.3; E_value=0.043; Accession=PF00098.15; Description=Zinc knuckle
MHTVASRCSRCGGCGHSSIACRVAATACQRGSEAATMRCGGGGAAAGLRLFGVQLGAASTSGGGASPALQLHKSYSVDCLNLQA

SEQ ID NO: 72418 - protein, 251 aa, Setaria italica
  Transcript Sequence Number=SeqID_6444
  Gene Ontology: Cellular component=cytoplasm; Biological process=rRNA processing
  Homolog annotation: Hit_ID=B6TSA2; Match level="QueryCoverage=99%, HitCoverage=46%, E-value=1e-106, Identity=76%"; Hit description =Small nucleolar ribonucleoprotein complex subunit
  Pfam annotation: Domain name=U3_snoRNA_C; Domain location=99-245; Score=202.2; E_value=1.4e-57; Accession=PF09384.2; Description=U3 small nucleolar RNA C terminal
  Pfam annotation: Domain name=Utp13; Domain location=120-239; Score= -43.2; E_value=0.035; Accession=PF08625.3; Description=Utp13 specific WD40 associated domain
  Pfam module annotation: Pfam domain module=U3_snoRNA_C::Utp13; Domain location=99-245::120-239
TRLLSAGIDGYVKCFDFGKLKITHSLRHPQPLLSVACSPCGTVLVAGSAKGKIYMGKRKKKAVDEEDEGTKAGSGEIDWVSPEPEKPVLKPNYFRYFLRGQNEKAKEGDFVIKKPKKVKIAEHDKLLRKFRHKEALVSALVKNNPRSAVAVMEELVARRKLVRCIGNLDKEELGLLLEFLRRNATLPRYARFLLGVANKVVEMREEDIRSDDKLRMHIRNLKRMVGEEIQIQHTLQGIQGMISPMLALAAR

SEQ ID NO: 72419 - protein, 92 aa, Setaria italica
  Transcript Sequence Number=SeqID_6445
  Subcellular localization annotation: CTP_CleavageSite=57; ConfidenceScore=5.83e-01
MPTSVTLPLPAVGAVAASPVTTAAGAATPLRCRPLRLFATPAATASSSPSTSASAVSSALPSARRIRKHLAGRDGAPSKPTKPRVFFLDVNP

SEQ ID NO: 72420 - protein, 69 aa, Setaria italica
  Transcript Sequence Number=SeqID_6446
  Gene Ontology: Mol. function=zinc ion binding; Cellular component =intracellular
  Homolog annotation: Hit_ID=C5L6T8; Match level="QueryCoverage=97%, HitCoverage=95%, E-value=1e-10, Identity=51%"; Hit description=Zinc finger protein, putative
  Pfam annotation: Domain name=DUF1909; Domain location=2-63; Score =33.8; E_value=6.9e-07; Accession=PF08927.2; Description=Domain of unknown function (DUF1909)
MTRGKQKIDAQRRNAEKNQKAKGSQIEARAVGLKVVCPICKVQLANEKQLTDHYGSKHPKEKPPSTSNA

SEQ ID NO: 72421 - protein, 78 aa, Setaria italica
  Transcript Sequence Number=SeqID_6447
  Subcellular localization annotation: CTP_CleavageSite=19; ConfidenceScore=5.47e-01
SKSNLAVKASSRRAAASASASHETGLIAAARRLAPPASSATSVLVPRTGRKVWLCWPLPQLTSDSCRFCTRAANFTTG

SEQ ID NO: 72422 - protein, 285 aa, Setaria italica
  Transcript Sequence Number=SeqID_6448
  Gene Ontology: Mol. function=hydrolase activity, hydrolyzing O -glycosyl compounds; Cellular component=cell wall; Biological process= carbohydrate metabolic process
  Homolog annotation: Hit_ID=C0IRH2; Match level="QueryCoverage=85%, HitCoverage=73%, E-value=1e-95, Identity=65%"; Hit description =Xyloglucan endotransglucosylase/hydrolase 13
  Pfam annotation: Domain name=Glyco_hydro_16; Domain location=1-171; Score=263.4; E_value=5.3e-76; Accession=PF00722.13; Description =Glycosyl hydrolases family 16
  Pfam annotation: Domain name=XET_C; Domain location=200-245; Score =28.3; E_value=1.5e-05; Accession=PF06955.4; Description=Xyloglucan endo-transglycosylase (XET)
  Pfam module annotation: Pfam domain module=Glyco_hydro_16::XET_C; Domain location=1-171::200-245
RNRNGRRVHLALDETTGAGFASQDLFLHGFFSAAIKLPADYAAGVVVAFYLSNGDVYEKTHDELDFEFLGNVRGREWRVQTNVYGNGSTHAGREERYDLPFDPTDDFHHYSILWTSRRIVFYVDETPIREVVRTAAMGAAFPSKPMSLYATIWDGSAWATLGGRYRVNYKYAPFVAEFTDLAIQGCAVDPTDDRLSAAACDARASLESLAVPAGQRAAMAAFRRAHTSYSYCHDRRRYPAALPDCAGAGLPGRMFGPDGMKLHRRHRAGAAAAARGHRGARDDVM

SEQ ID NO: 72423 - protein, 357 aa, Setaria italica
  Transcript Sequence Number=SeqID_6449
  Gene Ontology: Mol. function=hydrolase activity, hydrolyzing O -glycosyl compounds; Cellular component=cell wall; Biological process= carbohydrate metabolic process
  Homolog annotation: Hit_ID=C0IRH3; Match level="QueryCoverage=80%, HitCoverage=83%, E-value=5e-81, Identity=52%"; Hit description =Xyloglucan endotransglucosylase/hydrolase 14
  Pfam annotation: Domain name=Glyco_hydro_16; Domain location=42-227; Score=296.8; E_value=4.5e-86; Accession=PF00722.13; Description =Glycosyl hydrolases family 16
  Pfam annotation: Domain name=XET_C; Domain location=264-308; Score =25.3; E_value=3.4e-05; Accession=PF06955.4; Description=Xyloglucan endo-transglycosylase (XET)
  Pfam module annotation: Pfam domain module=Glyco_hydro_16::XET_C; Domain location=42-227::264-308
GQRLGAAMAVKAALLLAAATWVCLSAAAASAFEFEDVPTVAFDERFSPLFGDGNLVRSSDDRSVRLLLDRRSGSGFISSDYYLHGFFSASIKLPKDYTAGVVVAFYLSNGDVYEKTHDELDFEFLGSRWGGQWRVQTNVYGNGSTSHGREERYLLPFDPTLEAHRYSVLWAPTHIIFYIDDTPIREVIRHPDMGGDFPAKPMAVYATIWDGSAWATEGGKYKVNYKYAPFASEFSDLAVVGPRADSVLRFPRRAGAGADQDLLGLMTADYAVMTPQKRAAMRAFRARQMTYTVCYDAVRYASGPFPECDNSDEERENFSAWGESKTVVMRPRARGRRRGRKAGAGAGAKGRTGVASS

SEQ ID NO: 72424 - protein, 209 aa, Setaria italica
  Transcript Sequence Number=SeqID_6450
  Subcellular localization annotation: CTP_CleavageSite=25; ConfidenceScore=5.23e-01
SRAPVAAIPVRQFLARYSSPVFQPRAAELGPSLAARVALGLRPQLSGLNLLKGFGTCTALGMALHQGKVTATTRDLPSNAVTRPPPGSLKNELGSFWPLVRKLQLPIGLMFLILTGWQYPLGLTINILLLIYCSRPSRYSIYLFLQELRHREMGQNNAMWKEELVHTRNVDVQDYKFFSIGTVELPDGRVLHLIGMLGSWWIHHVSYVK

SEQ ID NO: 72425 - protein, 122 aa, Setaria italica
  Transcript Sequence Number=SeqID_6451
  Gene Ontology: Mol. function=transporter activity; Cellular component= membrane; Biological process=sodium ion transport
  Homolog annotation: Hit_ID=Q768R4; Match level="QueryCoverage=76%, HitCoverage=16%, E-value=1e-40, Identity=94%"; Hit description =Plastidic general dicarboxylate transporter
RLSAAPRRGLPLPLLASQASHSNPEPESAGAKLVPLVISVAIGLAVRFLAPRPAEVSLQGWQLLSIFLSTIAGLVLGPLPVGAWAFLGLTAAVATRTLPFTAAFSAFTNEVIWLIVISFFFA

SEQ ID NO: 72426 - protein, 50 aa, Setaria italica
  misc_feature (23)..(23): Xaa can be any naturally occurring amino acid
  Transcript Sequence Number=SeqID_6452
MWAASCLASCCAACACEACRTAXGLFALSLFASWALREVAAPLLQSIPWI

SEQ ID NO: 72427 - protein, 53 aa, Setaria italica
  Transcript Sequence Number=SeqID_6453
  Gene Ontology: Mol. function=nucleoside-triphosphatase activity; Cellular component=chloroplast; Biological process=nucleotide -excision repair
  Homolog annotation: Hit_ID=Q7F9I1; Match level="QueryCoverage=84%, HitCoverage=5%, E-value=8e-10, Identity=71%"; Hit description =OSJNBa0039C07.4 protein
SPSFTSPAIMRLLEDSLAEKMLAGEVKEGDSCIVDVDSEGSATPLLPFRTITL

SEQ ID NO: 72428 - protein, 85 aa, Setaria italica
  misc_feature (62)..(62): Xaa can be any naturally occurring amino acid
  Transcript Sequence Number=SeqID_6454
  Gene Ontology: Cellular component=membrane
  Homolog annotation: Hit_ID=A6MZY1; Match level="QueryCoverage=92%, HitCoverage=35%, E-value=1e-33, Identity=88%"; Hit description =Serine incorporator 3 (Fragment)
TLYLDIFSVGSEAEDKKDVPRPVTYSYSFFHLIFSLASMYSAMLLTGWSTSIGESGKLVDVXWPSVWVRIATQWATAGLFIWSLV

SEQ ID NO: 72429 - protein, 77 aa, Setaria italica
  Transcript Sequence Number=SeqID_6455
  Gene Ontology: Cellular component=membrane
  Homolog annotation: Hit_ID=A6MZY1; Match level="QueryCoverage=57%, HitCoverage=20%, E-value=3e-18, Identity=97%"; Hit description =Serine incorporator 3 (Fragment)
MKNRLSPQSCPDGVNLFFIVFTLILVFAFAIVALHPKINGSLLPASVIGLYCTYLCYSGLSSEPRDYECNGLHITQS

SEQ ID NO: 72430 - protein, 62 aa, Setaria italica
  misc_feature (13)..(13): Xaa can be any naturally occurring amino acid
  Transcript Sequence Number=SeqID_6456
  Gene Ontology: Mol. function=nucleoside-triphosphatase activity; Cellular component=chloroplast; Biological process=nucleotide -excision repair
  Homolog annotation: Hit_ID=O98447; Match level="QueryCoverage=54%, HitCoverage=3%, E-value=1e-11, Identity=94%"; Hit description=ClpC protease
TQILRGLRERYEXHHKLRYTDEALVAAAQLSYQYIRFAKRRSFIKLWLICHVHTNMYHCWFL

SEQ ID NO: 72431 - protein, 90 aa, Setaria italica
  Transcript Sequence Number=SeqID_6457
  Gene Ontology: Mol. function=nucleoside-triphosphatase activity; Cellular component=chloroplast; Biological process=nucleotide -excision repair
  Homolog annotation: Hit_ID=Q7F9I1; Match level="QueryCoverage=100%, HitCoverage=10%, E-value=3e-43, Identity=96%"; Hit description =OSJNBa0039C07.4 protein
  Pfam annotation: Domain name=UVR; Domain location=9-44; Score=55.0; E_ value=2.8e-13; Accession=PF02151.11; Description=UvrBuvrC motif
LPDEAKELDKELRQITKQKNEAVRGQDFEKAGELRDREMELKAQITAIIDKSKEMIKAETESGEVGPLVTEADIQHIVSSWTGIPVEKVS

SEQ ID NO: 72432 - protein, 156 aa, Setaria italica
  Transcript Sequence Number=SeqID_6458
  Gene Ontology: Mol. function=nucleoside-triphosphatase activity; Cellular component=chloroplast; Biological process=nucleotide -excision repair
  Homolog annotation: Hit_ID=Q7F9I1; Match level="QueryCoverage=71%, HitCoverage=12%, E-value=6e-43, Identity=78%"; Hit description =OSJNBa0039C07.4 protein
QVIRMVGESTEAVGAGVGGGTSGQKMPTLEEYGTNLTKLAEEGKLDPVVGRQNQIERVTQILGRRTKNNPCLIGEPGVGKTAIAEGLAQRIANGDVPETIEGKKVCLDQPILDPCCYVSIDCCTCYSSQMCPLREDSSFSLPNYVVCSNEHVAFTR

SEQ ID NO: 72433 - protein, 395 aa, Setaria italica
  misc_feature (305)..(305): Xaa can be any naturally occurring amino acid
  misc_feature (325)..(325): Xaa can be any naturally occurring amino acid
  Transcript Sequence Number=SeqID_6459
  Gene Ontology: Mol. function=protein binding; Cellular component =membrane; Biological process=induction of apoptosis
  Homolog annotation: Hit_ID=Q9S9L9; Match level="QueryCoverage=92%, HitCoverage=87%, E-value=1e-135, Identity=65%"; Hit description =T24D18.26 protein
  Pfam annotation: Domain name=Serinc; Domain location=8-393; Score =546.4; E_value=3.4e-161; Accession=PF03348.7; Description=Serine incorporator (Serinc)
MWAASCLASCCAACACEACRTAVGSIGRRSARIAYCGLFALSLFASWALREVAAPLLQSIPWINHFHKTPDREWFETDAVLRVSLGNFLFFTILAVIMAGIKDQKDPRDKIHHGGWMAKIFCWAIIVFLMFFVPNGVVSFYESISKFGSGLFLLVQVVLLLDFVHGWNENWVAKDEQFWYMALLVVSVVCYIATFSFSGLLFHWFTPSGHDCGLNLFFIVFTLILVFAFAIVALHPKINGSLLPASVIGLYCTYLCYSGLSSEPRDYECNGLHNHSKAVSTGSLTLGLLTTILSVVYSAVPLSWXSSATVLSPPDSPRGTDKPLXPFSKADEQEDKKDVPRPVTYSYSFFHLIFSLASMYSAMLLTGWSTSIGESGKLVDVGWPILVLGYKDCNP

SEQ ID NO: 72434 - protein, 86 aa, Setaria italica
  Transcript Sequence Number=SeqID_6460
RTSGILEGGAGLSNKQALDFFTGLQSLRIGRCYGCVMAQIESYRITRPLRIKVYAFLYNNWKAIVGVGSVIGVLASILRAIKSLNG

SEQ ID NO: 72435 - protein, 71 aa, Setaria italica
  misc_feature (53)..(53): Xaa can be any naturally occurring amino acid
  Transcript Sequence Number=SeqID_6461
HSQVLRGAAGSKQTAAHTPHHLILLRHTTAQCTQLAKNQPWLKSSKKLPPPLXHHLPSVADHPPYRPSSVR

SEQ ID NO: 72436 - protein, 193 aa, Setaria italica
  Transcript Sequence Number=SeqID_6462
  Gene Ontology: Mol. function=nucleotide binding; Biological process =defense response
  Homolog annotation: Hit_ID=A1Z0J5; Match level="QueryCoverage=38%, HitCoverage=42%, E-value=2e-31, Identity=84%"; Hit description=NBS -LRR-like resistance protein (Fragment)
IIDEHAYLAAQAVDTGSFFKRKFRQIKNFVAWQKFTSQISQVEARIQRLGEMRNRYGISVGEIHRSNKLRHPNQLFMSESSYLTDNSEIVGHADEIERLTQWLLEEKQERTLIAIFGMGGLGKSTIASSAYKNQKISRTFDCHAWVTVSQTYQVEELLREIINQLIDQRASVAGGFMTMSRLRLVEVIQSYLR

SEQ ID NO: 72437 - protein, 143 aa, Setaria italica
  misc_feature (40)..(40): Xaa can be any naturally occurring amino acid
  Transcript Sequence Number=SeqID_6463
  Gene Ontology: Mol. function=DNA binding; Cellular component=nucleus
  Homolog annotation: Hit_ID=Q69MC4; Match level="QueryCoverage=67%, HitCoverage=28%, E-value=4e-12, Identity=55%"; Hit description=DNA -binding protein-like
  Subcellular localization annotation: CTP_CleavageSite=58; ConfidenceScore=5.53e-01
VISFFLFSATFLAPSMSAAVPPRAVRDLSVSLAGPHGQIXVGGTVAGPLVAATTVVILAAAFTDLTFHRLPLEDDASVSVSGSAEADEHRGHQPPEPQDAGGLHPHLRSMAPGTQPVPSYARQSSQEVWPPAGSAQRPRPPYQ

SEQ ID NO: 72438 - protein, 314 aa, Setaria italica
  Transcript Sequence Number=SeqID_6464
  Gene Ontology: Cellular component=Golgi apparatus
  Homolog annotation: Hit_ID=B9SB27; Match level="QueryCoverage=89%, HitCoverage=31%, E-value=1e-18, Identity=27%"; Hit description=Early endosome antigen, putative
MKEFFSEMKIRLHGYEMELDMKHEVCSVIQNEAVAQAMFDSLLLEKKGCAEEESKQKQKIENLKRIVDSFTEVVRKKEEFVSQIGLRAMEARVGSLCHEIDLLREKVGKQDSYISEKNKEFDNIMGRLEQAQQHVQNDDAILSELNDRFRTVSASLKELEKQNQVLHTIIEEKEKGLTSAVSKDKELNEFMESVVKSVRGFEKFMSDQLTVIANKVQHNESRFCVLKEQCKHLVKEGNLLRKKALRYKEISETRGSNLQKAELEVDLLGDEVEALTDLLAKVYIALDHYSPVLQHYTGVMETLTMIKKHISMAN

SEQ ID NO: 72439 - protein, 84 aa, Setaria italica
  Transcript Sequence Number=SeqID_6465
LGTHRGGCDADVLALLLLFGRRAGDDTLGFCCSPDGGMLGLPPMRDRHGKRICIRDGDKERLSCPTSPTVPVGSMSGGGAGDVR

SEQ ID NO: 72440 - protein, 155 aa, Setaria italica
  Transcript Sequence Number=SeqID_6466
  Gene Ontology: Mol. function=DNA binding; Cellular component=nucleus; Biological process=regulation of transcription
  Homolog annotation: Hit_ID=Q5Y5S5; Match level="QueryCoverage=31%, HitCoverage=13%, E-value=1e-11, Identity=67%"; Hit description=Myb transcription factor
LDNGGYYGMGSPHHHGMMAMEGGGGCFMRGEGLFGVAPLLDAMSAQDQDQAGQALIASSGGNNNPKNNSSNNTAETTTTVSNNESNITDNNTTNTKDNNINAMSLVNSGSSNVAAVYWEGAHQQYMSRNVMHGEWDLEELMKDVSSLPFLDFQVE

SEQ ID NO: 72441 - protein, 175 aa, Setaria italica
  Transcript Sequence Number=SeqID_6467
  Homolog annotation: Hit_ID=B6U143; Match level="QueryCoverage=93%, HitCoverage=37%, E-value=5e-29, Identity=50%"; Hit description=BEL1 -related homeotic protein 13
RQLIGFGEPADAAASFLVDGGSMLAGQLQLIRAAAPQSVSPVETARGAYGGYEPSPSDVTVAHAPKVAKHLAGEMEGSWIHEPYCCPTWFFSGDSFRDPFAAAASELSLRLRRAESSPTGAVHVSLPDQSPEVSCSGLTHASSAGTGGGVFQPPCGGGGEMAPLHFSQVLPRWSA

SEQ ID NO: 72442 - protein, 53 aa, Setaria italica
  Transcript Sequence Number=SeqID_6468
VSWYNCCSAIDHMVQDMMNLNELQERGIIGCSISLFQKCYFLMLLHFCKGLIL

SEQ ID NO: 72443 - protein, 62 aa, Setaria italica
  Transcript Sequence Number=SeqID_6469
KKRKQLIKYESCYKLSSKNMATLKEWPQCYTCVLRQTMSSPNILRIIVARLGDYKSFPDSLN

SEQ ID NO: 72444 - protein, 81 aa, Setaria italica
  Transcript Sequence Number=SeqID_6470
  Subcellular localization annotation: CTP_CleavageSite=54; ConfidenceScore=5.32e-01
DFWRPYIVVTSSKTGGIIRKSGAYSGTLALSLAQPWTIANRRRFRRTSGPPPSVPDAKQNPPLLRRPPARPPRWRPRSSPP

SEQ ID NO: 72445 - protein, 318 aa, Setaria italica
  Transcript Sequence Number=SeqID_6471
  Gene Ontology: Mol. function=hydrolase activity, hydrolyzing O -glycosyl compounds; Cellular component=extracellular region; Biological process=carbohydrate metabolic process
  Homolog annotation: Hit_ID=Q84V65; Match level="QueryCoverage=99%, HitCoverage=95%, E-value=3e-95, Identity=59%"; Hit description =Glucan endo-1,3-beta-D-glucosidase
  Pfam annotation: Domain name=Glyco_hydro_17; Domain location=17-317; Score=593.8; E_value=1.8e-175; Accession=PF00332.10; Description =Glycosyl hydrolases family 17
ALLIGILASIPTAVHSIGVCYGTHGDGLPSAADVVQLYRSNGINRMRIYSPDATILKALRGSGIDVIVDETDLNALLSDASVWVQANVLPYKDDVKFKYIAVGNEVEGSDTQKILPAMQKLNAALSAAGLSNIKVSTAVKMSVLDTPSSPPSNGVFADPSIMGPIVQFLASTGSPLLANIYPYFAYKGADGNIDLNYALFKPSPPTSNGPEYTNLFDAMTDAMYTAMEKVGGSNVPIVVSESGWPSDGGFGASVQNAQTYNQNLIHHVGKGTPKRPGALETYIFAMFNENKKTGDETEKHFGLFNGQNKSPVYTIRFQ

SEQ ID NO: 72446 - protein, 247 aa, Setaria italica
  misc_feature (229)..(229): Xaa can be any naturally occurring amino acid
  Transcript Sequence Number=SeqID_6472
  Gene Ontology: Mol. function=protein tyrosine kinase activity; Biological process=protein amino acid phosphorylation
  Homolog annotation: Hit_ID=B6SWU9; Match level="QueryCoverage=99%, HitCoverage=36%, E-value=1e-119, Identity=82%"; Hit description =Lectin-like receptor kinase 7
  Pfam annotation: Domain name=Lectin_legB; Domain location=1-213; Score=291.8; E_value=1.5e-84; Accession=PF00139.11; Description =Legume lectin domain
  Subcellular localization annotation: CTP_CleavageSite=37; ConfidenceScore=5.25e-01
PGLLELTNGTAQLKGHAVHPAPLRFRRSPGGPVRSFSASFVFGIIPAYADLSGHGIVFFVGNNSFSTALPSQYLGFLNDTNNGNASNHIFGVELDTIRSTEFNDPNDNHVGIDINSLNSVNVSTAGYYNDGTGAFHNLSLISAKAMQVWVDYDGETTQINVFLAPLKIAKPSKPLVSATQNLSDVLVDPAFVGFSSATGTVKSLHYVLGWSFAMDGPAPAINIAGLPKXPRFGPKPRSKVLDIMLPI

SEQ ID NO: 72447 - protein, 47 aa, Setaria italica
  Transcript Sequence Number=SeqID_6473
  Gene Ontology: Mol. function=binding
MLVRSASTPVLGALLPPGCQSPAVSSPAVHFPESPAAAYHPPAISCH

SEQ ID NO: 72448 - protein, 303 aa, Setaria italica
  Transcript Sequence Number=SeqID_6474
  Gene Ontology: Mol. function=oxidoreductase activity, acting on the CH-OH group of donors, NAD or NADP as acceptor
  Homolog annotation: Hit_ID=B9R7T7; Match level="QueryCoverage=93%, HitCoverage=90%, E-value=8e-76, Identity=52%"; Hit description=2 -hydroxyacid dehydrogenase, putative
MGDGVAFEAARKIIMHPLYAPRSSPWLDLKVFYIRVSNCVVDESAPEHLTLNHIPLSPDTVIEVNGQRSSMHTEFISSSLRRDRVDKKTEEATFVSTDNIRMTGSVRFQVFDKNDLLLTGDLDLSNANGVVGESKNSSKKWNMKCQSSTSCNGFLKGKLSTGSEYVQPVIEVYVAGTFSGTPIILTKAIQLISRRKSEMKLKLDSIPENEATEQQKEESAEDSLKVSEFQDSKPETDVDVDYNSLYSRQDFLEGEDGELSWFNAGVRVGVGIGLGVCVGIGLGVGLLVRTYQSTSRNFRRRLP

SEQ ID NO: 72449 - protein, 93 aa, Setaria italica
  Transcript Sequence Number=SeqID_6475
FFFFGRKSNLLDSQQSIDILIQAVLHSACTYDWRTQQPEHTLQEHTTIPISTCPHVRLVPACPLALYFIYVYVYVYRMECARLLATGYGTDTT

SEQ ID NO: 72450 - protein, 273 aa, Setaria italica
  Transcript Sequence Number=SeqID_6476
  Gene Ontology: Cellular component=chloroplast
  Homolog annotation: Hit_ID=B6TZN2; Match level="QueryCoverage=100%, HitCoverage=100%, E-value=1e-116, Identity=78%"; Hit description =Calcium homeostasis regulator CHoR1
  Subcellular localization annotation: CTP_CleavageSite=41; ConfidenceScore=5.16e-01
MGALPVAHKLALTSPFLPRHRRPCPAAHHHGQRRRRHGVVVAYMEPNPNSPAAIAGRLVGALPVVGLVARILSDEGGVGGDIIDFAEFRRRVSKKCTVMDSQAFYDFNERRGKPGDPFYVLLCCWLAAVGAGLLKTEEILEGVARLRISNDIEFEEETFIDMIRTAKEKRAKLKAPAPQIPMETRAEKALEAIYVCCFGQDMVEEEDEKLLRTILNAVFPSVGRPAIERMVASMAKQVASGERKRDGRTVSKEVQQRQLKDLQFLKQNKLDSA

SEQ ID NO: 72451 - protein, 502 aa, Setaria italica
  misc_feature (492)..(492): Xaa can be any naturally occurring amino acid
  Transcript Sequence Number=SeqID_6477
  Gene Ontology: Mol. function=catalytic activity; Cellular component =extracellular region; Biological process=metabolic process
  Homolog annotation: Hit_ID=A8J657; Match level="QueryCoverage=99%, HitCoverage=59%, E-value=1e-179, Identity=61%"; Hit description =Alpha-1,2-fucosidase
RLGAMVWGGVESERLQLNHDTLWTGGPGNYTNPKAPPVLSKVRNLVDNGKYPEATAAAYDLSGDQTQVYQPLGDIDLIFGKHIKHTNYKRELNLHTATVNVTYTVGEVVYSREHFSSNPHQVIATKISANKPGNVSFTVSLTTPLDHKIRVTDANEIIMEGSCPGERPQKDNKTSDHPIGIKFCAILYLQTNGANSKVKILKDKMLKLDGADSVILLLAAATSFEGPFIKPSESKLDPTVSAFTTLSVARSLSYSQLKAYHMDDYQSLFQRVSLQLSHDCNYQLWENRLGQSAEAGSQDATVSDYAFQRADCTRSAVLNDSVKSTVDRIITFKDNEDPSLVELLFQFGRYLLISCSRPGTQISNLQGIWSNDPSPPWDAAPHPNINLQMNYWPALPCNLSECQEPLFDFIGSLSVNGAKTAKVNYEASGWVSHQVTDLWAKTSPDAGDPVWALWPMGGPWLATHLWEHYSFTLDKQFLEKTAYPLLEGSASXFLLDWLIEGH

SEQ ID NO: 72452 - protein, 128 aa, Setaria italica
  Transcript Sequence Number=SeqID_6478
  Gene Ontology: Cellular component=chloroplast
METVKCCIACILPCGALDVVRIVHSNGRVEEISGGPVLAGEIMKAYPKHVLRKPPSTCPADGGGGIVVQKPVILPPNAELQKGKIYFLMPVMAAPAAEKAPAPEKSAAQAQAPAAHAASAAAAAARRQ

SEQ ID NO: 72453 - protein, 83 aa, Setaria italica
  misc_feature (21)..(21): Xaa can be any naturally occurring amino acid
  misc_feature (49)..(49): Xaa can be any naturally occurring amino acid
  Transcript Sequence Number=SeqID_6479
  Gene Ontology: Mol. function=aspartic-type endopeptidase activity; Cellular component=nuclear pore; Biological process=DNA integration
  Homolog annotation: Hit_ID=Q6I5B6; Match level="QueryCoverage=100%, HitCoverage=6%, E-value=8e-32, Identity=78%"; Hit description =Putative polyprotein
RRGLLGPISGDVSLHSCQGCXLGKHIQLPYDSSESVSQRPFDLVHSDVXDPAPFSSKGGHNYYIIFIDDFSHYTWIYLMSSRS

SEQ ID NO: 72454 - protein, 70 aa, Setaria italica
  Transcript Sequence Number=SeqID_6480
  Gene Ontology: Cellular component=integral to membrane; Biological process=cell redox homeostasis
  Homolog annotation: Hit_ID=Q5BJC2; Match level="QueryCoverage=98%, HitCoverage=97%, E-value=6e-15, Identity=54%"; Hit description =Transmembrane protein 167A
  Pfam annotation: Domain name=DUF1242; Domain location=10-43; Score =71.6; E_value=2.9e-18; Accession=PF06842.4; Description=Protein of unknown function (DUF1242)
MSALFNFNSFLTVVLLVICTCTYIKMQFPAILNDRTGFRGFFWKAARIGERHQIRISFGCLAMGISTLFF

SEQ ID NO: 72455 - protein, 55 aa, Setaria italica
  Transcript Sequence Number=SeqID_6481
TNNKRNKNKVNPDQYLQTNRTGWRGFFWKAARIGERLSPWVSFGCLAMGISTLFF

SEQ ID NO: 72456 - protein, 76 aa, Setaria italica
  Transcript Sequence Number=SeqID_6482
  Gene Ontology: Mol. function=oxidoreductase activity; Biological process=oxidation reduction
  Homolog annotation: Hit_ID=B3TM13; Match level="QueryCoverage=81%, HitCoverage=19%, E-value=5e-18, Identity=69%"; Hit description=Short- chain dehydrogenase Tic32
  Subcellular localization annotation: CTP_CleavageSite=67; ConfidenceScore=5.06e-01
MMTSWLLSRRGPSGFCWSSTADQVTEGISAAGLTAVVTGASSGIGAETARTLALRGAHVVMAVRSVPAAPGRQGPR

SEQ ID NO: 72457 - protein, 178 aa, Setaria italica
  Transcript Sequence Number=SeqID_6483
  Gene Ontology: Mol. function=copper ion binding; Cellular component =mitochondrial inner membrane; Biological process=respiratory chain complex IV assembly
  Homolog annotation: Hit_ID=B6TAB7; Match level="QueryCoverage=74%, HitCoverage=46%, E-value=3e-60, Identity=81%"; Hit description=SCO1 protein
  Pfam annotation: Domain name=SCO1-SenC; Domain location=91-178; Score= -65.7; E_value=0.1; Accession=PF02630.6; Description=SCO1SenC
  Subcellular localization annotation: CTP_CleavageSite=51; ConfidenceScore=5.15e-01
MRTSRVLNLSLLRRLRVAAELSPPCFSRVLPARGYQSRGYSSGGSSNRPMRQFSEQNESSPRPLIHYIAPSALLCFAGLVAFVHYNDEKRAVPLAKGGGLTGVPKRCTTNRPAIGGPFKLYDTENNVVTESKLRGSWTLMCFGYTSCPDVGPAEVQKMADVIKLLESKYGIKITPLFI

SEQ ID NO: 72458 - protein, 426 aa, Setaria italica
  Transcript Sequence Number=SeqID_6484
  Gene Ontology: Mol. function=polyribonucleotide nucleotidyltransferase activity; Cellular component=chloroplast; Biological process=mRNA catabolic process
  Homolog annotation: Hit_ID=B9SI65; Match level="QueryCoverage=86%, HitCoverage=39%, E-value=1e-160, Identity=73%"; Hit description =Polyribonucleotide nucleotidyltransferase, putative
  Pfam annotation: Domain name=KH_1; Domain location=214-272; Score =49.0; E_value=1.8e-11; Accession=PF00013.21; Description=KH domain
  Pfam annotation: Domain name=KH_2; Domain location=214-273; Score =4.9; E_value=0.097; Accession=PF07650.9; Description=KH domain
  Pfam annotation: Domain name=RNase_PH; Domain location=1-109; Score =85.6; E_value=1.8e-22; Accession=PF01138.13; Description=3' exoribonuclease family, domain 1
  Pfam annotation: Domain name=RNase_PH_C; Domain location=112-188; Score=77.6; E_value=4.6e-20; Accession=PF03725.7; Description=3' exoribonuclease family, domain 2
  Pfam annotation: Domain name=S1; Domain location=278-351; Score=48.6; E_value=2.5e-11; Accession=PF00575.15; Description=S1 RNA binding domain
  Pfam module annotation: Pfam domain module=KH_1::KH_2::RNase _PH::RNase_PH_C::S1; Domain location=214-272::214-273::1-109::112 -188::278-351
QSLAVVTLGGYQMAQRIDNLVDTEESKSFYLQYSFPPSCVGEVGRIGAPSRREIGHGMLAERALEPILPLEEDFPYTIRVESTITESNGSSSMASVCGGCLALLDAGVPIKFPVAGIAMGLVLDTQEFGGDGSPLILSDITGAEDASGDMDLKVAGNESGITAFQMDIKVVGITLPVMEQALLQARDGRRHILNEMSKSSPPPSKALSPHAPLIHVMKVKPNKVNLIIGSGGKTIKSIIEETGVDAIDTGDDGTVKITARDLSSLEKSKTIIANLTMVPKVGEIYRNCEIKSIAPYGAFVEIAPGREGLCHISELSSGWLAKAEDAFKVGDRIDVKLIEINDKGQLRLSSRALLPNADSESNSKQQTSGSTKEKVPQKDDLIKMTTRRARRKKQSEPSGAENATTKTLEKSAAASATSQGSETAKK

SEQ ID NO: 72459 - protein, 152 aa, Setaria italica
  misc_feature (25)..(25): Xaa can be any naturally occurring amino acid
  Transcript Sequence Number=SeqID_6485
  Gene Ontology: Mol. function=transferase activity, transferring groups other than amino-acyl groups; Cellular component=membrane; Biological process=fatty acid biosynthetic process
  Homolog annotation: Hit_ID=A9L9N1; Match level="QueryCoverage=77%, HitCoverage=24%, E-value=2e-39, Identity=69%"; Hit description =Putative very long chain fatty acid condensing enzyme CUT1;1
  Pfam annotation: Domain name=FAE1_CUT1_RppA; Domain location=21-152; Score=-31.8; E_value=3.5e-13; Accession=PF08392.4; Description =FAE1Type III polyketide synthase-like
RLRVAYVFLAVLVPAAAAALYLMLXPRPVYLVDYACFRTRPNCRVPFATFLEHAKLVTFVEGASIDERSVRFMTRLLERSGLGEETCLPPAHHYIPPYRNMEASRAEVELVIFSAIDDLLAKTGISPSAIDILVVNLSKYLTLRTYPNYPLL

SEQ ID NO: 72460 - protein, 160 aa, Setaria italica
  Transcript Sequence Number=SeqID_6486
  Gene Ontology: Mol. function=transferase activity, transferring groups other than amino-acyl groups; Cellular component=membrane; Biological process=fatty acid biosynthetic process
  Homolog annotation: Hit_ID=A9L9N1; Match level="QueryCoverage=99%, HitCoverage=34%, E-value=2e-71, Identity=78%"; Hit description =Putative very long chain fatty acid condensing enzyme CUT1;1
  Pfam annotation: Domain name=FAE1_CUT1_RppA; Domain location=2-160; Score=147.7; E_value=3.6e-41; Accession=PF08392.4; Description =FAE1Type III polyketide synthase-like
NLVDYACFRTASNCRVPFSTFLEHAKQVPVLNERSIRFMTKLLERSGLGEETCLPPAHHYIPPYKYCTLDAARGEVDLVVFGALDDLFAKTGVSPGDIDILVVNCSLFCPTPSFVDMIINRYKLRSDIRSTHLSGMGCSAGLVSVGLARNLLQVAPRGAH

SEQ ID NO: 72461 - protein, 136 aa, Setaria italica
  Transcript Sequence Number=SeqID_6487
  Gene Ontology: Mol. function=transferase activity, transferring groups other than amino-acyl groups; Cellular component=membrane; Biological process=fatty acid biosynthetic process
  Homolog annotation: Hit_ID=B6TEK6; Match level="QueryCoverage=76%, HitCoverage=21%, E-value=4e-34, Identity=64%"; Hit description=3 -ketoacyl-CoA synthase
  Pfam annotation: Domain name=FAE1_CUT1_RppA; Domain location=62-136; Score=-192.8; E_value=0.0019; Accession=PF08392.4; Description =FAE1Type III polyketide synthase-like
QNTHACSYSYRAIQAGARASCHDEHAALQRTSPEEALTVARAIRPAHWLLALLAAAAAAKLRRMGRPKDVYLVEYGCFRPKPWFRAPFATCLEHANLMPYLIDDESVSFAIRLLERSGLGEETCVPEAYHYMPPSV

SEQ ID NO: 72462 - protein, 227 aa, Setaria italica
  Transcript Sequence Number=SeqID_6488
  Gene Ontology: Mol. function=transferase activity, transferring groups other than amino-acyl groups; Cellular component=membrane; Biological process=fatty acid biosynthetic process
  Homolog annotation: Hit_ID=A9L9N1; Match level="QueryCoverage=89%, HitCoverage=44%, E-value=2e-65, Identity=61%"; Hit description =Putative very long chain fatty acid condensing enzyme CUT1;1
  Pfam annotation: Domain name=FAE1_CUT1_RppA; Domain location=54-227; Score=211.2; E_value=2.8e-60; Accession=PF08392.4; Description =FAE1Type III polyketide synthase-like
VNNILAIVAVPFAAAAVLKAAELGPGEILARLRALRPAHMFLAAFLPAAAAALYLRLRPRAVYLVDYACFRTNPNCRVPFATFLEHSRVWPGFDERSVRFMTRLLERSGLGEETCLPYAQHYIPPSRDLESSRAEAELVIFSAIDDLLAKTGLSPQDIDILVVNCSLFAPTPSFTDMIMRRYKLREDVRAVHLAGMGCSAGLISVELARNLLQVAPRGAHALVVSTE

SEQ ID NO: 72463 - protein, 117 aa, Setaria italica
  Transcript Sequence Number=SeqID_6489
  Gene Ontology: Mol. function=transferase activity, transferring groups other than amino-acyl groups; Cellular component=membrane; Biological process=fatty acid biosynthetic process
  Homolog annotation: Hit_ID=A9L9N1; Match level="QueryCoverage=100%, HitCoverage=25%, E-value=7e-57, Identity=84%"; Hit description =Putative very long chain fatty acid condensing enzyme CUT1;1
  Pfam annotation: Domain name=ACP_syn_III_C; Domain location=7-89; Score=20.8; E_value=1.2e-07; Accession=PF08541.2; Description=3 -Oxoacyl-[acyl-carrier-protein (ACP)
PDFRTAFEHFCIHAGGRAVIDELQRSLGLSDEDVEASRMALHRFGNTSSSSVWYELAYTEAKGRMRKGDRVWMIGFGSGFKCNSAAWECIEPARTAEGPWEESICRYPVDIPEVLKH

SEQ ID NO: 72464 - protein, 255 aa, Setaria italica
  Transcript Sequence Number=SeqID_6490
  Gene Ontology: Mol. function=transferase activity, transferring groups other than amino-acyl groups; Cellular component=membrane; Biological process=fatty acid biosynthetic process
  Homolog annotation: Hit_ID=B6TEK6; Match level="QueryCoverage=94%, HitCoverage=49%, E-value=1e-86, Identity=63%"; Hit description=3 -ketoacyl-CoA synthase
  Pfam annotation: Domain name=FAE1_CUT1_RppA; Domain location=37-255; Score=318.8; E_value=1.1e-92; Accession=PF08392.4; Description =FAE1Type III polyketide synthase-like
WTAWPISISGLAGRVRAVRPVHALAAAILAAALARLRRLRRPRDVYFVEYGCFRPKSWFRAPFATCLEHVRLMPYLVDEEDFAWGRRLLLRSGIGEETCVPYAYHYVPPDRSVEASRDEAELVIFSAVDNLFARTAVEPGEIDVVVVNCSIFTPTPVFADMVVSRYKLRDDVRTVNLSGMGCSAGLISVELARNLLQVAPRGAHALVVSTETITPNYYMGQERAMLLPNCLFRMGGAAALLSTNGANETTTVLGL

SEQ ID NO: 72465 - protein, 106 aa, Setaria italica
  Transcript Sequence Number=SeqID_6491
  Gene Ontology: Mol. function=transferase activity, transferring groups other than amino-acyl groups; Cellular component=membrane; Biological process=fatty acid biosynthetic process
  Homolog annotation: Hit_ID=B6TEK6; Match level="QueryCoverage=96%, HitCoverage=20%, E-value=2e-47, Identity=83%"; Hit description=3 -ketoacyl-CoA synthase
  Pfam annotation: Domain name=ACP_syn_III_C; Domain location=1-74; Score=11.0; E_value=1.2e-06; Accession=PF08541.2; Description=3 -Oxoacyl-[acyl-carrier-protein (ACP)
GRAVIDEVQHGLGLSDEDVEASRMTLHRFGNTSSSSVLYELAYIEAKGTMKKGDRVWMISFGAGFDCNSVAWECIKPAADADGPWVDCIHRYPVQLPEISKDISNS

SEQ ID NO: 72466 - protein, 172 aa, Setaria italica
  Transcript Sequence Number=SeqID_6492
  Gene Ontology: Mol. function=transferase activity, transferring groups other than amino-acyl groups; Cellular component=membrane; Biological process=fatty acid biosynthetic process
  Homolog annotation: Hit_ID=B6TEK6; Match level="QueryCoverage=92%, HitCoverage=32%, E-value=4e-65, Identity=75%"; Hit description=3 -ketoacyl-CoA synthase
  Pfam annotation: Domain name=ACP_syn_III_C; Domain location=58-140; Score=27.8; E_value=2.2e-08; Accession=PF08541.2; Description=3 -Oxoacyl-[acyl-carrier-protein (ACP)
  Pfam annotation: Domain name=Chal_sti_synt_C; Domain location=4-142; Score=10.6; E_value=0.00026; Accession=PF02797.7; Description =Chalcone and stilbene synthases, C-te
  Pfam module annotation: Pfam domain module=ACP_syn_III_C::Chal_sti _synt_C; Domain location=58-140::4-142
WLPLPGSGALKRNIVAFGPLVLPISEQLLVALSLLKRKLLSRVGSKVRLYRPDFRTAFEHFCIHAGGRAVIDEVQRGLGLSDEDAEASRMTLHRFGNTSSSSVLYELAYIEAKGMMKKGDRLWMISFGAGFECNSVAWECVMPAADADGPWADCIHRYPVQLPKVVEGKGII

SEQ ID NO: 72467 - protein, 481 aa, Setaria italica
  misc_feature (171)..(171): Xaa can be any naturally occurring amino acid
  Transcript Sequence Number=SeqID_6493
  Gene Ontology: Mol. function=transferase activity, transferring groups other than amino-acyl groups; Cellular component=membrane; Biological process=fatty acid biosynthetic process
  Homolog annotation: Hit_ID=A9L9N1; Match level="QueryCoverage=92%, HitCoverage=95%, E-value=0.0, Identity=72%"; Hit description =Putative very long chain fatty acid condensing enzyme CUT1;1
  Pfam annotation: Domain name=ACP_syn_III; Domain location=200-295; Score=-18.2; E_value=0.058; Accession=PF08545.2; Description=3 -Oxoacyl-[acyl-carrier-protein (ACP)]
  Pfam annotation: Domain name=ACP_syn_III_C; Domain location=371-453; Score=12.2; E_value=9e-07; Accession=PF08541.2; Description=3 -Oxoacyl-[acyl-carrier-protein (ACP)
  Pfam annotation: Domain name=Chal_sti_synt_C; Domain location=312 -455; Score=10.7; E_value=0.00026; Accession=PF02797.7; Description =Chalcone and stilbene synthases, C-te
  Pfam annotation: Domain name=FAE1_CUT1_RppA; Domain location=66-355; Score=618.8; E_value=5.4e-183; Accession=PF08392.4; Description =FAE1Type III polyketide synthase-like
  Pfam module annotation: Pfam domain module=ACP_syn_III::ACP_syn_III _C::Chal_sti_synt_C::FAE1_CUT1_RppA; Domain location=200-295::371 -453::312-455::66-355
MGKLLKASYHLVVSNFLAIAAVAFATAVVQRGWPFSIDGLAGWLHAQRPVHLITAAILMAAVAKLRRARRQRDVYIVEYGCFRPRPCFRAPFATCLEHARLLPYLVADKESLNFAIRLLERSGLGEETCVPYSYHYMPPDRSLDAAREETELVIFSAIDDVLSKTAVKPGXIDILVVNCSLFAPIPSFTDMIINRYGMRPDIRNVHLSGMGCSAGLISVGLARNFLQVAPRGAHALVVSTETITPNYYVGSERAMLLPNCLFRIGGAAALLSNSRAKARFRLRHVVRTLTGAQDSAYTCVFQEEDDRGNVGINLNKDLMTIAGDALKANITAIGPLVLPASEQLLFALSFIARKVLNGRFKPYIPDFRTAFEHFCIHAGGRAVIDELQRSLNLSDQQVEASRMALHRFGNTSSSSLWYELAYIEAKGRMRKGDRVWMIGFGSGFKCNSAAWECIEPAANAEGPWATSIHRYPVDIPDVLKH

SEQ ID NO: 72468 - protein, 472 aa, Setaria italica
  Transcript Sequence Number=SeqID_6494
  Gene Ontology: Mol. function=transferase activity, transferring groups other than amino-acyl groups; Cellular component=membrane; Biological process=fatty acid biosynthetic process
  Homolog annotation: Hit_ID=B6TEK6; Match level="QueryCoverage=92%, HitCoverage=89%, E-value=0.0, Identity=80%"; Hit description=3 -ketoacyl-CoA synthase
  Pfam annotation: Domain name=ACP_syn_III; Domain location=187-279; Score=-14.9; E_value=0.028; Accession=PF08545.2; Description=3 -Oxoacyl-[acyl-carrier-protein (ACP)]
  Pfam annotation: Domain name=ACP_syn_III_C; Domain location=361-443; Score=33.1; E_value=6.1e-09; Accession=PF08541.2; Description=3 -Oxoacyl-[acyl-carrier-protein (ACP)
  Pfam annotation: Domain name=Chal_sti_synt_C; Domain location=299 -445; Score=15.2; E_value=0.00011; Accession=PF02797.7; Description =Chalcone and stilbene synthases, C-te
  Pfam annotation: Domain name=Chal_sti_synt_N; Domain location=36-262; Score=-87.6; E_value=0.072; Accession=PF00195.11; Description =Chalcone and stilbene synthases, N-te
  Pfam annotation: Domain name=FAE1_CUT1_RppA; Domain location=54-342; Score=609.8; E_value=2.7e-180; Accession=PF08392.4; Description =FAE1Type III polyketide synthase-like
  Pfam module annotation: Pfam domain module=ACP_syn_III::ACP_syn_III _C::Chal_sti_synt_C::Chal_sti_synt_N::FAE1_CUT1_RppA; Domain location= 187-279::361-443::299-445::36-262::54-342
RLVVDNFVAIFAVAAAAAALQRTSPEEALTVARAIRPAHWLLALLAAAAAAKLRRMGRPKDVYLVEYGCFRPKPWFRAPFATCLEHANLMPYLIDDESVSFAIRLLERSGLGEETCVPEAYHYMPPNRSLKASRDETELVIFSAVDDVFARTTVKPEEIDVLIVNCSIFTPTPVLADMVVNRYKLRADVQNVNLSGMGCSAGLVSVGLAKNLLQVAPPGTHVLIVSTEILSSQYYVGTERAMLLPNCLFRMGAAAMILSNSSERARFKLARVVRTVTAARDADYRCVFQEEDDKGNTGIRLSKDLATTAGHALKSNIVAFGPLVLPASEQLLVALSFLKRKLLSRVGSKVRLYRPDFRTAFEHFCIHAGGRAVIDEVQRGLGLSDEDVEASRMTLHRFGNTSSSSVLYELAYIEAKGTMKKGDRVWMISFGAGFECNSVAWECVRPAAAADGPWVDCIHRYPVQLPDVAKDI

SEQ ID NO: 72469 - protein, 283 aa, Setaria italica
  Transcript Sequence Number=SeqID_6495
  Gene Ontology: Mol. function=ATP binding; Biological process=apoptosis
  Homolog annotation: Hit_ID=Q8H5J9; Match level="QueryCoverage=96%, HitCoverage=51%, E-value=2e-60, Identity=40%"; Hit description =Fusarium resistance protein I2C-5-like
KSTLVAHVCKDGRVHDYFSEIVFLSDHDFRDENITTLREGCVMKYQNCVSNKDGRVLVVVELAGDFSEGDWKRLYSASKRYLPSGSKIIITSRSDEIKKLGTTQAITLKFLSCEAYWYYFRTLAFGSVDPETYPKLAHLAMQIARALKRTFIGANITTCVLRDNFDIRFWCKVLALLRGIIQKNVSRFGEHPLRRVDQNRSAPLGRMATPSEDLVLCCQYQCSSQEEVPKIKMQDVMYGSVKPHGNFEVLGWKSPILPYYSYVFTCEIQELKSTAAKRKRSDP

SEQ ID NO: 72470 - protein, 41 aa, Setaria italica
  Transcript Sequence Number=SeqID_6496
KYDSCYLAKTTRFFNLPRSSNTMIHSCSLASTNNFSNGRMF

SEQ ID NO: 72471 - protein, 391 aa, Setaria italica
  Transcript Sequence Number=SeqID_6497
  Gene Ontology: Mol. function=glycerophosphodiester phosphodiesterase activity; Cellular component=vacuole; Biological process=glycerol metabolic process
  Homolog annotation: Hit_ID=A0ZHW5; Match level="QueryCoverage=80%, HitCoverage=26%, E-value=6e-44, Identity=35%"; Hit description =Phytase
  Pfam annotation: Domain name=GDPD; Domain location=49-357; Score =244.2; E_value=3.3e-70; Accession=PF03009.9; Description =Glycerophosphoryl diester phosphodiesterase family
MRPSRCCVPLFLLLLSHLAFARPLFPLPSKTKNEEKRPIQTFRPYNIAHRGSNGLVSEETAVAYLRAIEEGADFIETDILASKDGTLICFHDVTLDETTDVAEHKEFANRRRTYEVEWSNVTGWFVVDFTLEELKTLKVKQRYSFRDQQYNGMFSIITFEEFISIALDADRTVGIYPEIKDPVFINKHVKWADGKKFEDKFVDTLLKYGYKGQYMSENWLKQPLFIQSFAPTSIIYVSKLIDSPKVFLIDDITVRTQDTNQSYWEITSDDYLAYIGKYVVGLGPWKDTIVPAAGNYLMPPSDLVARAHAHNLQVHPYTYRNENQFLHFNFHQDPYAEYDFWIKNVGVDGLFTDFTGTLHQYQELTSPHRKDETANSLLVKISQMISAYEGL

SEQ ID NO: 72472 - protein, 126 aa, Setaria italica
  Transcript Sequence Number=SeqID_6498
  Gene Ontology: Mol. function=protein serine/threonine kinase activity; Biological process=protein amino acid phosphorylation
  Homolog annotation: Hit_ID=UPI00000481E8; Match level="QueryCoverage =94%, HitCoverage=12%, E-value=1e-36, Identity=71%"; Hit description =leucine-rich repeat transmembrane protein kinase, putative
  Pfam annotation: Domain name=LRR_1; Domain location=12-34; Score =10.5; E_value=2.9; Accession=PF00560.25; Description=Leucine Rich Repeat
  Pfam annotation: Domain name=LRR_1; Domain location=36-58; Score =13.3; E_value=0.86; Accession=PF00560.25; Description=Leucine Rich Repeat
  Pfam annotation: Domain name=LRR_1; Domain location=60-82; Score =10.7; E_value=2.7; Accession=PF00560.25; Description=Leucine Rich Repeat
  Pfam annotation: Domain name=LRR_1; Domain location=84-106; Score =16.3; E_value=0.13; Accession=PF00560.25; Description=Leucine Rich Repeat
  Pfam module annotation: Pfam domain module=LRR_1::LRR_1::LRR_1::LRR _1; Domain location=12-34::36-58::60-82::84-106
ETKISNLGNITSLELMLLNGNQLNGSLPEEIGFLPNLNRIQIDQNHISGPIPKSFANLNKTKHFHMNNNSLSGQIPPELSRLPSLVHLLLDNNNLSGYIPPELSKLPKVLIIQLDNNNFSGSSVPV

SEQ ID NO: 72473 - protein, 82 aa, Setaria italica
  Transcript Sequence Number=SeqID_6499
  Gene Ontology: Mol. function=DNA-directed RNA polymerase activity; Cellular component=nucleus; Biological process=transcription
  Homolog annotation: Hit_ID=B9G6G0; Match level="QueryCoverage=71%, HitCoverage=5%, E-value=3e-10, Identity=55%"; Hit description=DNA -directed RNA polymerase
MDTAAKSASPAGADYAALKELFRPHVESFDSFLDVGLDEMLRGIRPMEIKDPNSSAILKITLEKGQVLPPMRMVGWVYPSTP

SEQ ID NO: 72474 - protein, 127 aa, Setaria italica
  Transcript Sequence Number=SeqID_6500
MENSDARPVRRVRCPKCHSVLEEPGAPVYQCGGCGTSLRAKNRTGNTGDAPKGSPSPSRSALPPQSRHLDSTDVASTSRSSTPTSLEATSSRHRATDTTSRHESGDLVSARRHGSSDVASTSSTPTV

SEQ ID NO: 72475 - protein, 139 aa, Setaria italica
  Transcript Sequence Number=SeqID_6501
  Homolog annotation: Hit_ID=Q7XJV9; Match level="QueryCoverage=39%, HitCoverage=24%, E-value=3e-12, Identity=63%"; Hit description =OSIGBa0128P10.6 protein
AAMKVAAATEGVESVTLSGKDKSLLRVVGDGVDCNRLTTRLRRKVGRADLVELRTLHAGYYGSSSSRAAGSSLSRVDSGYGGSSYGSSYPTTTSSYAPEYYGHHQPSSASYGYYPAAPAYAAAPTVVHHEYYPPSTDPN

SEQ ID NO: 72476 - protein, 202 aa, Setaria italica
  Transcript Sequence Number=SeqID_6502
  Gene Ontology: Cellular component=integral to membrane
  Homolog annotation: Hit_ID=B6U045; Match level="QueryCoverage=75%, HitCoverage=65%, E-value=1e-42, Identity=65%"; Hit description =UPF0497 membrane protein 1
  Pfam annotation: Domain name=DUF588; Domain location=47-196; Score =154.0; E_value=4.6e-43; Accession=PF04535.4; Description=Domain of unknown function (DUF588)
  Subcellular localization annotation: CTP_CleavageSite=66; ConfidenceScore=5.23e-01
MSEPATVIHMDGGKAPPTTGDAAGSSSKAAGRGLPLILRSSGGGGFRRCLAVIDFLLRVAAFGPTLAAAISTGTADERLSVFTQFFQFHARFDDFTAFIFFMVANAVAAGYLVLSLPFSAVGIVRPKATGVRVFLLVCDVLVMSLLTAAGAAAAAIVYVSHWGSLRANWVPICMQFHGFCQRTSGAVVATFLAVLVLLVLIL

SEQ ID NO: 72477 - protein, 96 aa, Setaria italica
  Transcript Sequence Number=SeqID_6503
DPRGRRAATSRRPGRLLQGPERTLLSINSSRSPCDEQSCDDYMCMHARRQETCRRQARTVAGEARGEVSSPPSSDLRRCFQNASTSSFVSDRFRRA

SEQ ID NO: 72478 - protein, 50 aa, Setaria italica
  Transcript Sequence Number=SeqID_6504
  Gene Ontology: Mol. function=nucleic acid binding
  Homolog annotation: Hit_ID=Q6IVD3; Match level="QueryCoverage=100%, HitCoverage=100%, E-value=2e-19, Identity=90%"; Hit description =Arginine/serine-rich splicing factor 1 variant 2
MRPVFVGNLDYDTRHSELDHLFYRYGRIERIDMKSGTTRANIAPPGLLNS

SEQ ID NO: 72479 - protein, 150 aa, Setaria italica
  Transcript Sequence Number=SeqID_6505
  Gene Ontology: Mol. function=nucleic acid binding; Cellular component= nucleus
  Homolog annotation: Hit_ID=Q6IVD5; Match level="QueryCoverage=100%, HitCoverage=62%, E-value=1e-76, Identity=92%"; Hit description =Arginine/serine-rich splicing factor RSP41
  Pfam annotation: Domain name=RRM_1; Domain location=4-68; Score=59.0; E_value=1.8e-14; Accession=PF00076.14; Description=RNA recognition motif. (a.k.a. RRM, RBD, o
  Pfam annotation: Domain name=RRM_1; Domain location=95-148; Score =28.2; E_value=3.3e-05; Accession=PF00076.14; Description=RNA recognition motif. (a.k.a. RRM, RBD, o
  Pfam module annotation: Pfam domain module=RRM_1::RRM_1; Domain location=4-68::95-148
MRPVFVGNLDYDTRHSELDHLFYRYGRIERIDMKSGFAFVYFEDERDGDDAIRALDGYPFGPGRRRLSVEWSRGDRAARRDGNKPEANTKATKTLFVINFDPITTTVGDIEKHFAPFGNISNVRIRRNFAFVQFETLEEARKALEATHAT

SEQ ID NO: 72480 - protein, 44 aa, Setaria italica
  misc_feature (34)..(34): Xaa can be any naturally occurring amino acid
  Transcript Sequence Number=SeqID_6506
  Gene Ontology: Mol. function=nucleic acid binding
  Homolog annotation: Hit_ID=Q6IVD5; Match level="QueryCoverage=81%, HitCoverage=15%, E-value=7e-11, Identity=91%"; Hit description =Arginine/serine-rich splicing factor RSP41
CSSYHQNYAGFAFVYFEDERDGDDAIRALDGYPXGPGRRRLSVE

SEQ ID NO: 72481 - protein, 247 aa, Setaria italica
  Transcript Sequence Number=SeqID_6507
  Gene Ontology: Mol. function=nucleic acid binding; Cellular component= nucleus
  Homolog annotation: Hit_ID=Q6IVD5; Match level="QueryCoverage=100%, HitCoverage=100%, E-value=1e-100, Identity=80%"; Hit description =Arginine/serine-rich splicing factor RSP41
  Pfam annotation: Domain name=RRM_1; Domain location=4-68; Score=59.0; E_value=1.8e-14; Accession=PF00076.14; Description=RNA recognition motif. (a.k.a. RRM, RBD, o
  Pfam annotation: Domain name=RRM_1; Domain location=95-158; Score =54.5; E_value=4.1e-13; Accession=PF00076.14; Description=RNA recognition motif. (a.k.a. RRM, RBD, o
  Pfam module annotation: Pfam domain module=RRM_1::RRM_1; Domain location=4-68::95-158
MRPVFVGNLDYDTRHSELDHLFYRYGRIERIDMKSGFAFVYFEDERDGDDAIRALDGYPFGPGRRRLSVEWSRGDRAARRDGNKPEANTKATKTLFVINFDPITTTVGDIEKHFAPFGNISNVRIRRNFAFVQFETLEEARKALEATHATTLLDRVISVEYAFRDDGERSDRYDSPRRAGGYGRCGDNPYRRSISPVYRSRPSPDYGRPPSPVYGSYGRSRSPVRDRYRRSPGYRSRSPPAKRRAYD

SEQ ID NO: 72482 - protein, 51 aa, Setaria italica
  Transcript Sequence Number=SeqID_6508
IKTLVLDKLTNTVMNNALGQCILPFLHMNQNVVYCTKQPARAMDFTCTQLH

SEQ ID NO: 72483 - protein, 51 aa, Setaria italica
  Transcript Sequence Number=SeqID_6509
TDCISIFLEDRPNHFLRFPSNTEQVAYHQTNFETRKHVDLGSVVPKIEPSS

SEQ ID NO: 72484 - protein, 184 aa, Setaria italica
  misc_feature (13)..(13): Xaa can be any naturally occurring amino acid
  misc_feature (48)..(48): Xaa can be any naturally occurring amino acid
  Transcript Sequence Number=SeqID_6510
  Gene Ontology: Mol. function=protein methyltransferase activity; Cellular component=cytoplasm; Biological process=protein amino acid methylation
  Homolog annotation: Hit_ID=B6U5U6; Match level="QueryCoverage=49%, HitCoverage=18%, E-value=3e-48, Identity=97%"; Hit description =Protein binding protein
  Pfam annotation: Domain name=zf-C3HC4; Domain location=108-147; Score= 40.3; E_value=7.7e-09; Accession=PF00097.17; Description=Zinc finger, C3HC4 type (RING finger)
MPAQKRRLPSGPXSRPRDYVAAPGSDAATSGGGGGVGEGRGGRPPLPXRGAAKRRLTEPKPQRGLEDDSDAEDGGGADGDSESSQSDGGGNDEFMLVKLAEIRKEVQCPICLGIIRKTRTVMECLHRFCRDCIDKSMRLGNNECPACRTHCASRRSLRDDPNYDALITALYPDIDKYEEEELAF

SEQ ID NO: 72485 - protein, 180 aa, Setaria italica
  misc_feature (164)..(164): Xaa can be any naturally occurring amino acid
  misc_feature (172)..(172): Xaa can be any naturally occurring amino acid
  Transcript Sequence Number=SeqID_6511
  Gene Ontology: Mol. function=nucleic acid binding; Cellular component= nucleus
  Homolog annotation: Hit_ID=Q8W2K5; Match level="QueryCoverage=68%, HitCoverage=33%, E-value=5e-12, Identity=30%"; Hit description =Phragmoplastin-interacting protein PHIP1
  Pfam annotation: Domain name=zf-CCHC; Domain location=111-128; Score =26.3; E_value=2.3e-05; Accession=PF00098.15; Description=Zinc knuckle
  Pfam annotation: Domain name=zf-CCHC; Domain location=51-68; Score =29.5; E_value=6.7e-06; Accession=PF00098.15; Description=Zinc knuckle
  Pfam annotation: Domain name=zf-CCHC; Domain location=8-25; Score =29.2; E_value=7.4e-06; Accession=PF00098.15; Description=Zinc knuckle
  Pfam module annotation: Pfam domain module=zf-CCHC::zf-CCHC::zf-CCHC; Domain location=111-128::51-68::8-25
WQSSNKRRTCYECGIPGHLSSSCPNKKGVEFISDEKNANVDSATASSKKRRTCYECGTPGHLSSACPNRRTEDSVQNNREPVDDAKSAPTIVPEEMKPGDESNSVPSKKRRKCYECGISGHLSSACPNKKVAEVVDNAVERDTGSTIAEEKANGDTKSAPAKKXRRTCYECXGIAGHPLH

SEQ ID NO: 72486 - protein, 227 aa, Setaria italica
  Transcript Sequence Number=SeqID_6512
  Gene Ontology: Mol. function=nucleic acid binding
MQVTSNIEVFHQGHEESYENNDGKITPGIPASGVSEAVDIERSETEIGLAPPGGTSALPDEQLNMKVESHEVDEYSCCYDEDTSSLFDTESLCSKASSLDKDTHKDPPSDLSTLRSPEVSTVFQNQSVPGSVGICQSSRRRGIDELRAKLQSFKVSSTVKGSYIAMSAPRPKPGDNLGQSAIALLRNRENAPPAKAGHHAMPNPDRSVAKESSRLALQPISGRPRDH

SEQ ID NO: 72487 - protein, 79 aa, Setaria italica
  Transcript Sequence Number=SeqID_6513
AVRSRLFENLSLPGRNQRPVRLGVAQTRAKQLASQTTGLKKNTVSCERDFYRWSQGCITKKTTSTKQWHHIYLCFYHRP

SEQ ID NO: 72488 - protein, 87 aa, Setaria italica
  Transcript Sequence Number=SeqID_6514
PQLPGQQMPRQILQTARTKKTATNIFEQKKLHPSTNYRFDRRQQINTNTHCVSIRTCKEIIQTLICHFREIKTTKSLNINNLFSFYL

SEQ ID NO: 72489 - protein, 275 aa, Setaria italica
  Transcript Sequence Number=SeqID_6515
  Gene Ontology: Cellular component=integral to membrane
  Homolog annotation: Hit_ID=B6TPW7; Match level="QueryCoverage=100%, HitCoverage=100%, E-value=2e-98, Identity=69%"; Hit description=Yip1 domain family member 6
  Pfam annotation: Domain name=Yip1; Domain location=109-256; Score =158.4; E_value=2.1e-44; Accession=PF04893.9; Description=Yip1 domain
MSHNHGDTIPLHPSSAQSDMDEIESLIHAAPSSATVLPARPPSPPRASIPVSSSPAPAPVPSKPPLPAASIPISVSPVPPASASVSVPIGADGFGAPPNTLTEPVWDTVKRDLARIVSNLKLVVFPNPYREDPGKALRDWDLWGPFFFIVFLGLTLSWSASVKKSEVFAVAFAVLAAGAIILTLNVLLLGGHIIFFQSLSLLGYCLFPLDVGALVCMLKDNVILKIVVVTITLAWSSWAAYPFMSAAVNPRRKALALYPVFLMYISVGFLIIAID

SEQ ID NO: 72490 - protein, 153 aa, Setaria italica
  misc_feature (141)..(141): Xaa can be any naturally occurring amino acid
  Transcript Sequence Number=SeqID_6516
  Gene Ontology: Mol. function=nucleic acid binding; Cellular component= nucleus; Biological process=ribosome biogenesis
  Homolog annotation: Hit_ID=B4FC44; Match level="QueryCoverage=99%, HitCoverage=59%, E-value=4e-78, Identity=92%"; Hit description =Activator of basal transcription 1
PHMNPSHIRQMLSKYGEVLRIYLVPEGQGHRKHAIVKAKAYTEGWIEFAKKSVAKRVANLLNGEQIGGKKRSSFYYDIWNIKYLRKFKWDDLVGETAEKTHIREQKLTLEIAAAKKQRDHYLSNVQKSHALKHIQERRKKXQKTEGAEPSNVL

SEQ ID NO: 72491 - protein, 143 aa, Setaria italica
  misc_feature (7)..(7): Xaa can be any naturally occurring amino acid
  misc_feature (63)..(63): Xaa can be any naturally occurring amino acid
  Transcript Sequence Number=SeqID_6517
SLLFHPXQYSSSGLVDKSLYTLCLLESESLDNQITVGAIYGDEQVHITTLSTSCHAEKFVDQXISLMKRDGYNLCNDEVCNESSELRQQSEDVSHLGFPTGEDADYLLFSPSAVNSLPIITNNKVGCTIQNKLPDFMHLLCSH

SEQ ID NO: 72492 - protein, 192 aa, Setaria italica
  Transcript Sequence Number=SeqID_6518
  Gene Ontology: Mol. function=voltage-gated chloride channel activity; Cellular component=integral to membrane; Biological process=chloride transport
  Homolog annotation: Hit_ID=B9MZ38; Match level="QueryCoverage=90%, HitCoverage=45%, E-value=2e-33, Identity=47%"; Hit description=Cl -channel clc-7
  Pfam annotation: Domain name=CBS; Domain location=51-170; Score=11.9; E_value=0.0084; Accession=PF00571.20; Description=CBS domain
GMAATLAGVCKVPLTSVLLLFELTHDYRIVLPLLGAVGVSSWIASPQRFSKSIRSKLDSLEEKSSIAQQTDSMPTENKQVNSMDIADSSQELCKVESSLCVYDANNDNMFENLTVAEAMKTNYFSVSMTTPLVEALDLMVAEKQPFVMVTESNSSVICLLALKNIQDFCRAAKTTRAQAEVKEFLVCHVTKQ

SEQ ID NO: 72493 - protein, 124 aa, Setaria italica
  Transcript Sequence Number=SeqID_6519
  Gene Ontology: Mol. function=zinc ion binding; Cellular component =intracellular
  Homolog annotation: Hit_ID=B6TH99; Match level="QueryCoverage=97%, HitCoverage=30%, E-value=2e-26, Identity=52%"; Hit description=B-box zinc finger family protein
  Pfam annotation: Domain name=zf-B_box; Domain location=1-47; Score =44.1; E_value=5.4e-10; Accession=PF00643.16; Description=B-box zinc finger
  Pfam annotation: Domain name=zf-B_box; Domain location=67-115; Score =34.8; E_value=3.4e-07; Accession=PF00643.16; Description=B-box zinc finger
  Pfam module annotation: Pfam domain module=zf-B_box::zf-B_box; Domain location=1-47::67-115
MKIVCDACGRAEAAVLCCADEAALCRRCDVAVHSANRLAGRHSRVALLPSTTTTGPSPDLAVDGTGSHHPACDICQEKTGYFFCLEDRALLCRPCDVAVHTAGGAHVASHRRFLITGVRIGGGV

SEQ ID NO: 72494 - protein, 56 aa, Setaria italica
  Transcript Sequence Number=SeqID_6520
MHDWAYFFLFLVSAYLSPCVCSLIVACQLQVLTEDIPTIISGISFPKSMRWNSNIV

SEQ ID NO: 72495 - protein, 76 aa, Setaria italica
  Transcript Sequence Number=SeqID_6521
  Gene Ontology: Mol. function=arginine-tRNA ligase activity; Cellular component=cytoplasm; Biological process=arginyl-tRNA aminoacylation
  Homolog annotation: Hit_ID=Q8L785; Match level="QueryCoverage=81%, HitCoverage=5%, E-value=5e-16, Identity=61%"; Hit description=Glycyl- tRNA synthetase 2, chloroplastic/mitochondrial
  Subcellular localization annotation: CTP_CleavageSite=67; ConfidenceScore=5.05e-01
MYFHATHSGLFHLQIVFSRPIRWILALHGDFVVPFSFAGISSGNSSCGLRNSSVANLRWKLLESYLSAVEKAGLLI

SEQ ID NO: 72496 - protein, 159 aa, Setaria italica
  misc_feature (127)..(127): Xaa can be any naturally occurring amino acid
  Transcript Sequence Number=SeqID_6522
  Gene Ontology: Mol. function=arginine-tRNA ligase activity; Cellular component=cytoplasm; Biological process=arginyl-tRNA aminoacylation
  Homolog annotation: Hit_ID=B9RCZ0; Match level="QueryCoverage=89%, HitCoverage=13%, E-value=1e-49, Identity=62%"; Hit description =Glycyl-tRNA synthetase 2, chloroplast/mitochondrial, putative
KSPNQVRRKDNLEPKNGNPTKAAEGFCRKNNVSVDCLYRRIDGKTEYIYARVRESARFADEVLTEDIPTIISGISFPKSMRWNSNIVFSRPIRWILALHGDFVVPFSFAGISSGNSSCGLRNSSVAXFKVETAESYLSSVEKAGLLIDMQERKERVLRD

SEQ ID NO: 72497 - protein, 104 aa, Setaria italica
  Transcript Sequence Number=SeqID_6523
MQKKKRPQCLLNYMTRFTDCQNNEVYTVMFNQNKIVLVPGTNDLPTLQCVLVPAKPWLLQPYLVFTFSARNAAQIFFQLLMTMSVGIQTQILFAKMKYAQSRMD

SEQ ID NO: 72498 - protein, 90 aa, Setaria italica
  Transcript Sequence Number=SeqID_6524
EDKKVTRKLKELNQELERKQAEIMEMQKNEVIAFVICKCQTFLCSTYILSWCSFCLSMLLLLLVCQKEKQRRKNPVKKNYIVTFSHLVSG

SEQ ID NO: 72499 - protein, 82 aa, Setaria italica
  Transcript Sequence Number=SeqID_6525
  Gene Ontology: Mol. function=protein dimerization activity; Cellular component=nucleus; Biological process=regulation of transcription, DNA-dependent
  Homolog annotation: Hit_ID=B6U8V1; Match level="QueryCoverage=100%, HitCoverage=22%, E-value=3e-37, Identity=95%"; Hit description=BZIP transcription factor
  Pfam annotation: Domain name=bZIP_1; Domain location=3-56; Score =34.4; E_value=4.7e-07; Accession=PF00170.13; Description=bZIP transcription factor
  Pfam annotation: Domain name=bZIP_2; Domain location=1-56; Score =32.4; E_value=1.8e-06; Accession=PF07716.7; Description=Basic region leucine zipper
  Pfam module annotation: Pfam domain module=bZIP_1::bZIP_2; Domain location=3-56::1-56
VERRHRRMIKNRESAARSRARKQAYTMELEAEVQKLKELNQELERKQAEIMEMQKNELPEMLKDPFRRKKRVCLRRTLTGPW

SEQ ID NO: 72500 - protein, 73 aa, Setaria italica
  Transcript Sequence Number=SeqID_6526
  Subcellular localization annotation: CTP_CleavageSite=42; ConfidenceScore=5.74e-01
MPAMLAAQFTGIPLSQSPAPQPSFRLGLRPWPAVRARSLAPRAAASTTAVSAKPAAAVVPPVADRTVVRIGLP

SEQ ID NO: 72501 - protein, 133 aa, Setaria italica
  Transcript Sequence Number=SeqID_6527
  Gene Ontology: Mol. function=transferase activity, transferring glycosyl groups; Cellular component=cytoplasm; Biological process =histidine biosynthetic process
  Homolog annotation: Hit_ID=Q8H8D1; Match level="QueryCoverage=50%, HitCoverage=56%, E-value=1e-28, Identity=91%"; Hit description =Putative ATP phosphoribosyl transferase
  Subcellular localization annotation: CTP_CleavageSite=59; ConfidenceScore=5.88e-01
MLAARPYSAAIPLPQSPSPPSSFGLRPSRAAGSRSLAPRAAASTTAVSAKPAAAVVPPVADRTVVRIGLPSKGRMAEQTLNLLKSCQLLVRQLNPRQYTADIPLIPNLEVWFQRPKDIVRKLQSGDLDLGIVG

SEQ ID NO: 72502 - protein, 140 aa, Setaria italica
  Transcript Sequence Number=SeqID_6528
  Gene Ontology: Mol. function=transferase activity, transferring glycosyl groups; Cellular component=cytoplasm; Biological process =histidine biosynthetic process
  Homolog annotation: Hit_ID=A6N0U4; Match level="QueryCoverage=95%, HitCoverage=97%, E-value=8e-53, Identity=77%"; Hit description=ATP phosphoribosyltransferase (Fragment)
  Pfam annotation: Domain name=HisG_C; Domain location=36-123; Score =85.8; E_value=1.5e-22; Accession=PF08029.3; Description=HisG, C -terminal domain
SPRSYFFVASRKSLHKRKGVLEITHELLERLEAHLRATAELMVTANMRGNSAEEVAERVLSQTSICGLQGPTISPVYCRRDGKVAVDYYAMNVVVPQKLLYKSIQQLRSIGGSGVLVTKLTYIFDEETPRWRNLLTELGL

SEQ ID NO: 72503 - protein, 324 aa, Setaria italica
  Transcript Sequence Number=SeqID_6529
  Gene Ontology: Mol. function=transferase activity, transferring glycosyl groups; Cellular component=cytoplasm; Biological process =histidine biosynthetic process
  Homolog annotation: Hit_ID=Q8L9K8; Match level="QueryCoverage=100%, HitCoverage=78%, E-value=1e-128, Identity=67%"; Hit description=ATP phosphoribosyl transferase
  Pfam annotation: Domain name=HisG; Domain location=39-219; Score =241.0; E_value=3e-69; Accession=PF01634.10; Description=ATP phosphoribosyltransferase
  Pfam annotation: Domain name=HisG_C; Domain location=220-307; Score =86.8; E_value=7.6e-23; Accession=PF08029.3; Description=HisG, C -terminal domain
  Pfam module annotation: Pfam domain module=HisG::HisG_C; Domain location=39-219::220-307
MAEQTLNLLKSCQLLVRQLNPRQYTADIPLIPNLEVWFQRPKDIVRKLQSGDLDLGIVGFDIVSEYGKGNEDLVVVHDALEFGHCRLSLAVPKEGIFENINTLEDLLNMPEWTEERPLRVVTGFGYLGDKFLREKGFKHVRLLSADGALESYPPMGMADAIVDLVSSGTTLRENNLKEVEGGVVVESQATLVASRKSLHKRKGVLEITHELLERLEAHLRATAELMVTANMRGNSAEEVAERVLSQTSICGLQGPTISPVYCRRDGKVDVEYYAINVVVPQKLLYKSIQQLRSIGGSGVLVTKLTYIFDEETPRWRNLLSELGL

SEQ ID NO: 72504 - protein, 76 aa, Setaria italica
  misc_feature (62)..(62): Xaa can be any naturally occurring amino acid
  Transcript Sequence Number=SeqID_6530
SSAVHEVETRRLKTTVEVLFKEMNDILQKWHELDLQPINSTRQSLNSEFLGDLTPYHDIIGXVVQLQVTNLISIQP

SEQ ID NO: 72505 - protein, 107 aa, Setaria italica
  misc_feature (19)..(19): Xaa can be any naturally occurring amino acid
  Transcript Sequence Number=SeqID_6531
  Gene Ontology: Mol. function=hydrolase activity
  Homolog annotation: Hit_ID=Q94DR5; Match level="QueryCoverage=73%, HitCoverage=7%, E-value=8e-27, Identity=65%"; Hit description =P0460E08.35 protein
IGLSISLLPRIIAGSSVGXSIICSIVATRTWPEIESYFIDSLQTLQFFDRIGGIFAVMKRVTTYGALHDISQMQRLLRDLTSNLTFQEAYDMTGRVLGITVCSPKKK

SEQ ID NO: 72506 - protein, 64 aa, Setaria italica
  Transcript Sequence Number=SeqID_6532
  Homolog annotation: Hit_ID=B6TXS8; Match level="QueryCoverage=78%, HitCoverage=14%, E-value=4e-11, Identity=66%"; Hit description =Solute carrier family 35, member F1
MIYIHVIFNLINYRLIFERKSLETVAWSPTMISLFAGFAVAIFMFYTITPFVLKVKISCMLGMT

SEQ ID NO: 72507 - protein, 151 aa, Setaria italica
  misc_feature (23)..(23): Xaa can be any naturally occurring amino acid
  Transcript Sequence Number=SeqID_6533
  Gene Ontology: Cellular component=integral to membrane; Biological process=transport
  Homolog annotation: Hit_ID=B6TXS8; Match level="QueryCoverage=95%, HitCoverage=41%, E-value=5e-65, Identity=85%"; Hit description =Solute carrier family 35, member F1
  Pfam annotation: Domain name=DUF914; Domain location=1-151; Score= -45.4; E_value=1.6e-10; Accession=PF06027.4; Description=Eukaryotic protein of unknown function (DUF914)
  Pfam annotation: Domain name=TPT; Domain location=22-151; Score= -32.6; E_value=0.052; Accession=PF03151.8; Description=Triose -phosphate Transporter family
  Pfam module annotation: Pfam domain module=DUF914::TPT; Domain location=1-151::22-151
MNIYTIWKLQFSADPSKIPLLGXALVIAGTVCFAFSNVGEEYCVKKKDRVELVAMLGLFGLLISIVQILIFERKSLETVAWSPTMISLFAGFAVAIFMFYTITPFVLKMSGATLFNLSLLTSDMWAVAIRVLFYHQQINWLYYLAFTIVAV

SEQ ID NO: 72508 - protein, 88 aa, Setaria italica
  Transcript Sequence Number=SeqID_6534
  Subcellular localization annotation: CTP_CleavageSite=65; ConfidenceScore=5.06e-01
SEASELGLMEFKGKDVWGLLLVLLLGQLVAFSMAASSFTSSLIANLGTRSFIFLTGHENVLVGVDAPLTQSFFAYLLLTLVYVPIVLR

SEQ ID NO: 72509 - protein, 96 aa, Setaria italica
  Transcript Sequence Number=SeqID_6535
  Homolog annotation: Hit_ID=B6TXS8; Match level="QueryCoverage=79%, HitCoverage=22%, E-value=3e-26, Identity=77%"; Hit description =Solute carrier family 35, member F1
  Subcellular localization annotation: CTP_CleavageSite=29; ConfidenceScore=5.53e-01
LHSTSQKKGPLIVTSKSNSFAFSFLMPFLQMSGATLFNLSLLTSDMWAVAIRVLFYHQQINWLYYLAFTIVAVGLIIYALNESSSDDKTAASTEAA

SEQ ID NO: 72510 - protein, 347 aa, Setaria italica
  Transcript Sequence Number=SeqID_6536
  Gene Ontology: Cellular component=integral to membrane; Biological process=transport
  Homolog annotation: Hit_ID=B6TXS8; Match level="QueryCoverage=100%, HitCoverage=100%, E-value=1e-157, Identity=80%"; Hit description =Solute carrier family 35, member F1
  Pfam annotation: Domain name=DUF6; Domain location=172-299; Score =6.2; E_value=0.034; Accession=PF00892.12; Description=Integral membrane protein DUF6
  Pfam annotation: Domain name=DUF6; Domain location=27-145; Score =20.2; E_value=0.0054; Accession=PF00892.12; Description=Integral membrane protein DUF6
  Pfam annotation: Domain name=DUF914; Domain location=1-329; Score =396.2; E_value=5.8e-116; Accession=PF06027.4; Description=Eukaryotic protein of unknown function (DUF914)
  Pfam annotation: Domain name=TPT; Domain location=163-299; Score= -13.8; E_value=0.0041; Accession=PF03151.8; Description=Triose -phosphate Transporter family
  Pfam annotation: Domain name=UAA; Domain location=19-305; Score= -134.1; E_value=0.0012; Accession=PF08449.3; Description=UAA transporter family
  Pfam module annotation: Pfam domain module=DUF6::DUF6::DUF914::TPT::UA A; Domain location=172-299::27-145::1-329::163-299::19-305
MEFKGKDVWGLLLVLLLGQLVAFSMAASSFTSSLIANLGVDAPLTQSFFAYLLLTLVYVPIVLRRRQKLQIAWYWYLALAFIDVQGNYLVVKAYQYSYITSVTLLDCWTVVWVIVLTWYALGTRYSIWQFLGAGTCVAGLALVLLSDAQSAKEQDPSKIPLLGDALVIAGTVCFAFSNVGEEYCVKKKDRVEVVAMLGLFGLLISIVQILIFERKSLETVAWSPTMISLFAGFAVAIFMFYTITPFVLKMSGATLFNLSLLTSDMWAVAIRVLFYHQQINWLYYLAFTIVAVGLIIYALNESSSDDKTAASTEAAAQYQQLQSEDNSTGWESNEGGQERTRNEVHIC

SEQ ID NO: 72511 - protein, 57 aa, Setaria italica
  Transcript Sequence Number=SeqID_6537
MSTSVQSPYLPATTESISKAQEAKDASESISILYRVLEDPSSSADALRVKELAITNL

SEQ ID NO: 72512 - protein, 138 aa, Setaria italica
  Transcript Sequence Number=SeqID_6538
  Gene Ontology: Mol. function=protein binding; Cellular component =protein complex; Biological process=anaphase-promoting complex -dependent proteasomal ubiquitin-dependent protein catabolic process
  Homolog annotation: Hit_ID=O81694; Match level="QueryCoverage=92%, HitCoverage=29%, E-value=1e-48, Identity=77%"; Hit description=19S proteosome subunit 9
MSTSVQSPYLPATTESISKAQEAKDASESISILYRVLEDPSSSADALRVKELAITNLTNYLTKENRAEDLRNLLTQLRPFFAVIPKAKTAKIVRGIIDAVAKIPGTSELQISLCKEMVEWTRTEKRTFLRQRVEARLA

SEQ ID NO: 72513 - protein, 87 aa, Setaria italica
  Transcript Sequence Number=SeqID_6539
GIDKTITRMQHSRSLYPSHTTPSWCPRAPQSAHIDPGHSSPVNSWHLLLQSLQVWFIRPQRKRVQYQKSDSGFKTLLSTTLYTHDSE

SEQ ID NO: 72514 - protein, 120 aa, Setaria italica
  Transcript Sequence Number=SeqID_6540
  Gene Ontology: Mol. function=DNA-directed RNA polymerase activity; Cellular component=nucleus; Biological process=transcription
  Homolog annotation: Hit_ID=B4FJS1; Match level="QueryCoverage=100%, HitCoverage=100%, E-value=8e-63, Identity=94%"; Hit description=DNA -directed RNA polymerase II subunit J
  Pfam annotation: Domain name=RNA_pol_L; Domain location=29-103; Score= 69.0; E_value=1.8e-17; Accession=PF01193.16; Description=RNA polymerases L  13 to 16 kDa subunit
MNAPDRYERFVVPEGTKKVSYERDTKIVNAASFTIEREDHTIGNIVRMQLHRDPNVLFAGYKLPHPLQYKIIVRIHTTSQSSPTQAYTQAVNDLDKELEYLKQAFEVEKNRYEERAKQGF

SEQ ID NO: 72515 - protein, 381 aa, Setaria italica
  Transcript Sequence Number=SeqID_6541
  Homolog annotation: Hit_ID=Q5W7D1; Match level="QueryCoverage=22%, HitCoverage=14%, E-value=5e-09, Identity=36%"; Hit description =Unknow protein
  Subcellular localization annotation: CTP_CleavageSite=52; ConfidenceScore=5.04e-01
NFFQKFDPVVRRDLHKRDSPSSTANCITILKPSRRNQSTATESNFSEQKEVKHSLRKPYPNVSYQSLKEESGSLRQKLSRSGHHENAGNQGCPTRIVVLKPSLEKPHDVEGALPLHHEISHSDYRKHKEYQDVGRWSPYTEDYMCQVPLGDSETLGRMGKGSREIAREITKQMRAARGGSRKHVVNSETITFASDERSQFLSSVSKHKTPEAIHRSSEICDVWPSSSFNSSPTYSAETSVSKEAKRHLSNRWKKTHQCQDQVTDSDGFSTLGDVLALSDQEASKVATHKMACRKCPKGEVQSDRMQGSCIYPLGISSNDGWRDTAASKLTRSKSLPPSFIRGVQKSNNRKRAGSVRYNEFSMLKDVLKVGPHYSEYACSLV

SEQ ID NO: 72516 - protein, 126 aa, Setaria italica
  Transcript Sequence Number=SeqID_6542
  Homolog annotation: Hit_ID=B9RAJ5; Match level="QueryCoverage=92%, HitCoverage=28%, E-value=3e-20, Identity=44%"; Hit description=WD -repeat protein, putative
MPRTTVVESPGCPPLRALTTDILGLVKVVEAHAKPAGAAKIVETWGAPDASRGIVAASLADRAADPVLAVARKNGVVELLNPLNGNALAAVKTVGPAPTDGGAEGDPLVALHLFTRQSSDSMLGTF

SEQ ID NO: 72517 - protein, 76 aa, Setaria italica
  misc_feature (11)..(11): Xaa can be any naturally occurring amino acid
  misc_feature (60)..(60): Xaa can be any naturally occurring amino acid
  Transcript Sequence Number=SeqID_6543
LGEMLKESDSXVLQSKTEDGSPKQVDMEKLVSSLPLHLLAVCLELGQGSDMAYVLRGVRXFLHSLSEPASRHTRLE

SEQ ID NO: 72518 - protein, 86 aa, Setaria italica
  Transcript Sequence Number=SeqID_6544
PRTLGWPDDPSAGMDGRLSGKAEGSTTWRIVYLKNLCLYFLISLCGRSLFAVVSRVELVCSLLLVICKLVSPVCRKVCNPNLIGFL

SEQ ID NO: 72519 - protein, 135 aa, Setaria italica
  misc_feature (100)..(100): Xaa can be any naturally occurring amino acid
  Transcript Sequence Number=SeqID_6545
  Homolog annotation: Hit_ID=Q10SR6; Match level="QueryCoverage=77%, HitCoverage=23%, E-value=9e-18, Identity=45%"; Hit description=F-box domain containing protein, expressed
  Pfam annotation: Domain name=DUF295; Domain location=34-82; Score =13.5; E_value=0.026; Accession=PF03478.10; Description=Protein of unknown function (DUF295)
RLPKGSLVDVLGHNDLSGSQILVCKLADLVLQRFIPTKDIRGNTLFLEERNISVSSKVLPTVKGDNVVFIRSGRPYLAQYHLGSGSLSPAIDNCSLYGRXGPSSLIHYIFSCCIRNRWSRGLIFRRNAEGWSMQD

SEQ ID NO: 72520 - protein, 118 aa, Setaria italica
  Transcript Sequence Number=SeqID_6546
  Subcellular localization annotation: CTP_CleavageSite=31; ConfidenceScore=5.17e-01
WRRDTSPPPPPSRTWPNRPPPPPWREAPLPPAVPPTPHHHRRSGTDPSAIPLSPAATNPLPNPKPETLTRSGARRRGGARRRRRDRRSARQRRRGDRWSWIAFFVTFLWIFVFFSFFP

SEQ ID NO: 72521 - protein, 31 aa, Setaria italica
  Transcript Sequence Number=SeqID_6547
  Homolog annotation: Hit_ID=B6U4K3; Match level="QueryCoverage=100%, HitCoverage=5%, E-value=8e-11, Identity=96%"; Hit description =Vacuolar sorting receptor 3
MDSEIRAIMAQYMPLDNQGEVPNHTHEEDRS

SEQ ID NO: 72522 - protein, 93 aa, Setaria italica
  Transcript Sequence Number=SeqID_6548
  Gene Ontology: Mol. function=nucleic acid binding; Cellular component= late endosome membrane; Biological process=protein transport
  Homolog annotation: Hit_ID=B6U4K3; Match level="QueryCoverage=95%, HitCoverage=15%, E-value=3e-29, Identity=70%"; Hit description =Vacuolar sorting receptor 3
TNNRGGYDCTCSGDLLYIREHDTCISKTAVQAKAAWAAVWGILIVIVVVAAGSYIVYKYRLRSYMDSEIRAIMAQYMPLDNQGEVPNHTHEED

SEQ ID NO: 72523 - protein, 348 aa, Setaria italica
  Transcript Sequence Number=SeqID_6549
MGKGGELWDDSALVDAFDRAVATYKEMHGKSNRATPCEDEKPEHAAAAAAATAQVEEAVTAETADEHREKDANRDNTACGMAETPQLPSEEKQAVEQAPLQETDPGKETHVPESKAISDATDADGNVSSSQQTWEYNELLRQYYELEEKSRNVLQQLQQANYWNYQASGYSSTTQQQQIPAYSATAPDPHSSTTQSSCCYWNVPLVSVSCCSAGQPSEGSASMPPSGGCSVSLTCDQCPGASTTYPSISNSMQLPTKLSPNDDQVAKAAMMTAEGALNFMRSTVAGQPGSQGNESETRKEENTSMGMNPNLDITGADSDLAALLNAWYAAGFYTGRYLALQSTKNSKQ

SEQ ID NO: 72524 - protein, 81 aa, Setaria italica
  misc_feature (6)..(6): Xaa can be any naturally occurring amino acid
  misc_feature (70)..(70): Xaa can be any naturally occurring amino acid
  Transcript Sequence Number=SeqID_6550
  Gene Ontology: Mol. function=hydrolase activity, hydrolyzing O -glycosyl compounds; Cellular component=cell wall; Biological process= carbohydrate metabolic process
  Homolog annotation: Hit_ID=B6TDC2; Match level="QueryCoverage=100%, HitCoverage=44%, E-value=2e-28, Identity=52%"; Hit description =Xyloglucan endotransglucosylase/hydrolase protein 23
  Pfam annotation: Domain name=Glyco_hydro_16; Domain location=1-81; Score=-60.2; E_value=0.009; Accession=PF00722.13; Description =Glycosyl hydrolases family 16
FDITWXDGRGKIRDNGQLLTLTLDRTSGSGFQSKHEYLFGKIDMQREQQFRLWFDPTKDFHTYSILWNPXKHVIFMVDDLP

SEQ ID NO: 72525 - protein, 97 aa, Setaria italica
  Transcript Sequence Number=SeqID_6551
  Gene Ontology: Mol. function=hydrolase activity, hydrolyzing O -glycosyl compounds; Cellular component=cell wall; Biological process= carbohydrate metabolic process
  Homolog annotation: Hit_ID=P93671; Match level="QueryCoverage=97%, HitCoverage=32%, E-value=3e-49, Identity=95%"; Hit description =Xyloglucan endotransglycosylase (XET)
  Pfam annotation: Domain name=Glyco_hydro_16; Domain location=1-97; Score=60.6; E_value=6e-15; Accession=PF00722.13; Description =Glycosyl hydrolases family 16
KHEYLFGKIDMQLKLVPGNSAGTVTAYYLSSQGNTHDEIDFEFLGNVTGEPYTLHTNVFTQGQGQREQQFRLWFDPTKDFHTYSILWNPKHVIFIGG

SEQ ID NO: 72526 - protein, 131 aa, Setaria italica
  Transcript Sequence Number=SeqID_6552
  Gene Ontology: Mol. function=hydrolase activity, hydrolyzing O -glycosyl compounds; Cellular component=cell wall; Biological process= carbohydrate metabolic process
  Homolog annotation: Hit_ID=B1P1S7; Match level="QueryCoverage=73%, HitCoverage=44%, E-value=1e-36, Identity=64%"; Hit description =Xyloglucan xyloglucosyl transferase
  Pfam annotation: Domain name=Glyco_hydro_16; Domain location=37-131; Score=0.5; E_value=7.2e-07; Accession=PF00722.13; Description =Glycosyl hydrolases family 16
MPAAMASGPKLMRTVALGVLCSAVLLLAGGASAAGNFYQDVDITWGDGRGKILDGGQLLTLSMDRSSGSGFQSKNQYLYGRFDMQLKLVPGDSAGTVTTFYLSSQGSQQFRMWFDPTKDFHTLLPLVVGNP

SEQ ID NO: 72527 - protein, 158 aa, Setaria italica
  Transcript Sequence Number=SeqID_6553
  Gene Ontology: Mol. function=hydrolase activity, hydrolyzing O -glycosyl compounds; Cellular component=cell wall; Biological process= carbohydrate metabolic process
  Homolog annotation: Hit_ID=B6TX02; Match level="QueryCoverage=100%, HitCoverage=53%, E-value=1e-83, Identity=91%"; Hit description =Xyloglucan endotransglucosylase/hydrolase protein 23
  Pfam annotation: Domain name=Glyco_hydro_16; Domain location=1-136; Score=214.5; E_value=2.7e-61; Accession=PF00722.13; Description =Glycosyl hydrolases family 16
DMQIKLVPGNSAGTVTTFYLSSQGSTHDEIDFEFLGNETGEPYTLHTNVFTQGQGQREQQFRLWFDPTTSFHTYSIVWNPQHVIFAVDGTPIRDFKNHEARGVAFPKSQPMRLYASLWNADDWATQGGRVKADWSHAPFVASFRGFSADACVWANGRQ

SEQ ID NO: 72528 - protein, 260 aa, Setaria italica
  misc_feature (60)..(60): Xaa can be any naturally occurring amino acid
  misc_feature (88)..(88): Xaa can be any naturally occurring amino acid
  misc_feature (92)..(92): Xaa can be any naturally occurring amino acid
  Transcript Sequence Number=SeqID_6554
  Gene Ontology: Mol. function=hydrolase activity, hydrolyzing O -glycosyl compounds; Cellular component=cell wall; Biological process= carbohydrate metabolic process
  Homolog annotation: Hit_ID=P93671; Match level="QueryCoverage=91%, HitCoverage=81%, E-value=1e-116, Identity=83%"; Hit description =Xyloglucan endotransglycosylase (XET)
  Pfam annotation: Domain name=Glyco_hydro_16; Domain location=24-208; Score=342.8; E_value=6.6e-100; Accession=PF00722.13; Description =Glycosyl hydrolases family 16
MAARVSLVLGVLLACSAALAAANFNQEFDITWGDGRGKIRDNGQLLTLTLDRTSGSGFQXKDNEYLFGKIDMQLKLVPGNSAGTVTAXTNLXSSQGNTHDEIDFEFLGNVTGEPYTLHTNVFTQGQGQREQQFRLWFDPTKDFHTYSILWNPKHVIFMVDDLPIRDFRNLESKGIAFPKNQPMRLYSSLWNADDWATQGGRVKTDWSHAPFSASYRNFRADACVAVAGGKTRCGATVGTEGSAGAAAGDWYNQELDLTLQ

SEQ ID NO: 72529 - protein, 208 aa, Setaria italica
  misc_feature (74)..(74): Xaa can be any naturally occurring amino acid
  misc_feature (97)..(97): Xaa can be any naturally occurring amino acid
  misc_feature (174)..(174): Xaa can be any naturally occurring amino acid
  Transcript Sequence Number=SeqID_6555
  Gene Ontology: Mol. function=hydrolase activity, hydrolyzing O -glycosyl compounds; Cellular component=cell wall; Biological process= carbohydrate metabolic process
  Homolog annotation: Hit_ID=B1P1S7; Match level="QueryCoverage=88%, HitCoverage=63%, E-value=5e-80, Identity=80%"; Hit description =Xyloglucan xyloglucosyl transferase
  Pfam annotation: Domain name=Glyco_hydro_16; Domain location=25-205; Score=288.7; E_value=1.3e-83; Accession=PF00722.13; Description =Glycosyl hydrolases family 16
ERWLLVFYARRCCCSAGGASAAGNFYQDVDITVGHGRGKILDGGQLLTLSMDRSSGSGFQSKNQYLYGRFDMQXKSSFPGDSAGTVTTFYLSSQGSXQHDEIDFEFLGNASGEPYTVHTNVYSQGKGGREQQFRMWFDPTKDFHTYSVVWNPSHIVFYVDGTPIRDFRNLAASXRGVPFPTSQPMRVYASVWDAEEWVVRLGRARQDG

SEQ ID NO: 72530 - protein, 294 aa, Setaria italica
  Transcript Sequence Number=SeqID_6556
  Gene Ontology: Mol. function=hydrolase activity, hydrolyzing O -glycosyl compounds; Cellular component=cell wall; Biological process= carbohydrate metabolic process
  Homolog annotation: Hit_ID=B1P1S7; Match level="QueryCoverage=87%, HitCoverage=89%, E-value=1e-112, Identity=75%"; Hit description =Xyloglucan xyloglucosyl transferase
  Pfam annotation: Domain name=Glyco_hydro_16; Domain location=37-220; Score=369.2; E_value=7.5e-108; Accession=PF00722.13; Description =Glycosyl hydrolases family 16
  Pfam annotation: Domain name=XET_C; Domain location=243-290; Score =83.9; E_value=5.6e-22; Accession=PF06955.4; Description=Xyloglucan endo-transglycosylase (XET)
  Pfam module annotation: Pfam domain module=Glyco_hydro_16::XET_C; Domain location=37-220::243-290
MPAAMASGPKLMRTVALGVLCSAVLLLAGGASAAGNFYQDVDITWGDGRGKILDGGQLLTLSMDRSSGSGFQSKNQYLYGRFDMQLKLVPGDSAGTVTTFYLSSQGSQHDEIDFEFLGNASGEPYTVHTNVYSQGKGGREQQFRMWFDPTKDFHTYSVVWNPSHIVFYVDGTPIRDFRNLAASAAGVPFPTSQPMRVYASVWDAEEWATQGGRVRTDWSKAPFVASYRGFAAAGCAGSDAAACARAGGAWMFQELDAAGQEELRRARASYMIYDYCTDKYRFRQGPPPECAAAK

SEQ ID NO: 72531 - protein, 236 aa, Setaria italica
  misc_feature (25)..(25): Xaa can be any naturally occurring amino acid
  misc_feature (124)..(124): Xaa can be any naturally occurring amino acid
  Transcript Sequence Number=SeqID_6557
  Gene Ontology: Mol. function=hydrolase activity, hydrolyzing O -glycosyl compounds; Cellular component=cell wall; Biological process= carbohydrate metabolic process
  Homolog annotation: Hit_ID=B6TDC2; Match level="QueryCoverage=89%, HitCoverage=70%, E-value=1e-113, Identity=90%"; Hit description =Xyloglucan endotransglucosylase/hydrolase protein 23
  Pfam annotation: Domain name=Glyco_hydro_16; Domain location=25-206; Score=375.0; E_value=1.3e-109; Accession=PF00722.13; Description =Glycosyl hydrolases family 16
MAARVSLVLGVLLACSAALAAANFXNQEFDITWGDGRGKIRDNGQLLTLTLDRTSGSGFQSKHEYLFGKIDMQLKLVPGNSAGTVTAYYLSSQGNTHDEIDFEFLGNVTGEPYTLHTNVFTQGXGQREQQFRLWFDPTKDFHTYSILWNPKHVIFMVDDLPIRDFRNLESKGIAFPKNQPMRLYSSLWNADDWATQGGRVKTDWSHAPFSASYRNFRADACVAVAGGKTRCGATVG

SEQ ID NO: 72532 - protein, 155 aa, Setaria italica
  Transcript Sequence Number=SeqID_6558
  Gene Ontology: Mol. function=receptor activity; Cellular component =plasma membrane; Biological process=small GTPase mediated signal transduction
  Homolog annotation: Hit_ID=B6TLL9; Match level="QueryCoverage=68%, HitCoverage=41%, E-value=5e-50, Identity=89%"; Hit description =Signal recognition particle receptor beta subunit
  Pfam annotation: Domain name=SRPRB; Domain location=1-130; Score= -42.3; E_value=0.00019; Accession=PF09439.2; Description=Signal recognition particle receptor beta su
MDEWIRQAESWAGQAESWIRQQPPEQIYVAAAVVAITILVLIAASCLKSYLYDTLTKASVVKKRVPVLIFCNKTDKVTAHSKEFIKKQLEKEINKLRESRNAISSADISDEVKLGVPGEAFNFSQCQNKVTVAEGGGLTGNVLAVEQFIREYVKA

SEQ ID NO: 72533 - protein, 256 aa, Setaria italica
  Transcript Sequence Number=SeqID_6559
  Gene Ontology: Mol. function=receptor activity; Cellular component =plasma membrane; Biological process=small GTPase mediated signal transduction
  Homolog annotation: Hit_ID=B6TLL9; Match level="QueryCoverage=100%, HitCoverage=100%, E-value=1e-117, Identity=83%"; Hit description =Signal recognition particle receptor beta subunit
  Pfam annotation: Domain name=ATP_bind_1; Domain location=57-240; Score=-66.8; E_value=0.027; Accession=PF03029.9; Description =Conserved hypothetical ATP binding protein
  Pfam annotation: Domain name=Arf; Domain location=39-209; Score= -30.5; E_value=3.9e-07; Accession=PF00025.13; Description=ADP -ribosylation factor family
  Pfam annotation: Domain name=GTP_EFTU; Domain location=50-256; Score=- 68.7; E_value=0.00049; Accession=PF00009.19; Description=Elongation factor Tu GTP binding domain
  Pfam annotation: Domain name=MMR_HSR1; Domain location=53-176; Score =6.1; E_value=0.00027; Accession=PF01926.15; Description=GTPase of unknown function
  Pfam annotation: Domain name=Miro; Domain location=54-176; Score=1.9; E_value=0.0073; Accession=PF08477.5; Description=Miro-like protein
  Pfam annotation: Domain name=SRPRB; Domain location=50-231; Score =120.0; E_value=7.7e-33; Accession=PF09439.2; Description=Signal recognition particle receptor beta su
  Pfam module annotation: Pfam domain module=ATP_bind_1::Arf::GTP _EFTU::MMR_HSR1::Miro::SRPRB; Domain location=57-240::39-209::50 -256::53-176::54-176::50-231
MDEWIRQAESWAGQAESWIRQQPPEQIYVAAAVVAITILVLIAASCLKSSKPNTIVLSGLNGGGKTTLFYQLRDGSSHQGTVTSMEENNDTFVLHSEQERKGKVKPVHIVDVPGHARLKPKLDEVLPKAAGVVFVVDAQDFLSSMQAAAEYLYDILTKAIVVKKKVPLLIFCNKTDKVTAHSKEFIKKQLEKEINKLRESRNAISSADITDEVQLGVPGEAFNFSQCQNKVTVAEGAGSTGNVSAVEQFIRECVKA

SEQ ID NO: 72534 - protein, 92 aa, Setaria italica
  Transcript Sequence Number=SeqID_6560
  Homolog annotation: Hit_ID=B6TRY4; Match level="QueryCoverage=96%, HitCoverage=40%, E-value=2e-12, Identity=50%"; Hit description=IAA2 -auxin-responsive Aux/IAA family member
MAWRGRLGETADSGLELSLGLPAYFAKTSSGLDAGEDPGDAAAFALQATKGSDGSKARVRPAAAAPVVGWPPVRSFRRNLASTRQSPQSSSA

SEQ ID NO: 72535 - protein, 116 aa, Setaria italica
  misc_feature (26)..(26): Xaa can be any naturally occurring amino acid
  Transcript Sequence Number=SeqID_6561
  Gene Ontology: Mol. function=protein dimerization activity; Cellular component=nucleus; Biological process=regulation of transcription, DNA-dependent
  Homolog annotation: Hit_ID=B6UDD0; Match level="QueryCoverage=75%, HitCoverage=47%, E-value=2e-40, Identity=94%"; Hit description=IAA14- auxin-responsive Aux/IAA family member
  Pfam annotation: Domain name=AUX_IAA; Domain location=1-116; Score =70.9; E_value=4.8e-18; Accession=PF02309.8; Description=AUXIAA family
VRAYRKNAFHAAAEAAASVRRTKGGXQGGLYVKVSMDGAPYLRKVDLRTYGGYRELRDALDALFGCFSSSSPDAGCQFAVAYEDKDGDLMLAGDVPWDMFICSCKKLRIMRSSEAR

SEQ ID NO: 72536 - protein, 92 aa, Setaria italica
  Transcript Sequence Number=SeqID_6562
EELRAEMSSSLESLSTMPSVRISWIEEKKGKYEICVASDSQAAKSCNQPECYAPSVGDIMILSDVKPGHISDITRNGRPYRVAFVTEGGDED

SEQ ID NO: 72537 - protein, 178 aa, Setaria italica
  Transcript Sequence Number=SeqID_6563
  Gene Ontology: Mol. function=hydrolase activity
  Homolog annotation: Hit_ID=B6UDV1; Match level="QueryCoverage=100%, HitCoverage=54%, E-value=1e-86, Identity=87%"; Hit description =Catalytic/ hydrolase
GAGRVGPVVIASSDLLKTAADDRGFLKRAGEGWGGVDEILLPAEPAAMRKLIELASYRPPPRAMMPDFMLRDFIQKLFTDNRERLVHLLKGITVGTDKFQVTPISQDVLIVWGDHDQLFPLEKAFAVQRSLNGSARMEVIKNTGHAPQLEDPARFNKVMLDFLLAAHKPDPSVNGGSQ

SEQ ID NO: 72538 - protein, 98 aa, Setaria italica
  Transcript Sequence Number=SeqID_6564
  Gene Ontology: Cellular component=integral to membrane
  Homolog annotation: Hit_ID=B9R8X1; Match level="QueryCoverage=78%, HitCoverage=22%, E-value=2e-29, Identity=79%"; Hit description =Organic anion transporter, putative
  Pfam annotation: Domain name=TPT; Domain location=17-96; Score=-35.4; E_value=0.075; Accession=PF03151.8; Description=Triose-phosphate Transporter family
AGVGICTVTDVEVNAKGFICACVAVFCTSLQQITIGSFQKKYNIGSFELLSKTAPIQAISLIILGPFVDYYLNGRSLLNYNFSGGATVSYNFCHNFSS

SEQ ID NO: 72539 - protein, 344 aa, Setaria italica
  Transcript Sequence Number=SeqID_6565
  Gene Ontology: Cellular component=integral to membrane
  Homolog annotation: Hit_ID=B9R8X1; Match level="QueryCoverage=100%, HitCoverage=100%, E-value=1e-137, Identity=72%"; Hit description =Organic anion transporter, putative
  Pfam annotation: Domain name=DUF6; Domain location=131-298; Score =1.7; E_value=0.061; Accession=PF00892.12; Description=Integral membrane protein DUF6
  Pfam annotation: Domain name=TPT; Domain location=156-298; Score =147.6; E_value=3.8e-41; Accession=PF03151.8; Description=Triose -phosphate Transporter family
  Pfam annotation: Domain name=UAA; Domain location=20-304; Score= -158.6; E_value=0.02; Accession=PF08449.3; Description=UAA transporter family
  Pfam module annotation: Pfam domain module=DUF6::TPT::UAA; Domain location=131-298::156-298::20-304
  Subcellular localization annotation: CTP_CleavageSite=62; ConfidenceScore=5.15e-01
MEAEKKPPAVSDMGAWAMNVVSSVGIIMANKQLMSSSGYAFAFATTLTGFHFTVTALVGWISNATGYSVSKHVPLWELVWFSLVANTSITGMNLSLMLNSVGFYQISKLSMIPVVCLMEWVLNSKHYTTKVISAVVVVAAGVGICTVTDVEVNAKGFICACVAVFCTSLQQITIGSFQKKYNIGSFELLSKTAPIQAISLIILGPFVDYYLNGRSLLNYNFSGGATFFILLSCSLAVFCNMSQYLCIGRFSATSFQVLGHMKTVCVLILGWILFDSALTVKNILGMLLAVMGMVVYSWAVEAEKKASTPIPRNKSDMLDGEDVPLKARVSGLTPSDLEEGELKS

SEQ ID NO: 72540 - protein, 101 aa, Setaria italica
  Transcript Sequence Number=SeqID_6566
RRRSSCLRLRARRDAAVTPPGPGGGVWSRASLAGSGREAFVASQAPIYMNQAPPHMSRPSIILKLILGLIWGIIHLAISLFNIWSLLIYNLECYIISSGLL

SEQ ID NO: 72541 - protein, 50 aa, Setaria italica
  Transcript Sequence Number=SeqID_6567
MDSKAMEAFVASQAPIYMNQAPPHMSRPSIILKLILGLIWGIIHLAISPF

SEQ ID NO: 72542 - protein, 53 aa, Setaria italica
  Transcript Sequence Number=SeqID_6568
KDLIAKWMMLQISPKMSLRIIDGLDICTQSNYNLSCSHFCDQVMHSTGSQKYI

SEQ ID NO: 72543 - protein, 242 aa, Setaria italica
  misc_feature (71)..(71): Xaa can be any naturally occurring amino acid
  Transcript Sequence Number=SeqID_6569
  Gene Ontology: Mol. function=transferase activity; Cellular component= integral to membrane; Biological process=metabolic process
  Homolog annotation: Hit_ID=Q9SAA1; Match level="QueryCoverage=89%, HitCoverage=53%, E-value=3e-45, Identity=43%"; Hit description =F25C20.9
MSRPSISLKLILGLIWGIIHLAIRLFNLWSLLIYNLECYIISSGLLRKYRYLHLDRLKYLAIVVDSKEAKXTVKIRQLLCWLSTMGVKYICLYDIEGVMKKSFEPAMEGSRDGKGISASISHSSHKDLAIECLSGSDGKEGIAKAANLLCSTYLNGDTHGDGKTEPTFTEADMASALKAVGCGGPEPDLLLMYGPARCHFGFPAWRLRYTEIMHMGPLKSMKYGAIMKALYNFSKKYQNYGK

SEQ ID NO: 72544 - protein, 123 aa, Setaria italica
  Transcript Sequence Number=SeqID_6570
  Gene Ontology: Mol. function=phosphotransferase activity, alcohol group as acceptor; Cellular component=phosphoinositide 3-kinase complex; Biological process=phosphoinositide-mediated signaling
  Homolog annotation: Hit_ID=P42348; Match level="QueryCoverage=99%, HitCoverage=14%, E-value=8e-38, Identity=63%"; Hit description =Phosphatidylinositol 3-kinase, nodule isoform
  Pfam annotation: Domain name=PI3K_C2; Domain location=3-88; Score =20.2; E_value=1e-04; Accession=PF00792.16; Description=C2 domain
VWDVSSGEDPEIVGGATIFLFNSKRQLKTGRQKLRLWPKKEADGGVPTTTPGKVPKNERGEIERLERLVNKYERGQIQHVDWLDRLSFSAMEKAKEKECERKANLYPSLVVELCSFEHRVVLF

SEQ ID NO: 72545 - protein, 48 aa, Setaria italica
  Transcript Sequence Number=SeqID_6571
AAASAFPLFFKFFVPFLFFVLLKVKFIWLVPYLTNSQGPHQMRHPTPT

SEQ ID NO: 72546 - protein, 75 aa, Setaria italica
  Transcript Sequence Number=SeqID_6572
RRKHQCLGLLSIFMQDTNQNVLVWNVRGLNACCRRDVLRDVTREARATVVCVQETKLAVISPFLVSEMLGSSFYQ

SEQ ID NO: 72547 - protein, 82 aa, Setaria italica
  Transcript Sequence Number=SeqID_6573
RGHSSASPPHLLHGDWGCLHLPWQVCSGTLRHEARTLSRDVAAKYSGVIDAAVAEDDSHQLGCFIYEFQDPSHCTFMADFHG

SEQ ID NO: 72548 - protein, 89 aa, Setaria italica
  misc_feature (9)..(9): Xaa can be any naturally occurring amino acid
  Transcript Sequence Number=SeqID_6574
RANQDSRIXGFNSYALGTEPGVAHQATCQTKRLQLDDHKEASYGAITHTATLVRVHYWRLLWASFTYSTMVASGPSLSSFDVSKMDRAP

SEQ ID NO: 72549 - protein, 71 aa, Setaria italica
  Transcript Sequence Number=SeqID_6575
NRVSQIGIHHPCVCGCVPTSCSTFFRTTHERCMQVWLPLPPGMCSWCHVSWRLFTYNPILNEPQGRILEIR

SEQ ID NO: 72550 - protein, 167 aa, Setaria italica
  misc_feature (54)..(54): Xaa can be any naturally occurring amino acid
  Transcript Sequence Number=SeqID_6576
  Gene Ontology: Mol. function=3'-5'-exoribonuclease activity; Cellular component=exosome (RNase complex); Biological process=RNA processing
  Homolog annotation: Hit_ID=B6THH8; Match level="QueryCoverage=100%, HitCoverage=69%, E-value=8e-85, Identity=87%"; Hit description =Exosome complex exonuclease RRP46
  Pfam annotation: Domain name=RNase_PH; Domain location=14-134; Score =43.3; E_value=9.3e-10; Accession=PF01138.13; Description=3' exoribonuclease family, domain 1
MEGTSRADGRNPNQLRPFSCTGNPLNRAHGSARWAQGDTVVLAAVYGPKPGTRXGENPEKASIEVVWKPKTGQIGRQEKEYEMTLKRTLQSICVLTVHPNTTTSVVLQVVGDDGSLLPCAINASCTALSFAGFPLKHLAVAIGCGVMENGAVILDMNTAEEQQLKSY

SEQ ID NO: 72551 - protein, 41 aa, Setaria italica
  Transcript Sequence Number=SeqID_6577
MIVKFGNVEAGDRLQERLMSEAISNEDHQVSLAIIAVFPCT

SEQ ID NO: 72552 - protein, 226 aa, Setaria italica
  Transcript Sequence Number=SeqID_6578
  Gene Ontology: Mol. function=protein binding; Cellular component =protein complex; Biological process=anaphase-promoting complex -dependent proteasomal ubiquitin-dependent protein catabolic process
  Homolog annotation: Hit_ID=B4FPX0; Match level="QueryCoverage=94%, HitCoverage=100%, E-value=1e-105, Identity=88%"; Hit description=26S proteasome non-ATPase regulatory subunit 9
MRREREREREREIMVAPDLKAETMKLMDRRGALEAEMDAIIARLTAPGGPGITGGLVDAEGFPRSDIDIPNVLAQRRRLAELRNDHKDVTNKIDKNLEILHSSKLSRNEQSASRGSDTTASSHIGLSQIEPMEEDPVTRLPFAMIDEITDGSPAAVDGLQLGDEIVKFGNVEAGDRLQERLMSEAISNEDHQVSLAIIRQGSAMNLTITPRRWHGRGLLGCHFRML

SEQ ID NO: 72553 - protein, 53 aa, Setaria italica
  Transcript Sequence Number=SeqID_6579
FSDVHQGQTAPIATSGRPRWLPTVLSNCTSQQHRAIPIRMAAWTKPGRRAEVP

SEQ ID NO: 72554 - protein, 66 aa, Setaria italica
  Transcript Sequence Number=SeqID_6580
APYNSRHGAFAFTTPSFSGAHHLQLSSLVIVFLLLTTLVIILIIDLGSEEEDDKSKTSRCEVKLNN

SEQ ID NO: 72555 - protein, 187 aa, Setaria italica
  misc_feature (53)..(53): Xaa can be any naturally occurring amino acid
  Transcript Sequence Number=SeqID_6581
  Gene Ontology: Mol. function=DNA binding; Cellular component =chromatin; Biological process=regulation of transcription, DNA -dependent
  Homolog annotation: Hit_ID=P40621; Match level="QueryCoverage=56%, HitCoverage=47%, E-value=5e-17, Identity=51%"; Hit description =HMG1/2-like protein
  Pfam annotation: Domain name=HMG_box; Domain location=41-139; Score =75.5; E_value=1.9e-19; Accession=PF00505.11; Description=HMG (high mobility group) box
  Subcellular localization annotation: CTP_CleavageSite=46; ConfidenceScore=5.11e-01
MKGAKSKGAAKADAKLAVKSKGAEKPAKGRKGKAGKDPNKPKRAPSAFFVFMXDPSCLPFLVLGKVSFYFGWPWFDLFLVREEFRKEFKEKNPKNKSVAEVGKAAGNRWKSLTDADKAPYLAKANKLKSEYNKAIAAYNKGESTAAAKKAPAKEEEEEDEEESDKSKSEVNDEDDDEGSEEEEDDDE

SEQ ID NO: 72556 - protein, 51 aa, Setaria italica
  Transcript Sequence Number=SeqID_6582
RVVVVYLSCLAKKAPAKEEEEEDEEESDKSKSEVNDEDDDEGSEEEEDDDE

SEQ ID NO: 72557 - protein, 99 aa, Setaria italica
  Transcript Sequence Number=SeqID_6583
KECYPPNRPCMSPPHQSLATPIPFHSSAKIQPITLCSHVHVCITETAIGHTTATLLPNCCKVAAVQQQPKRIPQQKQAYMSPSTAPVKTKHHGAGQHRD

SEQ ID NO: 72558 - protein, 117 aa, Setaria italica
  misc_feature (9)..(9): Xaa can be any naturally occurring amino acid
  misc_feature (15)..(15): Xaa can be any naturally occurring amino acid
  Transcript Sequence Number=SeqID_6584
  Gene Ontology: Mol. function=electron carrier activity; Biological process=oxidation reduction
  Homolog annotation: Hit_ID=A2Q567; Match level="QueryCoverage=96%, HitCoverage=21%, E-value=2e-21, Identity=44%"; Hit description=Amine oxidase
PRPCLDPPXPQFKRXAVARLGFGAVNKLFMEVEPAEAPGPEGGGGQPPEFPFLHMAFRGHVAKIPWWMRGTESICPVHAGSRVVLAWFAGREAAHLESLPDDEVIRGLQATLDSFLP

SEQ ID NO: 72559 - protein, 103 aa, Setaria italica
  Transcript Sequence Number=SeqID_6585
PKLKSMKGVQTNATLNLLQSIPKVNMIITPTCTPQLILKLSVCLIWSHLQVKIRMPVLSIEKLKMVVQTKIALLNLHWAASVAWLFPMKFKIDPCRGIFIVCC

SEQ ID NO: 72560 - protein, 244 aa, Setaria italica
  Transcript Sequence Number=SeqID_6586
  Gene Ontology: Mol. function=transcription regulator activity; Cellular component=nucleus; Biological process=transcription
  Homolog annotation: Hit_ID=Q6Z809; Match level="QueryCoverage=95%, HitCoverage=29%, E-value=6e-12, Identity=34%"; Hit description=Bromo- adjacent homology (BAH) domain-containing protein-like
SPELADPKAVGSSAKVEIHEGRANKCNSQPASVDSKGENPDACTVHRKVEDGCTDKDSEVESALGSQCSLVVSNRNSKLILAGESSLSAADKQAQGLLKSTNNKQLLGVSDHPRTFDRRDSIAGKLDLMATEVKKADAVRDSSTVQNEDEKKEQATSSLADVTKLVGAASPLGVANVIKETKESKDSSSESNVHVKPEGLNSQQSEHSAKQSSKKSSDGVSGKEDGKEDLVSSDEGSSLAARTK

SEQ ID NO: 72561 - protein, 71 aa, Setaria italica
  Transcript Sequence Number=SeqID_6587
SQVTSKLLCKADECALKTFIKNKQSGLITVAPRSLKRLGWAQGHKDSNPTQKTQQPLPRSKIKKPKRPKQD

SEQ ID NO: 72562 - protein, 145 aa, Setaria italica
  Transcript Sequence Number=SeqID_6588
  Gene Ontology: Mol. function=transcription regulator activity; Cellular component=nucleus; Biological process=transcription
  Homolog annotation: Hit_ID=Q6Z809; Match level="QueryCoverage=80%, HitCoverage=16%, E-value=2e-20, Identity=48%"; Hit description=Bromo- adjacent homology (BAH) domain-containing protein-like
NALIEIKYSEASHSLQPGDDTAMNLLASVAGEISKSELVSPSSSPGSSSAKKLVCEGDNTGKCKAETDVGPVQDPGPTILENDALVAKEEQRQTVPSPEIADSKAVGPPAKVEIHEGCANKCNSQPASVDSKGEKSGCLYCPCES

SEQ ID NO: 72563 - protein, 217 aa, Setaria italica
  Transcript Sequence Number=SeqID_6589
  Gene Ontology: Mol. function=transcription regulator activity; Cellular component=nucleus; Biological process=transcription
  Homolog annotation: Hit_ID=Q6Z809; Match level="QueryCoverage=99%, HitCoverage=25%, E-value=1e-76, Identity=69%"; Hit description=Bromo- adjacent homology (BAH) domain-containing protein-like
DLNEGIPGDDCHQSEPAVSPVICSSAIHLPGLSPFTSPVTSGLQPAPITVAAPAKGPFVPPDNLLRAKPEIGWKGSAATSAFRPAEPRKVLEMPVTTRDIPVSHTAGKQSRPTLGFDLNVADDQALEEDVPQSSAQTTCSESGNTRSRDGSSRSAGIEFDLNRADEVADNGQFVPNAAHRVEVPLLPARALPGVFSNTGMNSSRDFDLNSGPGLDDA

SEQ ID NO: 72564 - protein, 1608 aa, Setaria italica
  misc_feature (112)..(112): Xaa can be any naturally occurring amino acid
  Transcript Sequence Number=SeqID_6590
  Gene Ontology: Mol. function=transcription regulator activity; Cellular component=nucleus; Biological process=transcription
  Homolog annotation: Hit_ID=Q6Z809; Match level="QueryCoverage=51%, HitCoverage=100%, E-value=0.0, Identity=51%"; Hit description=Bromo -adjacent homology (BAH) domain-containing protein-like
  Pfam annotation: Domain name=BAH; Domain location=84-198; Score=25.8; E_value=6.2e-05; Accession=PF01426.10; Description=BAH domain
  Pfam annotation: Domain name=TFIIS; Domain location=361-448; Score =59.3; E_value=1.4e-14; Accession=PF08711.3; Description =Transcription factor S-II (TFIIS)
  Pfam module annotation: Pfam domain module=BAH::TFIIS; Domain location=84-198::361-448
MHGWRGAEGCDGRRRRLVRLMWPAARVEAEAPPPPAQGPPTSPSSSSVPPSRTTSYPPESAARKQDCVDSPRPVSPDSFIKDGREIRVGDCALFRAVDVPPFIGLIRWIEKXEEGYPKLRVSWLYRPADVKLNKGIQLNAAPNEIFYSFHQDEASAVSLLHPCKVAFLRKGVELPAGISSFVCWRVYDIDNKCLWWLTDQDYINERQEEVNRLLHRTRLEMRAAVQSGGRSPKRLNGPSASQQPKTSSDGTQNGGLSKGKKRDRGEQGIDPDKRDQDRLLVDDSEPGSKLDDMKSEIEKFEKGGLPNAEAVEKLVHLMQLDQTEQRIDLAGRIMLADVIAATESTDYLGRFVQSRGLPVLDSWLQEAHKGKSGDGSKGDKPIDDLLLSLLRALAKLPINLSALQSCSIGKSVNHLRGHKNLDIQKKAKCLVENWKKRVDAEMKSNDAKPLASGQSVSWSGKAGFQEISNTANKRGGSSESSPKNPVPTVSSSKVLTDKPGGTDAAAKLNPVVPASSKLQHMQPTNVATNLKDQPCKSTGGTGGSELPTVKEEKSSSSSQSPNNSQSCSSEPSKDARSSTAASGGASKPSGSSSRSHRRANNGLVSGNLKEASAGRSVSLDRSLLQDKSSQSGTASEKGVDTPADHGNNHRLIVRFPNPARSPARSASGGSFEDPSVTGGRASSPVVADRHEQTDRRVKMKTESSRPHLASDANAESWHSNDIKGAEEGDKSPCAMLDDDNSRTPDDSVKDAHVSRVACSYMNEKVVCSSETRVGNSFSPMNALIEIKYSEASHSLQDGDDTAMNLLASVAGEISKSELVSPSSSPRSSSAKKLVCEGDSTGKFKVESDVGPSQDSGPTDAKKVIVGKEVKNDASLVAKEEQCQTVLSPELADPKAVGSSAKVEIHEGRANKCNSQPASVDSKGENPDACTVHGKVEDGCTDKDSAVESALGSQSSLVISNRNSRSILAGKSSLSAADKQDQGLLKSTNHKQFLGVSDHPGVFDRRDSITGKAAEVKKTDDIGDISTVQKENKTKEQPSSDLADVPKLAVAAAALLGVANVITEKKESKDSSSESNNHVKSEGVNSQQSEHGAKQCSKKSDDAVSVKEDGKEDLVSSDEDSSLAARTKSGSAKLDFDLNEGIPGDDCHQSEPAVSPVICSSAIHLPGLSPFTSPVTSGLQPAPITVAAPVKRPFVPPENLLRAKPEIGWKGSAATSAFRPAEPRMIMEVPRDISGSGASESQSRPTLGFDLNVADDQALEEDVPQSSAQTTCSESGNNRSRDGSSRSAGIELDLNRADEVAENGQFAPNTSHRVEVSLLPARPLPEVFSNTGTSSSRDFDLNNGPGIDEAGTEPAPKNPPAKNTSSIQFLPQVPGVRMNNATMSNISPWFASANPCGPVAIQSFLPARGEQPYPIEMTPGTQRIVAPTADGGQFGGDPSRAPVISSSPTMVFHQPAYPYAGFAFPPSVHLQTPGFSIGSTTFPNSVPSGVPYFPAISPSLVGPTGALPSHHSRQYAINLVEGSSSSGRDNNRKWESQGLDLNSGPGSIDLEGKDERAPLQIRQNLIPPPHGFAEEQGRIYQIPVVGTKRKEPDGSWDTERSTYKQLSWQ

SEQ ID NO: 72565 - protein, 97 aa, Setaria italica
  misc_feature (25)..(25): Xaa can be any naturally occurring amino acid
  Transcript Sequence Number=SeqID_6591
LVSVPVPDSPPFAHLLYLRLTVAFXSDLLLLGSVLLLARDARRRQRPFLALALVLWSPALLAVDHVHFQYNGFLMGLLLLSLYFLEQGWDLAGGMVF

SEQ ID NO: 72566 - protein, 266 aa, Setaria italica
  misc_feature (43)..(43): Xaa can be any naturally occurring amino acid
  misc_feature (170)..(170): Xaa can be any naturally occurring amino acid
  Transcript Sequence Number=SeqID_6592
  Gene Ontology: Cellular component=chloroplast
  Homolog annotation: Hit_ID=B2ZAT1; Match level="QueryCoverage=97%, HitCoverage=54%, E-value=1e-59, Identity=34%"; Hit description =Putative pentatricopeptide repeat protein
  Pfam annotation: Domain name=PPR; Domain location=115-149; Score =37.2; E_value=6.7e-08; Accession=PF01535.12; Description=PPR repeat
  Pfam annotation: Domain name=PPR; Domain location=15-48; Score=10.4; E_value=0.53; Accession=PF01535.12; Description=PPR repeat
  Pfam annotation: Domain name=PPR; Domain location=150-184; Score =19.4; E_value=0.015; Accession=PF01535.12; Description=PPR repeat
  Pfam annotation: Domain name=PPR; Domain location=186-220; Score=1.1; E_value=6.6; Accession=PF01535.12; Description=PPR repeat
  Pfam module annotation: Pfam domain module=PPR::PPR::PPR::PPR; Domain location=115-149::15-48::150-184::186-220
KAIEVFKCMPEKDVVSWSSTIAGFCFNHRNFEALYYFRHMLAXLKPNSVTFIAALAACAATGALRSGKEIHAHVLRCGIGSEGYLPNALIDLYVKCGQTGYAWAQFCVHGAKDVVSWNIMLAGFVAHGHGDTALSFFNQMVKTGECPDEVTFVTLLCACSRGGMVNEGWXLFHSMTEIYSVVPNLKHYACMVDLLSRAGQLTEAYNFINEMPITPDAAVWGALLNGCRIHRHVELGELAAKYVLELEPNDAGYHVLLCDIIIARID

SEQ ID NO: 72567 - protein, 400 aa, Setaria italica
  Transcript Sequence Number=SeqID_6593
  Gene Ontology: Mol. function=drug transporter activity; Cellular component=membrane; Biological process=multidrug transport
  Homolog annotation: Hit_ID=Q10A00; Match level="QueryCoverage=98%, HitCoverage=82%, E-value=1e-119, Identity=56%"; Hit description=MATE efflux family protein, expressed
  Pfam annotation: Domain name=MatE; Domain location=258-400; Score =63.3; E_value=9.3e-16; Accession=PF01554.10; Description=MatE
  Pfam annotation: Domain name=MatE; Domain location=37-197; Score =145.4; E_value=1.8e-40; Accession=PF01554.10; Description=MatE
  Pfam module annotation: Pfam domain module=MatE::MatE; Domain location=258-400::37-197
PWPRGSVEESLLAAGRPGEECLSVREEVKKQLWLAGPMIAGALLQNVIQMISVMYVGHLGELPLAGASMANSFATVTGLSLLLGMASALDTLCGQAFGARQYYLLGIYMQRAMFLLTLVSVPVAVIWFHTGEILLLFGQDPDIAAEAGNYARWMIPAIFGYGLMQCQVRFLQTQNIVMPVMASAGAAAACHLVVCWVLVYGLGLGSKGAALSNAIAFWVNVVLLAVYIRVSSACKETWTGFSMEAFHDALSFFRLGIPSALMVCLEMWSFELIVLLSGLLPKTPKLETSVLSISLNTAAFVWMIPFGLGSAVSTRVSNELGAGRPQAARLAVRVVVFLAVSEGLVIGLILVCIRYIWGHAYSNVEEVVRYVAKMMLVITVSNFFDGIQCVLSGLVRGAHI

SEQ ID NO: 72568 - protein, 116 aa, Setaria italica
  misc_feature (22)..(22): Xaa can be any naturally occurring amino acid
  misc_feature (28)..(28): Xaa can be any naturally occurring amino acid
  misc_feature (70)..(70): Xaa can be any naturally occurring amino acid
  Transcript Sequence Number=SeqID_6594
  Gene Ontology: Mol. function=transferase activity, transferring glycosyl groups; Cellular component=1,3-beta-glucan synthase complex; Biological process=cell wall organization and biogenesis
  Homolog annotation: Hit_ID=Q9LYS6; Match level="QueryCoverage=96%, HitCoverage=5%, E-value=5e-13, Identity=41%"; Hit description =Putative callose synthase 6
DTQVLGNDASEIQQFYKKYCAXRDVTDXKRNFEEMARYYQVASALYEVLRDVTDNKVDPQVIRCAEMIEXKGRHFKNYKYNIIPLNFPGSSEAIVELPEIRGAMTLIASIDGLPMP

SEQ ID NO: 72569 - protein, 87 aa, Setaria italica
  misc_feature (13)..(13): Xaa can be any naturally occurring amino acid
  misc_feature (24)..(24): Xaa can be any naturally occurring amino acid
  misc_feature (81)..(81): Xaa can be any naturally occurring amino acid
  Transcript Sequence Number=SeqID_6595
  Gene Ontology: Mol. function=DNA-directed RNA polymerase activity; Cellular component=chloroplast; Biological process=transcription, DNA-dependent
  Homolog annotation: Hit_ID=Q01923; Match level="QueryCoverage=97%, HitCoverage=5%, E-value=3e-41, Identity=96%"; Hit description=DNA -directed RNA polymerase subunit beta''
  Pfam annotation: Domain name=RNA_pol_Rpb1_4; Domain location=1-62; Score=36.8; E_value=8.7e-08; Accession=PF05000.9; Description=RNA polymerase Rpb1, domain 4
NNLKQEMNSNFRXTDPSNPVYLMXFSGARGNASQVHQLVGMRGLMADPQGQMIDLPIQSNLREGLSLTEYIISCYGARKGXVVDTAV

SEQ ID NO: 72570 - protein, 94 aa, Setaria italica
  misc_feature (72)..(72): Xaa can be any naturally occurring amino acid
  Transcript Sequence Number=SeqID_6596
  Gene Ontology: Cellular component=vacuole
  Homolog annotation: Hit_ID=B6SWR6; Match level="QueryCoverage=100%, HitCoverage=23%, E-value=6e-43, Identity=90%"; Hit description=CBS domain containing protein
FHHVVGDLTCGKPEVSELHDTDTLEDAARAIASSPEGAVPVWRPRAAPEDPPSGVRFIGMISALDIAAFVAXAGVGDRAMRAVVGEVVQPNPGL

SEQ ID NO: 72571 - protein, 47 aa, Setaria italica
  Transcript Sequence Number=SeqID_6597
RWFFIESLILVLVCHTGLGEETVQLCPARVANLYVVCFSDCCLGKKS

SEQ ID NO: 72572 - protein, 72 aa, Setaria italica
  Transcript Sequence Number=SeqID_6598
KLVLLLVIVGIVDNIAYCKPNSTFGTCVIPPPPPPSPPTPGRRGAGAGDASAATGRSHHQWSFFLGLALLLC

SEQ ID NO: 72573 - protein, 178 aa, Setaria italica
  Transcript Sequence Number=SeqID_6599
  Gene Ontology: Mol. function=electron carrier activity; Cellular component=extracellular region; Biological process=hydrogen peroxide catabolic process
  Homolog annotation: Hit_ID=B6SI04; Match level="QueryCoverage=94%, HitCoverage=50%, E-value=4e-85, Identity=91%"; Hit description =Peroxidase 65
  Pfam annotation: Domain name=peroxidase; Domain location=2-142; Score= 19.1; E_value=2.2e-11; Accession=PF00141.15; Description=Peroxidase
YARRSDARDVEGNLPRTNMSARAMARLFASKGITPREMVALAGAHTVGFSHCGEFAHRIYGYRGAGGHDPRLNPEFALALQRSCAGYRSDPTVSIFNDIVTPRDFDEAYYKNLPRGLGLLASDAALWEYPPTRVFAERYAGNRTAFFEDFAAAMQRLGAVGVKTGRQGVVRRRCDALD

SEQ ID NO: 72574 - protein, 82 aa, Setaria italica
  misc_feature (29)..(29): Xaa can be any naturally occurring amino acid
  misc_feature (46)..(46): Xaa can be any naturally occurring amino acid
  Transcript Sequence Number=SeqID_6600
  Gene Ontology: Mol. function=sequence-specific DNA binding; Cellular component=nucleus
YQTAGMLETVLRVGVLGEDDTGEESPSKXKITSNKCACYAVKLLYXGNGRVRAFHIMDPKGVLDTLLVFHERQGSVVPQPLI

SEQ ID NO: 72575 - protein, 80 aa, Setaria italica
  Transcript Sequence Number=SeqID_6601
  Gene Ontology: Mol. function=sequence-specific DNA binding; Cellular component=nucleus
  Subcellular localization annotation: CTP_CleavageSite=45; ConfidenceScore=5.03e-01
MAEALVGLRFAAPAFPQPQSQRHRDRLLPAARFTPLWRGRLYTARAAVAGPPEVDEDEAMSIDNLHRFFELNIVSGFVIW

SEQ ID NO: 72576 - protein, 100 aa, Setaria italica
  Transcript Sequence Number=SeqID_6602
  Gene Ontology: Mol. function=sequence-specific DNA binding; Cellular component=nucleus
  Subcellular localization annotation: CTP_CleavageSite=45; ConfidenceScore=5.03e-01
MAEALVGLRFAAPAFPQPQSQRHRDRLLPAARFTPLWRGRLYTARAAVAGPPEVDEDEAMSIDNLHRFFELNIGKWDGSFYVRLALFASNLRAFMQFPDS

SEQ ID NO: 72577 - protein, 96 aa, Setaria italica
  Transcript Sequence Number=SeqID_6603
  Gene Ontology: Mol. function=sequence-specific DNA binding; Cellular component=nucleus
DTISTKIGTGTTTTVNWMESANNNLLQFDGGYEITLLPGGMYMGYPSDISKSVAQLDSFHLEFCWMESPGKRQRLVRTYDSAGLAVSSTYFLETKV

SEQ ID NO: 72578 - protein, 244 aa, Setaria italica
  Transcript Sequence Number=SeqID_6604
  Gene Ontology: Mol. function=sequence-specific DNA binding; Cellular component=nucleus
LRIVASAVPQPRTLHCCLLRTALRGGQFRGGRLRARAAVAGAPEVDDDDAMSIDNLHRFFDLNVGRWNGSFYQFDAHGRVLQGISTRLSVSTYGEDELISLLQSLYIKQASSRMSIVDEEDSEPEWVEYKIKETNMFTVDKYQQIGFFPEEKAFALRYQTAGMLETVLRVGVLGEDDTGEDSPKNLKIPSRKPSIVCENCLYSLEANGRVRAFHIMDPKGVVDTLLVFHEKQGSIVSQPLFDSS

SEQ ID NO: 72579 - protein, 201 aa, Setaria italica
  Transcript Sequence Number=SeqID_6605
  Gene Ontology: Mol. function=sequence-specific DNA binding; Cellular component=nucleus
AIYCFFLLSLLEVLIGRVRAFHIMDPKGVVDTLLVFHERQGSVVPQPLIHSPIGTENASSDRINALLGRWEGHSVTKRSGVYGATLAEADTAVVLKMDSNGLLTQDTISTKFGTGTTTTVNWIGSANNNLLQFDGGYEITLLPGGMYMGYPSDISKCVAQLDSFHLEFCWMESPGKRQRLVRTYDSAGLAVSSTYFLESKV

SEQ ID NO: 72580 - protein, 185 aa, Setaria italica
  misc_feature (65)..(65): Xaa can be any naturally occurring amino acid
  Transcript Sequence Number=SeqID_6606
  Gene Ontology: Mol. function=aspartic-type endopeptidase activity; Cellular component=plasma membrane; Biological process=proteolysis
  Homolog annotation: Hit_ID=B2CSI3; Match level="QueryCoverage=68%, HitCoverage=39%, E-value=6e-47, Identity=74%"; Hit description =Putative nucellin-like aspartic protease
ERNLRTKTNSRTNEIEYADQSSSMGVLARDDMHLIATNGGREKLDFVFGCAYDQQGQLLSSPAKXDGILGLSSAAISLPSQLASHGIISNIFGHCITREQGGGGYMFLGDDYAPRWGMTWTSIRSGPDNLYHTEANSVKYGDQQLSVRGKAGNSVQVIFDSVKYGDQSSSVCVGRQGNLEFKWIF

SEQ ID NO: 72581 - protein, 169 aa, Setaria italica
  Transcript Sequence Number=SeqID_6607
  Gene Ontology: Mol. function=aspartic-type endopeptidase activity; Biological process=proteolysis
  Homolog annotation: Hit_ID=Q9M9A8; Match level="QueryCoverage=63%, HitCoverage=19%, E-value=1e-17, Identity=44%"; Hit description =F27J15.15
MGYPVAAETRRRSRRRLSPRRVAAMVLVLGALAVAAYYCFYSDVAVQFLGMEQEEAQKERNETRSFLLPLYPKARQGRALREFGDVKLAAKRVDGGGMKATNKMEVKKAAAAGANSTALLPIKGNVFPDGQYYTSIFVGNPPRPYFLDVDTGSDLTWIQCDAPCTNCAN

SEQ ID NO: 72582 - protein, 77 aa, Setaria italica
  misc_feature (52)..(52): Xaa can be any naturally occurring amino acid
  Transcript Sequence Number=SeqID_6608
MVMEGNAGSLYGRLNRASTRGLLAYVAAGAACAAVLACFVLSAADPRAAAGXNDGLLRLASRTARVSAHLAFNWRVV

SEQ ID NO: 72583 - protein, 125 aa, Setaria italica
  Transcript Sequence Number=SeqID_6609
  Homolog annotation: Hit_ID=Q9S7Y5; Match level="QueryCoverage=100%, HitCoverage=63%, E-value=6e-59, Identity=86%"; Hit description =F17A17.10 protein
  Pfam annotation: Domain name=SAM_1; Domain location=13-82; Score=5.1; E_value=0.054; Accession=PF00536.22; Description=SAM domain (Sterile alpha motif)
MSRGRSPEPLDFFIWTVQDVGLWLEEINLGSYRQSFEENGVNGEYLESLSMFTTEQILRFIRRCHMKWGDFITLCKELRRIKVACLKGEQEVRRPWWAPSCLSVVFVRVAKRNRQSRVVSLKLEA

SEQ ID NO: 72584 - protein, 229 aa, Setaria italica
  Transcript Sequence Number=SeqID_6610
EACSYERAFFLDEYATNTLDHSQLIKLLDVELGIIMYDDLYTKAPLLRTRSGIILRCISQVSAIVALVLFSITSKKQADRYGRADIVITYILFTGGFLLEVCAVIMMLASPWTWAWLEAEGYRRLASISRFLLSSKVFGLPETRLLWSGTMGQYSLLSYIGFNEQVNLSQRVMSMIRKMAGALGIGEVKKLFWVSKLLDTKSEVVDDKITEFLVEEIRHFTHGGQRQWP

SEQ ID NO: 72585 - protein, 98 aa, Setaria italica
  Transcript Sequence Number=SeqID_6611
LPHPWERMSGFTWKLIPFISSVLPRCHLHCSHFSALHPWERMRYASTHCRSHLVLSSYSSLLCSEAKPVRIEMAMALLTRRDFGIDDSLTDDVFSAPP

SEQ ID NO: 72586 - protein, 87 aa, Setaria italica
  Transcript Sequence Number=SeqID_6612
  Gene Ontology: Mol. function=oxidoreductase activity, acting on single donors with incorporation of molecular oxygen, incorporation of two atoms of oxygen; Cellular component=cytoplasm; Biological process=aromatic amino ...
  Gene Ontology: Biological process=acid family metabolic process
  Homolog annotation: Hit_ID=O48604; Match level="QueryCoverage=78%, HitCoverage=15%, E-value=3e-30, Identity=92%"; Hit description=4 -hydroxyphenylpyruvate dioxygenase
AAPPPDYYEGVRRRAGDVLSEAQIKECQELGVLVDRDDQGVLLQIFTKPVGDRQTLFLEIIQRIGCMEKDEQGQEYQKGGCGGFGKG

SEQ ID NO: 72587 - protein, 98 aa, Setaria italica
  Transcript Sequence Number=SeqID_6613
  Gene Ontology: Mol. function=solute:hydrogen antiporter activity; Cellular component=integral to membrane; Biological process =regulation of pH
  Homolog annotation: Hit_ID=Q2HVU7; Match level="QueryCoverage=100%, HitCoverage=11%, E-value=2e-21, Identity=52%"; Hit description =Sodium/hydrogen exchanger
KNADRSYTFSTAIVDTRKEKELDEAAVAEFRQRMGSLVRFEERVVVGNMIEEVVSIGKSREYGLVVVGKGRLPSPMVAQLAVRPAEHPELGPIGDALA

SEQ ID NO: 72588 - protein, 432 aa, Setaria italica
  Transcript Sequence Number=SeqID_6614
  Gene Ontology: Mol. function=phosphoglycerate mutase activity; Cellular component=cytoplasm; Biological process=glucose catabolic process
  Homolog annotation: Hit_ID=P35493; Match level="QueryCoverage=94%, HitCoverage=73%, E-value=0.0, Identity=80%"; Hit description=2,3 -bisphosphoglycerate-independent phosphoglycerate mutase
  Pfam annotation: Domain name=Metalloenzyme; Domain location=273-400; Score=171.6; E_value=2.3e-48; Accession=PF01676.10; Description =Metalloenzyme superfamily
  Pfam annotation: Domain name=iPGM_N; Domain location=6-263; Score =235.7; E_value=1.2e-67; Accession=PF06415.5; Description=BPG -independent PGAM N-terminus (iPGM
  Pfam module annotation: Pfam domain module=Metalloenzyme::iPGM_N; Domain location=273-400::6-263
ADGYCLPPLFFSSSFFWLLQLLLKGASEHGAKRVRVHILTDGRDVLDGSSIRFVEMLEEDLARLREKGVDARIASGGGRMYVTMDRYENDWQVVKRGWDAHVLGEAPHKFKNALEAVKKLREDPKANDQYLPPFVIVDESGKPVGPIQDGDAVVTFNFRADRMVMLAKALEYENFDKFDRVRFPKIRYAGMLQYDGELKLPSHYLVAPPEIERTSGEYLARNGVRTYACSETVKFGHVTFFWNGNRSGYFNPSLEKYEEIPSDIGIPFNDQPKMKALEIAQKARDAILSRKFDQVRVNIANGDMVGHTGDIEATIVGCKAADEAVKIILDAIEQVGGIFVLTADHGNAEDMAKRDKSGKPLRDKDGKVQTLTSHTLNPVPIAIGGPGLAPGVRFRTDLPNAGLANVAATVMNLHGFEAPDHYEPTLIEVVDK

SEQ ID NO: 72589 - protein, 61 aa, Setaria italica
  Transcript Sequence Number=SeqID_6615
  Subcellular localization annotation: CTP_CleavageSite=34; ConfidenceScore=5.10e-01
EDIVVLGCGRGDGDGAVALVAVVALRRRIRRGARASPRPRCQPRRLLPPRPSCPPSISATP

SEQ ID NO: 72590 - protein, 100 aa, Setaria italica
  Transcript Sequence Number=SeqID_6616
  Gene Ontology: Mol. function=metal ion binding
MSSSSAAQRYYCHQCDRTVSIAPPASQDDDVLCPHCAGGFVEVLELPQGQDASPAAFFPQAQLPSFDLRHPSDLSAFFGPPSPEPLGQGLFDPSNFLHDI

SEQ ID NO: 72591 - protein, 72 aa, Setaria italica
  Transcript Sequence Number=SeqID_6617
SHLATQKKQPRQWVQPSFTSLKYNQIVRMELHGTIFFKMKNWLRSKSIDLQKYKTVQILAAVIPRQEQQTKT

SEQ ID NO: 72592 - protein, 142 aa, Setaria italica
  Transcript Sequence Number=SeqID_6618
  Gene Ontology: Mol. function=iron-sulfur cluster binding
  Homolog annotation: Hit_ID=Q7EY67; Match level="QueryCoverage=94%, HitCoverage=14%, E-value=8e-57, Identity=76%"; Hit description=F-box protein family-like protein
DAEALYYNHRVHEVLNTDDSRPIDVDVCPLCRNVRLVFDCTRKDCREVKDGWTHCRGCFFCVARCETCGGCIDLEELGETGLACSDFLCMDCWLKLPKCSTCNRPYCERHSNLKENLSPSGQFTCQECTAFDTSLESLGDGD

SEQ ID NO: 72593 - protein, 115 aa, Setaria italica
  Transcript Sequence Number=SeqID_6619
  Gene Ontology: Mol. function=electron carrier activity; Cellular component=anchored to membrane; Biological process=electron transport chain
  Homolog annotation: Hit_ID=B6T5Q5; Match level="QueryCoverage=77%, HitCoverage=73%, E-value=4e-39, Identity=87%"; Hit description =Chemocyanin
  Pfam annotation: Domain name=Cu_bind_like; Domain location=32-108; Score=105.5; E_value=1.8e-28; Accession=PF02298.9; Description =Plastocyanin-like domain
QCGVEVPRPPAGLLAACLLLGAADAATHRVDWSSNADSWSRGKSFRAGDVLEFNYDPSLHNVVAVDAGGYYGCSSSGRAYGSGSDRITLGPGTNYFICSLNGHCGMGMKMAVNAS

SEQ ID NO: 72594 - protein, 118 aa, Setaria italica
  misc_feature (108)..(108): Xaa can be any naturally occurring amino acid
  Transcript Sequence Number=SeqID_6620
  Gene Ontology: Mol. function=DNA binding
  Homolog annotation: Hit_ID=B9RYZ9; Match level="QueryCoverage=65%, HitCoverage=10%, E-value=4e-28, Identity=74%"; Hit description =Transcription factor, putative
  Subcellular localization annotation: CTP_CleavageSite=21; ConfidenceScore=5.04e-01
TTRTPRRLGGGRGRSGAKRKRVSEGGAAAGGSGSGSGSGSGKMMRFFEGLMKQVMERQEAMQQRFLEAIEKREQDRMIREEAWRRQEMTRLAREQEILAQERAMAASXDAAVLSFIQK

SEQ ID NO: 72595 - protein, 76 aa, Setaria italica
  Transcript Sequence Number=SeqID_6621
LGHSAWRLNPACFACYAIWLESSLLRDGFCGCVFMILILVMLMGININAWDMGDWMASWCSRLCSFWESRDQLYSA

SEQ ID NO: 72596 - protein, 94 aa, Setaria italica
  Transcript Sequence Number=SeqID_6622
SRKARARRTRRPKEAAKDKKQPEAEGKEKKPEKDKGSDKKPEKAEAAKPKDEAKKDVEVTPPKEKGSPEPTKESAAAASPDAARCRVVVRGRLS

SEQ ID NO: 72597 - protein, 127 aa, Setaria italica
  Transcript Sequence Number=SeqID_6623
EEDPRQADKKGKKKKNKQQKEGGESETAPAEKTPQPSMPAPVPAPAPPPGPERPLGGFPYYAAQPVMSYNVAHPSSSVSYYAPTPVGHMQPMPTTMAPYGYPPYPPMMPPPMPEFMYGPPGIRSSPP

SEQ ID NO: 72598 - protein, 57 aa, Setaria italica
  Transcript Sequence Number=SeqID_6624
VQINRYVFKKMGEMLQLSSTKTHLANIINSSTKLSLHPDRQTKIKILKYPLRRRCNN

SEQ ID NO: 72599 - protein, 78 aa, Setaria italica
  misc_feature (69)..(69): Xaa can be any naturally occurring amino acid
  Transcript Sequence Number=SeqID_6625
  Gene Ontology: Mol. function=hydrolase activity; Cellular component =intracellular; Biological process=regulation of transcription, DNA -dependent
  Homolog annotation: Hit_ID=Q9M4U5; Match level="QueryCoverage=65%, HitCoverage=16%, E-value=3e-16, Identity=86%"; Hit description =Histone deacetylase HDT2
MKSKDDEDSEEEEEETPTPKKPEGGKKRAAENALKTPVSDKKAKVATPSGQKTGGKKGVTHVATPHPAXKKTPANNDK

SEQ ID NO: 72600 - protein, 81 aa, Setaria italica
  Transcript Sequence Number=SeqID_6626
  Gene Ontology: Mol. function=nucleic acid binding; Cellular component= nucleus; Biological process=response to stress
  Homolog annotation: Hit_ID=P10979; Match level="QueryCoverage=71%, HitCoverage=36%, E-value=7e-23, Identity=87%"; Hit description =Glycine-rich RNA-binding, abscisic acid-inducible protein
  Pfam annotation: Domain name=RRM_1; Domain location=1-53; Score=46.2; E_value=1.3e-10; Accession=PF00076.14; Description=RNA recognition motif. (a.k.a. RRM, RBD, o
YASYGDVVDSKVITDRETGRSRGFGFVTFSTEQSMLEAIENMNGKELDGRNITVNQAQSRGGGGGGGYGGSRGESGGNWRN

SEQ ID NO: 72601 - protein, 46 aa, Setaria italica
  Transcript Sequence Number=SeqID_6627
SLFSSHFFSLRKQLGNGRHGEPTPNRTVTRDTKLGISNGNTMLIDS

SEQ ID NO: 72602 - protein, 176 aa, Setaria italica
  Transcript Sequence Number=SeqID_6628
  Gene Ontology: Mol. function=iron-sulfur cluster binding; Cellular component=mitochondrion; Biological process=iron-sulfur cluster assembly
  Homolog annotation: Hit_ID=B4FTN1; Match level="QueryCoverage=75%, HitCoverage=73%, E-value=8e-62, Identity=85%"; Hit description=NifU -like N-terminal domain-containing protein
  Pfam annotation: Domain name=NifU_N; Domain location=44-171; Score =271.0; E_value=2.7e-78; Accession=PF01592.8; Description=NifU-like N terminal domain
  Subcellular localization annotation: CTP_CleavageSite=35; ConfidenceScore=5.03e-01
CRRRCRSSCTVRRASGRPRRRSRTTTCSTRRTPAVAAAGAASRGYHERVVDHYNNPRNVGSFDKDDADVGTGIVGAPSCGDVMKLQIRVDEGSGRIVDARFKTFGCGSAIASSSVASEWVKGKQMEEVVAIKNTEIAKHLSLPPVKLHCSMLAEDAIKAAVKDYEAKKGKLAKADE

SEQ ID NO: 72603 - protein, 105 aa, Setaria italica
  misc_feature (57)..(57): Xaa can be any naturally occurring amino acid
  Transcript Sequence Number=SeqID_6629
  Pfam annotation: Domain name=zf-CCHC; Domain location=30-47; Score =37.9; E_value=4.1e-08; Accession=PF00098.15; Description=Zinc knuckle
MDRGRGLRWVGGGGRAPRGGGGGGGGGGGGDCFKCGKPGHFARECPSGDGGRRGQEXGGRDDKYGGGSGGSRYGSDRGGDRYSSRSRDGGSYGGDRYNRDRSGPY

SEQ ID NO: 72604 - protein, 74 aa, Setaria italica
  Transcript Sequence Number=SeqID_6630
HWRTTAKSLLLGSNLCTISIGGPLQHIAYCFCLFSLFGGLTTWWFLWRAEVASCRCPVLCDSCSQRSCIHAYSA

SEQ ID NO: 72605 - protein, 267 aa, Setaria italica
  misc_feature (46)..(46): Xaa can be any naturally occurring amino acid
  Transcript Sequence Number=SeqID_6631
ALWPAPAPAAVVEAAKKPEEVDPAPPAAVEGDKVKEGAGKADAKAXKEAAKDKKQPEAEGKEKKPEKDKGSDKKPEKAEAAKPKDEAKKDVEVTPPKEKGSPEPTKESAAAGEEAGAEEPSSGKKGKKKKNKQQKEGGESETAPAEKTPQPSMPAPVPAPAPPPGPERPLGGFPYYAAQPVMSYNVAHPSSSVSYYAPTPVGHMQPMPTPPPPPTTMAPYGYPPYPPMMPPPMPEFMYGPPGIRSSPPQESYNNMFNEENANSCSVM

SEQ ID NO: 72606 - protein, 157 aa, Setaria italica
  Transcript Sequence Number=SeqID_6632
  Gene Ontology: Mol. function=iron-sulfur cluster binding; Cellular component=mitochondrion; Biological process=iron-sulfur cluster assembly
  Homolog annotation: Hit_ID=B4FTN1; Match level="QueryCoverage=90%, HitCoverage=78%, E-value=2e-76, Identity=97%"; Hit description=NifU -like N-terminal domain-containing protein
  Pfam annotation: Domain name=NifU_N; Domain location=15-142; Score =285.5; E_value=1.2e-82; Accession=PF01592.8; Description=NifU-like N terminal domain
GEAGPAAAAAAGVRAYHERVVDHYNNPRNVGSFDKDDPNVGTGLVGAPACGDVMKLQIRVDEDSGKIVDACFKTFGCGSAIASSSVATEWVKGKPMDEVLTIKNTEIAKHLSLPPVKLHCSMLAEDAIKAAVKDYEAKKAKTGQKGEDSPSEKTAEA

SEQ ID NO: 72607 - protein, 208 aa, Setaria italica
  Transcript Sequence Number=SeqID_6633
  Gene Ontology: Mol. function=nucleic acid binding; Cellular component= nucleus; Biological process=response to stress
  Homolog annotation: Hit_ID=B6TF12; Match level="QueryCoverage=72%, HitCoverage=73%, E-value=2e-43, Identity=64%"; Hit description =Glycine-rich RNA-binding protein 8
  Pfam annotation: Domain name=RRM_1; Domain location=9-79; Score =106.5; E_value=9.2e-29; Accession=PF00076.14; Description=RNA recognition motif. (a.k.a. RRM, RBD, o
  Pfam annotation: Domain name=zf-CCHC; Domain location=134-151; Score =37.9; E_value=4.1e-08; Accession=PF00098.15; Description=Zinc knuckle
  Pfam module annotation: Pfam domain module=RRM_1::zf-CCHC; Domain location=9-79::134-151
MADVEEYRCFIGNLSWSTTDDSLKDAFGKFGNLTEAKVVHDKFSGRSRGFGFVTFDEKKAMEDAIEGMNGLDLDGRNITVDKAQPQGPGRDRNGDRDYDRERGSRYDRGRDYGGGGGGRAPRGGGGGGGGGGGGDCFKCGKPGHFARECPSGDGGRGDRYGGRDDKYGGGSGGSRYGSDRGGDRYSSRSRDGGSYGGDRYNRDRSGPY

SEQ ID NO: 72608 - protein, 93 aa, Setaria italica
  misc_feature (16)..(16): Xaa can be any naturally occurring amino acid
  Transcript Sequence Number=SeqID_6634
  Gene Ontology: Mol. function=structural constituent of ribosome; Cellular component=ribonucleoprotein complex; Biological process =translation
  Homolog annotation: Hit_ID=P46302; Match level="QueryCoverage=54%, HitCoverage=78%, E-value=8e-20, Identity=98%"; Hit description=40S ribosomal protein S28
  Pfam annotation: Domain name=Ribosomal_S28e; Domain location=29-93; Score=153.1; E_value=8.7e-43; Accession=PF01200.10; Description =Ribosomal protein S28e
  Subcellular localization annotation: CTP_CleavageSite=40; ConfidenceScore=5.25e-01
APCAPPSPPFASRARXARRPPRSRENESMDTQVKLAVVVKVMGRTGSRGQVTQVRVKFLDDQNRLIMRNVKGPVREGDILTLLESEREARRLR

SEQ ID NO: 72609 - protein, 82 aa, Setaria italica
  Transcript Sequence Number=SeqID_6635
  Gene Ontology: Mol. function=zinc ion binding; Cellular component =intracellular
  Subcellular localization annotation: CTP_CleavageSite=44; ConfidenceScore=5.23e-01
MLIHLSDPPPHLLSAHPSDAILDGPLDTSRRNLSRSPPLDVFPRNASPKRVLERLPPSRSILGPDPRRLPDRNGRSRWMCTQ

SEQ ID NO: 72610 - protein, 873 aa, Setaria italica
  Transcript Sequence Number=SeqID_6636
  Gene Ontology: Mol. function=zinc ion binding; Cellular component =intracellular; Biological process=embryonic development ending in birth or egg hatching
  Homolog annotation: Hit_ID=Q9ZS85; Match level="QueryCoverage=99%, HitCoverage=81%, E-value=3e-69, Identity=60%"; Hit description =T4B21.1 protein
  Pfam annotation: Domain name=DUF618; Domain location=1-56; Score =26.8; E_value=8.8e-05; Accession=PF04818.5; Description=Protein of unknown function, DUF618
PSLYLLDSIVKNIGREYVDRFAARLQKVFVDAYCRVHPSQYASMRRLFRTWWPVFPSSVLRGIEDDLQFSPSQEKRPAIATNPHQSESLSPRPSHGIHVNPKYLEAQQKLKQANVMHQPAVRGTRQMADVEEDLINGLTSNGLRGRPSMFQKSTVQYADDPDQQDTLRSLAGTIRATSPHLLSAHPSDAILDGPLDTSRRNLSRSPPLDVFPRNASPKRVLERLPPSRSILGPDPRRLPDRNGRSRWTFDDGARRPTISMLDEEYRKQSARELIDAYGNSQGRDADERVSKMQRLDSNGMASARNWLTSEEEEYSWEDMSPTLTDRIRSSVPSFPPGTMRAGFPGAKAGLLESDIGRHNFPSQAPRSSVDGPPLNLEDRITAASHANMPTSRRHPSNFGVQNGALLEYQSSEHTLNHGRTATMQAPPWQQPTGLPLRVQAPEHPSVLDRIPLPADGEMPVKRLEIGGIYNALSADIPLVEKHRPLTAAAPIEWPPLHHTQSQTLVPIPPDTKHVRNAADSLEIRPFVSQGASSSVFVPRHQYDALDRKTLSTGSLAQPPYQHQDLLPSSQQNQGAVLGNQAQPHHPQQFHPHSHPHHQEAFRGFGPGMSISPFPGQGGSAALPPVSLLPSSFSGPPAVPPYGMPSASSFPRPPLPPGPPPGSLQIGSSSSQVGGPQPFVSGLLSNLMRQGVITLGPHSQPQDSIGVDFNIDLKVRNDSVINALYQDLSRQCKTCGLRFKCQEEHRAHMDWHVTKNRNSKNRKQSSRKYFVTAEEWLRAAETVGNDGVPAFVPSDPVPDSKEEKEMAVPADEEQTACALCHEPFEDFYSDETEEWMYKGAVYMNAPDGNIDGLERSQLGPIVHAKCRSGPSSTS

SEQ ID NO: 72611 - protein, 198 aa, Setaria italica
  misc_feature (12)..(12): Xaa can be any naturally occurring amino acid
  misc_feature (47)..(47): Xaa can be any naturally occurring amino acid
  misc_feature (57)..(57): Xaa can be any naturally occurring amino acid
  Transcript Sequence Number=SeqID_6637
  Gene Ontology: Mol. function=electron carrier activity; Cellular component=integral to membrane; Biological process=oxidation reduction
  Homolog annotation: Hit_ID=B6SW13; Match level="QueryCoverage=97%, HitCoverage=35%, E-value=8e-71, Identity=71%"; Hit description =Cytochrome P450 CYP86E2
FWLLASHPDVEXRVLADVVRAADADDKSGKSMDYLHAALTESMRLYXPVPADFKEAXLEDDVLPDGTAVRAAQRVIYFTYAMGRDKVLWGPDCLEFRPERWLDKRGAFAGGAESPYKYVVFNAGPRLCVGKRFAYTQMKAVAAAVLARFRVEVLPGQEAVKPKLNTTLYMKHGLMVRFARREQRHEPGHAVPAAGQVD

SEQ ID NO: 72612 - protein, 185 aa, Setaria italica
  Transcript Sequence Number=SeqID_6638
DILLNILHCAKQKDVHESDTEVSDEIICLAAVLRVMSSSLLHILHCVSQMASAGDKENVDYATLCTGYNFIYESICLLGQHEANGLLRYDLLDIIGMPVDRERASMAMLAHFATMSLCCVRKRLGFLWKGCVVMMIMSMNLIAEEEGLSTFELSSKESAVVCSTEEGILKVSARTKAMALRYEAI

SEQ ID NO: 72613 - protein, 162 aa, Setaria italica
  Transcript Sequence Number=SeqID_6639
KLSFFLGRQQRQAAPARARVGTDYGGVRVQVPLEQPESDGALDPASHGDAAGRPAAKAEGDAARKDKGFRRRRFCGTETHARSSWKKKPAGRDRGRSCSRRRGRVAARRRREPDAPSLPGCRRVVACVCVQGSPLRARTCMGFVRAWRFWRRRLSVQQEPAA

SEQ ID NO: 72614 - protein, 271 aa, Setaria italica
  misc_feature (18)..(18): Xaa can be any naturally occurring amino acid
  misc_feature (225)..(225): Xaa can be any naturally occurring amino acid
  misc_feature (253)..(253): Xaa can be any naturally occurring amino acid
  Transcript Sequence Number=SeqID_6640
  Gene Ontology: Mol. function=transferase activity; Cellular component= integral to membrane; Biological process=carbohydrate metabolic process
  Homolog annotation: Hit_ID=A7UQU6; Match level="QueryCoverage=98%, HitCoverage=58%, E-value=4e-78, Identity=52%"; Hit description=Three- deoxy-D-manno-octulosonic-acid transferase, N-terminal
  Pfam annotation: Domain name=Glycos_transf_N; Domain location=1-156; Score=142.9; E_value=1e-39; Accession=PF04413.8; Description=3-Deoxy- D-manno-octulosonic-acid transferase (kdotransferase)
PRSPVVRHCARLHPGLPXLLTTTTLSSFEVIKDLLPEGVIYQFAPLDCPDAIDSFIGYWKPSLVLLMESELWPNLIMSAAANGIAVALLNARMSLKSFNRWSVPLGLPLVTLMLSKLSLVAPLSTIQAVRFQLLHTPPGIIHFAGDLKYAVGDVNAGENEVIKIKDLQQQFSNRPLWMAASIHRGEEEVILRVHDELIKMYPTLLLILVPRHPHDCKDFSLVLKXQKANFVLRSTKEVVCSSTRVYMVDTLGXTPVAVVGGSFLPGLAGHN

SEQ ID NO: 72615 - protein, 177 aa, Setaria italica
  Transcript Sequence Number=SeqID_6641
  Gene Ontology: Mol. function=transferase activity; Cellular component= integral to membrane; Biological process=carbohydrate metabolic process
  Homolog annotation: Hit_ID=A7UQU6; Match level="QueryCoverage=84%, HitCoverage=31%, E-value=8e-44, Identity=56%"; Hit description=Three- deoxy-D-manno-octulosonic-acid transferase, N-terminal
MYPTLLLILVPRHPHDCKDFSLVLKKQKANFVLRSTKEVVCSSTRVYMVDTLGELRMLYRVTPVAVVGGSFLPGLAGHNISEAAAAGCAVMTGPHVGHFYHMLLEMWQINPLAVKQVGGEFELLHTLKELFGDAKTLGACQRASKDAFSIMSHGVVNRVWDLVCRFAIDLETDKWNS

SEQ ID NO: 72616 - protein, 42 aa, Setaria italica
  Transcript Sequence Number=SeqID_6642
MHVEMQAVAAGATAQAKENNDDDVPELVPGETFEEVAQEAKA

SEQ ID NO: 72617 - protein, 158 aa, Setaria italica
  Transcript Sequence Number=SeqID_6643
  Gene Ontology: Mol. function=RNA polymerase II transcription factor activity; Cellular component=nucleus; Biological process =transcription from RNA polymerase II promoter
  Homolog annotation: Hit_ID=Q10AI8; Match level="QueryCoverage=82%, HitCoverage=89%, E-value=1e-58, Identity=86%"; Hit description=NAC domain containing protein, expressed
  Pfam annotation: Domain name=NAC; Domain location=34-92; Score=106.3; E_value=1e-28; Accession=PF01849.10; Description=NAC domain
MNKERLMKMAGAVRTGGKGTVRRKKKAVHKTATTDDKRLQSTLKRVGVNTIPAIEEVNIFKDDLVIQFLNPKVQASIAANTWVVSGSPQTKKLQDVLPGIINQLGPDNMEHLRRIAEEIEKQAVAAGATAQAKENNDDDVPELVPGETFEEVAQEAKA

SEQ ID NO: 72618 - protein, 68 aa, Setaria italica
  Transcript Sequence Number=SeqID_6644
RYSVQFQFARPEASAGSSFPLYPSKLHFPLLFLEVQFPRNMTLQILAASWSNLPANYHEFIRPCFPPS

SEQ ID NO: 72619 - protein, 104 aa, Setaria italica
  Transcript Sequence Number=SeqID_6645
  Gene Ontology: Mol. function=acetolactate synthase activity; Cellular component=chloroplast; Biological process=branched chain family amino acid biosynthetic process
  Homolog annotation: Hit_ID=Q6K2E8; Match level="QueryCoverage=100%, HitCoverage=16%, E-value=8e-45, Identity=85%"; Hit description =Acetolactate synthase 1, chloroplastic
  Pfam annotation: Domain name=TPP_enzyme_N; Domain location=1-104; Score=83.4; E_value=7.9e-22; Accession=PF02776.10; Description =Thiamine pyrophosphate enzyme, N-termina
DILVEALERCGVSDVFAYPGGASMEIHQALTRSPVIANHLFRHEQGEAFAASGYARSSGRVGVCVATSGPGATNLVSALADALLDSVPMVAITGQVPRRMIGTD

SEQ ID NO: 72620 - protein, 120 aa, Setaria italica
  misc_feature (65)..(65): Xaa can be any naturally occurring amino acid
  Transcript Sequence Number=SeqID_6646
TAFFHVIPQRKRGEAEAGDDETKVSLDDNDDDAEEAANGNLSEEDLKKVIDEDVADDGDEELEDXETDVSNKRQCVRREDVEAGDQDHSGAVAEATPAGLDATTPQAEQAKESNNGGKDD

SEQ ID NO: 72621 - protein, 127 aa, Setaria italica
  Transcript Sequence Number=SeqID_6647
  Gene Ontology: Mol. function=methyltransferase activity; Cellular component=cytoplasm; Biological process=tRNA processing
  Homolog annotation: Hit_ID=B9T580; Match level="QueryCoverage=73%, HitCoverage=28%, E-value=5e-35, Identity=68%"; Hit description=RNA (Guanine-9-) methyltransferase domain containing, putative
  Pfam annotation: Domain name=tRNA_m1G_MT; Domain location=1-127; Score=-10.8; E_value=0.00053; Accession=PF01746.13; Description=tRNA (Guanine-1)-methyltransferase
PNEIHSLTQQIMYCYAVNGRSANPAHLWLTGCSGEMATHLQRIPGYDKWIIEKAAKPYLEAFEDRKENLVYLTADAETVLDDLDMSKIYIIDNLFQVLLRKISICSFFSIIIIIVQAYFGLIISSFS

SEQ ID NO: 72622 - protein, 292 aa, Setaria italica
  Transcript Sequence Number=SeqID_6648
  Gene Ontology: Mol. function=methyltransferase activity; Cellular component=cytoplasm; Biological process=tRNA processing
  Homolog annotation: Hit_ID=B9T580; Match level="QueryCoverage=63%, HitCoverage=56%, E-value=8e-80, Identity=71%"; Hit description=RNA (Guanine-9-) methyltransferase domain containing, putative
  Pfam annotation: Domain name=tRNA_m1G_MT; Domain location=34-200; Score=193.5; E_value=6e-55; Accession=PF01746.13; Description=tRNA (Guanine-1)-methyltransferase
RVGRRAEERGARAERLRRAAEGAGQKVVLDLEFADLMRPNEIHSLTQQIMYCYAVNGRSANPAHLWLTGCSGEMATHLQRIPGYDKWIIEKAAKPYLEAFEDRKENLVYLTADAETVLDDLDMSKIYIIGGLVDRNRWKGITLKKAAEQGIQSAKLPIGNYLKLSSSQVLTVNQVFEIMLKFVETRDWKTAFFHVIPQRKRGEAEAGDDETKVSLDDNDDDAEEAANGNLSEEDLKKVIDEDVADDGDEELEDDETDVSNKRQCVRREDVEAGDQDHSGAVAEATQPRYTKN

SEQ ID NO: 72623 - protein, 233 aa, Setaria italica
  misc_feature (36)..(36): Xaa can be any naturally occurring amino acid
  Transcript Sequence Number=SeqID_6649
  Gene Ontology: Mol. function=protein transporter activity; Cellular component=nuclear pore; Biological process=protein import into nucleus, docking
  Homolog annotation: Hit_ID=Q10AB7; Match level="QueryCoverage=97%, HitCoverage=11%, E-value=3e-92, Identity=72%"; Hit description =Retrotransposon protein, putative, Ty1-copia subclass
QRPELICATLATLHAFLSWIPIGFIFESQLLEYTFXSFFPIAAYRNLTLQCLTEVAALHFGDFYDTQYVQMYTVFMLQLKVILPSGTISDGYGNGSNEEQAFIQNLALFLTSFFKNHIRILESTLDALLLGLDYLIEISFVDDTEMFKVCLDYWNLFVLELFETYNQVERLLGLQAQRIPGTDDGTLIAVQRRRQLYAGPLSKLRTLMICRMAKPEEVLIVEDENGNTEQGHH

SEQ ID NO: 72624 - protein, 257 aa, Setaria italica
  misc_feature (109)..(109): Xaa can be any naturally occurring amino acid
  Transcript Sequence Number=SeqID_6650
  Gene Ontology: Mol. function=protein transporter activity; Cellular component=nuclear pore; Biological process=protein import into nucleus, docking
  Homolog annotation: Hit_ID=Q10AB7; Match level="QueryCoverage=94%, HitCoverage=11%, E-value=1e-124, Identity=88%"; Hit description =Retrotransposon protein, putative, Ty1-copia subclass
  Pfam annotation: Domain name=CRM1_C; Domain location=1-216; Score =274.8; E_value=1.9e-79; Accession=PF08767.3; Description=CRM1 C terminal
LIFVFYLPSILFSYTLYQMITKNFEDYPEHRLKFFSLLRAIGTHCFQAFIQLSSQQLKLVMDSISWAFRHTERNIAETGLSLLLEILKNFEASGFQNQFYKTYFLNIEXQEIFAVLTDTFHKPGFKLHVSVLQHLFYVVDGLTEPLWDATMVPSQYTNNAMFVRDYTIKLLSSSFPNMTPVEVAKFVDGLFNSKTDAPNFKNHIRDFLVQSKEFSAQDNKDLYAEEAAVQREKERQRMLSIPGLIAPNELQDEMSDL

SEQ ID NO: 72625 - protein, 1015 aa, Setaria italica
  misc_feature (795)..(795): Xaa can be any naturally occurring amino acid
  Transcript Sequence Number=SeqID_6651
  Gene Ontology: Mol. function=protein transporter activity; Cellular component=nuclear pore; Biological process=protein import into nucleus, docking
  Homolog annotation: Hit_ID=Q10AB7; Match level="QueryCoverage=99%, HitCoverage=47%, E-value=0.0, Identity=91%"; Hit description =Retrotransposon protein, putative, Ty1-copia subclass
  Pfam annotation: Domain name=CRM1_C; Domain location=654-974; Score =768.4; E_value=5.1e-228; Accession=PF08767.3; Description=CRM1 C terminal
  Pfam annotation: Domain name=IBN_N; Domain location=1-46; Score=12.0; E_value=0.0063; Accession=PF03810.11; Description=Importin-beta N -terminal domain
  Pfam annotation: Domain name=Xpo1; Domain location=57-201; Score =192.3; E_value=1.4e-54; Accession=PF08389.4; Description=Exportin 1 -like protein
  Pfam module annotation: Pfam domain module=CRM1_C::IBN_N::Xpo1; Domain location=654-974::1-46::57-201
LQNSLNLNTKFFALQVLESVIKYRWNALPVEQRDGIKNYISDVIVQLSSNEVTFRQERLYVNKLNIILVQVLKHEWPARWASFIPDLVAAAKSSETICENCMAILKLLSEEIFDFSRGEMTQQKIKELKSSLNSEFRLIHELCLYVLSATQRSELIRATLATLHAFLSWIPVGFIFESPLLETLLKFFPVAAYRNLTLQCLTEVAALQFGDFYNMQYVKMYTIFMMQLQAILPPETIPDAYANGSSEEQAFIQNLALFFTSFFKNHMRILEITADNKTALHLGLEYLIGISYVDDTEVFKVCLDYWNVFVLELFEAHNQMEPAAAVSMMGLQAQMVPGIVDGTGTAVQQRRQLYSGPLSKLRMLMICRMAKPEEVLIVEDENGNIVRETMKDNDVLVQYKIMRETLIYLSHLDHEDTEQQMLKKLSKQLNGEDWSWNNLNTLCWAIGSISGSMVEEQENRFLVMVIRDLLNLCEITKGKDNKAVIASNIMYVVGQYPRFLRAHWKFLKTVVNKLFEFMHEMHPGVQDMACDTFLKIVQKCKRKFVTQQVGENEPFVSELLSNLATTIADLEPHQIHTFYESVGHMIQAESDNAKRDEYLKRLMSLPNQKWAEIIGQASQSIDILKNQDVIRSVLNILQTNTSVASSLGPHFFPQISLIFLDMLTVYRMYSELVSSTIAEGGPFASRTSFVKLLRSVKRETLKLIETFVDKAEDLPHIGKQFVPPMMDPVLGDYARNVPDARESEVLSLFATIINKYKGEMLEDVPRIFEAVFQCTLEMITKNFEDYPEHRLKFFXLLRAIGTHCFQALIQLSSQQLKLVIDSINWAFRHTERNIAETGLSLLLEILKNFQASGFHNQFYKTYFLTIEQEIFAVLTDTFHKPGFKLHVLVLQHLFCVVDGLTEPLWDATSVPYQYTDNAMFVRDYTIKLLGTSFPNMTATEVTKFVDGLLSSKHDLPSFKNHIRDFLVQSKEFSAQDNKDLYAEEAAAQRERERQRMLAIPGLIAPSELQDDMVDS

SEQ ID NO: 72626 - protein, 125 aa, Setaria italica
  misc_feature (8)..(8): Xaa can be any naturally occurring amino acid
  Transcript Sequence Number=SeqID_6652
  Gene Ontology: Cellular component=intracellular
  Homolog annotation: Hit_ID=B9RQZ2; Match level="QueryCoverage=79%, HitCoverage=18%, E-value=9e-30, Identity=61%"; Hit description =Topbp1, putative
ATERLGGXEYSGSLHPKCTHLVVQNFAGRKFEHALKHGPRNGLFLVTLGWFVDCVRRSMRLDESLYAIKNIGENGLPLGEFNRFIAVTVDEKSCLPPMIFQDKACSDATRKHPPQTPMKESGNDE

SEQ ID NO: 72627 - protein, 124 aa, Setaria italica
  Transcript Sequence Number=SeqID_6653
  Homolog annotation: Hit_ID=B9SY25; Match level="QueryCoverage=73%, HitCoverage=17%, E-value=4e-10, Identity=36%"; Hit description =Pentatricopeptide repeat-containing protein, putative
  Pfam annotation: Domain name=PPR; Domain location=11-45; Score=7.3; E_ value=1.2; Accession=PF01535.12; Description=PPR repeat
  Pfam annotation: Domain name=PPR; Domain location=46-80; Score=37.6; E_value=4.9e-08; Accession=PF01535.12; Description=PPR repeat
  Pfam annotation: Domain name=PPR; Domain location=81-115; Score=23.1; E_value=0.0011; Accession=PF01535.12; Description=PPR repeat
  Pfam module annotation: Pfam domain module=PPR::PPR::PPR; Domain location=11-45::46-80::81-115
LVARGVVPDAKSRTDLLVVTARGASAADALALFDEMRGKGYHADVMMYDAVMRACFKGGMHGDAVRLFDEMARAGVKPDERVYSLTIAASCKLRDADRAVQVLGEMREAGFRPWDLTYSSVVDV

SEQ ID NO: 72628 - protein, 102 aa, Setaria italica
  Transcript Sequence Number=SeqID_6654
  Subcellular localization annotation: CTP_CleavageSite=38; ConfidenceScore=5.66e-01
PAIPNPSSPATLAIALPIRNRSPMSKNGAPPFRRSTVAAAAAASLPPRLLKIGLLVWSLEPTPHKPRYRRRPRTSHQRRWRAAAAAVATVPRFLLPLRYLPT

SEQ ID NO: 72629 - protein, 53 aa, Setaria italica
  Transcript Sequence Number=SeqID_6655
KSYRTIMLFLLFLNILTRHENFQECNNSIKIFMDVTIGNCTVEFIGCKIYSNG

SEQ ID NO: 72630 - protein, 224 aa, Setaria italica
  Transcript Sequence Number=SeqID_6656
  Gene Ontology: Mol. function=oxidoreductase activity; Cellular component=plasma membrane; Biological process=negative regulation of transcription
  Homolog annotation: Hit_ID=B6SPB2; Match level="QueryCoverage=91%, HitCoverage=82%, E-value=1e-90, Identity=82%"; Hit description =Flavoprotein wrbA
  Pfam annotation: Domain name=FMN_red; Domain location=22-219; Score= -31.2; E_value=0.0089; Accession=PF03358.7; Description=NADPH -dependent FMN reductase
  Pfam annotation: Domain name=Flavodoxin_1; Domain location=26-159; Score=79.9; E_value=9e-21; Accession=PF00258.17; Description =Flavodoxin
  Pfam module annotation: Pfam domain module=FMN_red::Flavodoxin_1; Domain location=22-219::26-159
PEEEVTAAAVASAAAAGAGRKVRLYIVFYSMYGHVESLAQRAAAGAGAVDGVEAVLRRVPETLPPEVLEKMQAPAKDPAVPVIASAAELQEADGVLFGFPTRYGAMAAQMKAFFDSTGSLWEEQKLAGKPAGFFVSTGTQGGGQETTAWTAITQLVHHGMLFVPIGYTFGAGMFNMDDIRGGSPYGAGVFAGDGSRQPSDTELALAEHQGKYMASIVKKLAHHA

SEQ ID NO: 72631 - protein, 141 aa, Setaria italica
  misc_feature (75)..(75): Xaa can be any naturally occurring amino acid
  Transcript Sequence Number=SeqID_6657
  Gene Ontology: Mol. function=protein serine/threonine kinase activity; Cellular component=plasma membrane; Biological process =protein amino acid phosphorylation
  Homolog annotation: Hit_ID=Q9LW99; Match level="QueryCoverage=97%, HitCoverage=24%, E-value=4e-72, Identity=89%"; Hit description =Protein kinase MK6
  Pfam annotation: Domain name=Pkinase; Domain location=2-107; Score= -113.7; E_value=0.1; Accession=PF00069.17; Description=Protein kinase domain
MAQAYSTVGTPDYIAPEVLLKKGYGMECDWWSLGAIMYEMLVGYPPFYSEDPMSTCRKIVNWRSHLKFPEEAKLXPEAKDLISKLLCNVEQRLGTKGAHEIKAHPWFRGVQWDMLYQMKAAFIPEVNGELDTQNFEKFEET

SEQ ID NO: 72632 - protein, 556 aa, Setaria italica
  Transcript Sequence Number=SeqID_6658
  Gene Ontology: Mol. function=protein serine/threonine kinase activity; Cellular component=plasma membrane; Biological process =protein amino acid phosphorylation
  Homolog annotation: Hit_ID=Q9LW99; Match level="QueryCoverage=99%, HitCoverage=98%, E-value=0.0, Identity=74%"; Hit description=Protein kinase MK6
  Pfam annotation: Domain name=Pkinase; Domain location=116-420; Score =298.6; E_value=1.3e-86; Accession=PF00069.17; Description=Protein kinase domain
  Pfam annotation: Domain name=Pkinase_C; Domain location=438-487; Score=51.0; E_value=4.6e-12; Accession=PF00433.16; Description =Protein kinase C terminal domain
  Pfam annotation: Domain name=Pkinase_Tyr; Domain location=116-398; Score=14.3; E_value=1.1e-14; Accession=PF07714.9; Description =Protein tyrosine kinase
  Pfam module annotation: Pfam domain module=Pkinase::Pkinase _C::Pkinase_Tyr; Domain location=116-420::438-487::116-398
MDSARSWFQKFQPRDKSKSPAVASSHGKDPGKPPMDDAPSSATKQKVAAAKQYIENHYKTQMKSLQDRKERRWMLERKLQDAEVPVEEQNNILKHLEKKETEYMRLQRHKMGVEDFELLTIIGRGAFGEVRLCREKTSKNVYAMKKLKKSEMLRRGQVEHVKAERNLLAEVDSAYIVKLYYSFQDEEFLYLIMEYLPGGDMMTLLMRKDTLTEDEARFYIAETVLAIESIHKHNYIHRDIKPDNLLLDRSGHLKLSDFGLCKPLDSSNFPNLNEPDYTPGKGTKPLPDSTRLSNPSAPRRTQQEQLSHWQKNRRMLAYSTVGTPDYIAPEVLLKKGYGMECDWWSLGAIMYEMLVGYPPFYSEDPMSTCRKIVNWRSHLKFPEEAKLSPEAKDLISKLLCNVEQRLGTKGAHEIKAHPWFRGVQWDMLYQMKAAFIPEVNGELDTQNFEKFEETGAQMQSSSKSGPWRKMLPSKDANFVGYTYKNFEIVNDDEVAGIAELKKKSSKPKRPTIKTLFESMDEEEPVQGSFLSMLPPKEGQPSSHSSIPPEQYQPRRK

SEQ ID NO: 72633 - protein, 103 aa, Setaria italica
  Transcript Sequence Number=SeqID_6659
MAQEDVHLDDAGLALGLSLGGGGGASDAARQGTCSRLSREPRALEPSLTLSMPDEATATGSGGCGGGPSHSVSSLSVAGVKRERVEEAKSTMCLLISSTLPPP

SEQ ID NO: 72634 - protein, 699 aa, Setaria italica
  Transcript Sequence Number=SeqID_6660
  Gene Ontology: Mol. function=phosphatidylinositol phosphate kinase activity; Biological process=phosphatidylinositol metabolic process
  Homolog annotation: Hit_ID=Q2QVA9; Match level="QueryCoverage=87%, HitCoverage=38%, E-value=1e-128, Identity=43%"; Hit description =Phosphatidylinositol-4-phosphate 5-Kinase family protein, expressed
  Pfam annotation: Domain name=PIP5K; Domain location=422-653; Score =184.1; E_value=4e-52; Accession=PF01504.10; Description =Phosphatidylinositol-4-phosphate 5-Kinase
VHARGVTLYSKVATLLQKLKNEHSDVIRVAINCGLSLPIKDFAELEELLIKEKASFEGSLDKAIDQNGRPSSSVDELLNINWSYQDLLLRLYIWDRRLHQLFYCKSVGLETAANCKNPADIVNEISDGNFEIGDTGAPSLDGNLEAGNSELSCNGGSKDEESSIGPSQIDVDSTTEAPKVPCFEISNEKGVQRNVTVADTIPVEQEPSSSPQQFKYQYWDSTERWIWNPIDESQLAYRNDIQDGYLDEFEIVNHYKPSYLPPLFEQQDDAYPPQFTVGPGSNILCVQEDEISSIIARALAMSDERHHLKDSSFENEMENYRGEHARTMEKSFSFMSASSYSSSQWSSTGSQESEASLSSISSIASDDFSGYDSSSLLSPAHPEITVNGKVTFRGKYSVTSIYANEFYELRKKCCPSELAYITSLSRCKKWDAQGGKSKAFFAKTMDDRFIIKQIKKTEFESFIEFAPHYFQHVFHSLDTGSQTCLAKILGIYQVKHIRHGKEVKIDLMVMENLLFGHNISRIYDLKGATFSRRVADSNDHDTVYLDQNYVEDMGVSPIYIGGRTKHLLQRAIWNDTAFLTSVNVMDYSLLVGVDKQKHELVFGIIDYLRQYTWDKQLETWVKTSLVVPKNVSPTVISPREYKKRFRKFMAKYFLTVPDTWSPDIPSKQCKSIGHSNHKSVEVQNGDSLLQHPNEAEACA

SEQ ID NO: 72635 - protein, 99 aa, Setaria italica
  Transcript Sequence Number=SeqID_6661
  Gene Ontology: Mol. function=signal transducer activity; Biological process=two-component signal transduction system (phosphorelay)
  Homolog annotation: Hit_ID=B6SY22; Match level="QueryCoverage=98%, HitCoverage=64%, E-value=2e-43, Identity=84%"; Hit description =Histidine-containing phosphotransfer protein 4
ARLMTNIEQAMEKNPRDFNRWDSHMQQLKGSCSSIGASRMKNECTSFRNSCGDENAEGCMRSFQKLKREHGVLRQKLESYFQLLRQAGPAETAIRRGGR

SEQ ID NO: 72636 - protein, 1073 aa, Setaria italica
  misc_feature (26)..(26): Xaa can be any naturally occurring amino acid
  misc_feature (385)..(385): Xaa can be any naturally occurring amino acid
  Transcript Sequence Number=SeqID_6662
  Gene Ontology: Mol. function=sequence-specific DNA binding; Cellular component=nucleus; Biological process=regulation of transcription, DNA-dependent
  Homolog annotation: Hit_ID=Q9SWE0; Match level="QueryCoverage=99%, HitCoverage=91%, E-value=0.0, Identity=70%"; Hit description =Flowering-time protein isoform alpha
RRDLLNPKAVKCMQSLFALKDTIGKXETREISLLCGVTVTQVREFFTCQKSRVRKFVRLSQEKALRVEAPKELDNAFSMSTEQIPLDIEAHAEVVEPLRTLEPVVPRSSSQPMDVPQVSSQPMELSQSCLQPMEAFQNSLQQATAQQYFAAPVMPSGTMVVQPTDAKISPDSVRKEIKQEEVHPGVESEDKKFLESIFALMRKEETFSGQVKLMEWILQINNVTVLSWFVTMGGLTIMSTWLSLAANEEQTSVILVIFKVLLHLPLHKALPAHMSVVLQTINRLRFYRTPDISSKARNLLSRLSKVLVRSQALKKPQKDLICKQRISEILRDESWKSEVDITEEVLALTDGANESSKPEPRKTQMLLTASADETNKRSAMQTKSXKQKRKVLLVEHPNKKAAVKNVNSARNSTNNSRPLSADDIQKAKMRAMFMQEKYGKVDSSKASDKSQAMETPKTSGLVNSNVLPVPRDPIRSTAQPFDASTSSTAQPVDPSTSTSKQSTVPQPDKPEISNGLKLNIGSPKNVVEKLDSKRVPWRIPPAVWIDPSWSVSAGDNSKELEVQTQRNRREKETFYASQKDIPLNPKDPWDLEMDFDDSLTPEIPIDQAPDADTMEMDSVGAAPNAAAPVKDKQIGSTATSVAVADGANGEDPEPDLELLTVLLKNPQLVFALTSNNGEDVSSEQTVALLDTLKRTGLGLSELVNTLGNGAGAPKEPEPEPIPASLPSPTPSDQTARAVWGPEHPTQARAPNLQQPPLSNRGNTPPIANTVQQSFSNVMSSLPSQPYASVSVLPAQIQANVPSLPQLAVSVNPPVQHVSPVNNHLSRASVHQHAQQYALASDPVAMSLHQQAASVPNPAVAHSSLPEPNASYTTLPWQSNAAHVTNTGRNATADPWAARTTNSCNTASASTVPYANQNAYGDQSTHSAYNAYGSAAASSRTVLTGHGLDRNGYSRPVVEYQAMARDSHQRHSRSPDPGAGRDYGGTQGYNQQPLTRWSAGQGQQSYNPEPSRQWRSAQQGYTSAEPSRQWSSARQSYTSAEPSRQWSSEPKSYNVESSRSWNLGQQGQNPEGSR

SEQ ID NO: 72637 - protein, 156 aa, Setaria italica
  misc_feature (98)..(98): Xaa can be any naturally occurring amino acid
  Transcript Sequence Number=SeqID_6663
  Gene Ontology: Mol. function=catalytic activity; Cellular component =plasma membrane
  Homolog annotation: Hit_ID=B6TVJ7; Match level="QueryCoverage=65%, HitCoverage=40%, E-value=3e-32, Identity=60%"; Hit description=NAD dependent epimerase/dehydratase family protein
  Subcellular localization annotation: CTP_CleavageSite=36; ConfidenceScore=5.56e-01
MRSAVARLIRSSSASASTSRLSSSPVLLKTGNVFFSSATPSDPKHVEEPFKVEEAETVKVTPPSPDKLLVLGGSGFVGSHVCKEALDRGFVVSSLNRXNLLEPASFKDAMDNVSAVISCVGGFGSNSFMYKINGTANINAIKAAAEKGIVLLMSLL

SEQ ID NO: 72638 - protein, 294 aa, Setaria italica
  Transcript Sequence Number=SeqID_6664
  Gene Ontology: Mol. function=catalytic activity; Cellular component =plasma membrane; Biological process=cellular metabolic process
  Homolog annotation: Hit_ID=B6TVJ7; Match level="QueryCoverage=90%, HitCoverage=89%, E-value=1e-108, Identity=73%"; Hit description=NAD dependent epimerase/dehydratase family protein
  Pfam annotation: Domain name=3Beta_HSD; Domain location=69-266; Score= -84.0; E_value=7.7e-05; Accession=PF01073.11; Description=3-beta hydroxysteroid dehydrogenaseisomerase family
  Pfam annotation: Domain name=Epimerase; Domain location=68-285; Score= 10.0; E_value=7.4e-08; Accession=PF01370.13; Description=NAD dependent epimerasedehydratase family
  Pfam annotation: Domain name=NAD_binding_4; Domain location=70-268; Score=-44.4; E_value=2.9e-06; Accession=PF07993.4; Description=Male sterility protein
  Pfam annotation: Domain name=NmrA; Domain location=68-276; Score= -77.1; E_value=0.0008; Accession=PF05368.5; Description=NmrA-like family
  Pfam module annotation: Pfam domain module=3Beta_HSD::Epimerase::NAD _binding_4::NmrA; Domain location=69-266::68-285::70-268::68-276
  Subcellular localization annotation: CTP_CleavageSite=36; ConfidenceScore=5.56e-01
MRSAVARLIRSSSASASTSRLSSSPVLLKTGNVFFSSATPSDPKHVEEPFKVEEAETVKVTPPSPDKLLVLGGSGFVGSHVCKEALDRGFVVSSLNRSGKPSLSESWADKVIWNQGNLLEPASFKDAMDNVSAVISCVGGFGSNSFMYKINGTANINAIKAAAEKGVKRFVYVSAADFGLVNYLLQGYYEGKRAAEAELLSKFTYGGVILRPGFIHGTRRVGSVKIPLGLVGAPMQMVLQNAKPLARLPLVGPLLTPPVSVTSVAKVAVRAATDPVFPPGIVDVHGIMRYSEQK

SEQ ID NO: 72639 - protein, 44 aa, Setaria italica
  Transcript Sequence Number=SeqID_6665
TKSSTKTNILVFFVQLCHVFQQECRFREATEFMESCSPSWIACT

SEQ ID NO: 72640 - protein, 125 aa, Setaria italica
  Transcript Sequence Number=SeqID_6666
MADEYDRSSYRSTSVDEGGYSKSSTGNYGNNGSYKSNDLSSDYTKSGTEDYSGSGGYTKSTTSDEYKKPSSDDYDGSYKNSSTDGYSGSGYNKSRTDDYGSGKNTSNTVVVSAGLVVAATPATVV

SEQ ID NO: 72641 - protein, 210 aa, Setaria italica
  Transcript Sequence Number=SeqID_6667
  Homolog annotation: Hit_ID=Q01L88; Match level="QueryCoverage=50%, HitCoverage=31%, E-value=4e-09, Identity=49%"; Hit description =OSIGBa0076I14.4 protein
VPSTDDYSSGGGYNKSSTDDYRNDGGYKSNDLSSDYNKSGTDDYSGSGGYSKSTTSDEYKKPSSDDYDGSYKNSSTDGYSGSGYNKSRTDDYGSGKNTSNTDDYGSCGYHKSSTDDYSSGGGGYNKSSTDDYSSGGGYNKSSTDDYRNDGGYKSNDLSSDYNKSGTDDYSGSGGYSKSTTSDEYKKPSSDDYDGDGGYKSNDLSSDYNKS

SEQ ID NO: 72642 - protein, 53 aa, Setaria italica
  Transcript Sequence Number=SeqID_6668
WIKILFLFAVIWHCSRSSCLFSRSTERSPPRQQMSCFHRLMSIILATRISDCY

SEQ ID NO: 72643 - protein, 48 aa, Setaria italica
  Transcript Sequence Number=SeqID_6669
MSWRIPLFGSQQQQTDPNFQDIPTQSWYPPSVAGSSSRPSTPTSSSAS

SEQ ID NO: 72644 - protein, 58 aa, Setaria italica
  Transcript Sequence Number=SeqID_6670
  Subcellular localization annotation: CTP_CleavageSite=33; ConfidenceScore=5.37e-01
MSWRFPRFGSQQQQTDPNFQDIPTQSWYPPSVVGSSSRPSTPTSSSASPHQRASDHPQ

SEQ ID NO: 72645 - protein, 79 aa, Setaria italica
  misc_feature (6)..(6): Xaa can be any naturally occurring amino acid
  misc_feature (9)..(9): Xaa can be any naturally occurring amino acid
  Transcript Sequence Number=SeqID_6671
  Homolog annotation: Hit_ID=Q9SCP9; Match level="QueryCoverage=97%, HitCoverage=35%, E-value=5e-19, Identity=58%"; Hit description =Putative vacuolar protein-sorting-associated protein 37 homolog 1
  Pfam annotation: Domain name=Mod_r; Domain location=1-69; Score= -20.7; E_value=0.013; Accession=PF07200.5; Description=Modifier of rudimentary (Mod(r)) prot
RLTDLXRQXDDIMMSYSPAALLDKLQTSMAKLDEESEELHQKLLEKDIDLPTFVQKYKKLRTAYHKQALLHLAGQTSLR

SEQ ID NO: 72646 - protein, 232 aa, Setaria italica
  Transcript Sequence Number=SeqID_6672
  Homolog annotation: Hit_ID=Q5YJL6; Match level="QueryCoverage=71%, HitCoverage=94%, E-value=1e-59, Identity=68%"; Hit description =Autophagy protein AGP6 (Fragment)
  Pfam annotation: Domain name=Mod_r; Domain location=77-222; Score =206.8; E_value=5.6e-59; Accession=PF07200.5; Description=Modifier of rudimentary (Mod(r)) prot
  Subcellular localization annotation: CTP_CleavageSite=66; ConfidenceScore=5.54e-01
MSWRIPLFGSQQQQTDPNFQDIPTQSWYPPSVAGSSSRPSTPTSSSASPHQRASDHPQPSSRGQPSPAEAAGIIARLKDKSIEELQRLLKDKEAYNAFFNSLDQVKTQNNVRDELRKETLQLARENLEKEQRILELRNQCTIIRTTELAAAQDRLTDLERQKDDIMRSYSPAALLDKLQTSMAKLDEESEELHQKFLEKDIDLPTFVQKYKKIRTAYHKQALLHLAGQTSLR

SEQ ID NO: 72647 - protein, 77 aa, Setaria italica
  Transcript Sequence Number=SeqID_6673
DKAIPILPLFLQSPSPSPPSPSCCDCAVHSHFQIAIQVNLLRHQQHVTKPSQAKQKLHHHRRGRAMVAVIHPHCHWR

SEQ ID NO: 72648 - protein, 93 aa, Setaria italica
  misc_feature (21)..(21): Xaa can be any naturally occurring amino acid
  Transcript Sequence Number=SeqID_6674
  Gene Ontology: Mol. function=calcium ion binding; Cellular component =mitochondrial inner membrane; Biological process=transport
  Homolog annotation: Hit_ID=Q2RBP8; Match level="QueryCoverage=98%, HitCoverage=15%, E-value=1e-37, Identity=81%"; Hit description =Mitochondrial substrate carrier family protein, putative, expressed
  Pfam annotation: Domain name=Mito_carr; Domain location=1-84; Score =72.1; E_value=2.1e-18; Accession=PF00153.19; Description =Mitochondrial carrier protein
  Subcellular localization annotation: CTP_CleavageSite=23; ConfidenceScore=5.29e-01
SVGALSGGLAAVVTTPFDVMXTRMMTAPPGTPVSMQTIVLSILGNEGPLGLFKGAIPRFFWIAPLGAMNFAGYELAKKAMIKEEKKTMVGYRV

SEQ ID NO: 72649 - protein, 270 aa, Setaria italica
  Transcript Sequence Number=SeqID_6675
  Gene Ontology: Mol. function=transporter activity; Cellular component= membrane; Biological process=oligopeptide transport
  Homolog annotation: Hit_ID=B9RU48; Match level="QueryCoverage=99%, HitCoverage=39%, E-value=2e-82, Identity=58%"; Hit description =Nitrate transporter, putative
  Pfam annotation: Domain name=PTR2; Domain location=52-270; Score= -50.7; E_value=0.00016; Accession=PF00854.13; Description=POT family
HAGFGANMITYLTQQLHLPLVDASNLLTNFGGTSSLTPILGALAADSFAGRFWTIIAGSVFYQLGMLGLVVSALLPSLRPAPCSSPAPGANAPCRRASGWQLGVLYLSLLCTSIGSGGLRPSVVAFGTDQFDHEPEVQEQQHKQGSSAEAARAVAERKRRYFNLYFFTMGIAALLAVTVVVYIQDNVGWGWGFGIPAVAMFVSIVVFVVGYPLYVRLKPGGSPFTRLAQVAAAAFKKRKIAMPEDAGILYQDKELDALISTNGRLLHTNQ

SEQ ID NO: 72650 - protein, 334 aa, Setaria italica
  Transcript Sequence Number=SeqID_6676
  Gene Ontology: Mol. function=prephenate dehydratase activity; Biological process=L-phenylalanine biosynthetic process
  Homolog annotation: Hit_ID=B6SYB7; Match level="QueryCoverage=100%, HitCoverage=84%, E-value=1e-177, Identity=93%"; Hit description=P -protein
  Pfam annotation: Domain name=ACT; Domain location=238-316; Score =28.4; E_value=2.8e-05; Accession=PF01842.17; Description=ACT domain
  Pfam annotation: Domain name=PDT; Domain location=50-228; Score =272.0; E_value=1.4e-78; Accession=PF00800.10; Description=Prephenate dehydratase
  Pfam module annotation: Pfam domain module=ACT::PDT; Domain location =238-316::50-228
GVESVDVNGLRRPPVPVSGLTVPGARDPHWLRRPLTSADVMEVNGKGLKVAYQGCPGAYSEAAARKAYPNCETVPCEHFDTAFQAVQNWVADRAVLPLENSLGGSIHRNYDLLLRHSLHIVGEVRLAVRHCLLANPGVEIENLKSAMSHPQALAQCEHTLTGLGIEHREAVDDTAGAAKFVAEQMLQDTGAIASSLAAKLYGLDVLAENIQDDKDNVTRFMMLAREPIIPRTDKPFKTSIVFSLEEGPGQLFKALAVFALREINLTKIESRPHKERPLRVSDDCLINRNFDYLFYVDLEASMADPKTQNALGNLKEFATFLRVLGSYPTDVNEP

SEQ ID NO: 72651 - protein, 58 aa, Setaria italica
  misc_feature (5)..(5): Xaa can be any naturally occurring amino acid
  Transcript Sequence Number=SeqID_6677
  Gene Ontology: Cellular component=chloroplast
PGGWXGQQAVAAEESYVALEKAIRSLAEFYSKAGPSAPLPQDVKNKILDDLSTADAYL

SEQ ID NO: 72652 - protein, 89 aa, Setaria italica
  Transcript Sequence Number=SeqID_6678
  Gene Ontology: Mol. function=nucleoside-triphosphatase activity; Cellular component=membrane; Biological process=transport
  Homolog annotation: Hit_ID=Q9C6W5; Match level="QueryCoverage=80%, HitCoverage=11%, E-value=8e-26, Identity=75%"; Hit description=ABC transporter G family member 14
VFWGFFPLYNAVFTFPLERPMLLKERSSGMYRLSSYFASRAAADLPMELGLPTAFVLILYWMGGLDPHPGPFLLSLAVVLYSVLVAQSL

SEQ ID NO: 72653 - protein, 573 aa, Setaria italica
  Transcript Sequence Number=SeqID_6679
  Gene Ontology: Mol. function=DNA binding; Cellular component=nucleus; Biological process=regulation of transcription
  Homolog annotation: Hit_ID=Q5QT31; Match level="QueryCoverage=91%, HitCoverage=98%, E-value=1e-126, Identity=49%"; Hit description =Transcription factor myb
  Pfam annotation: Domain name=Lipoprotein_15; Domain location=9-50; Score=4.6; E_value=0.082; Accession=PF03640.7; Description=Secreted repeat of unknown function
  Pfam annotation: Domain name=Myb_DNA-binding; Domain location=127 -172; Score=48.7; E_value=2.2e-11; Accession=PF00249.23; Description =Myb-like DNA-binding domain
  Pfam annotation: Domain name=Myb_DNA-binding; Domain location=23-69; Score=48.8; E_value=2.1e-11; Accession=PF00249.23; Description=Myb -like DNA-binding domain
  Pfam annotation: Domain name=Myb_DNA-binding; Domain location=75-121; Score=55.1; E_value=2.7e-13; Accession=PF00249.23; Description=Myb -like DNA-binding domain
  Pfam module annotation: Pfam domain module=Lipoprotein_15::Myb_DNA -binding::Myb_DNA-binding::Myb_DNA-binding; Domain location=9-50::127- 172::23-69::75-121
MYSNPADSVSGRRRTSGPVRRAKGGWTLDEDEKLRKAVGACNGKNWKKIAESFPDRTSVQCLHRWQKVLNPELIKGPWTQEEDDIIINMVKKYGPKKWSLIARSLDGRIGKQCRERWHNHLDPQIIKEAWSVEEERVVADAHRLHGNKWAEIAKLLPGRTDNSIKNHWNSSLRKRLGDYNASRALPVSVHMVHNSFKHEKAKLSGGNHIDLNKEPNINLERPPEIVDHSEHATHLHACSLKNIKSCSDFLSLAMPTAQPKKLCEMLGGGYSAVALAGIQGLKMDFVHDKGTEINVVCKERLKNDLLNVEVRKLDHATDTIGYSGSAKVEGKTVNNMCKLFLPNESNSFGSLCYEIPKLEDVVPCHSPVFSTPHIQQCCEDGFLPPVGYTTSSRDGDISDQLSVESILKSAAENFPGTPSILRRRKRETPAHDEDSNLKIAILHSNSFHTPLGKCTTESPHSFKTATFLSLGPPDNEGLSATLGSFDVSPPYRLRSKRMAILKTVEKKHLNFSSDEMDNYDSPDTMKKYSSWKTECTNTYTDVSSKQEMKMTEHMVDLETLAKDFTHTTKLDLI

SEQ ID NO: 72654 - protein, 49 aa, Setaria italica
  Transcript Sequence Number=SeqID_6680
  Gene Ontology: Mol. function=caffeate O-methyltransferase activity; Biological process=lignin biosynthetic process
  Homolog annotation: Hit_ID=Q06509; Match level="QueryCoverage=89%, HitCoverage=12%, E-value=5e-16, Identity=86%"; Hit description =Caffeic acid 3-O-methyltransferase
MRSTITSCHPQIKGVNFDLPHVISEAPPFPGVQHVGGDMFKSVPAGSAS

SEQ ID NO: 72655 - protein, 311 aa, Setaria italica
  misc_feature (134)..(134): Xaa can be any naturally occurring amino acid
  misc_feature (140)..(140): Xaa can be any naturally occurring amino acid
  Transcript Sequence Number=SeqID_6681
  Gene Ontology: Mol. function=caffeate O-methyltransferase activity; Biological process=lignin biosynthetic process
  Homolog annotation: Hit_ID=Q06509; Match level="QueryCoverage=80%, HitCoverage=67%, E-value=1e-129, Identity=89%"; Hit description =Caffeic acid 3-O-methyltransferase
  Pfam annotation: Domain name=Methyltransf_12; Domain location=152 -240; Score=9.7; E_value=0.059; Accession=PF08242.4; Description =Methyltransferase domain
  Pfam annotation: Domain name=Methyltransf_2; Domain location=46-288; Score=426.5; E_value=4.1e-125; Accession=PF00891.10; Description=O -methyltransferase
  Pfam module annotation: Pfam domain module=Methyltransf _12::Methyltransf_2; Domain location=152-240::46-288
LEARVELEELLGDDHRVVLHALVEHAVEARIRAVVLERRHAVRLVERDAALQNSVLQVVPALHEDGVSMAALALMNQDKVLMESWYYLKDAVLEGGIPFNKAYGMTAFEYHGTDPRFNRVFNEGMKNHSVIILXSKSSFXFYTGFEGVGTLVDVGGGIGATLHAITSCHPQIKGVNFDLPHVISEAPPFPGVQHVGGDMFKSVPAGDAILMKWILHDWSDAHCATILKNCYDALPANGKVIIVECVLPGEPRRATPKAQGVFHVDMIMLAHNPGGKERYEREFRELAKGAGFTGFKATYIYANAWAIEFTK

SEQ ID NO: 72656 - protein, 362 aa, Setaria italica
  misc_feature (198)..(198): Xaa can be any naturally occurring amino acid
  misc_feature (222)..(222): Xaa can be any naturally occurring amino acid
  misc_feature (301)..(301): Xaa can be any naturally occurring amino acid
  Transcript Sequence Number=SeqID_6682
  Gene Ontology: Mol. function=caffeate O-methyltransferase activity; Biological process=lignin biosynthetic process
  Homolog annotation: Hit_ID=Q06509; Match level="QueryCoverage=100%, HitCoverage=100%, E-value=1e-176, Identity=85%"; Hit description =Caffeic acid 3-O-methyltransferase
  Pfam annotation: Domain name=Dimerisation; Domain location=31-83; Score=89.4; E_value=1.3e-23; Accession=PF08100.3; Description =Dimerisation domain
  Pfam annotation: Domain name=Methyltransf_12; Domain location=203 -291; Score=7.9; E_value=0.082; Accession=PF08242.4; Description =Methyltransferase domain
  Pfam annotation: Domain name=Methyltransf_2; Domain location=92-339; Score=475.9; E_value=5.8e-140; Accession=PF00891.10; Description=O -methyltransferase
  Pfam module annotation: Pfam domain module=Dimerisation::Methyltransf_ 12::Methyltransf_2; Domain location=31-83::203-291::92-339
MGSTAADVAAVADEEACMYALQLVSSSILPMTLKNAIELGLLEVLQKDPAAALSPEEVVARLPVAPANPDAPVMVDRMLRLLASYDVVRCQMEDKDGKYSRRYAAAPVGKWLTPNEDGVSMAALALMNQDKVLMESWYYLKDAVLEGGIPFNKAYGMTAFEYHGTDPRFNRVFNEGMKNHSVIITKKLLEFYTGFEGXWGTLVDVGGGIGATLHAITSCHPXIKGVNFDLPHVISEAPPFPGVQHVGGDMFKSVPAGDAILMKWILHDWSDAHCATILKNCYDALPANGKVIIVECVLPGXTPEATPKAQGVFHVDMIMLAHNPGGKERYEREFRELAKGAGFTGFKATYIYANAWAIEFTK

SEQ ID NO: 72657 - protein, 133 aa, Setaria italica
  Transcript Sequence Number=SeqID_6683
SAAAGAVEEQRKQDGSPAPRGRRGAVKSSEPIRPDDCEKEEKELMREAGTDGAPALGVGRRGASRRARPAPALAEPAGKVTEEEKAPPIPRDRHVKLNDDEEDTRAATKPEEEEEDAPALGLVIAVPAGVFGA

SEQ ID NO: 72658 - protein, 104 aa, Setaria italica
  misc_feature (93)..(93): Xaa can be any naturally occurring amino acid
  Transcript Sequence Number=SeqID_6684
  Gene Ontology: Mol. function=nucleotide binding; Biological process =defense response
  Homolog annotation: Hit_ID=Q53L60; Match level="QueryCoverage=100%, HitCoverage=10%, E-value=1e-35, Identity=67%"; Hit description=NB -ARC domain containing protein, expressed
IGSTLENDPDVEEMRRILSLSYDDLPHHLKTCLLYLSIFPEDYEIERDQLVKRWIAEGFINMEGEQDLEEIGEKNFNDLINRSMIQPMKINWXGRVASCRVHDM

SEQ ID NO: 72659 - protein, 100 aa, Setaria italica
  misc_feature (37)..(37): Xaa can be any naturally occurring amino acid
  misc_feature (45)..(45): Xaa can be any naturally occurring amino acid
  misc_feature (71)..(71): Xaa can be any naturally occurring amino acid
  Transcript Sequence Number=SeqID_6685
  Gene Ontology: Mol. function=translation elongation factor activity; Cellular component=eukaryotic translation elongation factor 1 complex; Biological process=translational elongation
  Homolog annotation: Hit_ID=B7SDI2; Match level="QueryCoverage=83%, HitCoverage=20%, E-value=3e-42, Identity=90%"; Hit description =Elongation factor 1-gamma
  Pfam annotation: Domain name=EF1G; Domain location=1-83; Score=115.7; E_value=1.5e-31; Accession=PF00647.11; Description=Elongation factor 1 gamma, conserved domain
KTNFREVAIKGFWDMYDPEGYSLWFCDYKYNDENTVXFVTMNKVXGFLQRMDLCRKYAFGKMLVVCSEPPXKLKGLWLFRGQQGLTLEGLLVLDHGTDTL

SEQ ID NO: 72660 - protein, 54 aa, Setaria italica
  Transcript Sequence Number=SeqID_6686
  Gene Ontology: Mol. function=translation elongation factor activity; Cellular component=eukaryotic translation elongation factor 1 complex; Biological process=translational elongation
  Homolog annotation: Hit_ID=B6T7G7; Match level="QueryCoverage=90%, HitCoverage=11%, E-value=6e-21, Identity=89%"; Hit description =Elongation factor 1-gamma 3
WHSVTLADIVLTCNLYHGFARILTKSFTSEFPHVERYFWTMVNQPNLTEVGLCV

SEQ ID NO: 72661 - protein, 417 aa, Setaria italica
  Transcript Sequence Number=SeqID_6687
  Gene Ontology: Mol. function=translation elongation factor activity; Cellular component=eukaryotic translation elongation factor 1 complex; Biological process=translational elongation
  Homolog annotation: Hit_ID=B7SDI2; Match level="QueryCoverage=100%, HitCoverage=100%, E-value=0.0, Identity=82%"; Hit description =Elongation factor 1-gamma
  Pfam annotation: Domain name=EF1G; Domain location=256-364; Score =225.1; E_value=1.8e-64; Accession=PF00647.11; Description=Elongation factor 1 gamma, conserved domain
  Pfam annotation: Domain name=GST_C; Domain location=105-197; Score =51.8; E_value=2.7e-12; Accession=PF00043.17; Description=Glutathione S-transferase, C-terminal domain
  Pfam annotation: Domain name=GST_N; Domain location=1-76; Score=71.8; E_value=2.6e-18; Accession=PF02798.12; Description=Glutathione S -transferase, N-terminal domain
  Pfam module annotation: Pfam domain module=EF1G::GST_C::GST_N; Domain location=256-364::105-197::1-76
MALVLHAGSGNKNAFKALIAAEYSGIKVELVKDFQMGVSNKTPEFLKMNPIGKVPVLETPDGAVFESNAIARYVARLKADNPLYGFSLIDYAHIEQWMDFAATEVDANIGKWLFPRMGFYPYAAVSEETAIAALKRALGSLNTHLASNTFLVGHSVTLADIVLTCNLYLGFIRIMTKSFTSEFPHVERYFWTMVNQPNFKKVIGDVKQAEAVPPVQKKVAPAKEQKPKETKKEAPKEAPKPKADEKPAEEEAPKPKPKNHLDLLPPSKMILDDWKRLYSNTKTNFREVAIKGFWDMYDPEGYSLWFCDYKYNDENTVSFVTMNKVGGFLQRMDLCRKYAFGKMLVVGSEPPFKVKGLWLFRGSEIPKFVMDEVYDMELYEWTKVDLSDEAQKERVNAMIEDQEPFEGEALLDAKCFK

SEQ ID NO: 72662 - protein, 415 aa, Setaria italica
  misc_feature (20)..(20): Xaa can be any naturally occurring amino acid
  Transcript Sequence Number=SeqID_6688
  Gene Ontology: Mol. function=translation elongation factor activity; Cellular component=eukaryotic translation elongation factor 1 complex; Biological process=translational elongation
  Homolog annotation: Hit_ID=B6T7G7; Match level="QueryCoverage=100%, HitCoverage=100%, E-value=0.0, Identity=79%"; Hit description =Elongation factor 1-gamma 3
  Pfam annotation: Domain name=EF1G; Domain location=254-362; Score =237.0; E_value=4.6e-68; Accession=PF00647.11; Description=Elongation factor 1 gamma, conserved domain
  Pfam annotation: Domain name=GST_C; Domain location=101-198; Score =51.8; E_value=2.6e-12; Accession=PF00043.17; Description=Glutathione S-transferase, C-terminal domain
  Pfam annotation: Domain name=GST_N; Domain location=1-77; Score=67.0; E_value=6.9e-17; Accession=PF02798.12; Description=Glutathione S -transferase, N-terminal domain
  Pfam module annotation: Pfam domain module=EF1G::GST_C::GST_N; Domain location=254-362::101-198::1-77
MALVLHSFPGNKNAYKALIXAAEYSGVKVELNKNFEMGVSNKTPEFLKMNPLGKVPVLETPDGAVFESNAIARYVARLKDDNPLFGSSRIEQAHVEQWIDFAATEVDPGIARYLFPRLGFMPYVQTAEETAIASLKRALGSLNTHLASKTFLVGHSVTLADIVLTCNLYTGFMYILTKSFTSEFPHVERYFWTMVNQPNFKKVIGDVKQAESVPPVQKKAAPQPKAKDVKKEAPKEAPKPKVEAPAEEEAPKPKPKNPLDLLPPSKMILDDWKRLYSNTKTNFREVAIKGFWDMYDPEGYSLWFCDYKYNDENTVSFVTMNKVGGFLQRMDLCRKYAFGKMLVVGSEPPFKLKGLWLFRGQEVPKFVMDEVYDMELYEWTKVDISDEAQRERVSAMIEDQEPFEGEALLDAKCFK

SEQ ID NO: 72663 - protein, 414 aa, Setaria italica
  Transcript Sequence Number=SeqID_6689
  Gene Ontology: Mol. function=translation elongation factor activity; Cellular component=eukaryotic translation elongation factor 1 complex; Biological process=translational elongation
  Homolog annotation: Hit_ID=B6T7G7; Match level="QueryCoverage=100%, HitCoverage=100%, E-value=0.0, Identity=82%"; Hit description =Elongation factor 1-gamma 3
  Pfam annotation: Domain name=EF1G; Domain location=253-361; Score =237.0; E_value=4.6e-68; Accession=PF00647.11; Description=Elongation factor 1 gamma, conserved domain
  Pfam annotation: Domain name=GST_C; Domain location=100-197; Score =47.3; E_value=5.8e-11; Accession=PF00043.17; Description=Glutathione S-transferase, C-terminal domain
  Pfam annotation: Domain name=GST_N; Domain location=1-76; Score=77.0; E_value=6.8e-20; Accession=PF02798.12; Description=Glutathione S -transferase, N-terminal domain
  Pfam module annotation: Pfam domain module=EF1G::GST_C::GST_N; Domain location=253-361::100-197::1-76
MALVLHSGPGNKNAFKALIAAEYSGVKVELTKNFEMGVSNKTPEFLKMNPLGKVPVLETPDGAIFESNAIARYVARLKDDNPLFGSSRIEQAHVEQWMDFAATEVDSGVAWYLYPRLGYIPYAQTTEETAIASLKRALGSLNTHLASKTFLVGHSVTLADIVLTCNLYHGFARILTKSFTSEFPHVERYFWTMVNQPNFKKVMGDVKQAESVPSVQKKAAAQPKAKDVKKEAPKEAPKPKVEAPAEEEAPKPKPKNPLDLLPPSKMILDDWKRLYSNTKTNFREVAIKGFWDMYDPEGYSLWFCDYKYNDENTVSFVTMNKVGGFLQRMDLCRKYAFGKMLVVGSEPPFKLKGLWLFRGQEVPKFVMDEVYDMELYEWTKVDISDEAQRERVSAMIEDQEPFEGEALLDAKCFK

SEQ ID NO: 72664 - protein, 126 aa, Setaria italica
  Transcript Sequence Number=SeqID_6690
  Subcellular localization annotation: CTP_CleavageSite=48; ConfidenceScore=5.87e-01
SSVLDMAAAATTRTRGAARRRSGRGWRPARRSQFRRNPSCRAKHLHPAARSLPSTSTFRRRRTTTTAFRTPTDQGWEKFADEEFALGEINPTLLWLYIKGRPVGGELLRGSSLHRLLRGAKLMRSI

SEQ ID NO: 72665 - protein, 37 aa, Setaria italica
  Transcript Sequence Number=SeqID_6691
  Homolog annotation: Hit_ID=C3TX91; Match level="QueryCoverage=100%, HitCoverage=5%, E-value=4e-09, Identity=75%"; Hit description =Hedgehog-interacting-like protein
TVYSVACAALLKSILCAKCSPYSADLFDAGPKIRTIP

SEQ ID NO: 72666 - protein, 567 aa, Setaria italica
  Transcript Sequence Number=SeqID_6692
  Gene Ontology: Mol. function=catalytic activity; Cellular component =anchored to membrane; Biological process=oxidation reduction
  Homolog annotation: Hit_ID=C3TX91; Match level="QueryCoverage=93%, HitCoverage=75%, E-value=0.0, Identity=79%"; Hit description =Hedgehog-interacting-like protein
  Subcellular localization annotation: CTP_CleavageSite=49; ConfidenceScore=5.65e-01
ASSLPASPSRYATVRQVSSFTSSPFSSSPAQQLWIAEAPVLLNTTLKFCASAPANSSSCCDAAADAALSAQFDAMKVSDAACAALLKSILCAKCSPYSADLFDAGPKIRTIPFLCNSTSSATSAQSKETTQDYCKLVWETCKDVKITNSPFQPPLQGSAPPPSSSSKLTDAWQSENDFCTSFGGAPSDQSVCFSGNTVSFNATQPSPAPKGICLERIGDGSYLNMAPHPDGSNRVFLGSQAGKIWLATVPEQGSGGSLQFEEASPFADLTDQVHFDSAFGLMGMAFHPDFATNGRFFASYNCDRTKSPSCTGRCSCNSDVGCDPTKLGTDNGAQPCQYQVVVSEYSAKGSSANVSEATSADPSEVRRIFTMGLPYTSQHGGQVLFGPDGYLYLMMGDGGGKGDPFNFAQNKKSLLGKIMRLDIDNTPRASEISNTSLWGNYSIPKDNPYADDSELQPEIWALGLRNPWRCSFDSERPSYFYCGDVGQDQYEEVDLISKGGNYGWRALEGPLVYHPAWAPGGNTSLDSINAIPPIMGYSHSDVNKNIGSASIMGGYVYRGSADPCLSL

SEQ ID NO: 72667 - protein, 260 aa, Setaria italica
  Transcript Sequence Number=SeqID_6693
  Gene Ontology: Mol. function=catalytic activity; Cellular component =anchored to membrane; Biological process=oxidation reduction
  Homolog annotation: Hit_ID=C3TX91; Match level="QueryCoverage=98%, HitCoverage=35%, E-value=1e-127, Identity=86%"; Hit description =Hedgehog-interacting-like protein
MGNYSIPKDNPYADDSELQPEIWALGLRNPWRCSFDSERPSYFYCGDVGQDQYEEVDLISKGGNYGWRALEGPLVYHPAWAPGGNTSLDSINAIPPIMGYSHSDVNKNIGSASIMGGYVYRGSADPCLYGRYLYGDLYASAMWTGTETPESSGNYTSNLIPFSCSKDSPIPCDTAAGSPLPSLGYVYSFGEDNSKDIYVLASKGVYRVVRPSLCSYTCPTEKPATKNGTTPAGPSSKAPATALGNQMGVLLLFLLINQPF

SEQ ID NO: 72668 - protein, 531 aa, Setaria italica
  Transcript Sequence Number=SeqID_6694
  Gene Ontology: Mol. function=electron carrier activity; Biological process=oxidation reduction
  Homolog annotation: Hit_ID=Q5ZE54; Match level="QueryCoverage=97%, HitCoverage=94%, E-value=0.0, Identity=68%"; Hit description =Cytochrome P450-like
  Pfam annotation: Domain name=p450; Domain location=86-526; Score =193.7; E_value=5e-55; Accession=PF00067.14; Description=Cytochrome P450
MDDDGGTALLRESSPWSLLGGAAAVLLLWWAAQVLEWAWLAPRRMERALRAQGLRGNRYRFLWGDLKEERRLTAAALARPVPMDRPHDILPRVSPLLHRAVEEHGKLSFTWFGTIPRITVIDPELAREVASNKDGYFVKTKLATRMVKFLIGGVAILDGEEWVKHRRIMNPAFHAEKLKGMLPAFSAACSDLICRWENLLADSVGTIELDVWAEFQNLSGDVLSRTVFGVSYEEGRRIFLLQAEQVVRVTQAFGTSHIPGYFLLPTKGNRRIKAINRETKTILRGIIEKRREAMKNGEPTKHDLLGMLLESNMNYSNSDGKSSGGLNVEEVIEECKLFYFAGTESSAILLTYTMVLLSMHPEWLDRARDEVLQVFGQNKPDFSGFSRLKVVTMVLYEVLRLYPPALFINRRTHKQTELGGVVYPPDVMFVIPIMFVHRDPALWGQDAGEFNPGRFAEGVSKACGDPGAFIPFSWGPRICIGQNFALLEAKLAISMVLQRFAFELSPEYAHAPYSILTLHPQHSVPVRVRRL

SEQ ID NO: 72669 - protein, 254 aa, Setaria italica
  Transcript Sequence Number=SeqID_6695
  Gene Ontology: Mol. function=zinc ion binding
  Homolog annotation: Hit_ID=Q2QVL7; Match level="QueryCoverage=97%, HitCoverage=35%, E-value=8e-43, Identity=38%"; Hit description =Transposon protein, putative, unclassified, expressed
  Pfam annotation: Domain name=SWIM; Domain location=123-159; Score =33.5; E_value=8.6e-07; Accession=PF04434.9; Description=SWIM zinc finger
AYLTSSFFAELSLTHRVETVSRFHRNNFSARVSLSNFITRFDQYMDSLYVSEARKDIISLPPEQLLKTNTVLEKQAASIYTRAAFETFQVELIEALQHFAVKVQDGPYMKYYVERGGNPPTRHTVFYNVTEKKAWCDCCRFAFSAILCRHVLGVFVMAGVIMLPEPCITKRWTKKAKMGPELIGLNVGNESGSADSVASRYNDLVRDAMKCAEKGAVSAGTFRVAKEVLCKAFMEIKALREKLNKDALHSAASR

SEQ ID NO: 72670 - protein, 109 aa, Setaria italica
  Transcript Sequence Number=SeqID_6696
  Gene Ontology: Mol. function=ATPase activity, coupled to transmembrane movement of ions, phosphorylative mechanism; Cellular component=integral to membrane; Biological process=phospholipid transport
  Homolog annotation: Hit_ID=Q53JD1; Match level="QueryCoverage=99%, HitCoverage=13%, E-value=4e-41, Identity=70%"; Hit description =ATPase, calcium-transporting-related (Fragment)
LTAADAMIDKLTIAIFMFQIVVVLLMGYFGNIWKDTQGLKQWYLMYPVEVPWYDFLVIPLRFELLCSIMIPISIKVTLDLAKGVYAKFIDWDEQMFDWETNTPAHSANY

SEQ ID NO: 72671 - protein, 283 aa, Setaria italica
  Transcript Sequence Number=SeqID_6697
  Gene Ontology: Mol. function=transcription regulator activity; Cellular component=nucleus; Biological process=regulation of transcription
  Homolog annotation: Hit_ID=Q5IWM1; Match level="QueryCoverage=95%, HitCoverage=93%, E-value=4e-84, Identity=58%"; Hit description=BHLH transcription factor (Fragment)
  Pfam annotation: Domain name=HLH; Domain location=126-175; Score =55.3; E_value=2.4e-13; Accession=PF00010.18; Description=Helix-loop -helix DNA-binding domain
  Subcellular localization annotation: CTP_CleavageSite=89; ConfidenceScore=5.16e-01
LRKGLQNFTWSQARGLNSHQQKFGNGILVVTREAAHRSNGSTPVTGVSPFQLQKPEQILTQPPPQPRGPMQIDFRVGSSSKFGVLISQKAMLDGENGGIDGLFKEEREDRQPRKRERKPTNRREEQPLSHVEAERQRREKLNKRFCALRAIVPNISKMDKASILEDAVTHITDLKKKLEKMEAEREKLLECGKVDASEQTTRPEVDIQVVHGEILVQVVSPIDNHPIKKVLQAFEEAEVKVGESKVTANNGTVVHSFVIKSPGSEQHTRNKLVASISNVTRSV

SEQ ID NO: 72672 - protein, 189 aa, Setaria italica
  Transcript Sequence Number=SeqID_6698
  Gene Ontology: Mol. function=inositol or phosphatidylinositol phosphatase activity
  Homolog annotation: Hit_ID=Q9SIS4; Match level="QueryCoverage=100%, HitCoverage=42%, E-value=2e-44, Identity=48%"; Hit description =Putative inositol polyphosphate-5-phosphatase
  Pfam annotation: Domain name=Exo_endo_phos; Domain location=1-177; Score=25.2; E_value=5e-05; Accession=PF03372.15; Description =EndonucleaseExonucleasephosphatase family
FCFVCCHLASGGEVGDALRRNADAADILSRTSFLNSSGGVPAPVDLPKKILDHDRVVLLGDLNYRIAMDDGEARQLVRARKWSMLLENDELLLELSEGRQFYGWREGVVTFAPTYKYHRNSDKLYWCADTGHRRQRQHRAPAWCDRILWRGKGIRQIRYERCGGYRLSDHRPVRAMFHAVCEVVESKHG

SEQ ID NO: 72673 - protein, 96 aa, Setaria italica
  Transcript Sequence Number=SeqID_6699
  Gene Ontology: Mol. function=ATP binding
  Homolog annotation: Hit_ID=Q6K553; Match level="QueryCoverage=53%, HitCoverage=16%, E-value=3e-17, Identity=78%"; Hit description=ATP -binding cassette transporter AtABCA1-like protein
FLSVLQSAAISRGLFPALSPSLNSTDFLDILSKIVAIYSVNEGVPLWRESASIINYEFLKGYRQRGGELNEFIAGYDFLGTTQYGLGVNVWYNSTY

SEQ ID NO: 72674 - protein, 496 aa, Setaria italica
  misc_feature (323)..(323): Xaa can be any naturally occurring amino acid
  misc_feature (326)..(326): Xaa can be any naturally occurring amino acid
  Transcript Sequence Number=SeqID_6700
  Gene Ontology: Mol. function=methyltransferase activity; Cellular component=endosome membrane; Biological process=tRNA processing
  Homolog annotation: Hit_ID=Q8H4D4; Match level="QueryCoverage=97%, HitCoverage=42%, E-value=1e-166, Identity=59%"; Hit description=tRNA wybutosine synthesizing protein 2 homolog
  Pfam annotation: Domain name=Kelch_1; Domain location=261-307; Score =36.7; E_value=9.5e-08; Accession=PF01344.17; Description=Kelch motif
  Pfam annotation: Domain name=Kelch_1; Domain location=313-358; Score =14.8; E_value=0.057; Accession=PF01344.17; Description=Kelch motif
  Pfam annotation: Domain name=Kelch_1; Domain location=363-408; Score =36.5; E_value=1.1e-07; Accession=PF01344.17; Description=Kelch motif
  Pfam annotation: Domain name=Kelch_1; Domain location=413-458; Score =0.4; E_value=3.1; Accession=PF01344.17; Description=Kelch motif
  Pfam annotation: Domain name=Kelch_2; Domain location=209-257; Score =0.4; E_value=38; Accession=PF07646.7; Description=Kelch motif
  Pfam annotation: Domain name=Kelch_2; Domain location=261-307; Score =34.6; E_value=3.8e-07; Accession=PF07646.7; Description=Kelch motif
  Pfam annotation: Domain name=Kelch_2; Domain location=313-358; Score =14.8; E_value=0.36; Accession=PF07646.7; Description=Kelch motif
  Pfam annotation: Domain name=Kelch_2; Domain location=363-408; Score =30.3; E_value=8e-06; Accession=PF07646.7; Description=Kelch motif
  Pfam module annotation: Pfam domain module=Kelch_1::Kelch_1::Kelch _1::Kelch_1::Kelch_2::Kelch_2::Kelch_2::Kelch_2; Domain location=261 -307::313-358::363-408::413-458::209-257::261-307::313-358::363-408
AALVAAAISAGFRESGITSLQKRAMVAIRCSIRMEVPLGQIDELVVSPEYIRYLVRIANCKMEANKKRMDGFLDLLQTEGLSGSPGLLNNCNGSNSQTVDHRASLGCEVKISLDKGAKKNNDLVTKRRNGGKNCDADDRGDSEIGEGSLEAQYFENQDPTWSKGAEHGFGNAKRVVLEEKLPGNKKYHLSTAALKISGEPIEKLLLWGQSSCVFPVGGEQRVLTFGGFGGPGRHSRRNYSLLLDHKSGLLTEMIFKESPSPRMGHTVTSVDNSTFVIGGRGGPSEILDDVWVLQSTENTWLRLECSGNIFRPRHRQVRAAAVXQKXYVFGGLSNEGLYSCMNILDTKSMEWSMVAAAGEWPCARHSHSLVSYGSKLFMFGGHDGQHALKDFYSFDTTTLEWNKESTYEGTPSPRFSHCMFIYKNYLGILGGCPITGNNQEVALLNLKHGVWLSVSIPLLSQCLCVRSSSIVIEDHLVILGGGASCYAFGTKFNQPI

SEQ ID NO: 72675 - protein, 87 aa, Setaria italica
  Transcript Sequence Number=SeqID_6701
QLCLRGEKVKAALPSWRSSSAAKVIPEVRGYGGVRRRRRREERAGLRAGADAGHGEGAGRAHGPAGPAGGREGALRRALAGSWRRPS

SEQ ID NO: 72676 - protein, 242 aa, Setaria italica
  Transcript Sequence Number=SeqID_6702
  Gene Ontology: Mol. function=sequence-specific DNA binding; Cellular component=nucleus; Biological process=regulation of transcription, DNA-dependent
  Homolog annotation: Hit_ID=B6SS40; Match level="QueryCoverage=86%, HitCoverage=57%, E-value=1e-78, Identity=70%"; Hit description=GATA transcription factor 20
  Pfam annotation: Domain name=GATA; Domain location=180-215; Score =66.8; E_value=8.1e-17; Accession=PF00320.19; Description=GATA zinc finger
MSAIYMSQLSTALPLMEGDHHQDHHHHQGHFQAFNLPKDPPILFPFVISNSSASDSSLSYGSGDHHHLFRQQNQAMLEPQHMIGVSSAASVFATPFPTVESIRDDMIEPSSYDPYDMGRLQVGGSLETAGSWTTPPAKMRITRKASTDPGAAKKPRRKVQGYEDMMGTSGQPNLGVNRVCSDCNTTKTPLWRSGPCGPKSLCNACGIRQRKARRAMMASAGGSGPAPADGAKAATATPRDAI

SEQ ID NO: 72677 - protein, 121 aa, Setaria italica
  Transcript Sequence Number=SeqID_6703
  Gene Ontology: Mol. function=electron carrier activity; Biological process=oxidation reduction
  Homolog annotation: Hit_ID=B6SSW8; Match level="QueryCoverage=93%, HitCoverage=20%, E-value=2e-44, Identity=73%"; Hit description =Cytochrome P450 CYP714B3
YERWRKEYGPVFTYSIGNMVFLHASRADVVRDLGLCVSLDLGKSSYMKVTHRPLFGDGILKSSGEAWAYQRRLIAPEFFPDKVRGMVDLMVGSATALVESWEDRIISRDNNGGGGGLELKI

SEQ ID NO: 72678 - protein, 178 aa, Setaria italica
  misc_feature (122)..(122): Xaa can be any naturally occurring amino acid
  Transcript Sequence Number=SeqID_6704
  Gene Ontology: Mol. function=methyltransferase activity; Cellular component=nucleus
  Homolog annotation: Hit_ID=B9R8W9; Match level="QueryCoverage=99%, HitCoverage=20%, E-value=5e-27, Identity=33%"; Hit description=Set domain protein, putative
GQMCGPYPPEQLYEGLSTGFLPQDLAIYAVFGGKTADPVPLSFLNQFLSQRNFGATVSTPNAYMETKKIPSHAKMVLPDDLSSEESCWMFEDAEGCRQGPHSLAELSYWHHNSYIQDLSMNXSEATANDSSLNGLVGDIVGDVSHQLHAGIMKSARRVLIDEIFSCVLPDLIASKKTE

SEQ ID NO: 72679 - protein, 108 aa, Setaria italica
  Transcript Sequence Number=SeqID_6705
ATKILAIWYMASSCTLPSHQGSVHGLDQRMTHLGLWIHWHVYVRASKLPSLILWHTHLENSWTRTCITSWMNRQVCAALYLVRKQPFTSSAHPQLIPHAHHLQKAAAT

SEQ ID NO: 72680 - protein, 80 aa, Setaria italica
  misc_feature (65)..(65): Xaa can be any naturally occurring amino acid
  Transcript Sequence Number=SeqID_6706
  Gene Ontology: Mol. function=methyltransferase activity; Cellular component=nucleus; Biological process=regulation of transcription, DNA-dependent
  Homolog annotation: Hit_ID=B9R8W9; Match level="QueryCoverage=93%, HitCoverage=5%, E-value=5e-33, Identity=84%"; Hit description=Set domain protein, putative
  Pfam annotation: Domain name=SET; Domain location=1-64; Score=1.0; E _value=0.0019; Accession=PF00856.20; Description=SET domain
FNCWFDATKRGGLARFINHSCEPNCYTKVITVDGQKKIYIYAKRRIYAGEELTYNYKFPLEEKKXIPCYCGSQRCRGSMN

SEQ ID NO: 72681 - protein, 82 aa, Setaria italica
  Transcript Sequence Number=SeqID_6707
ATKILAIWYMASSCTLPSHQGSVHGLDQRMTHLGLWIHWHVYVRASKLPSLILWHTNFPNKQCKSEGYCWCFHGTENVTASG

SEQ ID NO: 72682 - protein, 954 aa, Setaria italica
  Transcript Sequence Number=SeqID_6708
  Gene Ontology: Mol. function=methyltransferase activity; Cellular component=nucleus; Biological process=regulation of transcription, DNA-dependent
  Homolog annotation: Hit_ID=B9R8W9; Match level="QueryCoverage=99%, HitCoverage=78%, E-value=2e-98, Identity=40%"; Hit description=Set domain protein, putative
  Pfam annotation: Domain name=SET; Domain location=808-939; Score =182.3; E_value=1.4e-51; Accession=PF00856.20; Description=SET domain
GNLTNNDLSSEESCWMFEDAEGCRQGPHSLAELSYWHHNSYIQDLSMIYHVDGKFGPFTLVSLIGSWSGEHAERSEATANDSSLNGLVGDIVGDVSHQLHAGIMKSARRVLIDEIFSCVLPDLIASKKTEKQLAAKLKNQATKPDSVSNMKISKLKVKINKPSTIPENGNSNRAPVDSSVAIQSTAVHDTFADILSAVWQTIYYEAMKNIWDGILSDPVMDYSDVWFQRNCQLNLPSTIISVTPDNIKAQDSHEMSSKDSDATECETEFPPGFEPKSAGLSLSRSSLEANIDRKSESSTALFSDPLAVAQRMLANELYISSKQSLFHYFEEVIAEEITNCLCYGLESSIDQEQIGTPIHAPESPISAEVSVHETLSPVEVVVDEELNTVEMATAIETSPIEMGVDEELNTVEVAADEELNIVQMAVATRANSIETTSDEPLGAAEMTTDKMLSSQGEERLPLVSYARIFEKMDICMTAELDESFDEVPPGVETGLVPLPLKEKIVYQPLRSMNSIPVISRYMSLALFRQRLHENVVREWTSLFSDTIRECLDSWYNRQNAVPKIADGSSKLKEYTYYRKRKSKKTCQATSSKKPVELSMDEQLSKPLCQLVDHKINVKNIQESNKASTSKRVSFVDKPSKKRTKTLAIANNAHNLNIQQDLKLVSSEVPKRTRSSHPTKKQVVANKTPMVNDNAMNTSMLTKPVKKRKGRNISSEASLKVDLMISCPESDGCARASINGWEWRNWARNATPSERARVRGYRVRSILSASNKKLWNNSQDKMVSSARTNRVKLRRLLRAYTGAELLKITQMKARKKRLRFQRSKIHDWGLVALELIEAEDFVIEYVGDLIRKRVSDIREAQYEKSGIGSSYLFRLDDDYVVDATKRGGLARFINHSCEPNCYTKVITVDGQKKIYIYAKRRIYAGEELTYNYKFPLEEKKIPCYCGSQRCRGSMN

SEQ ID NO: 72683 - protein, 217 aa, Setaria italica
  misc_feature (117)..(117): Xaa can be any naturally occurring amino acid
  Transcript Sequence Number=SeqID_6709
  Pfam annotation: Domain name=MAN1_C; Domain location=84-177; Score =34.1; E_value=5.4e-07; Accession=PF09402.2; Description=MAN1 C terminal
SELLHLRICDQHARALCGQPTKILVYFTTRFSSIYYCYMHISSLLHNPIFPQFQFHKHDVSDIIDELFSKNPSGLTEDGIQLVKARVLESAQGFFETTFTSNKYAILSLLSLRRLPXSNCEPWVVASWLRDHLLVPRERKNAFLWKKVEELILEDSRIDQYPKVIKGESKVVYEWQATGSLSGKIKKKVQGARVEAIKLADEMSACVGEVREQGLIT

SEQ ID NO: 72684 - protein, 329 aa, Setaria italica
  Transcript Sequence Number=SeqID_6710
  Pfam annotation: Domain name=MAN1_C; Domain location=179-272; Score =66.9; E_value=7.4e-17; Accession=PF09402.2; Description=MAN1 C terminal
PCDSLGPPDEYDYADDSCQPCPQNGRCVGGQLECVQGFKRYGASCVEDGLLSQTATKISELLHLRICDQHARALCGQPTKILFHKHDVSDIIDELFSKNPSGLTEDGIQLVKARVLESAQGFFETTFTSNKAEAFKCPELVAERHMPLTCQIRQWISRNVIFVTTICILFAALLWILWIIYWRRALSNRAEQIYEQVCEILEDNAINAKTSYSNCEPWVVASWLRDHLLVPRERKNAFLWKKVEELILEDSRIDQYPKVIKGESKVVYEWQATGSLSGKIKKKVQGARVEAIKLADEMSACVGEVLQVSSAEQVCTSWQTPRTQADQWR

SEQ ID NO: 72685 - protein, 381 aa, Setaria italica
  Transcript Sequence Number=SeqID_6711
  Gene Ontology: Mol. function=protein binding; Cellular component =cytoplasm; Biological process=ribosome biogenesis
  Homolog annotation: Hit_ID=Q6EQN4; Match level="QueryCoverage=83%, HitCoverage=100%, E-value=1e-151, Identity=80%"; Hit description =Bystin (51.6 kD)-like
  Pfam annotation: Domain name=Bystin; Domain location=60-355; Score =634.9; E_value=7.9e-188; Accession=PF05291.3; Description=Bystin
AAANAQAAAGPSTSSSFLVPAADDDEDDDVDEFDGFDALSEYDGGEVEINEEDERALAAFMSKDKAAELTLGDIILQKIREKDAEVLTEGRPRVKLDNSIIDLYKEVGKFLSRYTSGKIPKAFKRIPSLECWAEVLQLTEPENWSPNAVYQATRLFSSNMNTKNAERFYEAILLPRVRNDIRQNQRLHFALYQSLKKSLYKPAAFNKGILLPLCRERNCTLREAVIIGSIIQKVSIPFLHASVALVKLAEMEYCGTTSYFIKLFLDKKYALPYRALDAVLAHFMRFLDDERIMPVIWHQSLLAFVERYKNELEKKDKEKLARLLDHQKHYLVTPEIRRELRGSCNRGEKDSNLQTSSPISVITKPIEEDKWDVPQVPMEED

SEQ ID NO: 72686 - protein, 250 aa, Setaria italica
  misc_feature (209)..(209): Xaa can be any naturally occurring amino acid
  Transcript Sequence Number=SeqID_6712
  Gene Ontology: Mol. function=substrate-specific transmembrane transporter activity; Cellular component=integral to membrane; Biological process=transmembrane transport
  Homolog annotation: Hit_ID=B6TSL9; Match level="QueryCoverage=95%, HitCoverage=44%, E-value=1e-116, Identity=89%"; Hit description =Polyol transporter protein 4
  Pfam annotation: Domain name=Sugar_tr; Domain location=27-250; Score=- 88.3; E_value=1.7e-05; Accession=PF00083.16; Description=Sugar (and other) transporter
MSTDADAVPAAVAPAKRAPINKYAFASALLASMNSVLLGYDAWVLAHGAQLFMKEDLKITDTQIEILAGVINIYSLFGSLAAGFTSDWLGRRYTMVLAAAIFFTGALLMGLAPDYALLMVGRFVAGIGVGFALMIAPVYTAEVAPTSARGFLTSFPEVFNNFGILLGYVSNFAFARLPVHLSWRAMFLVGAVPPVFLGVAVLAMPESPXWLVMRGRIDDARRVLQKTSDSPAEAEERLTTNNTKKGRYGK

SEQ ID NO: 72687 - protein, 211 aa, Setaria italica
  Transcript Sequence Number=SeqID_6713
  Gene Ontology: Mol. function=substrate-specific transmembrane transporter activity; Cellular component=integral to membrane; Biological process=transmembrane transport
  Homolog annotation: Hit_ID=B6TSL9; Match level="QueryCoverage=90%, HitCoverage=35%, E-value=1e-91, Identity=90%"; Hit description =Polyol transporter protein 4
  Pfam annotation: Domain name=DUF606; Domain location=22-134; Score= -61.2; E_value=0.063; Accession=PF04657.5; Description=Protein of unknown function, DUF606
  Pfam annotation: Domain name=Sugar_tr; Domain location=27-211; Score=- 177.2; E_value=0.051; Accession=PF00083.16; Description=Sugar (and other) transporter
  Pfam module annotation: Pfam domain module=DUF606::Sugar_tr; Domain location=22-134::27-211
MSTDADAVPAAVAPAKRAPINKYAFASALLASMNSVLLGYDISVMSGAQLFMKEDLKITDTQIEILAGVINIYSLFGSLAAGFTSDWLGRRYTMVLAAAIFFTGALLMGLAPDYALLMVGRFVAGIGVGFALMIAPVYTAEVAPTSARGFLTSFPEVFNNFGILLGYVSNFAFARLPVHLSWRAMFLVGAGRGEHRGDAVIRGVVRVRAGP

SEQ ID NO: 72688 - protein, 514 aa, Setaria italica
  misc_feature (30)..(30): Xaa can be any naturally occurring amino acid
  Transcript Sequence Number=SeqID_6714
  Gene Ontology: Mol. function=substrate-specific transmembrane transporter activity; Cellular component=integral to membrane; Biological process=transmembrane transport
  Homolog annotation: Hit_ID=B6UEW2; Match level="QueryCoverage=93%, HitCoverage=92%, E-value=0.0, Identity=92%"; Hit description=Polyol transporter protein 4
  Pfam annotation: Domain name=MFS_1; Domain location=22-434; Score =116.6; E_value=8.2e-32; Accession=PF07690.8; Description=Major Facilitator Superfamily
  Pfam annotation: Domain name=Sugar_tr; Domain location=22-483; Score =353.8; E_value=3.3e-103; Accession=PF00083.16; Description=Sugar (and other) transporter
  Pfam module annotation: Pfam domain module=MFS_1::Sugar_tr; Domain location=22-434::22-483
MSTDADAVPAAVAPAKRAPINKTFSNGLTXTDISVMSGAQLFMKEDLKITDTQIEILAGVINIYSLFGSLAAGFTSDWLGRRYTMVLAAAIFFTGALLMGLAPDYALLMVGRFVAGIGVGFALMIAPVYTAEVAPTSARGFLTSFPEVFNNFGILLGYVSNFAFARLPVHLSWRAMFLVGAVPPVFLGVAVLAMPESPRWLVMRGRIDDARRVLQKTSDSPAEAEERLLDIKKVVGIPEGVSDADDVAAIVRANNKGSRGDGVWKELLINPSRPVRRMLMAGLGLMFIQQATGVDCVVLYSPRVFERAGIKSKTNSLGASMAVGACKTFFIPISTLLLDRIGRRPLLLASGGGMAIFLFTLATSLHMMDRRPEGEAAALGAVSIAAMLSFVASFASGLGPVAWVYCSEIYPLRLRAQAAAIGTGLNRIMSGATTMSFLSLSNAITIAGSFYLYACIMAAGWVFMYFFLPETMGKSLEDTAKLFGKDADDDDGVVVAAGRHESKKSSTELSAQQH

SEQ ID NO: 72689 - protein, 70 aa, Setaria italica
  misc_feature (62)..(62): Xaa can be any naturally occurring amino acid
  Transcript Sequence Number=SeqID_6715
NIKDKEGESHGEQQTTGKHQTANTDEVVSGSEHALMSDEQSENAMMSCTVWKITQHRQLTKXPMYQNRKP

SEQ ID NO: 72690 - protein, 67 aa, Setaria italica
  Transcript Sequence Number=SeqID_6716
  Gene Ontology: Cellular component=cytoplasm
  Homolog annotation: Hit_ID=B6U7X1; Match level="QueryCoverage=100%, HitCoverage=31%, E-value=3e-26, Identity=91%"; Hit description=Maf -like protein CV_0124
MATGSSSPATPQPFKLILGSSSVARKHILEEMGLEFQVMTADIDEKSIRREDPDDLVMVLAEAKADA

SEQ ID NO: 72691 - protein, 227 aa, Setaria italica
  Transcript Sequence Number=SeqID_6717
  Gene Ontology: Mol. function=ATPase activity, coupled to transmembrane movement of ions, phosphorylative mechanism; Cellular component=membrane; Biological process=transport
  Homolog annotation: Hit_ID=B9I2N3; Match level="QueryCoverage=99%, HitCoverage=19%, E-value=6e-95, Identity=69%"; Hit description =Aminophospholipid ATPase (Fragment)
PISLYISIEIVKLLQALFINQDIHMYHEETDTPAHARTSNLNEELGQVDTILTDKTGTLTCNSMEFIKCSIAGRAYGRGITEVERAMAKRKGTPMIADMDNGNQHFQPEGKVAVKGFNFTDERVMDGNWVSQPHSHVIEMFFRLLAVCHTCIPEVDEESGKISYEAESPDEAAFVVAARELGFTFYRRTQTDVFLHELDPVSGKQVDRSYRILNVLEFNSARKRMYK

SEQ ID NO: 72692 - protein, 400 aa, Setaria italica
  Transcript Sequence Number=SeqID_6718
  Gene Ontology: Mol. function=metalloendopeptidase activity; Cellular component=cell surface; Biological process=proteolysis
  Homolog annotation: Hit_ID=O43847; Match level="QueryCoverage=93%, HitCoverage=32%, E-value=3e-79, Identity=40%"; Hit description =Nardilysin
  Pfam annotation: Domain name=Peptidase_M16; Domain location=19-152; Score=141.0; E_value=3.7e-39; Accession=PF00675.12; Description =Insulinase (Peptidase family M16)
  Pfam annotation: Domain name=Peptidase_M16_C; Domain location=175 -360; Score=74.2; E_value=4.7e-19; Accession=PF05193.13; Description =Peptidase M16 inactive domain
  Pfam module annotation: Pfam domain module=Peptidase_M16::Peptidase _M16_C; Domain location=19-152::175-360
EDEEEGGSEPKRRKEKGGADPIVKKAAAAMCVGIGSFADPPKAQGLAHFLEHMLFMGSSEFPDENEYDSYLSKHGGASNAFTETEYTCYHFEVKREYLKGALDRFSQFFVSPLVKAEAMDREILAVDSEFNQVLQSDSCRLSQLQSHTCSQGHPLNRFTWGNKKSLVDAMGSGINLREEILQMYMRNYHGGAMKLVIIGGEPLDILEGWTMELFSKVKAGPLLDMTPKTDMPFWKSGKLYKLEAVRDVHSLFLSWTLPCLHKEYMKKPEDYLAHLLGHEGKGSLLYFLKAKGWASSLSAGVGSGGSERSSYAYIFEMSIHLTDSGLKNVFEVIGSVYQYIKLLKQSEPQEWIFKELQDIGNMEFRFAEEQPPDDYAVDLAENMLFYSEKHIVCGEYIHCR

SEQ ID NO: 72693 - protein, 92 aa, Setaria italica
  Transcript Sequence Number=SeqID_6719
PITCHRHFALVLSLRLPHLLLPHVHSLPRRRLTFHLSLPTCTCLLDLHCSLTAPVPRGSKHTWCARTARRHRIHFPARPRGVCVLPANAFTN

SEQ ID NO: 72694 - protein, 102 aa, Setaria italica
  Transcript Sequence Number=SeqID_6720
  Gene Ontology: Mol. function=catalytic activity; Biological process =metabolic process
  Homolog annotation: Hit_ID=Q6K821; Match level="QueryCoverage=98%, HitCoverage=13%, E-value=3e-42, Identity=85%"; Hit description =Phosphatidylinositolglycan-like
  Subcellular localization annotation: CTP_CleavageSite=47; ConfidenceScore=5.26e-01
MGAAVARWTVAAVLLQVAGLSLFLYGFFPVKPTLRGFSGTESYRMPSCGLVSAGEQEPALPPDQLRSLYGELFGMPPVYDRLVLMVIDGLPAEFVLGRGGKP

SEQ ID NO: 72695 - protein, 587 aa, Setaria italica
  Transcript Sequence Number=SeqID_6721
  Gene Ontology: Cellular component=plasma membrane
  Homolog annotation: Hit_ID=Q7XQX2; Match level="QueryCoverage=96%, HitCoverage=96%, E-value=0.0, Identity=79%"; Hit description =OSJNBa0014K14.3 protein
  Pfam annotation: Domain name=MFS_1; Domain location=29-508; Score= -6.9; E_value=0.048; Accession=PF07690.8; Description=Major Facilitator Superfamily
  Pfam annotation: Domain name=Nodulin-like; Domain location=25-272; Score=403.9; E_value=2.6e-118; Accession=PF06813.5; Description =Nodulin-like
  Pfam module annotation: Pfam domain module=MFS_1::Nodulin-like; Domain location=29-508::25-272
TNGPLGRGEGRAKGRGKVKAGRRPPWVGLAAAVWVQVAAGSAYVFPLYSHAVKEALGYDQKALTMLGVGNDVGENVGLLPGVLANRLPPWLILVIGSACAFFGFGTLWLAVTKTVAMPYWVLWIALGVGTNSSAWLGTAALVTNMRNFPLSRGTVAGLIKGYVAVSAAVYTETFNGMLGNSPTNLLLLLALGIPTACIVVMYFVRPCTPSLDEDNSTEHSHFMYTQISSVVLGIYLMVATILGDTLKLSQAVTYLLFGIMILLLLAPLAIPIKMTFYPNKQTKEKPSTLAPSYSTDSLSGADPENSEPLLGSASTILVTGTNESDDSTDLDVLLAVGEGAVNLKKKRGPRRGDDFTFLEALVKADFWLLFIVYFCGVGTGVTVLNNLAQIGMSVGANDTTILLCLFGFCNFIGRILGGSVSEYFVRSRMLPRPFWMMCTQIIMVITFLLFATGLHSLIYVSVTLLGICYGVQFAVMIPTVSELFGLKDFGLMYNFMLLVNPLGAFFFSALLAGYIYDKEAARQHPGVLEPSNCYGPDCFRVTFHVCGIVCCCGTLLSVLFIARIKPVYQMLYASGSFRHPRSQQQLH

SEQ ID NO: 72696 - protein, 84 aa, Setaria italica
  Transcript Sequence Number=SeqID_6722
NCKQKFMQCTSWATKTVQNWLCTCKRKMNLLWKDTNLRVIVVPRILYIDHEQLSSCIFKLHIIVLHNYHSYITRYYIYKKHYDL

SEQ ID NO: 72697 - protein, 60 aa, Setaria italica
  Transcript Sequence Number=SeqID_6723
  Homolog annotation: Hit_ID=B6TK63; Match level="QueryCoverage=100%, HitCoverage=26%, E-value=7e-16, Identity=68%"; Hit description =Saposin-like type B, region 1 family protein
MITRVQVTFLISLVLWCATSLALDDAAGIKTPNAGTVSPAMNENPQLCQLCEEFASEALF

SEQ ID NO: 72698 - protein, 68 aa, Setaria italica
  Transcript Sequence Number=SeqID_6724
  Gene Ontology: Mol. function=nucleic acid binding; Biological process= lipid metabolic process
  Homolog annotation: Hit_ID=B6TK63; Match level="QueryCoverage=100%, HitCoverage=30%, E-value=3e-20, Identity=70%"; Hit description =Saposin-like type B, region 1 family protein
MITRVQVTFLISLVLWCATSLALDDAAGIKTPNAGTVSPAMNENPQLCQLCEEFASEALFYLKENETQ

SEQ ID NO: 72699 - protein, 92 aa, Setaria italica
  Transcript Sequence Number=SeqID_6725
  Gene Ontology: Cellular component=lysosome; Biological process=lipid metabolic process
  Homolog annotation: Hit_ID=B6TK63; Match level="QueryCoverage=85%, HitCoverage=35%, E-value=2e-33, Identity=87%"; Hit description =Saposin-like type B, region 1 family protein
  Pfam annotation: Domain name=SapB_2; Domain location=40-74; Score =20.6; E_value=0.0064; Accession=PF03489.9; Description=Saposin-like type B, region 2
LVIFPIFFKKNKDTNLEDPDMELKIIEILLKGCNNAENFVQKCKRLIIQNAPIVMEYIKKFLEKRDFCNSIHVCGGKTVHAGAQVLGSLSSA

SEQ ID NO: 72700 - protein, 218 aa, Setaria italica
  misc_feature (30)..(30): Xaa can be any naturally occurring amino acid
  Transcript Sequence Number=SeqID_6726
  Gene Ontology: Mol. function=nucleic acid binding; Cellular component= lysosome; Biological process=lipid metabolic process
  Homolog annotation: Hit_ID=B6TK63; Match level="QueryCoverage=100%, HitCoverage=100%, E-value=1e-102, Identity=81%"; Hit description =Saposin-like type B, region 1 family protein
  Pfam annotation: Domain name=SapB_1; Domain location=125-163; Score =28.9; E_value=2e-05; Accession=PF05184.7; Description=Saposin-like type B, region 1
  Pfam annotation: Domain name=SapB_1; Domain location=39-77; Score =45.0; E_value=2.8e-10; Accession=PF05184.7; Description=Saposin-like type B, region 1
  Pfam annotation: Domain name=SapB_2; Domain location=166-200; Score =20.6; E_value=0.0064; Accession=PF03489.9; Description=Saposin-like type B, region 2
  Pfam annotation: Domain name=SapB_2; Domain location=80-113; Score =19.7; E_value=0.012; Accession=PF03489.9; Description=Saposin-like type B, region 2
  Pfam module annotation: Pfam domain module=SapB_1::SapB_1::SapB _2::SapB_2; Domain location=125-163::39-77::166-200::80-113
MITRVQVTFLISLVLWCATSLALDDAMYGXVSPAMNENPQLCQLCEEFASEALFYLKENETQTEIIATLHQACSKFPSFKLECTRLVDYYAPLFFTKIASLSPEDFCVSVSFCAEATFIRLPRHEDTCTLCHEVVDEIVTNLEDPDMELKIIEILLKGCNNAENFVQKCKRLIIQNAPIVMEYIKKFLEKRDFCNSIHVCGGKTVHAGAQVLGSLSSA

SEQ ID NO: 72701 - protein, 168 aa, Setaria italica
  misc_feature (59)..(59): Xaa can be any naturally occurring amino acid
  misc_feature (84)..(84): Xaa can be any naturally occurring amino acid
  Transcript Sequence Number=SeqID_6727
  Subcellular localization annotation: CTP_CleavageSite=17; ConfidenceScore=5.66e-01
RDLPPAAAPTTAASAPQASAAPPTTAASAPQATAQPPTTVSASAPQASAQPPTTVSASXQPQPPQVSASPPTTAASPPQVSAGXPTTATSPPLSSAAPPTTAAAPQLAATSPPVASPPVAAAPPVSATPPATSPPLASPPAATPPTVAAPAPYVRPVFLVGPSPTLLV

SEQ ID NO: 72702 - protein, 107 aa, Setaria italica
  Transcript Sequence Number=SeqID_6728
  Subcellular localization annotation: CTP_CleavageSite=96; ConfidenceScore=5.78e-01
AALRQPLSVAPQVSAAPPTTATSPPLSSAAPPTTAAAPQLAATSPPVASPPVAAAPPVSATPPATSPPLASPPAATPPTVAAPAPTTPAPVASPPMAMPPAALPPST

SEQ ID NO: 72703 - protein, 390 aa, Setaria italica
  Transcript Sequence Number=SeqID_6729
ALLRSEHTQARQQRGEQRASVPSEKTEETGRRTSCGLGGRRVTMALLPLFLSLLLVSCAAQSPASSPSASNAPPVSASSPPALKAPPVGGSVPKVVPPKTAAPAPKASSAAAPTTAASAPQASAAPPTTAASAPQATAQPPTTVSASAPQASAQPPTTVSASAPQASAAPPTTAASAPQVSATAPTTAASPPQVSASPPTTAASPPQVSAAPPTTATSPPLSSAAPPTTAAAPQLAATSPPVASPPVAAAPPVSATPPATSPPLASPPAATPPTVAAPAPTTPAPVASPPMAMPPAALPPSTLPPATAPTPLLAAPIMAPVATPVTAPAPAPVSPAPSVAPTPSPTEAPTPSPMLAPELATPLAPSLAPFSSVSVSPSLSPGPALAQADE

SEQ ID NO: 72704 - protein, 53 aa, Setaria italica
  Transcript Sequence Number=SeqID_6730
TGMLMPVHKVILSEDSYIDILSFMIDCQFLFANLTLRLTVCRFFKSCTFLFLQ

SEQ ID NO: 72705 - protein, 347 aa, Setaria italica
  Transcript Sequence Number=SeqID_6731
  Homolog annotation: Hit_ID=B6TRE4; Match level="QueryCoverage=100%, HitCoverage=100%, E-value=1e-176, Identity=83%"; Hit description=F -box domain containing protein
  Pfam annotation: Domain name=DUF295; Domain location=262-310; Score =65.1; E_value=2.6e-16; Accession=PF03478.10; Description=Protein of unknown function (DUF295)
  Pfam annotation: Domain name=F-box; Domain location=17-64; Score =22.1; E_value=0.0023; Accession=PF00646.25; Description=F-box domain
  Pfam module annotation: Pfam domain module=DUF295::F-box; Domain location=262-310::17-64
MSAKVPRRLEITSSGMADWATLQTDIVGLIVKKLAVPDYIRFRAVCTSWNHVCKDVSYCPRVDPWLMLPPNPTPLGAQFFCIPERKNQNIRLPSTASFFESVWAPVGSLNGWLIYFSQTYGTMQLVNPISGRQIQLPPIGRRIFSKAKLLEMNERNFIVAVLYGDQKGYKITRKGSNNWSSVESTHILDDIIKHRGRLYTCDMYGTVEVWAEPPRAWPDEEMTHQWRFRCLVETPAGDLIRVKRQSQNKFAVWILDKGSFSWVETDNIGDFALFVSHYNSFCFLAKDHPNLKANCIYFIDIHNNLCAFNLEHGTKELVETLAIGLDRNDYYRRPQRDQLLWFIPSLK

SEQ ID NO: 72706 - protein, 266 aa, Setaria italica
  misc_feature (242)..(242): Xaa can be any naturally occurring amino acid
  Transcript Sequence Number=SeqID_6732
  Gene Ontology: Mol. function=transferase activity, transferring glycosyl groups
  Homolog annotation: Hit_ID=B6SUZ6; Match level="QueryCoverage=100%, HitCoverage=59%, E-value=1e-111, Identity=76%"; Hit description =Protein-O-fucosyltransferase 1
MNILLELKHLKLLSLPARPVICKGLLIVIALIILRAILSPFFAINSSEKEEFYESTSPDLLPGIRRDKFVEVPQIIWGLNNQKIAFARACLTARFLNRSLLMPSLSASLFYKEVDLLQPINFDKVFDFNKFNARCHGFVKLARYSEVSNRTEPFKLQKGSGRKWTVERDLDQLQQFIGGRADDFEVIEIVGKHPFLWPDHWPVKDYAKIFDCLVLVPEIETEVVKVISKIREAGQRARHEAXGFSHSKQRRDGSTNLPVPYVAVHM

SEQ ID NO: 72707 - protein, 88 aa, Setaria italica
  Transcript Sequence Number=SeqID_6733
  Subcellular localization annotation: CTP_CleavageSite=49; ConfidenceScore=5.04e-01
WIGCGVGMGHGFGIGIALKPRVLHGIQSSFGEIMSKLTSRLKDSPEMPSASNPMARSLSSNQQTHDGMPMDLEAKTAESNLKNTTSYE

SEQ ID NO: 72708 - protein, 165 aa, Setaria italica
  Transcript Sequence Number=SeqID_6734
  Gene Ontology: Mol. function=nucleotide binding; Cellular component =myosin complex; Biological process=protein amino acid phosphorylation
  Homolog annotation: Hit_ID=B0CN61; Match level="QueryCoverage=100%, HitCoverage=10%, E-value=3e-78, Identity=82%"; Hit description =Myosin XI-K
PNLVDSVLMEKYKGANLGDLDPHVFAMSLTGYRQMINEGKSNSILVSGESGAGKTETTKLLMRYLAFLGGRSGTGERTVEQQVLESNPVLEAFGNAKTVRNNNSSRFGKFVEIQFDKSGKISGAAIRTYLLERSRVCQINSPERNYHCFYFLCAAPSEDLKKYKL

SEQ ID NO: 72709 - protein, 79 aa, Setaria italica
  misc_feature (10)..(10): Xaa can be any naturally occurring amino acid
  Transcript Sequence Number=SeqID_6735
  Gene Ontology: Mol. function=zinc ion binding; Cellular component =endoplasmic reticulum membrane; Biological process=ubiquitin -dependent protein catabolic process
  Homolog annotation: Hit_ID=B9RYE5; Match level="QueryCoverage=94%, HitCoverage=8%, E-value=2e-16, Identity=53%"; Hit description=Ssm4 protein, putative
  Pfam annotation: Domain name=zf-C3HC4; Domain location=5-59; Score =54.7; E_value=3.4e-13; Accession=PF00097.17; Description=Zinc finger, C3HC4 type (RING finger)
EEDACRICHXPRAEADAPPAHPCACRGSIRFVHDDCLLRWLATRRGSSTASASSICEVCKRAISIAPVYAANAPARLPL

SEQ ID NO: 72710 - protein, 81 aa, Setaria italica
  Transcript Sequence Number=SeqID_6736
  Gene Ontology: Mol. function=metal ion binding
  Homolog annotation: Hit_ID=UPI0001505824; Match level="QueryCoverage =45%, HitCoverage=3%, E-value=5e-10, Identity=72%"; Hit description =protein binding / zinc ion binding
  Pfam annotation: Domain name=zf-C3HC4; Domain location=19-72; Score =45.0; E_value=3e-10; Accession=PF00097.17; Description=Zinc finger, C3HC4 type (RING finger)
MADAAAAARLPPGEEEDACRICHLPGEADRPLRHPCACRGSIRFVHDDCLLRWLATRRGSSTASASSICEVRFPAVLQARH

SEQ ID NO: 72711 - protein, 95 aa, Setaria italica
  Transcript Sequence Number=SeqID_6737
  Subcellular localization annotation: CTP_CleavageSite=25; ConfidenceScore=5.61e-01
SLLEARGGRGGSARPSRSRGPGSTSSSAASSCSCAGTTDPTRSIGEASSIRVRRHGSIGGIVFALPLMLHRVPKFWGVFWVCLCAGARMVAGCCT

SEQ ID NO: 72712 - protein, 104 aa, Setaria italica
  Transcript Sequence Number=SeqID_6738
  Gene Ontology: Cellular component=chloroplast; Biological process =protein transport
  Homolog annotation: Hit_ID=Q7F441; Match level="QueryCoverage=83%, HitCoverage=24%, E-value=2e-15, Identity=41%"; Hit description =P0696G06.13 protein
KKSFRTKERLDLLLAQPLPGFRQMKGGKTPDVPKEVALHLIGPSKVKKETIKKIINCTVAEYVQKEGLTASKNLKVEQSYEELEAAFEPGKEFCFDAMVQITIS

SEQ ID NO: 72713 - protein, 138 aa, Setaria italica
  misc_feature (58)..(58): Xaa can be any naturally occurring amino acid
  Transcript Sequence Number=SeqID_6739
  Gene Ontology: Cellular component=chloroplast; Biological process =protein transport
  Homolog annotation: Hit_ID=Q7F441; Match level="QueryCoverage=97%, HitCoverage=31%, E-value=2e-15, Identity=31%"; Hit description =P0696G06.13 protein
KIKVNVSGTMTDSIFEKVLTKKVAAAQPLPGFRQMKGGHRNLTLPTFVGIVFHMVLPXHSGKTPDVPKEVALHLIGPSKVKKETIKKIINCTVAEYVQKEGLTASKNLKVEQSYEELEAAFEPGKEFCFDAMVQITIS

SEQ ID NO: 72714 - protein, 88 aa, Setaria italica
  misc_feature (1)..(1): Xaa can be any naturally occurring amino acid
  Transcript Sequence Number=SeqID_6740
  Gene Ontology: Mol. function=transferase activity, transferring groups other than amino-acyl groups
  Homolog annotation: Hit_ID=Q9LGF6; Match level="QueryCoverage=98%, HitCoverage=19%, E-value=7e-39, Identity=89%"; Hit description=3'-N -debenzoyltaxol N-benzoyltransferase-like
XPMLHASLPHGGAGFYGNCYYIMRVSAPAGKVAGSSVTEVVKIIKDGKRRMPAEFTRWAAGEMGAGGVDPYQITSDYRTLLVSDWTRL

SEQ ID NO: 72715 - protein, 432 aa, Setaria italica
  Transcript Sequence Number=SeqID_6741
  Gene Ontology: Mol. function=transferase activity, transferring groups other than amino-acyl groups
  Homolog annotation: Hit_ID=Q9LGF6; Match level="QueryCoverage=99%, HitCoverage=99%, E-value=1e-171, Identity=71%"; Hit description=3'-N- debenzoyltaxol N-benzoyltransferase-like
  Pfam annotation: Domain name=Transferase; Domain location=7-430; Score=181.4; E_value=2.5e-51; Accession=PF02458.7; Description =Transferase family
MEPAAAKTVDRLSQRLVPPAEPTPTAPHRLSWLDRYPTQMALIESLHVFKPDPARHGVSPAETIERALARALVEYYPLAGRLAVSEDAGGLHVDCSGEGVWFIEASVRCRLEDVDYLEYPLQIPKDELLPHPLPRPSHEEENKLILLVQVTTFACGGFVVGFRFSHAVADGLGAAKFMGAVGELARGADQISPPPTWGRDAIPDPAGAHVGSLPELDGAKRLEYLAIDISADYIDHFKSQFAAASGGGRCSAFEVLIAKAWQSRTRAAAFDPDTPVHLCFAMNARPLLAARLPRAGVGFYGNCYYIMRVSSTAGKVSSSSVTDVVKIIREGKKRFPSEFARWAAGEEAGDPYQITSDYRTLLVSDWTRLGFAEVDYGWGPPAHVVPLTNLDCIATCILVKPWAHKPGARLITQCVTPDRVAAFHDAMVDMNC

SEQ ID NO: 72716 - protein, 62 aa, Setaria italica
  Transcript Sequence Number=SeqID_6742
YDEPVKLTELNLIGRCYSSVCRYKMFSLCLCCICFLLSLETTYCCSNRIVPRKHVQAFAFKK

SEQ ID NO: 72717 - protein, 120 aa, Setaria italica
  Transcript Sequence Number=SeqID_6743
  Homolog annotation: Hit_ID=B4FZ90; Match level="QueryCoverage=99%, HitCoverage=28%, E-value=8e-55, Identity=82%"; Hit description=F-box domain containing protein
VDGRTTVVVSDVFRPDKRCVLYFYAFMYFSDRWQLLNRVTLPEEWGYRFRGIIGAAEGYLFIKLDHPKENLNDHSEQHIEYHSLDVKTMQLGSFCRTTLLTVTEAYLYCGFPPSLSLPSI

SEQ ID NO: 72718 - protein, 67 aa, Setaria italica
  Transcript Sequence Number=SeqID_6744
MAKLAAQLKDKLFGLFGRITSCGRAHKDAAGAAEPKSVASQHVEIRSRGGAPGGVNGGSKSINDVDI

SEQ ID NO: 72719 - protein, 179 aa, Setaria italica
  misc_feature (84)..(84): Xaa can be any naturally occurring amino acid
  Transcript Sequence Number=SeqID_6745
  Gene Ontology: Mol. function=calcium ion binding; Cellular component =cytoplasm
  Homolog annotation: Hit_ID=Q23MC3; Match level="QueryCoverage=72%, HitCoverage=27%, E-value=5e-15, Identity=37%"; Hit description =Serine/threonine-protein phosphatase 2A regulatory subunit B
MSCVCLEALFRWHFPSHDLYLMGAIQNQLQKQSELLLNADDLDAMWVCLRENCVIDDATGAEKMNYEDFCHIATVCTEQIGQKXQTFFSPSNFMKFEKDDSGRIAILPFYLYVMRTVSLTQARIDMSELDEDSDGFLQPHEMEAYIRGLIPNLAQLRDMPTLHQDHQHSTEVLIVSLET

SEQ ID NO: 72720 - protein, 469 aa, Setaria italica
  Transcript Sequence Number=SeqID_6746
  Gene Ontology: Mol. function=calcium ion binding; Cellular component =cytoplasm
  Homolog annotation: Hit_ID=UPI000186E58A; Match level="QueryCoverage =85%, HitCoverage=86%, E-value=4e-73, Identity=37%"; Hit description =protein phosphatase 2A, 59 kDa regulatory subunit B, putative
  Pfam annotation: Domain name=efhand; Domain location=181-209; Score =13.4; E_value=0.75; Accession=PF00036.24; Description=EF hand
  Pfam annotation: Domain name=efhand; Domain location=289-317; Score =20.6; E_value=0.0063; Accession=PF00036.24; Description=EF hand
  Pfam annotation: Domain name=efhand; Domain location=364-392; Score =10.4; E_value=1.6; Accession=PF00036.24; Description=EF hand
  Pfam module annotation: Pfam domain module=efhand::efhand::efhand; Domain location=181-209::289-317::364-392
GTPVFGRTRIPPPSSMPWVRNLRRFVGSGAGLGSEALMELETKRILLEIFKERQRKSAEAGSIPSFYKKKPEEGSISSRVQRLAKYRFLKKQSELLLNADDLDAMWVCLRENCVIDDATGAEKMNYEDFCHIATVCTEQIGQKCKRFFSPSNFMKFEKDDSGRIAILPFYLYVMRTVSLTQARIDMSELDEDSDGFLQPHEMEAYIRGLIPNLAQLRDMPTQFVQMYCRIAARKFFFFCDPHRRGKACIKKVLLSNCLQELMELHQESEEEVTDTEQAENWFSLTSAQRICDMFLALDKDQNGTLSKQELKEYADGTLTEIFIERVFDEHVRRSKVGGGNSREMDFESFLDFVLALENKDTAEGLTYLFRCLDLNGRGFLTTADIHTLFRDVHQKWIEGGNYELCIEDVRDEIWDMVKPADPLRISLSDLLSCKQGGTIASMLIDVRGFWAHDNRENLLQEEEEQVEEA

SEQ ID NO: 72721 - protein, 88 aa, Setaria italica
  Transcript Sequence Number=SeqID_6747
  Gene Ontology: Mol. function=arginine decarboxylase activity; Biological process=putrescine biosynthetic process
  Homolog annotation: Hit_ID=Q9SNN0; Match level="QueryCoverage=98%, HitCoverage=12%, E-value=1e-13, Identity=60%"; Hit description =Arginine decarboxylase
  Subcellular localization annotation: CTP_CleavageSite=43; ConfidenceScore=5.03e-01
MPALAVDAATPVAHAFASCDAARFPAPLMAVPTSATAAADKPEAAAGSADLSAALYNVDGWGAPYFFVNDDGDVAVRPHGAATLPGRG

SEQ ID NO: 72722 - protein, 428 aa, Setaria italica
  misc_feature (84)..(84): Xaa can be any naturally occurring amino acid
  Transcript Sequence Number=SeqID_6748
  Gene Ontology: Mol. function=catalytic activity; Cellular component =plasma membrane
  Homolog annotation: Hit_ID=B6TFE7; Match level="QueryCoverage=99%, HitCoverage=99%, E-value=0.0, Identity=95%"; Hit description=Protein phosphatase 2C-like
  Pfam annotation: Domain name=PP2C; Domain location=36-288; Score =107.0; E_value=6.3e-29; Accession=PF00481.13; Description=Protein phosphatase 2C
GAATEVKLSPALPLATLIGRELRGDGSERPLVRYGHSGFAKRGEDYFLVKPDCLRVPGDPSSAFSVFAVFDGHNGVSAAVFSKXKLLEHVMSAVPQGISREDWLQALPRALVAGFVKTDIDFQRKGETSGTTATLVVVDGFTVTVASVGDSRCILDTQGGEVSLLTVDHRLEENAEERERVTASGGEVSRLNLCGGQEVGPLRCWPGGLCLSRSIGDTDVGEFIVPIPHVKQVKLPNTGGRLIIASDGIWDALSSETAAQACRGLPAELAAKLVVKQALKTSGLKDDTTCVVVDIIPSDHCSTPPALSPKRNQNMLKSLIFGRRSHSSVGKLSKSASLSSVEEIFEEGSAMLEERLGRNFPSKANLPPFRCAICQVDQEPFEGLMTDNVGGCCSAPSTPWGGPYLCSDCRKKKDAMEGKRSSRSTTCR

SEQ ID NO: 72723 - protein, 98 aa, Setaria italica
  Transcript Sequence Number=SeqID_6749
YFYLLFSFCHFCHLLILLIPVITLFVHQLALESVRTEYANAQLECSAADERAKVLAAEVILLEDKALKLRSSELKLEKEVEGLHSEISSYRRKVSSLE

SEQ ID NO: 72724 - protein, 99 aa, Setaria italica
  Transcript Sequence Number=SeqID_6750
  Homolog annotation: Hit_ID=Q84VA3; Match level="QueryCoverage=70%, HitCoverage=16%, E-value=8e-20, Identity=72%"; Hit description=Heavy meromyosin-like protein (Fragment)
SIPDDQLRMIDNINSLMSELAVEREELLRALRIESSNCSKLKELNKDLTQKLEMQTQKLELLTSQRMANETSSKEGKSDILLDLKIDVPASSNVSTVLV

SEQ ID NO: 72725 - protein, 107 aa, Setaria italica
  misc_feature (48)..(48): Xaa can be any naturally occurring amino acid
  Transcript Sequence Number=SeqID_6751
  Homolog annotation: Hit_ID=Q84VA3; Match level="QueryCoverage=46%, HitCoverage=12%, E-value=6e-14, Identity=84%"; Hit description=Heavy meromyosin-like protein (Fragment)
VDSISILPPIPFLLQVPPPPGSPRQKLEMQTQKLELLTSQRMAENVLXPIDTRSINDATMYADEGDEVVERVLGPRAHHLPARACRGTLHGDGDTVCVIARTCRRAP

SEQ ID NO: 72726 - protein, 628 aa, Setaria italica
  Transcript Sequence Number=SeqID_6752
  Homolog annotation: Hit_ID=Q84VA3; Match level="QueryCoverage=50%, HitCoverage=65%, E-value=4e-75, Identity=58%"; Hit description=Heavy meromyosin-like protein (Fragment)
MASAQAPSSSSAPSRKEHLEAGKKRLEQFRKKKAAKKATAIAASAEPAKPPAPDVVENPPPIASTASSGDGLVSDVEPNQESTSSVPSAVYESGSASSSRGAESLSNGPVSVNASAGVSNVTPQQDGVSDVGSKFYGNLSFSDLVNGHHENWRGDAALKRDEHSPDKDVQSTSKLSVFGNTNSLSLPSSTNTLPSWGRNSLSDQVRDTEQSSSYSSSTIFGKSESAYTQDYSTSNDLFGRLRATSKDSSKVEQSVYASSMDYGNTFSSSRITDSVDHDTNVGTWNAADSTPVNFEKQDPFLSSGYPTAYTRSRPSFLDSIGVQRTPPTTQASYGEPAKANQLSGNSNYQSSFLQQSNQQSTGSNVADNSLTSGNQEYRHEKGSYGSPTPPDFSLFKEERSIQHCNQTSQNFTTHWKDDDFAALEQLIEDLTKEKFSLQRTLQKSQELAENLATDNSALTDKFNQQAHVISQLTSDMERLQEEIQAQLLALESVRTEYANAQLECSAADERAKVLAAEVILLEDKALKLRSSELKLEKEVEGLHSEISSYRRKVSSLEKERQHLQSTVEALQEEKKLLYSKLRNIPVNEKATAATEKPSADKRDASTATVDLDTGEISSSETLTSTVDT

SEQ ID NO: 72727 - protein, 225 aa, Setaria italica
  Transcript Sequence Number=SeqID_6753
  Homolog annotation: Hit_ID=Q84VA3; Match level="QueryCoverage=92%, HitCoverage=48%, E-value=1e-79, Identity=78%"; Hit description=Heavy meromyosin-like protein (Fragment)
MHFNGPFLASCTDTPICISFEALQEEKKLLYSKLRNIPVNEKATAATEKPSADKRDASTATVDLDTGEISSSETLTSTVDTLEDAGTSILRSNNMSDFPSLEEVSSSIPDDQLRMIDNINSLMSELAVEREELLRALRIESSNCSKLKELNKDLTQKLEMQTQKLELLTSQRMANENVLAKPIDTRSINDATMYADEGDEVVERVLGWIMKLFPGGPKRRTSKLL

SEQ ID NO: 72728 - protein, 148 aa, Setaria italica
  misc_feature (5)..(5): Xaa can be any naturally occurring amino acid
  misc_feature (139)..(139): Xaa can be any naturally occurring amino acid
  Transcript Sequence Number=SeqID_6754
  Homolog annotation: Hit_ID=B6UHB5; Match level="QueryCoverage=87%, HitCoverage=42%, E-value=5e-35, Identity=64%"; Hit description=C2 domain containing protein
  Subcellular localization annotation: CTP_CleavageSite=51; ConfidenceScore=5.40e-01
SWHLXGDSLVGSARFLLGDHRLLRRPVGSPSMFAVGVRRPSGRVHGLLNLAASLVAVPPSPAACHALRLSPAVSLSGLSVAPNPSRVLRVLNRAHPTPPPSPKLLTPKKQQMAVTPKQQQMAVKPNNKVADDGSDEEGXEEEERGWAG

SEQ ID NO: 72729 - protein, 72 aa, Setaria italica
  Transcript Sequence Number=SeqID_6755
  Homolog annotation: Hit_ID=B6T3L8; Match level="QueryCoverage=100%, HitCoverage=26%, E-value=9e-30, Identity=87%"; Hit description =Replication protein A 32 kDa subunit
  Subcellular localization annotation: CTP_CleavageSite=24; ConfidenceScore=5.58e-01
MSQPDFSPSQFTSSQNAAADSTTPSKMRGASGTMPLTVKQIADAQQSGTGDKGAPFVVDGVETANIRLVGMV

SEQ ID NO: 72730 - protein, 176 aa, Setaria italica
  Transcript Sequence Number=SeqID_6756
  Gene Ontology: Mol. function=transcription regulator activity; Cellular component=nucleus; Biological process=regulation of transcription
  Homolog annotation: Hit_ID=A2Q2N8; Match level="QueryCoverage=96%, HitCoverage=29%, E-value=1e-14, Identity=35%"; Hit description=Helix- loop-helix DNA-binding (Fragment)
PFVFLVDDEFPYSGIFSLTDTDQLLDAVISNVNPGGKQISGDSASCKTSVTDIPSSSYCRSKEPKRCESSVAPSSLIKNELAVSNLVKQPSFLEKADDGCLSQNNGIHKSQIRLWIESGQNMKCESASASNSKGVDTSSKASRKRSRPGENPKLTVLWSWLRMDRIKELRELVLWG

SEQ ID NO: 72731 - protein, 634 aa, Setaria italica
  Transcript Sequence Number=SeqID_6757
  Gene Ontology: Mol. function=transcription regulator activity; Cellular component=nucleus; Biological process=regulation of transcription
  Homolog annotation: Hit_ID=A2Q2N8; Match level="QueryCoverage=59%, HitCoverage=65%, E-value=1e-97, Identity=51%"; Hit description=Helix- loop-helix DNA-binding (Fragment)
  Pfam annotation: Domain name=HLH; Domain location=425-477; Score=2.3; E_value=0.098; Accession=PF00010.18; Description=Helix-loop-helix DNA- binding domain
  Subcellular localization annotation: CTP_CleavageSite=3; ConfidenceScore=5.37e-01
QTKQSYRDSRLGTNTQSVAMSSGLISPSLTSVKKQSLLMNGIGELEFSNNAHSSADLARNVILRSLVHQDPSACENTNINIHRGRYVVSNDRNGHGDFDFLTVGARSSGANLCTSVPSQVLDHTSGTLQQKQSQVLSKVPQSSEISKKMANPERGSFRVPSAPASESDGQVSSSLNVGQENQLSRSNHLRPDQNINRVNDPSANVSTQGMKNLDVCELPGMPSERASSLLVEPAADNDLFGMFGAEFNQFTHSVGADLVSWSGAESQNSDRNVPEPSTYLDNSPLFSSLDTELHCSGMFSLTETDQLLDAVISNINPSGKQCPDDSASCKTALTDAPSTSHLGPKDLKQCESSGVPSVLIKHESVQFVKQPCFFEKPEDGCLSQNNGMHKSQIRLWIESGQNMKCESTSASNSKGVDTSSKASRKRSRPGENPKPRPKDRQLIQDRIKELRELVPNGAKCSIDALLEKTIKHMLFLQSVTKHADNLKDSNESKILGGENGPLKDYFEGGATWAFDVGSQSMTCPIIVEDLDRPRQMLVEMLCEDRGIFLEIADFIKGLGLTILRGVMEARKNKIWARFTVEANRDVTRMEIFLSLMRLLEPSCDGGGAGENPNNVKVPLGVVQYPVIPATGHLR

SEQ ID NO: 72732 - protein, 121 aa, Setaria italica
  Transcript Sequence Number=SeqID_6758
  Subcellular localization annotation: CTP_CleavageSite=50; ConfidenceScore=5.30e-01
LPAQWNHHPPFPFLPSTSRILLQSLPNMRPQVTVRPWLQYPLQLTLLIPSLENGRALAGVHGFSSKMEAQGNSLDLRKLHLVCKGRFVLHFSFYLTSQSCSNSVANLYEMGRRPSSIHKSG

SEQ ID NO: 72733 - protein, 66 aa, Setaria italica
  Transcript Sequence Number=SeqID_6759
  Subcellular localization annotation: CTP_CleavageSite=58; ConfidenceScore=5.32e-01
YVQVHAVRADQSPKRLTACKYYGPSYSATHQRVRTASIARPNASARAPAAFLLFPRISARAVPEFH

SEQ ID NO: 72734 - protein, 256 aa, Setaria italica
  Transcript Sequence Number=SeqID_6760
  Gene Ontology: Mol. function=molecular_function; Cellular component =membrane; Biological process=auxin mediated signaling pathway
  Homolog annotation: Hit_ID=B6U3D7; Match level="QueryCoverage=81%, HitCoverage=61%, E-value=4e-71, Identity=64%"; Hit description =Nodulin protein
  Pfam annotation: Domain name=DUF6; Domain location=101-230; Score =44.9; E_value=3.2e-10; Accession=PF00892.12; Description=Integral membrane protein DUF6
  Pfam annotation: Domain name=DUF606; Domain location=105-227; Score= -59.1; E_value=0.041; Accession=PF04657.5; Description=Protein of unknown function, DUF606
  Pfam module annotation: Pfam domain module=DUF6::DUF606; Domain location=101-230::105-227
  Subcellular localization annotation: CTP_CleavageSite=25; ConfidenceScore=5.21e-01
FLIAVLLRCSSIQTLSFPALGLLVLSETTAPSFRVESLNMRNKAGAAKIIGTLMSFAGVMLLTLYKGVALTHQVEPSESPDHHAGKKSWTLGTLALLANCLCFSFWLLLQSKLTKKYPALYSSTAYMFLISSLQGGSLTAAIQRRASVWILTRPMEIVTVLYTGIMGSGVGYVVMTWCVEKRGPVFTSAFIPIIQIMVAMIDFFFLHENLYLGSVLGSILMILGLYILLWGKKRDASEASSSAKEAEEDKEKQVQS

SEQ ID NO: 72735 - protein, 451 aa, Setaria italica
  Transcript Sequence Number=SeqID_6761
  Gene Ontology: Mol. function=transferase activity, transferring glycosyl groups; Cellular component=integral to membrane
  Homolog annotation: Hit_ID=B6TKT5; Match level="QueryCoverage=100%, HitCoverage=100%, E-value=0.0, Identity=86%"; Hit description =Glycosyltransferase 5
  Pfam annotation: Domain name=Glyco_transf_34; Domain location=141 -385; Score=404.4; E_value=1.9e-118; Accession=PF05637.4; Description= galactosyl transferase GMA12MNN10 family
MWAERVVGERRMRQIQRFARNAKLTVVCLLLTVVVLRGTVGAGRFGTPQQDLIELRQHFVSHPHRALAEHHDARSRASTTTTTTSSSSSSSSGRGDDEPDPPPRTLRDPPYTLGPKISDWDEQRANWHRRHPETPPFLNDVKPRVLLVSGSSPKPCENPVGDHYLLKSIKNKIDYCRVHGLEIFYNMALLDAEMAGFWAKLPLMRALLLAHPEVEFIWWMDSDAMFTDMAFELPWERYGPYNLIMHGWDEMIYDDKNWIGLNTGSFLLRNCQWSLDMLDTWAPMGPKGPVRIEAGKVLTKSLKDRPVFEADDQSAMVYILATQREKWGDKVYLENGYYLHGYWGILVDRYEEMLENYKPGLGDHRWPLVTHFVGCKPCGKFGDYPVERCLKQMDRAFNFGDNQILQMYGFTHKSLASRRVKRIRNETSNPLEMKDELGLLHPAFKAVKTST

SEQ ID NO: 72736 - protein, 212 aa, Setaria italica
  Transcript Sequence Number=SeqID_6762
  Gene Ontology: Mol. function=protein binding; Cellular component =membrane; Biological process=protein amino acid glycosylation
  Homolog annotation: Hit_ID=B9RNW9; Match level="QueryCoverage=86%, HitCoverage=83%, E-value=4e-91, Identity=85%"; Hit description =Stromal cell-derived factor 2, putative
  Pfam annotation: Domain name=MIR; Domain location=49-210; Score=50.8; E_value=5.2e-12; Accession=PF02815.11; Description=MIR domain
FALALLLYLGLDLPEAAPAQSYAADPDTVVEITYGSVIKLMHERTKFRLHSHDVPYGSGSGQQSVTSFPNVDDANSYWIVRPQPGSSGKQGDPIAHGTIIRLQHMRTRKWLHSHLHASPITGNLEVSCFGGENESDTGDYWRLEIEGSGKTWRQDQRIRLRHVDTGGYLHSHDRKYTRIAGGQQEVCGVGDKRPDNLWLAAEGVYLPVIQRK

SEQ ID NO: 72737 - protein, 103 aa, Setaria italica
  misc_feature (55)..(55): Xaa can be any naturally occurring amino acid
  misc_feature (69)..(69): Xaa can be any naturally occurring amino acid
  Transcript Sequence Number=SeqID_6763
  Gene Ontology: Mol. function=transferase activity, transferring glycosyl groups; Cellular component=chloroplast
  Homolog annotation: Hit_ID=Q575Z7; Match level="QueryCoverage=98%, HitCoverage=12%, E-value=6e-25, Identity=63%"; Hit description =Alkaline alpha galactosidase 2
MKLWLMSLQDLAPGFRFAPIGLVDMFNSGGAVEGLTYHLLDGAKLVDGQTAPLLXSEAVGLVCMEVRGXGRFGAYSSVRPRKCMMGSSELEFSYDSSSGLLTL

SEQ ID NO: 72738 - protein, 51 aa, Setaria italica
  Transcript Sequence Number=SeqID_6764
  Gene Ontology: Cellular component=anchored to membrane
  Homolog annotation: Hit_ID=B6SPA0; Match level="QueryCoverage=74%, HitCoverage=52%, E-value=2e-11, Identity=86%"; Hit description=AGP20
  Pfam annotation: Domain name=DUF1070; Domain location=1-40; Score =61.2; E_value=3.9e-15; Accession=PF06376.4; Description=Protein of unknown function (DUF1070)
AAAAHAQPPAPPPTSDGTSIDQGIAYVLMLIALVLTYLIHPLDAASPYKLF

SEQ ID NO: 72739 - protein, 38 aa, Setaria italica
  Transcript Sequence Number=SeqID_6765
  Gene Ontology: Mol. function=hydrolase activity, acting on ester bonds; Biological process=DNA catabolic process
  Homolog annotation: Hit_ID=B6T329; Match level="QueryCoverage=89%, HitCoverage=11%, E-value=4e-12, Identity=97%"; Hit description =Nuclease PA3
DYFFAALPVVQKRIAQGGVRLAAILNKIFGGNSRLQSS

SEQ ID NO: 72740 - protein, 148 aa, Setaria italica
  Transcript Sequence Number=SeqID_6766
  Gene Ontology: Mol. function=protein binding; Biological process =protein metabolic process
  Homolog annotation: Hit_ID=Q6Z517; Match level="QueryCoverage=88%, HitCoverage=13%, E-value=2e-36, Identity=62%"; Hit description=101 kDa heat shock protein; HSP101-like protein
HAPLPVPPPPLPRLGVPNAYINPRLAAAGGGGGDDARKVLDVMLKPARRNPVLVGDAGPDAVLKEAVRRIPTAGSPVLAGAKVLPLEGELAKLADDKAALAARIGNLAAVVERLVADHGAVVLDLGDLKWLVDGPAAAASDGGKAVVS

SEQ ID NO: 72741 - protein, 74 aa, Setaria italica
  Transcript Sequence Number=SeqID_6767
MVMDSSVLMDIMLKEVGGTDIFRGLTSLVDVGGGLGVAAMAIARAFPHIKCTVLDLEQVISQAPSSDGTVEFIT

SEQ ID NO: 72742 - protein, 118 aa, Setaria italica
  Transcript Sequence Number=SeqID_6768
  Gene Ontology: Mol. function=amine oxidase activity; Biological process=cellular amine metabolic process
  Homolog annotation: Hit_ID=Q9SW88; Match level="QueryCoverage=92%, HitCoverage=16%, E-value=8e-21, Identity=49%"; Hit description=Amine oxidase
  Pfam annotation: Domain name=Cu_amine_oxidN2; Domain location=29-116; Score=86.7; E_value=8.3e-23; Accession=PF02727.8; Description=Copper amine oxidase, N2 domain
TRFAPWGCRQANRMTKPKPPSHEDDVPRHPLDPLTIGEINRARELLRAHPPFASSPSSLFVHSLALDEPEKAVVLGWRKGDPLPPRHAVAVVRFRGEASVLAVDLAGSAVTPLPVPAS

SEQ ID NO: 72743 - protein, 58 aa, Setaria italica
  Transcript Sequence Number=SeqID_6769
ERCTTLMNHQSCNQTFNEEKMHFGALMGIEGDSSPEYEHNVKLSSNFMSRPLMLSEQY

SEQ ID NO: 72744 - protein, 86 aa, Setaria italica
  Transcript Sequence Number=SeqID_6770
RIGVCDSQSVGSNRADYITVALYYLLLLGFLALGLLSHWDFDLTEQGCICLNSQWLFSYQYVRRWQIFLQSTCSVHLRKKSSCSVE

SEQ ID NO: 72745 - protein, 146 aa, Setaria italica
  misc_feature (16)..(16): Xaa can be any naturally occurring amino acid
  Transcript Sequence Number=SeqID_6771
  Gene Ontology: Cellular component=endoplasmic reticulum membrane; Biological process=GPI anchor biosynthetic process
  Homolog annotation: Hit_ID=B6T4P5; Match level="QueryCoverage=50%, HitCoverage=16%, E-value=9e-34, Identity=93%"; Hit description=GPI transamidase subunit PIG-U family protein
  Pfam annotation: Domain name=PIG-U; Domain location=1-78; Score= -55.7; E_value=0.00063; Accession=PF06728.5; Description=GPI transamidase subunit PIG-U
CVPSHLAEMQFTFFLXFGYIGVSLLSPVMHNLWIWRGTGNANFYFATGLAYTCLQTVLVVESVGSMIKHDRKLRLLVDRVNLVPKLQKSYWCSRSQTARHPGVCRCSSHFAYHVVLYTPTFVHYKDFNSLTKGQKTRGTRKASPSD

SEQ ID NO: 72746 - protein, 57 aa, Setaria italica
  Transcript Sequence Number=SeqID_6772
  Gene Ontology: Cellular component=endoplasmic reticulum membrane; Biological process=GPI anchor biosynthetic process
  Homolog annotation: Hit_ID=B6T4P5; Match level="QueryCoverage=100%, HitCoverage=12%, E-value=7e-22, Identity=87%"; Hit description=GPI transamidase subunit PIG-U family protein
WMTVVHFIFWLFIWSCYVLLLSSIILKKVGGLNEMFGKTYGFILTVKDLSPNIGVLW

SEQ ID NO: 72747 - protein, 116 aa, Setaria italica
  Transcript Sequence Number=SeqID_6773
  Gene Ontology: Cellular component=endoplasmic reticulum membrane; Biological process=GPI anchor biosynthetic process
  Homolog annotation: Hit_ID=B6T4P5; Match level="QueryCoverage=67%, HitCoverage=17%, E-value=3e-35, Identity=91%"; Hit description=GPI transamidase subunit PIG-U family protein
  Pfam annotation: Domain name=PIG-U; Domain location=24-116; Score =29.6; E_value=2.1e-09; Accession=PF06728.5; Description=GPI transamidase subunit PIG-U
ASSCKRFLLFPIDRFSFVTKLPTVLWLCRTYGFILTVKDLSPNIGVLWYFFAEVFDFFRSFFLIVFNMNIIFMVLPLAIRLKHRPCFLAFVYTAIIAMLKSYPSVSMLFVILYDYF

SEQ ID NO: 72748 - protein, 223 aa, Setaria italica
  Transcript Sequence Number=SeqID_6774
  Gene Ontology: Cellular component=endoplasmic reticulum membrane; Biological process=GPI anchor biosynthetic process
  Homolog annotation: Hit_ID=B6T4P5; Match level="QueryCoverage=90%, HitCoverage=45%, E-value=3e-78, Identity=71%"; Hit description=GPI transamidase subunit PIG-U family protein
  Pfam annotation: Domain name=PIG-U; Domain location=157-223; Score= -50.7; E_value=0.0003; Accession=PF06728.5; Description=GPI transamidase subunit PIG-U
AILLLTVLIYTFLAANVSAGDIASLIYLWNPWAIVTCVGSCTSPIENLMVVIMIYGACSRLAPLAAFGYVMATHLSLYPAILIVPVILLLGYGPDAPTTKVFLLKSSSSSKSDMRTSLKIQRFSWMTVLHFIFWLFIWSGYVLLLSSIILKKVDGLNEMFEKTYGFILTVKDLSPNIGVLWYFFAEVFDFFRSFFLTVFNMNIIFMVLPLAIQFSKVTKPVTV

SEQ ID NO: 72749 - protein, 399 aa, Setaria italica
  Transcript Sequence Number=SeqID_6775
  Gene Ontology: Cellular component=endoplasmic reticulum membrane; Biological process=GPI anchor biosynthetic process
  Homolog annotation: Hit_ID=B6T4P5; Match level="QueryCoverage=100%, HitCoverage=88%, E-value=1e-175, Identity=77%"; Hit description=GPI transamidase subunit PIG-U family protein
  Pfam annotation: Domain name=PIG-U; Domain location=228-399; Score =263.8; E_value=4.1e-76; Accession=PF06728.5; Description=GPI transamidase subunit PIG-U
  Subcellular localization annotation: CTP_CleavageSite=28; ConfidenceScore=5.25e-01
ASMSPYSGSMYHGSPLLLSVLGPLTRTRSGGKHAHVYCSLIFVAVDFLAAMLIRATGRRLQMSRNISLKSLDLTKAVNNSANVCAGGIASLIYLWNPWAIVTCVGSCTSPIENLMVVIMIYGACSRLAPLAAFGYVLATHLSLYPAILIVPVILLLGYGPDAPPSKVFLLKSSSASKSDMSEYDKRTSLEVQHFSWMTVVHFIFWLFIWSCYVLLLSSIILKKVGGLNEMFGKTYGFILTVKDLSPNIGVLWYFFAEVFDFFRSFFLIVFNMNIIFMVLPLAIRLKHRPCFLAFVYTAIIAMLKSYPSAGDSALYLGLLGLFANELAEMQFTFFLFFGYIGVSLLSPVMHNLWIWRGTGNANFYFATGLAYTCLQTVLVVESVGSMIKHDRKLRLLVTS

SEQ ID NO: 72750 - protein, 84 aa, Setaria italica
  Transcript Sequence Number=SeqID_6776
TWTGISTRHKTTRPTASAAGDDPPCSHTQPAKPAKCPLFGTLPTAPFITDKSFRRYAHMKTPWAAATSAKQLSYKQYYPRNLGS

SEQ ID NO: 72751 - protein, 245 aa, Setaria italica
  misc_feature (183)..(183): Xaa can be any naturally occurring amino acid
  Transcript Sequence Number=SeqID_6777
  Gene Ontology: Mol. function=nucleoside-triphosphatase activity
  Homolog annotation: Hit_ID=UPI000173928F; Match level="QueryCoverage =97%, HitCoverage=25%, E-value=9e-67, Identity=51%"; Hit description =ATP binding / ATPase/ nucleoside-triphosphatase/ nucleotide binding
EVYEINGDQVAVIFDPPPEKSHDGDEDITSKEENAKPTIYWVDSQDIAHDHDTESDDWHIALEALCEVLPSLQPIIVYFPDSSQWLSRAVSKSDRREFVQRVEEMFDRLTGPVVLICGQNILAAASKDKEHPSPLKRLVGGLKGQKYSRSSDISKLFTNSLTVPLPEEDEQLRVFNNQIEEDXKIIISSHNLVKLHKVLEEHDLSCVELLHVKSDGVVLTKQKAEKVVGWARSHYLSSLAKTFRF

SEQ ID NO: 72752 - protein, 100 aa, Setaria italica
  Transcript Sequence Number=SeqID_6778
  Gene Ontology: Mol. function=ATP binding
  Homolog annotation: Hit_ID=Q7X9J7; Match level="QueryCoverage=83%, HitCoverage=61%, E-value=4e-38, Identity=90%"; Hit description=P60 katanin (Fragment)
MLLAVVFCVVWIHFMPFLQNLCIAAAYRPVHELLEQENKGDMGSTKTSLRALKLDDLVQAKAKVSPSVAFDATSMNELRKWNEQYGEGGSRSKSPFGFGS

SEQ ID NO: 72753 - protein, 683 aa, Setaria italica
  misc_feature (351)..(351): Xaa can be any naturally occurring amino acid
  misc_feature (633)..(633): Xaa can be any naturally occurring amino acid
  misc_feature (671)..(671): Xaa can be any naturally occurring amino acid
  Transcript Sequence Number=SeqID_6779
  Gene Ontology: Mol. function=nucleoside-triphosphatase activity
  Homolog annotation: Hit_ID=UPI0001739034; Match level="QueryCoverage =98%, HitCoverage=67%, E-value=1e-173, Identity=47%"; Hit description= ATP binding / ATPase/ nucleoside-triphosphatase/ nucleotide binding
VGSSSSSREQEHPRLGERDQQEWLSGERFLTGCKRRESPFLTKRDRFRKEFPRRAVPWDKTGVSWNSFPYYVDQHAKQLLSECVASHLRHKDLALEYGSGLQSSSGRILLQSLPGTELYRERFVRALANELRVPILVLDSSVLAPYDCGEDCSESEEEDNHAESEDEGSESEVDGEGDEESGESDDDDSIKSVADLKKLVPCTLEEFAKRVVGIQESSSAAESSGTAESSEEEKRSLQKGDRVKYIGASVVVEADTRIILGQVPTQDGSKNAYTFISGRTLSNGQRGEVYEINGDQVAVIFDPPEEKAADGNKDEANKEQNAKPAVYWVDTQDIEHDHETRAPDWRTAVSXVCEVLPSLEPAIVYFPDSSQWLSRAVPRSNRREFVEKVEEMLDQLTGPLVLICGQNIAEASTEASKDKEPKTLLFHNMARLSHLTSSLKRLVGGLKGRKPSRSSDITKLFKNRLFIPLPKDDEQMRVLNNQIEEDKKIIISRHNLVELHKVLEEHGLSCEDLLHIKSEGIALTKQRAEMVVGWARSHYLSSAVNPSIKGDRLTIPRESLDLAIGRLKEQEASNKKPSESMKMLAKDEYERNFISAVVPPNEIGVKFDDIGALEDVKKTLDELVTLPMRRPEXLFSHGNLLRPCKGILLFGPPGTGKTLLAKALATEAGAXFISITGSTLTSK

SEQ ID NO: 72754 - protein, 436 aa, Setaria italica
  Transcript Sequence Number=SeqID_6780
  Gene Ontology: Mol. function=nucleoside-triphosphatase activity
  Homolog annotation: Hit_ID=UPI0001739034; Match level="QueryCoverage =70%, HitCoverage=30%, E-value=3e-85, Identity=49%"; Hit description =ATP binding / ATPase/ nucleoside-triphosphatase/ nucleotide binding
KLYRERFVRALAHELRVPLLVLDSTVLAPYDYGEDYSESEADDENAESEDEGSESEMEDEGDEDWTSNNEKSGESDDEDALKSVEDLKKSVDDLKKLVPCTIEEFAKRIVGSEESTASESSETPESPEDEKRPFQRGDRVKYVGDPAVSEADQRIILGKVPTQDGSRNAYTFISGRTLSNGQRGEVYEINGDQVAVIFDPPPEKSHDGDEDITSKEENAKPTIYWVDSQDIAHDHDTESDDWHIALEALCEVLPSLQPIIVYFPDSSQWLSRAVSKSDRREFVQRVEEMFDRLTGPVVLICGQNILAAASKDKEHPALMFHNLSRLSSLPSPLKRLVGGLKGQKYSRSSDISKLFTNSLTVPLPEEDEQLRVFNNQIEEDRKIIISRHNLVKLHKVLEEHDLSCVELLHVKSDGVVLTKQKAEKVVGWARSHYLSS

SEQ ID NO: 72755 - protein, 163 aa, Setaria italica
  Transcript Sequence Number=SeqID_6781
  Gene Ontology: Mol. function=nucleoside-triphosphatase activity
  Homolog annotation: Hit_ID=Q6YUV9; Match level="QueryCoverage=87%, HitCoverage=30%, E-value=1e-67, Identity=85%"; Hit description =Transitional endoplasmic reticulum ATPase-like
TNRPFDLDDAVIRRLPRRILVDLPDAKNRMKILKILLAKENLESDFRFDKLANVTEGYSGSDLKNLCIAAAYRPVHELLEQENKGDMGSTKTSLRALKLDDLVQAKAKVSPSVAFDATSMNELRKWNEQYGEGGSRSKSPFGFWQLTYSCSKVSHIVLGLGSV

SEQ ID NO: 72756 - protein, 422 aa, Setaria italica
  misc_feature (80)..(80): Xaa can be any naturally occurring amino acid
  Transcript Sequence Number=SeqID_6782
  Gene Ontology: Mol. function=nucleoside-triphosphatase activity
  Homolog annotation: Hit_ID=Q6YUV9; Match level="QueryCoverage=100%, HitCoverage=89%, E-value=0.0, Identity=83%"; Hit description =Transitional endoplasmic reticulum ATPase-like
  Pfam annotation: Domain name=AAA; Domain location=168-353; Score =262.8; E_value=8.1e-76; Accession=PF00004.21; Description=ATPase family associated with various cellular activities (AAA)
  Pfam annotation: Domain name=AAA_3; Domain location=168-294; Score= -17.2; E_value=0.029; Accession=PF07726.3; Description=ATPase family associated with various
  Pfam annotation: Domain name=AAA_5; Domain location=168-300; Score =4.5; E_value=0.0004; Accession=PF07728.6; Description=ATPase family associated with various
  Pfam annotation: Domain name=SRPRB; Domain location=164-332; Score= -77.7; E_value=0.075; Accession=PF09439.2; Description=Signal recognition particle receptor beta su
  Pfam module annotation: Pfam domain module=AAA::AAA_3::AAA_5::SRPRB; Domain location=168-353::168-294::168-300::164-332
FLNNQIEEDKKIIISRHNLVELHKVLEEHGLSCEDLLHIKSEGIALTKQRAEMVVGWARSHYLSSATHPSIKGDRLTIPXESLDIAIKRLKEQGITTKKSSQNLKVLAKDEYERNFISAVVPPNEIGVKFDDIGALEDVKRTLDELVTLPMRRPELFSHGNLLRPCKGVLLFGPPGTGKTLLAKALATEAGANFISITGSTLTSKWFGDAEKLTKALFSFASRLAPVIIFVDEVDSLLGARGGAFEHEATRRMRNEFMAAWDGLRSKESQRILILGATNRPFDLDDAVIRRLPRRIYVDLPDAQNRMKILKILLAKEKLESDFKFDELANATEGYSGSDLKNLCVAAAYRPVHELLEEEKKGGVSNESSYLRPLKLDDFIQAKAKVSPSVSYDATSMNELRKWNEQYGEGGSRTKSPFGFGN

SEQ ID NO: 72757 - protein, 74 aa, Setaria italica
  Transcript Sequence Number=SeqID_6783
MIETLQNNQQLLFMEVFIIAAWNIWKQRNNLIFENKQPSLSSWKHQLVEDATLQAHRFKSDKRAPFLAWIDSLR

SEQ ID NO: 72758 - protein, 232 aa, Setaria italica
  Transcript Sequence Number=SeqID_6784
  Gene Ontology: Mol. function=protein serine/threonine kinase activity; Biological process=protein amino acid phosphorylation
  Homolog annotation: Hit_ID=B9SF79; Match level="QueryCoverage=93%, HitCoverage=65%, E-value=3e-24, Identity=37%"; Hit description=ATP binding protein, putative
NCNGESLERSVSVPMNLGTSGCHKHSSGSLIPEQVLSPYMTADLERDEYCQRNPSIRNRSGPLLFRQMKDSRTHLSVAPEEPSEGKIIRRRGRFQVTSDSISQKVATSGCSSSRTNLPIGATRSNLKSSAILPTLQFLMQQNTMQKEVLSRLISSIEETSDDSEASTSGSYQSSGGPVREKELQSYVVQLQQSITELSDEVQRLKLRNNQLEQQIIALSKKDERLQTDDNQQ

SEQ ID NO: 72759 - protein, 562 aa, Setaria italica
  misc_feature (551)..(551): Xaa can be any naturally occurring amino acid
  Transcript Sequence Number=SeqID_6785
  Gene Ontology: Mol. function=protein serine/threonine kinase activity; Biological process=protein amino acid phosphorylation
  Homolog annotation: Hit_ID=A7L4B0; Match level="QueryCoverage=99%, HitCoverage=82%, E-value=0.0, Identity=63%"; Hit description=Protein kinase
  Pfam annotation: Domain name=Pkinase; Domain location=17-278; Score =238.3; E_value=1.9e-68; Accession=PF00069.17; Description=Protein kinase domain
  Pfam annotation: Domain name=Pkinase_Tyr; Domain location=17-278; Score=85.6; E_value=1.8e-22; Accession=PF07714.9; Description =Protein tyrosine kinase
  Pfam module annotation: Pfam domain module=Pkinase::Pkinase_Tyr; Domain location=17-278::17-278
MEHTLLSRRFPTNPDEYKLYEEIGEGVSASVYRALCVPLDIMVAIKVLDLEKCNNDLDGIRREVQTMSLIDHPNLLRAYCSFTNGHQLWVVMPYMAAGSALHIMKTSFPEGFDEPVIATLLREVLKALVYLHSQGHIHRDVKAGNILIDSNGAVKLADFGVSACMFDTGNRQRARNTFVGTPCWMAPEVMQQLHGYDYKADIWSFGITALELAHGHAPFSKYPPMKVLLMTLQNAPPGLDYERDKRFSKSFKDLVATCLVKDPRKRPPSEKLLKHSFFKHARSAEYLSRSILDGLPPLGERFRELKSKEAELLLNNKLGQESKEQLSQKEYIRGISGWNFNLEDLKNAAALIDSSNGTCHLEVRDNKVRDDSHDAYNDPELIYQERVNHGASGRPEEDEIQEVEDLNDALSSSFPSRPLEALKSCFDVCGADDPDRTAAHSRVQPNVGPVPVLQFPKIEHCKSANCNGESLERSVSVPMNLGTSGCHKHSSGSLIPEQVLSPYMTADLERDEYCQRNPSIRNRSGPLLFRQMKDSRTHLSVAPEEPSEGKXIRRRGRFQVTI

SEQ ID NO: 72760 - protein, 271 aa, Setaria italica
  Transcript Sequence Number=SeqID_6786
  Gene Ontology: Mol. function=transferase activity; Cellular component= chloroplast
  Homolog annotation: Hit_ID=B9R997; Match level="QueryCoverage=100%, HitCoverage=88%, E-value=1e-96, Identity=33%"; Hit description =Pentatricopeptide repeat-containing protein, putative
  Pfam annotation: Domain name=PPR; Domain location=119-153; Score =34.4; E_value=4.5e-07; Accession=PF01535.12; Description=PPR repeat
  Pfam annotation: Domain name=PPR; Domain location=14-48; Score=45.7; E_value=1.8e-10; Accession=PF01535.12; Description=PPR repeat
  Pfam annotation: Domain name=PPR; Domain location=154-188; Score =27.8; E_value=4.3e-05; Accession=PF01535.12; Description=PPR repeat
  Pfam annotation: Domain name=PPR; Domain location=189-223; Score =48.8; E_value=2.2e-11; Accession=PF01535.12; Description=PPR repeat
  Pfam annotation: Domain name=PPR; Domain location=224-258; Score =33.3; E_value=1e-06; Accession=PF01535.12; Description=PPR repeat
  Pfam annotation: Domain name=PPR; Domain location=49-83; Score=44.9; E_value=3.1e-10; Accession=PF01535.12; Description=PPR repeat
  Pfam annotation: Domain name=PPR; Domain location=84-118; Score=46.9; E_value=8.1e-11; Accession=PF01535.12; Description=PPR repeat
  Pfam module annotation: Pfam domain module=PPR::PPR::PPR::PPR::PPR::PP R::PPR; Domain location=119-153::14-48::154-188::189-223::224-258::49- 83::84-118
LRRMMNRGCMPDDFTYNTIIDGYCKRGLLQEATELLKDAVFKGFVPDRITYCSLINGLCAEGDVERALELFNEARAKDLKPDLVVYNSLVKGLCRQGLILHALQIMNEMVEDGCHPDIWTYNIVINGLCKMGNISDATVVMNDAIVKGYLPDVFTTNTSIDGYCKRLKLDRALQLVERMWTYGIAPDAITYNSVLNGLCKAGKSKEVNETFEEMILKGCRPNAITYNILIENFCKINQLEAASGVILRMSQEGLVPDAVSFNTLIHGFCRN

SEQ ID NO: 72761 - protein, 96 aa, Setaria italica
  Transcript Sequence Number=SeqID_6787
  Subcellular localization annotation: CTP_CleavageSite=66; ConfidenceScore=5.33e-01
NGTWRLPWPFPSIVESITNSQFTAPVWQHSTASCRPGQGEGQSPVTRGPLQQSSNLTAPRSADQLFQNKKKGSADPRPWTLVRIQLGYFILRLKMV

SEQ ID NO: 72762 - protein, 88 aa, Setaria italica
  Transcript Sequence Number=SeqID_6788
  Subcellular localization annotation: CTP_CleavageSite=75; ConfidenceScore=5.35e-01
MAMGMGMGMGMGMNQQQMGMGMGMNQQPMGMGMGMNQQPMGGMNMGMGMNQGMPMRPPMGMGPGGMPGAGYNQMGAAYGGQQPYGGYR

SEQ ID NO: 72763 - protein, 101 aa, Setaria italica
  misc_feature (21)..(21): Xaa can be any naturally occurring amino acid
  Transcript Sequence Number=SeqID_6789
  Gene Ontology: Mol. function=electron carrier activity; Cellular component=integral to membrane; Biological process=metabolic process
  Homolog annotation: Hit_ID=B9SY49; Match level="QueryCoverage=97%, HitCoverage=18%, E-value=2e-33, Identity=74%"; Hit description =Organic cation transporter, putative
RGRKPLAIGTMLLSGIFCTAXGSLIAGAGILRVVRMACGVVGIFGMAATYNLLFIYTAELFPTVVRNAALGCTAQAAQMGAIVAPLVVVLGERVPFAVFGA

SEQ ID NO: 72764 - protein, 75 aa, Setaria italica
  Transcript Sequence Number=SeqID_6790
  Gene Ontology: Mol. function=aldehyde dehydrogenase (NAD) activity; Cellular component=mitochondrial matrix; Biological process=response to cadmium ion
  Homolog annotation: Hit_ID=Q8LST4; Match level="QueryCoverage=98%, HitCoverage=13%, E-value=1e-27, Identity=82%"; Hit description =Mitochondrial aldehyde dehydrogenase
RRTGEVIAHVAEGDAEDVNRAVAAARKAFDVGPWPKMTAYERSRILLRFADLIEKHNDELARMASHCPMSPKQQA

SEQ ID NO: 72765 - protein, 104 aa, Setaria italica
  misc_feature (70)..(70): Xaa can be any naturally occurring amino acid
  Transcript Sequence Number=SeqID_6791
  Gene Ontology: Mol. function=oxidoreductase activity; Cellular component=mitochondrial matrix; Biological process=response to cadmium ion
  Homolog annotation: Hit_ID=Q8LST4; Match level="QueryCoverage=94%, HitCoverage=17%, E-value=4e-37, Identity=79%"; Hit description =Mitochondrial aldehyde dehydrogenase
TQRFFSDVQDGMKIAQEEIFGPVQSILKFKDLNEVIERANASQYGLAAGVFTKSLDTANTLTRALQGSVXFLGCNLSFRYVFDAGIPFGGYKQSGIGREKGVRT

SEQ ID NO: 72766 - protein, 72 aa, Setaria italica
  Transcript Sequence Number=SeqID_6792
  Homolog annotation: Hit_ID=Q8LST4; Match level="QueryCoverage=55%, HitCoverage=7%, E-value=8e-10, Identity=80%"; Hit description =Mitochondrial aldehyde dehydrogenase
  Subcellular localization annotation: CTP_CleavageSite=30; ConfidenceScore=5.65e-01
MASAARAAASSLASCCLLSRSSVAGRPAVAATLRTQVGTRGLLPGVLQRFSTAAVAEEPISPPVQVNYTKLL

SEQ ID NO: 72767 - protein, 101 aa, Setaria italica
  Transcript Sequence Number=SeqID_6793
PSSPACRLLSAGTDGIHLSCLVRAACQHTQRENLHLCAPDPCCRRAVLWESNRNQAARLLTSSSLPCAQPEIGGEAARAGAARRVRGPAQGGQAGRGRRRR

SEQ ID NO: 72768 - protein, 305 aa, Setaria italica
  misc_feature (87)..(87): Xaa can be any naturally occurring amino acid
  Transcript Sequence Number=SeqID_6794
  Gene Ontology: Mol. function=sequence-specific DNA binding; Cellular component=nucleus; Biological process=regulation of transcription, DNA-dependent
  Homolog annotation: Hit_ID=A3RG94; Match level="QueryCoverage=76%, HitCoverage=78%, E-value=1e-47, Identity=50%"; Hit description =WRKY13 transcription factor
  Pfam annotation: Domain name=WRKY; Domain location=92-152; Score =131.6; E_value=2.6e-36; Accession=PF03106.7; Description=WRKY DNA -binding domain
MSSAEDGYCSSDSPRAESPEESQAAAAADAESPRANKRERDLRDLHDLPASPSSPLPAAKRSRRSVEKRVVSVPLAECGDRPRAGRXEGPPPSDSWTWRKYGQKPIKGSPYPRGYYRCSSSKGCPARKQVERSRADPTVLLVTYTFEHNHESPQPKSSSCHQQGKPSPRPPAPKPEPVVEQAELGPEHELPEPEAPEQEQEQELEPEAEQEEQKVVVSLVAPETASTATVSPVAEEDESFDFGWFDQYPTWHRSAAYAPLLPPEEWERELQGEDALFAGLGELPECAVVFGRRRELSLEATAPCS

SEQ ID NO: 72769 - protein, 365 aa, Setaria italica
  misc_feature (14)..(14): Xaa can be any naturally occurring amino acid
  misc_feature (22)..(22): Xaa can be any naturally occurring amino acid
  misc_feature (49)..(49): Xaa can be any naturally occurring amino acid
  Transcript Sequence Number=SeqID_6795
  Gene Ontology: Mol. function=positive transcription elongation factor activity; Cellular component=chromosome; Biological process =regulation of transcription, DNA-dependent
  Homolog annotation: Hit_ID=B9I6M8; Match level="QueryCoverage=100%, HitCoverage=34%, E-value=1e-110, Identity=53%"; Hit description =Global transcription factor group
  Pfam annotation: Domain name=Rtt106; Domain location=277-362; Score= -7.7; E_value=0.013; Accession=PF08512.4; Description=Histone chaperone Rttp106-like
  Pfam annotation: Domain name=SPT16; Domain location=1-136; Score =60.2; E_value=7.5e-15; Accession=PF08644.3; Description=FACT complex subunit (SPT16CDC68)
  Pfam module annotation: Pfam domain module=Rtt106::SPT16; Domain location=277-362::1-136
GFMVPFHVCTVKKXEIRGDSKXVFVFITFNVPNTVSSLQDSGLQANISXLYLKSVTLLSRDRRHAEEVVQSMKILQEGVLERAKRASLVSQEKLQLHDGLTRDRIQLLDLWIRPALSGRGRKVFGALVAHVNGFQYTVSKSEKVDIMFGNIKHAFFQPAERDMITLLHFHLYNEIMVGNKKTRDVQFYIEVMDAVDSISLKRRSAWDPDEIEEEQRERARRREMNRQFELFVRRVDSIWSKPRFNQLALQFESPLQKLGFNGVHGRTSCFIAPSPSCLVQLIETPFLVTSLREVDIVCLERVVLGQKSFDMVFVFQDYTKDVVRIEVIPMTDLDKIKDWLNDCGLKYYESKLNLNWRKVLKTMMN

SEQ ID NO: 72770 - protein, 136 aa, Setaria italica
  Transcript Sequence Number=SeqID_6796
  Subcellular localization annotation: CTP_CleavageSite=67; ConfidenceScore=5.17e-01
VLVPDGGYEQACQQVKKSSSLSLSTSILGNMSTCRGFATRSYAILLFGVWTVEHPPGVLPSTMQSCSVMLVGTLILQPSTVEYSNFPSEGSYMLDMSCHNNFNMSWQSQNHCIQIAIARLYLITCLSRNICIQIIK

SEQ ID NO: 72771 - protein, 194 aa, Setaria italica
  Transcript Sequence Number=SeqID_6797
  Gene Ontology: Mol. function=translation initiation factor activity; Cellular component=transcription factor TFIID complex; Biological process=transcription initiation
  Homolog annotation: Hit_ID=B6T3B6; Match level="QueryCoverage=99%, HitCoverage=85%, E-value=2e-82, Identity=84%"; Hit description =Transcription initiation factor TFIID subunit 9B
  Pfam annotation: Domain name=TFIID-31kDa; Domain location=1-116; Score=130.2; E_value=6.6e-36; Accession=PF02291.7; Description =Transcription initiation factor IID, 31kD
VVRELLRSMGLGEGEYEPRVVHQFLDLAYRYVGDVLGDAQVYADHAGKAQIDADDVRLAIQAKVNFSFSQPPPREVLLELARNRNRIPLPKSIAPPGSIPLPPEQDTLLAQNYQLLPPLKPLPQVEETEDDNEEANPSMTPNPANPNPNYSQDQRGSEQQHTPQHGQRVSFQLNAVAAAAAKRPRMTMDQLNMT

SEQ ID NO: 72772 - protein, 46 aa, Setaria italica
  Transcript Sequence Number=SeqID_6798
  Homolog annotation: Hit_ID=Q0E0Y3; Match level="QueryCoverage=91%, HitCoverage=10%, E-value=4e-17, Identity=85%"; Hit description=RNA pseudourine synthase 7
LFGSYDGDEEGLWLHCVRYTGPDWSYECPYPDWAVLDSVSTKKMKS

SEQ ID NO: 72773 - protein, 90 aa, Setaria italica
  Transcript Sequence Number=SeqID_6799
KKSEQNYRKNLGKKFLRKFRKDMFRKILKNLKQKFVSKIVTKISWKKSRNKIREFFWKKETEKAKKPTGLAPPPPPGERTSVSVFTTRSL

SEQ ID NO: 72774 - protein, 102 aa, Setaria italica
  misc_feature (81)..(81): Xaa can be any naturally occurring amino acid
  Transcript Sequence Number=SeqID_6800
MACLEAPPPLDLRPATGLRGRKLQPWRLSLLSSSSCKAWTLVCRQLPICNAQSYTDELWVAAPQSPASVRSRLLAAEREEXKAVLSLFLRQKGLRSTLAARI

SEQ ID NO: 72775 - protein, 131 aa, Setaria italica
  Transcript Sequence Number=SeqID_6801
  Gene Ontology: Mol. function=oxidoreductase activity; Biological process=oxidation reduction
  Homolog annotation: Hit_ID=B6SZL1; Match level="QueryCoverage=91%, HitCoverage=46%, E-value=1e-47, Identity=76%"; Hit description =Tropinone reductase 2
  Pfam annotation: Domain name=KR; Domain location=19-130; Score=-60.2; E_value=0.0016; Accession=PF08659.2; Description=KR domain
  Pfam annotation: Domain name=adh_short; Domain location=19-129; Score= 18.7; E_value=8e-07; Accession=PF00106.17; Description=short chain dehydrogenase
  Pfam module annotation: Pfam domain module=KR::adh_short; Domain location=19-130::19-129
MAAAAGGRSMGERWSLAGATALVTGGSKGIGHAVVEELAAFGARVLTCSRSAADLEDCRRRWAEKGLAVTVSVCDVAVRADREKLMDTVKQTFDGKLDILVNNAGMLLFKPAAEYTAEEYSRLMATNLESC

SEQ ID NO: 72776 - protein, 321 aa, Setaria italica
  Transcript Sequence Number=SeqID_6802
  Gene Ontology: Mol. function=heat shock protein binding; Biological process=response to stress
  Homolog annotation: Hit_ID=Q2R254; Match level="QueryCoverage=90%, HitCoverage=19%, E-value=4e-52, Identity=54%"; Hit description=DnaJ domain containing protein, expressed
  Pfam annotation: Domain name=DnaJ; Domain location=66-127; Score =95.6; E_value=1.7e-25; Accession=PF00226.23; Description=DnaJ domain
MECNREEALKAREIAIKKLESKDFAGAKRIALKAQRIFPEIENIPQLLTVCEVQCAAEANINGMLDFYGILQVEVTADEMTIKKQYRKLVLSLHPDKNSYAGAESAFKFVAEAYTTLSDRAKRYAYDIKWRVASKAAPKQATQRTQAAEPTRATRPNQSTQTKQAAKPKQAARPKQTAKPKQATQPNTAKEPEQATRPMQATELKQTNQPKQATEPVKTTERSNKNDANRSSTAGYGPSGSPPTDGWTFWTVCIHCETKYKYYGDVLNRQTRCQNCKQNFFAYKIGEEDVPSVFSSKAANGAGQQGCVPTQQGCSTNFSSK

SEQ ID NO: 72777 - protein, 166 aa, Setaria italica
  Transcript Sequence Number=SeqID_6803
  Gene Ontology: Mol. function=nucleotide binding; Biological process =defense response
  Homolog annotation: Hit_ID=Q2RB05; Match level="QueryCoverage=86%, HitCoverage=14%, E-value=4e-50, Identity=69%"; Hit description=NB -ARC domain containing protein, expressed
MELGTGAIGSLLPKLVELLKEEYGFHEGVRKKIKSLSRELESIHAVLRKVGEVHPDQLEELVKLWAHDVRELSYDMEDIVDTFLVRIDDGPEHVDARMLRRLRKKMAKIFKKCKHQRKIAGAIRDMNKRVEEVAARRDRYTVDNVIAKLASPATIDPRMQALYKKT

SEQ ID NO: 72778 - protein, 166 aa, Setaria italica
  Transcript Sequence Number=SeqID_6804
  Gene Ontology: Mol. function=nucleic acid binding
PAPAIAVGSRGVSPVPWYYHPSTTPPPPPPPPAAHYAHGAHQQYHGVLPFYPAATTYGYSPNYVADLSYNAKLGQAAAAAAGTAGSYMQGHFTYPAAQGGMVAPNGMMPVYPFYHYQYHGSQGLGVPAAHFFPPASAAAVATVPAIMSKPTVMAPPPKVEQVTGCS

SEQ ID NO: 72779 - protein, 75 aa, Setaria italica
  misc_feature (38)..(38): Xaa can be any naturally occurring amino acid
  misc_feature (54)..(54): Xaa can be any naturally occurring amino acid
  Transcript Sequence Number=SeqID_6805
PNETGMKIDQYYTDGELKEHDLLSRGAMQGGGAIATIXNRSSALAITLTSAPTXDRIIVCLYAPTQPTKLQMDLY

SEQ ID NO: 72780 - protein, 317 aa, Setaria italica
  misc_feature (138)..(138): Xaa can be any naturally occurring amino acid
  misc_feature (301)..(301): Xaa can be any naturally occurring amino acid
  Transcript Sequence Number=SeqID_6806
  Gene Ontology: Mol. function=protein serine/threonine phosphatase activity; Cellular component=protein serine/threonine phosphatase complex; Biological process=protein amino acid dephosphorylation
RRAFYHGPAFPTMSKILLSNVALKWLWKIQASARNEIYDSFFVKGPPTEVIQALVPALSEKEDSKEDHRTFCLNLERLLVLCLLDNKGVSQIVAEFTRSNKHGNDVLNPDKTIVVSRVAQLLASVPDKARLGTSAALXSTSFFKDVVSQLLAGAEAATVQLAADKDANEHCALSSVFLFVGEVLSRVSRRGSTGILVAELIPRICNHLHRCVPSDHKSISPEMIQHVSQSQFWFNIVETLKDQHSIERLTEELLRQLASQHISDEEAYWILWTLFNQSFKRLTVMRAMFVDKFLLWKTFPXCCLRWILHYAIFGYAH

SEQ ID NO: 72781 - protein, 275 aa, Setaria italica
  Transcript Sequence Number=SeqID_6807
  Gene Ontology: Mol. function=threonine-type endopeptidase activity; Cellular component=proteasome core complex; Biological process =ubiquitin-dependent protein catabolic process
  Homolog annotation: Hit_ID=B6TNX7; Match level="QueryCoverage=100%, HitCoverage=100%, E-value=1e-133, Identity=83%"; Hit description =Proteasome subunit alpha type
  Pfam annotation: Domain name=Proteasome; Domain location=29-214; Score=243.3; E_value=5.9e-70; Accession=PF00227.18; Description =Proteasome A-type and B-type
  Pfam annotation: Domain name=Proteasome_A_N; Domain location=6-28; Score=42.7; E_value=1.5e-09; Accession=PF10584.1; Description =Proteasome subunit A N-terminal signa
  Pfam module annotation: Pfam domain module=Proteasome::Proteasome_A _N; Domain location=29-214::6-28
MFRNQYDTDVTTWSPQGRLFQVEYAMEAVKQGSACVGLRSRTHAVLAAANKPASELSSYQRKVFRVAEHAGVALAGLTADGRVLSRFLRNECINHSFVYEAPLPVSRLALRLADKAQVCTQRSWKRPYGVGLLVAGLDESGAHLYYNCPSGNYFEYQAFAIGSRSQAAKTFLERRFEGYNDYTPEQLIKDALSAIKETLQGEKLTSANCTVAIVGRKDDGTIEPFEMIDAKRIQEIIDSMEAVEEAPAPAAAEAEAESSSMQEEERGSDAAPMDI

SEQ ID NO: 72782 - protein, 233 aa, Setaria italica
  Transcript Sequence Number=SeqID_6808
  Homolog annotation: Hit_ID=B6U0U6; Match level="QueryCoverage=100%, HitCoverage=91%, E-value=3e-95, Identity=74%"; Hit description =Calmodulin binding protein
RVKLQKRQEGAIKRERAIAYSYSQQLDGAAKCNPPKLNCNGRLNHSGMLLKHQNFDKTNGNWSWLERWMAARPWENRLMEEHNQTNSSSPDLRPTKNCEDSFGVLGDFSEPNSVKVRKNNVSKRVCAKPPGASHSQTHHQRFKAQSISSLSTELLNDESSASSSSCFASTPISLSTFVTSEKTEDTVRTRPNYMSMTESIKAKQKACNAQRMTTLKQSEDRKGMSAELKAVQV

SEQ ID NO: 72783 - protein, 36 aa, Setaria italica
  Transcript Sequence Number=SeqID_6809
KRPCNFDLKSKDKITAFGHVHVERMDEGTVLTSKLN

SEQ ID NO: 72784 - protein, 180 aa, Setaria italica
  Transcript Sequence Number=SeqID_6810
  Gene Ontology: Mol. function=drug transporter activity; Cellular component=membrane; Biological process=multidrug transport
  Homolog annotation: Hit_ID=Q10A00; Match level="QueryCoverage=100%, HitCoverage=37%, E-value=5e-64, Identity=72%"; Hit description=MATE efflux family protein, expressed
  Pfam annotation: Domain name=MatE; Domain location=1-122; Score=66.5; E_value=9.6e-17; Accession=PF01554.10; Description=MatE
AFMIPFGLSAAISTRVSNELGAGRPQAARLATRVVMVLAIVVGILIGLVMILVRNLWGYAYSNEEEVVKYISKMMPILAVSFLFDCVQCVLSGVARGCGWQKIGACVNLGAYYLVGIPAAFCFAFLFHLGGMGLWLGIICALVVQMLLLLTITLCSNWEKEALKATDRIFSSSLPVDMTT

SEQ ID NO: 72785 - protein, 81 aa, Setaria italica
  Transcript Sequence Number=SeqID_6811
RDRWGSDQDSESELRRAKLFDFDLVRTTLSVTVTLLLSVFTCRQRVTGGPPHRRICRPRHAGAGRNQPAAAAPANTPAASR

SEQ ID NO: 72786 - protein, 65 aa, Setaria italica
  Transcript Sequence Number=SeqID_6812
  Gene Ontology: Mol. function=heat shock protein binding
  Subcellular localization annotation: CTP_CleavageSite=35; ConfidenceScore=5.55e-01
PKAKTKPKTAAVPTVSKAPVAVTSTAPVYQGVFCRDMAVVGTLLSRGAGGGFDRALPVKCEAMSC

SEQ ID NO: 72787 - protein, 91 aa, Setaria italica
  misc_feature (83)..(83): Xaa can be any naturally occurring amino acid
  Transcript Sequence Number=SeqID_6813
  Gene Ontology: Mol. function=structural constituent of ribosome; Cellular component=ribonucleoprotein complex; Biological process =translation
  Homolog annotation: Hit_ID=B6T246; Match level="QueryCoverage=98%, HitCoverage=88%, E-value=1e-15, Identity=54%"; Hit description =Ribosomal protein L36
  Pfam annotation: Domain name=Ribosomal_L36; Domain location=1-38; Score=54.9; E_value=3.2e-13; Accession=PF00444.10; Description =Ribosomal protein L36
MKVRASVKRLCGFCKVVKRRGIVFIHCTANQKHKQRQGFSTIAEAAASCLHVPPPPPPPPPVSGSASAAAFAEASKVARQEMXYKFNWPLV

SEQ ID NO: 72788 - protein, 111 aa, Setaria italica
  Transcript Sequence Number=SeqID_6814
  Gene Ontology: Mol. function=heat shock protein binding; Cellular component=vacuole
  Homolog annotation: Hit_ID=B9RNG2; Match level="QueryCoverage=79%, HitCoverage=14%, E-value=3e-22, Identity=60%"; Hit description=Heat shock protein binding protein, putative
  Pfam annotation: Domain name=DnaJ; Domain location=29-106; Score=5.8; E_value=0.0012; Accession=PF00226.23; Description=DnaJ domain
EIAGAHRKLTARIQGLRSRVAAGEACNIDYYLLLGVRRGCTRSELERAHLLLSLKLKPDRAVVFGERLELVDEHRDLEAVRDQARMSATATATACQRLRLRRSVCGGFESG

SEQ ID NO: 72789 - protein, 108 aa, Setaria italica
  misc_feature (73)..(73): Xaa can be any naturally occurring amino acid
  Transcript Sequence Number=SeqID_6815
  Gene Ontology: Mol. function=heat shock protein binding; Cellular component=vacuole
  Homolog annotation: Hit_ID=B9RNG2; Match level="QueryCoverage=84%, HitCoverage=15%, E-value=1e-21, Identity=58%"; Hit description=Heat shock protein binding protein, putative
  Pfam annotation: Domain name=TPR_1; Domain location=16-49; Score =27.6; E_value=5e-05; Accession=PF00515.20; Description =Tetratricopeptide repeat
  Pfam annotation: Domain name=TPR_2; Domain location=16-49; Score =23.3; E_value=0.001; Accession=PF07719.9; Description=Tetratricopepti de repeat
  Pfam module annotation: Pfam domain module=TPR_1::TPR_2; Domain location=16-49::16-49
MADGALLDTTHDMCDVACLVGRAAAFQAGGRPADAIADCNRALALDPAYIPALRARADLLQSVGALADCLRDXLDHLKLLYDAALRDGKLPGPRWRPQGGVRYREIAG

SEQ ID NO: 72790 - protein, 226 aa, Setaria italica
  Transcript Sequence Number=SeqID_6816
  Gene Ontology: Mol. function=heat shock protein binding; Cellular component=vacuole
  Homolog annotation: Hit_ID=B9RNG2; Match level="QueryCoverage=98%, HitCoverage=36%, E-value=5e-53, Identity=50%"; Hit description=Heat shock protein binding protein, putative
  Pfam annotation: Domain name=TPR_1; Domain location=133-166; Score =28.8; E_value=2.1e-05; Accession=PF00515.20; Description =Tetratricopeptide repeat
  Pfam annotation: Domain name=TPR_2; Domain location=133-166; Score =24.5; E_value=0.00043; Accession=PF07719.9; Description =Tetratricopeptide repeat
  Pfam annotation: Domain name=TPR_2; Domain location=167-200; Score =0.2; E_value=32; Accession=PF07719.9; Description=Tetratricopeptide repeat
  Pfam annotation: Domain name=TPR_2; Domain location=3-36; Score=3.9; E_value=11; Accession=PF07719.9; Description=Tetratricopeptide repeat
  Pfam annotation: Domain name=TPR_2; Domain location=93-126; Score =4.1; E_value=10; Accession=PF07719.9; Description=Tetratricopeptide repeat
  Pfam annotation: Domain name=TPR_4; Domain location=133-158; Score =3.6; E_value=16; Accession=PF07721.6; Description=Tetratricopeptide repeat
  Pfam annotation: Domain name=TPR_4; Domain location=3-28; Score=12.8; E_value=1.3; Accession=PF07721.6; Description=Tetratricopeptide repeat
  Pfam annotation: Domain name=TPR_4; Domain location=93-118; Score =8.9; E_value=3.7; Accession=PF07721.6; Description=Tetratricopeptide repeat
  Pfam module annotation: Pfam domain module=TPR_1::TPR_2::TPR_2::TPR _2::TPR_2::TPR_4::TPR_4::TPR_4; Domain location=133-166::133-166::167- 200::3-36::93-126::133-158::3-28::93-118
DTQWRYLVLGQACFHLGLIEDAMVLLQTGRRLASAAFRRESVCWSDDSFTSSAAAAAVATVPSGKTSKSGSAFIIPAMESEAVSQLLAHVKLLLRRRAAAMAALDAGLPAEAVRHFSKILEARRGVLPHPFAAACLVGRAAAFQAGGRPADAIADCNRALALDPAYIPALRARADLLQSVGALADCLRDLDHLKLLYDAALRDGKLPGPRWRPQGGVRYREIAGAH

SEQ ID NO: 72791 - protein, 219 aa, Setaria italica
  misc_feature (12)..(12): Xaa can be any naturally occurring amino acid
  Transcript Sequence Number=SeqID_6817
  Gene Ontology: Mol. function=heat shock protein binding; Cellular component=vacuole
  Homolog annotation: Hit_ID=B9RNG2; Match level="QueryCoverage=100%, HitCoverage=33%, E-value=7e-35, Identity=41%"; Hit description=Heat shock protein binding protein, putative
  Pfam annotation: Domain name=DnaJ; Domain location=17-78; Score=7.2; E_value=0.0009; Accession=PF00226.23; Description=DnaJ domain
QGLRSRVAAGEXACNIDYYLLLGVRRGCTRSELERAHLLLSLKLKPDRAVVFGERLELVDEHRDLEAVRDQARMSALLLYRMLQKGYSFVMSAVLDEEAAERQRAKDAAAAAAAAAAAALAAKQEAAKQEPPQPVPEKSKTTETVRPRSPPGRAPKAKTKPKTAAVPTVSKAPVAVTSTAPVYQGVFCRDMAVVGTLLSRGAGGGFDRALPVKCEAMSC

SEQ ID NO: 72792 - protein, 235 aa, Setaria italica
  Transcript Sequence Number=SeqID_6818
  Gene Ontology: Cellular component=integral to membrane
  Homolog annotation: Hit_ID=Q10QE9; Match level="QueryCoverage=96%, HitCoverage=60%, E-value=9e-97, Identity=77%"; Hit description =UPF0496 protein 1
  Pfam annotation: Domain name=DUF677; Domain location=43-235; Score =115.5; E_value=1.8e-31; Accession=PF05055.4; Description=Protein of unknown function (DUF677)
MGNGHSSGSSRRPETSEPALPPEAAPAEELSSYEAACQSDPELRTFDTTLQRRTSRAISTLAVGVEVRSLSLDSLREVTGCLLDMNQEVVRVILDCKKDIWKSPELFDLVEDYFESSLHTLDFCTALDKCLKRARDSQLLLHVALQRFDDEEDAAAAAPSARYARTLHELRQFKAAGDPFTEEFFAAFQAVYRQQLTMLEKLQQRKHRLDKKIKTIKAWRRVSSIIFVVPTFRRS

SEQ ID NO: 72793 - protein, 83 aa, Setaria italica
  Transcript Sequence Number=SeqID_6819
  Subcellular localization annotation: CTP_CleavageSite=12; ConfidenceScore=5.31e-01
GPAASSAQQHIRLARPAPRRRQQRPCGGGGVERRRRRRRSMRQRGADGPRIGRALQLQLQQPDADVISYRCCKLASCSLQCVR

SEQ ID NO: 72794 - protein, 119 aa, Setaria italica
  misc_feature (94)..(94): Xaa can be any naturally occurring amino acid
  Transcript Sequence Number=SeqID_6820
  Gene Ontology: Mol. function=phosphoric diester hydrolase activity; Biological process=intracellular signaling cascade
  Homolog annotation: Hit_ID=B6TVN4; Match level="QueryCoverage=100%, HitCoverage=28%, E-value=9e-39, Identity=68%"; Hit description =Phospholipase C
MMAGDRVAPVPAVIVRLAAVGFLLILILCSSPAAVVVVSARTIGQTCALDRNCAAGLHCETCVANGNVRPRCTRVTPVDPQTKARDLPFNRYAXWLTTHNSFARLGQKSQTGVAIATPW

SEQ ID NO: 72795 - protein, 301 aa, Setaria italica
  Transcript Sequence Number=SeqID_6821
  Gene Ontology: Mol. function=protein serine/threonine kinase activity; Cellular component=integral to membrane; Biological process=protein amino acid phosphorylation
  Homolog annotation: Hit_ID=B9R6R4; Match level="QueryCoverage=95%, HitCoverage=53%, E-value=4e-63, Identity=32%"; Hit description =Receptor protein kinase CLAVATA1, putative
  Pfam annotation: Domain name=LRR_1; Domain location=117-142; Score =0.4; E_value=2.6e+02; Accession=PF00560.25; Description=Leucine Rich Repeat
  Pfam annotation: Domain name=LRR_1; Domain location=144-166; Score =9.6; E_value=4.3; Accession=PF00560.25; Description=Leucine Rich Repeat
  Pfam annotation: Domain name=LRR_1; Domain location=168-190; Score =13.0; E_value=1; Accession=PF00560.25; Description=Leucine Rich Repeat
  Pfam annotation: Domain name=LRR_1; Domain location=192-214; Score =13.0; E_value=0.97; Accession=PF00560.25; Description=Leucine Rich Repeat
  Pfam annotation: Domain name=LRR_1; Domain location=216-237; Score =8.2; E_value=8.3; Accession=PF00560.25; Description=Leucine Rich Repeat
  Pfam annotation: Domain name=LRR_1; Domain location=239-261; Score =10.3; E_value=3.3; Accession=PF00560.25; Description=Leucine Rich Repeat
  Pfam annotation: Domain name=LRR_1; Domain location=263-285; Score =13.0; E_value=0.97; Accession=PF00560.25; Description=Leucine Rich Repeat
  Pfam annotation: Domain name=LRR_1; Domain location=46-67; Score=2.1; E_value=1.2e+02; Accession=PF00560.25; Description=Leucine Rich Repeat
  Pfam annotation: Domain name=LRR_1; Domain location=69-90; Score=9.4; E_value=4.8; Accession=PF00560.25; Description=Leucine Rich Repeat
  Pfam annotation: Domain name=LRR_1; Domain location=92-115; Score =8.7; E_value=6.6; Accession=PF00560.25; Description=Leucine Rich Repeat
  Pfam module annotation: Pfam domain module=LRR_1::LRR_1::LRR_1::LRR _1::LRR_1::LRR_1::LRR_1::LRR_1::LRR_1::LRR_1; Domain location=117 -142::144-166::168-190::192-214::216-237::239-261::263-285::46-67::69- 90::92-115
  Subcellular localization annotation: CTP_CleavageSite=26; ConfidenceScore=5.31e-01
ATAADPCTFTGVACGTGRVVTGVSLRALNVSAASVPFADLCAALPSLTTLSLPENSLGGAIDGVVGCAALQELNLAFNGFSSTVPDLSPLTRLRRLNVSSNLFAGAFPWASLAKMPDLSVLALGDNPFLAATHAFPAEVTRLTNLTVLYLSAAKIGGAIPPEIGNLVNLVDLELSDNDLAGEIPKEIARLTNLNQLELYNNSLHGELPTGFGELTKLQYFDASMNNLTGSLAELRSLKELISLQLFSNNFSGEVPPEFGDFKELVNLSLYNNSLTGELPASLRVAWGLGNFTDLITLRFPL

SEQ ID NO: 72796 - protein, 239 aa, Setaria italica
  Transcript Sequence Number=SeqID_6822
  Gene Ontology: Mol. function=ATP binding; Cellular component=proton -transporting two-sector ATPase complex; Biological process=cellular metal ion homeostasis
  Homolog annotation: Hit_ID=B6TBL9; Match level="QueryCoverage=96%, HitCoverage=62%, E-value=4e-90, Identity=71%"; Hit description =Arsenical pump-driving ATPase
  Pfam annotation: Domain name=ArsA_ATPase; Domain location=1-239; Score=-38.5; E_value=3.6e-10; Accession=PF02374.7; Description=Anion- transporting ATPase
LCEDRGGTSFGSFINNVLGRMGLASANPFTLNEMLNRIPPGLEEAYALSELIKSIELQGTDKFRRIVLDAPSTGHTLKLLSANNWIEKLQDMLIKGVNAASFVPALKLSPENGQLISSRLEELRQQTARVRELLFDPRATEFIIVTIPTMMAVDESSRFHASLKKVRAHTRRLVVNQVLQPSASDCRFCAAKRREQARAFSAIREDRELGGLKLIQAPLLDVEVKGVPALRFLSDSVWK

SEQ ID NO: 72797 - protein, 163 aa, Setaria italica
  misc_feature (99)..(99): Xaa can be any naturally occurring amino acid
  misc_feature (122)..(122): Xaa can be any naturally occurring amino acid
  Transcript Sequence Number=SeqID_6823
  Gene Ontology: Mol. function=ATP binding; Cellular component=proton -transporting two-sector ATPase complex; Biological process=cellular metal ion homeostasis
  Homolog annotation: Hit_ID=B6TBL9; Match level="QueryCoverage=90%, HitCoverage=41%, E-value=1e-39, Identity=59%"; Hit description =Arsenical pump-driving ATPase
VGRTSMAASLAVKFAKHGEPTLIVSTDLTRSLCASFEQDWDVSDGKSVRIDGFDSLYATEIGCVKIEGETSFGSFINNVLGRMGLASANPFTLNEMLNXNPPGLEEAYALSELIKSIELQEXLDAPSTGHTLKLLSANNWIEKLQDMLIKVRFNVTSDFICYN

SEQ ID NO: 72798 - protein, 90 aa, Setaria italica
  Transcript Sequence Number=SeqID_6824
  Gene Ontology: Mol. function=protein serine/threonine kinase activity
  Homolog annotation: Hit_ID=Q336S1; Match level="QueryCoverage=94%, HitCoverage=8%, E-value=9e-18, Identity=50%"; Hit description =Protein kinase domain containing protein, expressed
KWSGEVTIRYERKRKVSDVSCFSTKRHRLLAPDSDLMEHSEQESNQLVAQTCAPAATGEVHLEVMQELQDRLPTISTFIGEPSLGLPTGA

SEQ ID NO: 72799 - protein, 55 aa, Setaria italica
  Transcript Sequence Number=SeqID_6825
NHVVIMQLDHLVSRTRAVSENTPKKESIKRRLGLGRFICCLQMMSRRFYSICLAL

SEQ ID NO: 72800 - protein, 145 aa, Setaria italica
  Transcript Sequence Number=SeqID_6826
EPMYSVEFEAIQGGHGCKVPPGKRDFLIPVDEKHDYDWLMTPPAAPLFPSLEIEANSSQMVFQRLLAKPEATKASARPASPTSNSSSRKTFIKGAPAISKEKKQPHTAGQRSDHKVPVNGHQKAAAAAVPAGTRTSGAPKKHSER

SEQ ID NO: 72801 - protein, 85 aa, Setaria italica
  Transcript Sequence Number=SeqID_6827
LDRWAENSAGEILSSVMFPQLKKLVIDKCDKLASLPRLPVLTYLNLSGRKGNNSIGALISMPLGSLPSLIHLRISFLLVDVVMPP

SEQ ID NO: 72802 - protein, 81 aa, Setaria italica
  Transcript Sequence Number=SeqID_6828
  Gene Ontology: Mol. function=nucleotide binding; Biological process =defense response
  Homolog annotation: Hit_ID=A8HI23; Match level="QueryCoverage=100%, HitCoverage=46%, E-value=1e-24, Identity=71%"; Hit description=NBS -LRR-like disease resistance protein (Fragment)
SVIELATNSTCDLPDTIELLRGKLQEAIGRKRFLLILDDVWNEDQNKWEDDLRPLLCSSIGGSGSKIVVTSRSRQVASIMG

SEQ ID NO: 72803 - protein, 82 aa, Setaria italica
  Transcript Sequence Number=SeqID_6829
  Gene Ontology: Mol. function=nucleotide binding; Biological process =defense response
INLNELLLYWDHFRDEYDKSTIDEATDHEQVLESLVPHDKLKILEVHSYGGLTISEWMGNPQMFRCLRELIMVFCLWCKDLP

SEQ ID NO: 72804 - protein, 65 aa, Setaria italica
  Transcript Sequence Number=SeqID_6830
PCDLLLCARSSCTVHFACLDQRDKKKLPWHRMEQASNFLYCPLPTELQVHPVISPNPTELQVQSI

SEQ ID NO: 72805 - protein, 87 aa, Setaria italica
  Transcript Sequence Number=SeqID_6831
TRPLPVQILCNCFLESGFTHSGVCIPIVVLGGHGCKVPPGKRDFLIPVDEKHDYDWYDRIKLEDEKHDYDWYDRIKLESLYPQPYSA

SEQ ID NO: 72806 - protein, 66 aa, Setaria italica
  Transcript Sequence Number=SeqID_6832
TIESVNHFPFGCIDPSVRSPVINYISVTCLQLIPASLGIAGKFGIFWVVFMCNLCRSLQTPDPLNC

SEQ ID NO: 72807 - protein, 157 aa, Setaria italica
  Transcript Sequence Number=SeqID_6833
  Gene Ontology: Mol. function=nucleotide binding; Biological process =defense response
  Homolog annotation: Hit_ID=Q6ZJF7; Match level="QueryCoverage=94%, HitCoverage=13%, E-value=1e-15, Identity=40%"; Hit description =Putative NBS-LRR resistance protein RGH1
HKKGKRNTYNELVWRSFFQHVILEREIDPPNDFDYPSKQEINGCKMHDLMHDLAKDVANECANAEELIQENLPVNDVRHLHISGKLKYQLNKISQLLGGTMYLRTLLTPESSYKDLLKSKLISSRALCFYCGDTSIVHMELTRTAHLRYLDLSGSKI

SEQ ID NO: 72808 - protein, 203 aa, Setaria italica
  misc_feature (91)..(91): Xaa can be any naturally occurring amino acid
  Transcript Sequence Number=SeqID_6834
  Gene Ontology: Mol. function=nucleotide binding; Cellular component =outer membrane-bounded periplasmic space; Biological process=defense response
  Homolog annotation: Hit_ID=Q6ZJF7; Match level="QueryCoverage=99%, HitCoverage=19%, E-value=8e-43, Identity=47%"; Hit description =Putative NBS-LRR resistance protein RGH1
  Pfam annotation: Domain name=LRR_1; Domain location=25-47; Score =11.1; E_value=2.3; Accession=PF00560.25; Description=Leucine Rich Repeat
  Pfam annotation: Domain name=LRR_1; Domain location=49-71; Score=7.9; E_value=9.4; Accession=PF00560.25; Description=Leucine Rich Repeat
  Pfam annotation: Domain name=LRR_1; Domain location=73-95; Score=4.9; E_value=35; Accession=PF00560.25; Description=Leucine Rich Repeat
  Pfam module annotation: Pfam domain module=LRR_1::LRR_1::LRR_1; Domain location=25-47::49-71::73-95
MSSRALRVHCGDISIIHMELTCTTHLRYLDLSDSMMIVSLPNSICMLYNLLSLRLNGCSRLQYLPEGMRTMRKLCHIYLLGCDRLERMPPXLSVLHNLRTLTTFVVGTKDGCGIEELEDLQQIGNRLELYNLREVKCGSKANLHEKHNLNELLLYWDHFHDEYDKSTIGEATNHEQVLESLVPHGELKTLEVHGYRGLTISQW

SEQ ID NO: 72809 - protein, 98 aa, Setaria italica
  Transcript Sequence Number=SeqID_6835
LIVTYCHVLDHPALQFTDRQVLDQSIRCWTRCSPVAPFACLDQRDKKKLPWHRMEQASNFYIVLCREKVEAPHTETIMLMQHKPARRHGLVNVEHRVQ

SEQ ID NO: 72810 - protein, 207 aa, Setaria italica
  Transcript Sequence Number=SeqID_6836
  Gene Ontology: Mol. function=nucleotide binding; Biological process =defense response
  Homolog annotation: Hit_ID=Q6ZJF7; Match level="QueryCoverage=84%, HitCoverage=16%, E-value=4e-47, Identity=60%"; Hit description =Putative NBS-LRR resistance protein RGH1
GRARKPCEQGNMAESLLLPVVRGVVGKAADALVQSITRMWGVDKDRLKLERHLEYVQSLLADAEAKSETNHAVRTWVKELKAAAYQADDVLDDFQYEALRREALSDQPRRRQVLSNFTSENRLVFCDKASRNLKNVLEKIDQLVTEMTKFGLVALAEAPPEALPRQTHSALDESMEIFGREDDKDRVVELLLDQQDRQDVQVLPIFG

SEQ ID NO: 72811 - protein, 115 aa, Setaria italica
  Transcript Sequence Number=SeqID_6837
LIVTYCHVLDHPALLCISRALISETRRSFRGTEWNRLLIFYIVLCREKGRGSSYGNDNAYAAQNQRGDTDWLMWSTASSDQSDGILENNHSASYLVYYGNRSDQVKVLPPSLQRL

SEQ ID NO: 72812 - protein, 426 aa, Setaria italica
  Transcript Sequence Number=SeqID_6838
  Gene Ontology: Mol. function=nucleotide binding; Cellular component =nucleus; Biological process=defense response
  Homolog annotation: Hit_ID=Q6ZJF7; Match level="QueryCoverage=99%, HitCoverage=41%, E-value=1e-103, Identity=49%"; Hit description =Putative NBS-LRR resistance protein RGH1
  Pfam annotation: Domain name=LRR_1; Domain location=170-191; Score =14.7; E_value=0.4; Accession=PF00560.25; Description=Leucine Rich Repeat
  Pfam annotation: Domain name=LRR_1; Domain location=193-215; Score =7.9; E_value=9.4; Accession=PF00560.25; Description=Leucine Rich Repeat
  Pfam annotation: Domain name=LRR_1; Domain location=217-239; Score =6.2; E_value=20; Accession=PF00560.25; Description=Leucine Rich Repeat
  Pfam annotation: Domain name=LRR_1; Domain location=356-377; Score =0.3; E_value=2.7e+02; Accession=PF00560.25; Description=Leucine Rich Repeat
  Pfam annotation: Domain name=LRR_1; Domain location=379-401; Score =3.3; E_value=70; Accession=PF00560.25; Description=Leucine Rich Repeat
  Pfam module annotation: Pfam domain module=LRR_1::LRR_1::LRR_1::LRR _1::LRR_1; Domain location=170-191::193-215::217-239::356-377::379-401
FIFPKDYEMEKDMLIQLWMANGYLHEEGTMDLTQKGEYVFNELAWRSFFQHVILVRVPYWPLHFSNQERCKMHDLMHDLAKDVANECANAEVLIKQNLPVNDVRHLHISEDYRLNKISQLLEGTMYLRTLLMPQSSYKDLVKSKLMSSRALRFYCEDTSIVHMELTRTAHLRYLDLSGSMIVSLPNSICMLYNLLSLRLNGCSRLQYLPEGMRTMRKLCHIYLLGCHRLERMPPKLSVLHNLRTLTTFVVGTKDGCGIEELEDLRHIGNRLELYNLRKVKCGSKANLHEKHNLNALLFYWDHFRGEYDKSTVGEATNHEQVLESLVPHDKLKILEVYSYGGLTISKWMRNPQMFRCLRELLMSGCPWCKDLPIVWLSSSLEYLCLRHMDSLTTLCKNIDVEAEADNTSLQIFPKLKRMELRSLPKL

SEQ ID NO: 72813 - protein, 215 aa, Setaria italica
  Transcript Sequence Number=SeqID_6839
  Gene Ontology: Mol. function=nucleotide binding; Biological process =defense response
  Homolog annotation: Hit_ID=Q6ZJF7; Match level="QueryCoverage=51%, HitCoverage=10%, E-value=2e-24, Identity=50%"; Hit description =Putative NBS-LRR resistance protein RGH1
  Pfam annotation: Domain name=LRR_1; Domain location=120-142; Score =5.7; E_value=25; Accession=PF00560.25; Description=Leucine Rich Repeat
  Pfam annotation: Domain name=LRR_1; Domain location=144-167; Score =4.9; E_value=36; Accession=PF00560.25; Description=Leucine Rich Repeat
  Pfam annotation: Domain name=LRR_1; Domain location=38-60; Score=2.2; E_value=1.2e+02; Accession=PF00560.25; Description=Leucine Rich Repeat
  Pfam annotation: Domain name=LRR_1; Domain location=62-93; Score=5.6; E_value=26; Accession=PF00560.25; Description=Leucine Rich Repeat
  Pfam annotation: Domain name=LRR_1; Domain location=96-118; Score =11.7; E_value=1.7; Accession=PF00560.25; Description=Leucine Rich Repeat
  Pfam module annotation: Pfam domain module=LRR_1::LRR_1::LRR_1::LRR _1::LRR_1; Domain location=120-142::144-167::38-60::62-93::96-118
SQRPLDTLRYLKLEGDDAFITIFNKSKLQLGLRDCLVSVEELDIRSLDIVRWPVEELRCFPRLRSLRISCCYKLEGKGSSSEEDGILPLLPEFPASLEEIWIDNNRSLVALPSNLGDLTKLRRLSVWSCNALKALPDGMDGLTSLEALTIFLCPGIEKFPQGLLQRLPALEFLSIYDCPDLERRCREGGEYFDLIASIPDKYIEAPEVTSAQPRN

SEQ ID NO: 72814 - protein, 280 aa, Setaria italica
  misc_feature (201)..(201): Xaa can be any naturally occurring amino acid
  misc_feature (215)..(215): Xaa can be any naturally occurring amino acid
  misc_feature (234)..(234): Xaa can be any naturally occurring amino acid
  Transcript Sequence Number=SeqID_6840
  Gene Ontology: Mol. function=nucleotide binding; Cellular component =intrinsic to membrane; Biological process=defense response
  Homolog annotation: Hit_ID=Q6ZJF7; Match level="QueryCoverage=98%, HitCoverage=26%, E-value=6e-73, Identity=54%"; Hit description =Putative NBS-LRR resistance protein RGH1
  Pfam annotation: Domain name=NACHT; Domain location=79-236; Score= -12.5; E_value=0.00074; Accession=PF05729.4; Description=NACHT domain
  Pfam annotation: Domain name=NB-ARC; Domain location=58-280; Score =81.9; E_value=2.3e-21; Accession=PF00931.14; Description=NB-ARC domain
  Pfam module annotation: Pfam domain module=NACHT::NB-ARC; Domain location=79-236::58-280
LVFRHKASRDLKNVLEKIDELVTEMTKFSLVALAEAPPQALPRQTHSALDESMEVFGREDDKDEVVKLLLDQQDRQHVQVLPILGMGGVGKTTLVKMVYNNDKIQKHFELRMWHCVSENFEVIPLVRSVIELATNSRCDLPDTIELLRGKLQEAIGRRRFLLILDDVWNEDRKKWEDDLRPLLCSSIGGSGSTIVVTSRSXKVALIMGTIVPPYXLVCLSEDDSWELFSKKAFXSKGVQEQAEFVKIGRCISEKCKGLPLVLKTMGGLMSSKQQIQELGG

SEQ ID NO: 72815 - protein, 238 aa, Setaria italica
  misc_feature (224)..(224): Xaa can be any naturally occurring amino acid
  Transcript Sequence Number=SeqID_6841
  Gene Ontology: Mol. function=nucleotide binding; Biological process =defense response
  Homolog annotation: Hit_ID=Q6ZJF7; Match level="QueryCoverage=70%, HitCoverage=16%, E-value=2e-25, Identity=40%"; Hit description =Putative NBS-LRR resistance protein RGH1
  Pfam annotation: Domain name=LRR_1; Domain location=130-152; Score =8.3; E_value=7.8; Accession=PF00560.25; Description=Leucine Rich Repeat
  Pfam annotation: Domain name=LRR_1; Domain location=154-176; Score =0.8; E_value=2.1e+02; Accession=PF00560.25; Description=Leucine Rich Repeat
  Pfam annotation: Domain name=LRR_1; Domain location=178-201; Score =10.7; E_value=2.7; Accession=PF00560.25; Description=Leucine Rich Repeat
  Pfam annotation: Domain name=LRR_1; Domain location=96-127; Score =2.4; E_value=1.1e+02; Accession=PF00560.25; Description=Leucine Rich Repeat
  Pfam module annotation: Pfam domain module=LRR_1::LRR_1::LRR_1::LRR _1; Domain location=130-152::154-176::178-201::96-127
MRMPLGSLSSLIRLRISFLLVDVVMPPDGKESQSQRPLDTLRYLELEGDEAFITIFNKSKLQLGLRDCLVFVEELCIISCPNIVRWPMEELHYFPRLRSLGICYCSKLEGKGSSSEEDGILPLLPKFPASLEEIMIKNNISLVALPSNLGDLVKLRRLIVLRCDALKALPDGMDGLTSLELLTIRDCPGIEKFPQGLLQRLPALKDLDIHGCPDLERRCREGGXYFDLIASIPDKDII

SEQ ID NO: 72816 - protein, 529 aa, Setaria italica
  misc_feature (28)..(28): Xaa can be any naturally occurring amino acid
  misc_feature (502)..(502): Xaa can be any naturally occurring amino acid
  Transcript Sequence Number=SeqID_6842
  Gene Ontology: Mol. function=nucleotide binding; Cellular component =intrinsic to membrane; Biological process=defense response
  Homolog annotation: Hit_ID=Q6ZJF7; Match level="QueryCoverage=97%, HitCoverage=48%, E-value=1e-174, Identity=61%"; Hit description =Putative NBS-LRR resistance protein RGH1
  Pfam annotation: Domain name=NACHT; Domain location=201-357; Score= -15.1; E_value=0.0012; Accession=PF05729.4; Description=NACHT domain
  Pfam annotation: Domain name=NB-ARC; Domain location=180-467; Score =281.7; E_value=1.7e-81; Accession=PF00931.14; Description=NB-ARC domain
  Pfam module annotation: Pfam domain module=NACHT::NB-ARC; Domain location=201-357::180-467
GRARKPCEQGNMAESLLLPVVRGVVGKXADALVQSITRMWGVDNDRLKLERHLKYVQYLLADAEAKSETNHAVRTWMKELKAAAYQADDVLDDFQYEALRREALSGQSMASKVLSNFTSKNRLVFRHKASRDLKNVLEKIDELVTEMTKFGLVALPEAPPQALPRQTHSALDESMEIIGRKDDKDGVVELLLDQQDRQHVQVLPILGMGGVGKTTLAKMVYNNDKIQKHFELRMWHCVSENFEAIPLVRSVIELATNSRCDLPDTIELLRGKLQEAIGRKRFLLILDDVWNEDKKKWEDDLRPLLCSSIGGSGSKIVVTSRSPQVASIMGTLPPHELVCLSEDDSWELFSKKAFSKGVQEQAEFVKFGRCISKKCKGLPLALKTMGGLMSSKQQIQEWEAIAACNISDTNRGKDEVLPILKLSYKHLSPEMKQCFAFCSVFPKDYLMEKDMLIQLWMANGYVHEEGTMDLTQKGEYVFNELAWRSFFQDVIPVRKPSWPSFXICLKTEINGCKMHDLMHDLAKYVANEC

SEQ ID NO: 72817 - protein, 377 aa, Setaria italica
  Transcript Sequence Number=SeqID_6843
  Gene Ontology: Mol. function=voltage-gated potassium channel activity; Cellular component=integral to membrane; Biological process=potassium ion transport
  Homolog annotation: Hit_ID=Q9SM12; Match level="QueryCoverage=88%, HitCoverage=39%, E-value=1e-161, Identity=83%"; Hit description =Potassium channel protein ZMK2
  Pfam annotation: Domain name=Ank; Domain location=180-211; Score=0.7; E_value=29; Accession=PF00023.22; Description=Ankyrin repeat
  Pfam annotation: Domain name=Ank; Domain location=212-244; Score =37.7; E_value=4.5e-08; Accession=PF00023.22; Description=Ankyrin repeat
  Pfam annotation: Domain name=Ank; Domain location=245-272; Score=1.7; E_value=21; Accession=PF00023.22; Description=Ankyrin repeat
  Pfam annotation: Domain name=Ank; Domain location=276-308; Score =11.3; E_value=0.84; Accession=PF00023.22; Description=Ankyrin repeat
  Pfam annotation: Domain name=Ank; Domain location=309-341; Score =24.6; E_value=0.00042; Accession=PF00023.22; Description=Ankyrin repeat
  Pfam annotation: Domain name=cNMP_binding; Domain location=59-148; Score=64.3; E_value=4.5e-16; Accession=PF00027.21; Description =Cyclic nucleotide-binding domain
  Pfam module annotation: Pfam domain module=Ank::Ank::Ank::Ank::Ank::cN MP_binding; Domain location=180-211::212-244::245-272::276-308::309 -341::59-148
MCLKFRAESLNQQQLMDQLPKSIYKSICERLFLPVVKDVYLFRGVSREGLLCLVTKMKPEYIPPREDVIVQDEAPDDVYVVVSGEVEVIRFDGAEERVEATLVSRDIFGEVSALSNRAQGFTFRTRTLSQLLRLKQATLKEAMQSRPEDSVVIIKNFLKVEMHGMKVEDLLAENAGEQDDANNVLTVAAMGNAGLLEDLLRAGKDADVGDAKGRTALHIAASKGYEDCVLVLLKHACNVNIKDAQGNTALWHAVAAGHHKIFNILYHFARVSSPRAGGDVLCLAARRNDVGALRELLKLGLDVDSEDHDGATALRVAMAEGHADAARFLIMNGASVDKAGLDDDDGSGSSSGSGAARLAMSPGELRELLKKRELGHQ

SEQ ID NO: 72818 - protein, 557 aa, Setaria italica
  Transcript Sequence Number=SeqID_6844
  Gene Ontology: Mol. function=nucleotide binding; Cellular component =outer membrane-bounded periplasmic space; Biological process=defense response
  Homolog annotation: Hit_ID=Q6ZJF7; Match level="QueryCoverage=96%, HitCoverage=40%, E-value=8e-66, Identity=49%"; Hit description =Putative NBS-LRR resistance protein RGH1
  Pfam annotation: Domain name=LRR_1; Domain location=13-35; Score=6.9; E_value=15; Accession=PF00560.25; Description=Leucine Rich Repeat
  Pfam annotation: Domain name=LRR_1; Domain location=201-223; Score =1.1; E_value=1.8e+02; Accession=PF00560.25; Description=Leucine Rich Repeat
  Pfam annotation: Domain name=LRR_1; Domain location=267-288; Score =11.6; E_value=1.8; Accession=PF00560.25; Description=Leucine Rich Repeat
  Pfam annotation: Domain name=LRR_1; Domain location=37-59; Score=3.9; E_value=54; Accession=PF00560.25; Description=Leucine Rich Repeat
  Pfam annotation: Domain name=LRR_1; Domain location=378-400; Score =2.2; E_value=1.2e+02; Accession=PF00560.25; Description=Leucine Rich Repeat
  Pfam annotation: Domain name=LRR_1; Domain location=402-433; Score =5.9; E_value=22; Accession=PF00560.25; Description=Leucine Rich Repeat
  Pfam annotation: Domain name=LRR_1; Domain location=436-458; Score =11.0; E_value=2.3; Accession=PF00560.25; Description=Leucine Rich Repeat
  Pfam annotation: Domain name=LRR_1; Domain location=460-482; Score =9.6; E_value=4.3; Accession=PF00560.25; Description=Leucine Rich Repeat
  Pfam annotation: Domain name=LRR_1; Domain location=484-507; Score =8.3; E_value=7.8; Accession=PF00560.25; Description=Leucine Rich Repeat
  Pfam module annotation: Pfam domain module=LRR_1::LRR_1::LRR_1::LRR _1::LRR_1::LRR_1::LRR_1::LRR_1::LRR_1; Domain location=13-35::201 -223::267-288::37-59::378-400::402-433::436-458::460-482::484-507
IVSLPNSICMLYNLLSLRLNDCYRLQYLPEGMRTMRKLCHIYLLGCDSLKRMPPKLSVLHNLRTLTTFVVGTKDGCGIEELEDLRHIGNRLELYNLREVKCGSKANLHEKHNLNELLLYWDHFRGKYDKSTISIGEASDHEQVLESLVPHDKLKIFELHGYGGHTISKWMRNPQMFRCLRELIMMGCRGCKDLPIVCLSSSLEHLCLGSMESLTTLCKNIDVEAEADNTSLQIFPKLKRMELRSLPELDRWAENSAGEILSSVTFPRLEELDIENCDKLAGLPRLPVLTYLDLSGREGNNSTGAVISMHMPLGSLPSLIRLIISFLLVDVVMPSDGEESHSQRPLDTLRCLKLEGDDAFTMIFNKSKLQLGLRDWLVSVEELDIRSLDIVRWPVEELRCFPRLRSLRIQDCSKLEGKGSSSEEDGILPLLPKFPASLEEIGINNNRSLVALPSNLGDLTKLRELKLRCCHALKALPDGMDGLTSLELLTIGECPGIEKFPQGLLHRLPALKRLCIDGCPDLQRRCREGGEYFDLIASIPHKYTKYDAEWLFSSMPSD

SEQ ID NO: 72819 - protein, 254 aa, Setaria italica
  misc_feature (18)..(18): Xaa can be any naturally occurring amino acid
  Transcript Sequence Number=SeqID_6845
  Gene Ontology: Mol. function=nucleotide binding; Biological process =defense response
  Homolog annotation: Hit_ID=Q6ZJF7; Match level="QueryCoverage=42%, HitCoverage=10%, E-value=3e-24, Identity=53%"; Hit description =Putative NBS-LRR resistance protein RGH1
  Pfam annotation: Domain name=LRR_1; Domain location=127-148; Score =10.6; E_value=2.9; Accession=PF00560.25; Description=Leucine Rich Repeat
  Pfam annotation: Domain name=LRR_1; Domain location=150-172; Score =7.5; E_value=11; Accession=PF00560.25; Description=Leucine Rich Repeat
  Pfam annotation: Domain name=LRR_1; Domain location=174-197; Score =12.5; E_value=1.2; Accession=PF00560.25; Description=Leucine Rich Repeat
  Pfam annotation: Domain name=LRR_1; Domain location=71-94; Score=3.9; E_value=56; Accession=PF00560.25; Description=Leucine Rich Repeat
  Pfam annotation: Domain name=LRR_1; Domain location=96-123; Score =1.2; E_value=1.8e+02; Accession=PF00560.25; Description=Leucine Rich Repeat
  Pfam module annotation: Pfam domain module=LRR_1::LRR_1::LRR_1::LRR _1::LRR_1; Domain location=127-148::150-172::174-197::71-94::96-123
MHMPLGSLPSLIRLIISXLLVDMVMPSDGEESQSQRPLDTLRYLELEGDDIFITIFNKSKLQLGLRDWLVSVEVLTISKCLNIVRWPVEELSCFPRLRSLRIWDCSKFEGKGSSSEEDGILPLLPASLEEIWINNTSLVALPSNLGDLTKLRELTVQHCDALKALPDGMDDLTSLEWLHIEHCPGIEKFPQGLLQRLPALKRLSIWGCPDLQRRCREGGEYFGLIASIPHKHIRAPAQPWKWFLPSCGGGSQGN

SEQ ID NO: 72820 - protein, 360 aa, Setaria italica
  Transcript Sequence Number=SeqID_6846
  Homolog annotation: Hit_ID=O04210; Match level="QueryCoverage=23%, HitCoverage=18%, E-value=1e-11, Identity=41%"; Hit description =En/Spm-like transposon protein
YSCNLCHSLQTPDPLNLLKQRCACFFKMNRVRKIAGIGKAKVPSAVQKDKDESIVFFRELYKREKDKDVNLLEPMYSVEFEAIQGGHGCKVPPGKRDFLIPVDEKHDYDWLMTPPAAPLFPSLEIEANSSQMVFQRVPIPTRQVKPSAPRLLAKPEATKASARPASPTSNSSSRKTFIKGAPAISKEKKQPHTAGQRSDHKVPVNGHQKAAAAAVPAGTRTSGAPKKHSERCYATQTGGTSATKGVTDQETPFKAPKNLITTTRSIFRRRTPSAENARSKDPGSGADVKKENGKARRQSYPPPAIRGMTELQLQDRRDALPPRGKSVAGSGGELATGNGGRAGRASLMKGTGRTDGRAWI

SEQ ID NO: 72821 - protein, 727 aa, Setaria italica
  misc_feature (135)..(135): Xaa can be any naturally occurring amino acid
  Transcript Sequence Number=SeqID_6847
  Gene Ontology: Mol. function=nucleotide binding; Cellular component =nucleus; Biological process=defense response
  Homolog annotation: Hit_ID=Q6ZJF7; Match level="QueryCoverage=96%, HitCoverage=56%, E-value=1e-100, Identity=45%"; Hit description =Putative NBS-LRR resistance protein RGH1
  Pfam annotation: Domain name=LRR_1; Domain location=153-174; Score =14.0; E_value=0.62; Accession=PF00560.25; Description=Leucine Rich Repeat
  Pfam annotation: Domain name=LRR_1; Domain location=176-198; Score =7.9; E_value=9.6; Accession=PF00560.25; Description=Leucine Rich Repeat
  Pfam annotation: Domain name=LRR_1; Domain location=200-222; Score =5.9; E_value=23; Accession=PF00560.25; Description=Leucine Rich Repeat
  Pfam annotation: Domain name=LRR_1; Domain location=339-362; Score =3.8; E_value=57; Accession=PF00560.25; Description=Leucine Rich Repeat
  Pfam annotation: Domain name=LRR_1; Domain location=428-449; Score =9.5; E_value=4.7; Accession=PF00560.25; Description=Leucine Rich Repeat
  Pfam annotation: Domain name=LRR_1; Domain location=539-561; Score =1.1; E_value=1.9e+02; Accession=PF00560.25; Description=Leucine Rich Repeat
  Pfam annotation: Domain name=LRR_1; Domain location=563-594; Score =6.9; E_value=15; Accession=PF00560.25; Description=Leucine Rich Repeat
  Pfam annotation: Domain name=LRR_1; Domain location=597-619; Score =6.2; E_value=20; Accession=PF00560.25; Description=Leucine Rich Repeat
  Pfam annotation: Domain name=LRR_1; Domain location=621-643; Score =6.3; E_value=19; Accession=PF00560.25; Description=Leucine Rich Repeat
  Pfam annotation: Domain name=LRR_1; Domain location=645-668; Score =8.1; E_value=8.7; Accession=PF00560.25; Description=Leucine Rich Repeat
  Pfam module annotation: Pfam domain module=LRR_1::LRR_1::LRR_1::LRR _1::LRR_1::LRR_1::LRR_1::LRR_1::LRR_1::LRR_1; Domain location=153 -174::176-198::200-222::339-362::428-449::539-561::563-594::597 -619::621-643::645-668
GYLHEEGTMDLTQKGEYVFNELAWRSFFQHVILVRGPYVPYFRYASKQEINGCKMHDLMHDLAKDVANECANAEELIQQNLPVNDVRHLHISRDDQLNKISQLLGGTMYLRTLLTPESSYKDLVKSKLMSSRAFXIRCGDTSIVHMELTRTAHLRYLDLSRSKIVSLPNSICMLYNLLSLRLNGCSQLQYLPEGMRTMRKLCHIYLLGCCKLERMPPKLSVLHNLRTLTTFVVGTKDGCGIEELEDLRQIGGMLELYNLREVKCGSKANLHGKHNLNELSLYWDHFSGKHDKSTIGEAANHEQVLESLVPHDKLKILEVRSYGGVTISQWMRNPQMFRCLRELIMSGCPWCKDLPIVWLSSSLEHLCLRGMERLTTLCKNIDLEAEADNTSLQIFPKLKRMELIALPELDRWAENSAGEILSSVMFSQLENLEIVGCDKLASLPRLPVLTYLNLSGREGNNSTGALISMRMPLGSLPSLIHLKISFLLVDVVMPPDDQESPSQRPLNTLRSLELGGDASFITIFNKSKLQLGLRDWLVSVEELNIGSLDIVRWPVEELRCFPRLRSLNIYDCSKLEGKGSSSEEDGILPLLPKFPASLEKIGFYRNTSLVALPSNLGDLVKLRILSVRSCDALKALPDGMDGLTSLELLIIAECPGIEKFPQGLLQRLPALKGLYIWSCPDLQRRCREGGEYFDLIASIPDKIIAAPAQAQPRKWFLPSCGGGSQGN

SEQ ID NO: 72822 - protein, 889 aa, Setaria italica
  Transcript Sequence Number=SeqID_6848
  Gene Ontology: Mol. function=nucleotide binding; Cellular component =intrinsic to membrane; Biological process=defense response
  Homolog annotation: Hit_ID=Q6ZJF7; Match level="QueryCoverage=97%, HitCoverage=77%, E-value=1e-172, Identity=43%"; Hit description =Putative NBS-LRR resistance protein RGH1
  Pfam annotation: Domain name=LRR_1; Domain location=374-395; Score =14.2; E_value=0.56; Accession=PF00560.25; Description=Leucine Rich Repeat
  Pfam annotation: Domain name=LRR_1; Domain location=397-419; Score =7.3; E_value=12; Accession=PF00560.25; Description=Leucine Rich Repeat
  Pfam annotation: Domain name=LRR_1; Domain location=421-443; Score =5.9; E_value=22; Accession=PF00560.25; Description=Leucine Rich Repeat
  Pfam annotation: Domain name=LRR_1; Domain location=560-581; Score =0.2; E_value=2.8e+02; Accession=PF00560.25; Description=Leucine Rich Repeat
  Pfam annotation: Domain name=LRR_1; Domain location=583-605; Score =4.7; E_value=38; Accession=PF00560.25; Description=Leucine Rich Repeat
  Pfam annotation: Domain name=LRR_1; Domain location=649-670; Score =2.3; E_value=1.1e+02; Accession=PF00560.25; Description=Leucine Rich Repeat
  Pfam annotation: Domain name=LRR_1; Domain location=758-781; Score =6.3; E_value=19; Accession=PF00560.25; Description=Leucine Rich Repeat
  Pfam annotation: Domain name=LRR_1; Domain location=783-803; Score =8.1; E_value=8.6; Accession=PF00560.25; Description=Leucine Rich Repeat
  Pfam annotation: Domain name=LRR_1; Domain location=805-828; Score =7.2; E_value=13; Accession=PF00560.25; Description=Leucine Rich Repeat
  Pfam annotation: Domain name=NB-ARC; Domain location=1-226; Score =121.5; E_value=2.8e-33; Accession=PF00931.14; Description=NB-ARC domain
  Pfam module annotation: Pfam domain module=LRR_1::LRR_1::LRR_1::LRR _1::LRR_1::LRR_1::LRR_1::LRR_1::LRR_1::NB-ARC; Domain location=374 -395::397-419::421-443::560-581::583-605::649-670::758-781::783 -803::805-828::1-226
LEAIPLVRSVIELATNSRCDLPNTIELLRGKLQEAIARKRFLLILDDVWNEDQNKWEDDLRPLLCSSIGGSGSKIVVTSRSRQVVSIMGTLPPHELVCLSEDDSWELFSKKAFSKGVQEQAEFVKIGRCISKKCKGLPLALKTMGGLMSSKYQIQEWEVIADCNISDTDRGKDEVLPILKLSYKHLSPEMKQCFAFCSVFPKDYEMEKDMLIQLWMANGYVHEEETMDLTQKGERIFNELVWRSFFQHVILEREIDPPNYFDYPSKQEINGCKMHDLMHDLAKDVASECANAEELIQQNLPVNDVRHLYISGKLKYQLNKISQLLGGTMYLRTLLMPESSYKDLLKSKLMSSRALCFYCGDTSIVHMELTRTAHLRYLDLSGSKIVNLPNSICMLYNLLSLRLNGCSQLQYLPEGTRTMRKLCHIYLLGCHSLERMPPKLSVLHNLRTLTTFVVGTKDGCGIEELEDLRQIGNRLELYNLREVKCGSKANLHEKHNLNELLLCWDHRDGKYDESTIGEYWNHERVLESLVPHDKLKILEVHNYSGLTISQWMRNPRMFRCLRELIMSGCPWCVDLPIVWLSSSLEHLSLQRMKSLTTLCKNIDVEGEADNTSLQIFLKLKRMELIALPELDRWAENSAGEILSSVTFPWLKKLEIENCDKLASLPRLPVLTYLKLSGREGNNSIGALISMPLGSLPSLIHLKISFLLVDVVMPSDGEESQSQRPLDTLRYLKLEGDDAFITIFNKSKLQLGLRDCLVSVKVLDIRCCPNIVRWPVEELRCFPRLRFLNIRGCPELQEISLDGLTSLEYLAIGECPGIKKFPQGLLQRLPALKFLYIWCCPDLQRRCREGGEYFDLIASIPDKDIEFEAPAQPQPRKWFLPSRGGGSQGN

SEQ ID NO: 72823 - protein, 1160 aa, Setaria italica
  Transcript Sequence Number=SeqID_6849
  Gene Ontology: Mol. function=nucleotide binding; Cellular component =nucleus; Biological process=defense response
  Homolog annotation: Hit_ID=Q6ZJF7; Match level="QueryCoverage=98%, HitCoverage=98%, E-value=0.0, Identity=52%"; Hit description =Putative NBS-LRR resistance protein RGH1
  Pfam annotation: Domain name=LRR_1; Domain location=1007-1038; Score =5.4; E_value=29; Accession=PF00560.25; Description=Leucine Rich Repeat
  Pfam annotation: Domain name=LRR_1; Domain location=1041-1063; Score =7.1; E_value=13; Accession=PF00560.25; Description=Leucine Rich Repeat
  Pfam annotation: Domain name=LRR_1; Domain location=1065-1087; Score =4.5; E_value=42; Accession=PF00560.25; Description=Leucine Rich Repeat
  Pfam annotation: Domain name=LRR_1; Domain location=1089-1112; Score =9.3; E_value=5; Accession=PF00560.25; Description=Leucine Rich Repeat
  Pfam annotation: Domain name=LRR_1; Domain location=602-623; Score =14.0; E_value=0.62; Accession=PF00560.25; Description=Leucine Rich Repeat
  Pfam annotation: Domain name=LRR_1; Domain location=625-647; Score =7.5; E_value=11; Accession=PF00560.25; Description=Leucine Rich Repeat
  Pfam annotation: Domain name=LRR_1; Domain location=649-671; Score =5.1; E_value=33; Accession=PF00560.25; Description=Leucine Rich Repeat
  Pfam annotation: Domain name=LRR_1; Domain location=810-832; Score =4.1; E_value=50; Accession=PF00560.25; Description=Leucine Rich Repeat
  Pfam annotation: Domain name=LRR_1; Domain location=876-897; Score =11.7; E_value=1.7; Accession=PF00560.25; Description=Leucine Rich Repeat
  Pfam annotation: Domain name=LRR_1; Domain location=983-1005; Score =1.6; E_value=1.5e+02; Accession=PF00560.25; Description=Leucine Rich Repeat
  Pfam annotation: Domain name=NACHT; Domain location=190-346; Score= -11.7; E_value=0.00064; Accession=PF05729.4; Description=NACHT domain
  Pfam annotation: Domain name=NB-ARC; Domain location=169-456; Score =288.7; E_value=1.3e-83; Accession=PF00931.14; Description=NB-ARC domain
  Pfam module annotation: Pfam domain module=LRR_1::LRR_1::LRR_1::LRR _1::LRR_1::LRR_1::LRR_1::LRR_1::LRR_1::LRR_1::NACHT::NB-ARC; Domain location=1007-1038::1041-1063::1065-1087::1089-1112::602-623::625 -647::649-671::...
  Pfam module annotation: Domain location=810-832::876-897::983 -1005::190-346::169-456
MAESLLLPVVRGVVGKAADALVQSITRMWGVDNDRLKLERHLVYVQSLLADAEAKSETNHAVRTWMKELKAAAYQADDVLDDFQYEALRREALSGQSMASKVLSNFTSKNRLVFRHKASRDLKNVLEKIDELVTEMTKFGLVALAEAPLQALPRQTHSALDESREIFGREDDKDGVVELLLDQQDRQDVQVLPILGMGGVGKTTLAKMVYNNDKIQKHFELRMWHCVSENFEAIPLVRSVIELATNSRCDLPDTIELLRGKLQEAIGRKRFLLILDDVWNEDQNKWEDDLKPLLCSSIGGSGSTIVVTSRSRQVASIMHTLPPHELVCLSEDDSWELFSKKAFSKGVQEQAEFVKIGRCISKKCKGLPLALKTMGGLMSSKQQIQEWEAIADCNISDTNRGKDEVLPILKLSYKHLSPEMKQCFAFCSVFPKDYEMEKDMLIQLWMANGYLHEEGTMDLTQKGEYVFNELAWRSFFQDVILVTKHYWSYSRHPSKQEINGCKMHDLMHDLAKDVANECANAEELIQQNLPVNDVRHLHISGHDQLNKISKLLGGTMYLRTLLTPESSYKDLMKSKLMSLRALRICCGDTSIVHMKLITRTAHLRYLDLSRSKIVSLPNSICMLYNLLSLRLNDCSQLQYLPEGMRTMRKLCHIYLLRCHRLERMPPKLSVLHNLRTLTRFVVGTKDGCGIEELEDLRQIGNRLELYNLREVKCGSKANLHEKHNLNELLLCWAHFYHGYDKFIGEATNHEQVLESLVPHDKLKFLEVHSYGGLTISQWMRNPQMFRCLRELIMTFCPWCKDLPIVWLSSSLELLSLRHMESLTTLCKNIDVEAEPDNTSLQIFPKLKWMELSFLPELDRWVENSAGEILSSVMFPQLEKLEIANCCKLASLPRLPVLTYLHLSRNEWSTGALISMPLGSLPSLIKLDISFLLVDVVMPPDDQESSSQRPLNTLRSLELEGDDAFIRIFNKSKLQLGLRDWLVSVEELNIRSLDIVRWPVEELRCFPRLRSLLINNCFKLEGKGSSSEEDGILPLLPKFPASLEEIVINYSTRLVALPSNLGDLVKLRRLSVKSCDALKALPDGMDGLTSLEELSIIDCPGIEKFPQGLLQRLPALKRLKIYGCPDLERRCREGGEYFDLIASIPDKYIEAPEVTSAQPRN

SEQ ID NO: 72824 - protein, 93 aa, Setaria italica
  misc_feature (19)..(19): Xaa can be any naturally occurring amino acid
  Transcript Sequence Number=SeqID_6850
  Subcellular localization annotation: CTP_CleavageSite=66; ConfidenceScore=5.71e-01
PGRLGGGAVAGSGDSLAPXVRFSHVALPSSSCSLVSCCSGLLSMFTDDASSPSSIPLCLASVFLGSCSARPQLCSCFRLQLVDGASEAVCSFL

SEQ ID NO: 72825 - protein, 141 aa, Setaria italica
  Transcript Sequence Number=SeqID_6851
  Gene Ontology: Mol. function=catalytic activity; Biological process =metabolic process
  Homolog annotation: Hit_ID=B6SV29; Match level="QueryCoverage=99%, HitCoverage=24%, E-value=3e-63, Identity=84%"; Hit description=Acyl -activating enzyme 11
VMKGYLNNPKANEEAFRGGWFLTGDVGVVHEDGYIEIKDRSKDVIISGGENICSKEVEEVLFRHPAVADAAVVAMPHPRWGETPCAFVVARDKAARVSEDDVLAFCSKRMARFMVPKKVVVMEALPRNGLGKVEKVKLREV

SEQ ID NO: 72826 - protein, 242 aa, Setaria italica
  misc_feature (91)..(91): Xaa can be any naturally occurring amino acid
  Transcript Sequence Number=SeqID_6852
  Gene Ontology: Mol. function=electron carrier activity; Biological process=oxidation reduction
  Homolog annotation: Hit_ID=A9UKL9; Match level="QueryCoverage=93%, HitCoverage=54%, E-value=1e-48, Identity=43%"; Hit description =Cytochrome P450
QDLITRLVFDLTATPIFGVDPGCLSISMPSIHVATAMDTFMEVGLFRHTMPACFWKVMRRLNIGPERKLAMAQTVMHAFIREMTEKSKASXPSVGRDDVLLRNVLIVHMIAGRDTVGTTLPWVFYNLARNPRVVSCIRKELAPIASLKATALASNSISSMVVFDPKETEPLVYLQAALLESLRLYPPGPIERKVVLADDVLPSGHQLWNFDMEVLEGQSIEPKLSCILQLKNGLMMMVKQRE

SEQ ID NO: 72827 - protein, 512 aa, Setaria italica
  Transcript Sequence Number=SeqID_6853
  Gene Ontology: Mol. function=electron carrier activity; Biological process=oxidation reduction
  Homolog annotation: Hit_ID=Q10S01; Match level="QueryCoverage=97%, HitCoverage=98%, E-value=1e-125, Identity=46%"; Hit description =Cytochrome P450 family protein, expressed
  Pfam annotation: Domain name=p450; Domain location=36-508; Score =60.8; E_value=5.3e-15; Accession=PF00067.14; Description=Cytochrome P450
MTLQAMALPYLQELVISTLLVVSLCMYIKFWRLRNPLYPMDWPVVGMLPSLVANLHNFHDELTVVLATNGCNFKARGPVASGMRFFVTAEPANVRHIFTSNHANYPKGEDFAEIFDIFSGTIFTIDGEAGRQHRAMFQNIFSNPRLLALMASCCRDKVVNGLLPFLTRMGSTRTTFDMQDLITRLVFDLTATPIFGVDPGCLSISMPSIHVATAMDTFMEVGLFRHTMPACFWKVMRRLNIGPERKLAMAQTVMHAFIREMTEKSKARCADLLDDVLAMDIISANPSVGRDDVLLRNVLIVHMIAGRDTVGTTLPWVFYNLARNPRVVSCIRKELAPIASLKATALASNSISSMVVFDPKETEHLVYLQAALLESLRLYPPGPIERKVVLADDVLPSGHQLCSGETILISIYAMGRMESLWGKDCHVYRPERWLSEDGAKLRYVPSNKFMAFNTGPRMCLGKDIAIAQMKTIVAAVVWNFDMEVLEGQSIEPKLSCILQLKNGLMMMVKQRE

SEQ ID NO: 72828 - protein, 84 aa, Setaria italica
  Transcript Sequence Number=SeqID_6854
GPALPGAGLAPQLLDALLHAAQRFSAAPAPRQLLTQICLALSALALRAEGGVDDLFARMPLLPAPAVLELLTVLPEEAAQDQGP

SEQ ID NO: 72829 - protein, 58 aa, Setaria italica
  Transcript Sequence Number=SeqID_6855
CLAAAAAAGGDANLYERSNALDDGTPFILNYRYFDFSKFIAFAIHLECTLCLGVYQNI

SEQ ID NO: 72830 - protein, 88 aa, Setaria italica
  Transcript Sequence Number=SeqID_6856
  Gene Ontology: Mol. function=transcription initiation factor activity; Cellular component=transcription factor TFIID complex; Biological process=transcription initiation
  Homolog annotation: Hit_ID=Q10IY9; Match level="QueryCoverage=82%, HitCoverage=11%, E-value=2e-11, Identity=47%"; Hit description =Transcription initiation factor TFIID component TAF4 family protein, expressed
QNAKQIVSQQAPSGAQDTRKGPSIPFNMLIPILQAHLDRDKDMQLQTVWAKLRRNEVHKDDLLKSHQEYCWDQMLKQAAIKVFLVPGL

SEQ ID NO: 72831 - protein, 406 aa, Setaria italica
  Transcript Sequence Number=SeqID_6857
  Gene Ontology: Mol. function=transcription initiation factor activity; Cellular component=transcription factor TFIID complex; Biological process=transcription initiation
  Homolog annotation: Hit_ID=B9R722; Match level="QueryCoverage=55%, HitCoverage=24%, E-value=4e-68, Identity=63%"; Hit description =Transcription initiation factor, putative
  Pfam annotation: Domain name=TAF4; Domain location=181-405; Score =235.0; E_value=1.8e-67; Accession=PF05236.6; Description =Transcription initiation factor TFIID component TAF4 family
  Subcellular localization annotation: CTP_CleavageSite=65; ConfidenceScore=5.26e-01
MNSAISLQTKNKQHQPTQFQQASQQIYGASNPGAQVYPQSITGSLRPPNPVPETQPSMHAHGMPPAKVAPPPTHPMMQHNAVAWQMHQNKELKTNTPPPNANAKQNSESAGKARTVGAGNSSAKGKQAPPNSSTPNASGGAKSNKKSGGQKKSSEAAGSTQPSSKKQKTSGAFQEQSIDQLNDVTAVSGVNIREEEEQLLSAPKEESLASQEARRIAQEEEEKLFLRKGPLLKKLTEIARKCNLKNVNLDVEHCLSMCVEERLRRFISTLIRVSKQRIDTEKTGHRLVITSDVGRQILQMNQKAKEEWDKKQAEEADKNKKQNEADGNGTAELEKEKEESRPKNAKPNKEEDDKMRTNAANVAARQAVGGSDMLSKWQLMAEQARQKREGLDVAAASQPGRGPVQG

SEQ ID NO: 72832 - protein, 215 aa, Setaria italica
  Transcript Sequence Number=SeqID_6858
  Gene Ontology: Mol. function=transcription initiation factor activity; Cellular component=transcription factor TFIID complex; Biological process=transcription initiation
  Homolog annotation: Hit_ID=B9R722; Match level="QueryCoverage=89%, HitCoverage=21%, E-value=3e-43, Identity=56%"; Hit description =Transcription initiation factor, putative
  Pfam annotation: Domain name=TAF4; Domain location=1-205; Score =152.5; E_value=1.3e-42; Accession=PF05236.6; Description =Transcription initiation factor TFIID component TAF4 family
TTKSSSGNTAIHDGHRLVITSDVGRQILQMNQKAKEEWDKKQAEEADKNKKQNEADGNGTAELEKEKEESRPKNAKPNKEEDDKMRTNAANVAARQAVGGSDMLSKWQLMAEQARQKREGLDVAAASQPGRGPGPRPLSKFGKGLGENQEGAKRSHSSAFGTGMKRPGRTPFAGPQRTITVKDVICALEREPQMTKSRLIYLLHERLPGGDSTAD

SEQ ID NO: 72833 - protein, 119 aa, Setaria italica
  misc_feature (105)..(105): Xaa can be any naturally occurring amino acid
  Transcript Sequence Number=SeqID_6859
  Gene Ontology: Mol. function=transferase activity, transferring groups other than amino-acyl groups
  Homolog annotation: Hit_ID=Q5VMK3; Match level="QueryCoverage=72%, HitCoverage=17%, E-value=2e-18, Identity=51%"; Hit description =Putative anthranilate N-hydroxycinnamoyl/benzoyltransferase
PFPIFLVSVYPAPAAGLDAVLAAVRGAFPAYLSSFFPFAGRIVRDPETKIPEVQCNNAGAELVVADAAVPLADVDFTEVDRSLGLIQIPFDASIPMSLQLVRFAXGGFALTVGTTQPTY

SEQ ID NO: 72834 - protein, 130 aa, Setaria italica
  misc_feature (14)..(14): Xaa can be any naturally occurring amino acid
  Transcript Sequence Number=SeqID_6860
  Homolog annotation: Hit_ID=Q9M8K3; Match level="QueryCoverage=57%, HitCoverage=11%, E-value=2e-16, Identity=52%"; Hit description =F28L1.9 protein
TPGPSAAKLALASXLGVIVLLAADASLAGAGAHRRLRRQYLHYVGSGSVEAGSPPWLSVPDRPNFTDDLLARWLAPGGTPCRDARTANISVPVLDGAAARVEATELRAGEIHEFTFWALDDAGKRRCLGG

SEQ ID NO: 72835 - protein, 59 aa, Setaria italica
  misc_feature (14)..(14): Xaa can be any naturally occurring amino acid
  Transcript Sequence Number=SeqID_6861
WQPKRQHLATLGPXRARQDNKRICNPNYNHRRHCWFVRGSNLFGPLIQNQSLHSMQVKL

SEQ ID NO: 72836 - protein, 101 aa, Setaria italica
  Transcript Sequence Number=SeqID_6862
  Gene Ontology: Mol. function=oxidoreductase activity; Biological process=metabolic process
  Homolog annotation: Hit_ID=Q6YU31; Match level="QueryCoverage=97%, HitCoverage=23%, E-value=9e-18, Identity=45%"; Hit description =Putative monooxygenase 1
VRALPMTDNLVNFFVALWHPGADATKDASAMKELVLEKLKGQCSDEIIEMVRAPEPDSLILLTKIWYRPPWQVLFSSFHRGTATVAGDAMHVMGTYIGRGG

SEQ ID NO: 72837 - protein, 53 aa, Setaria italica
  Transcript Sequence Number=SeqID_6863
MAGQPPQGPEDDFLDQFFSMAGGSYSAAASGGGRAAGDQPFSLALSLDAAAAE

SEQ ID NO: 72838 - protein, 75 aa, Setaria italica
  Transcript Sequence Number=SeqID_6864
  Subcellular localization annotation: CTP_CleavageSite=25; ConfidenceScore=5.03e-01
LRSLLSPLTSLRRRSLPAGCTAWPRSSQRPSHTSGHLQELLSHIPPPFRGLRLISSLVGGSHDGGGLEPGGPIGL

SEQ ID NO: 72839 - protein, 345 aa, Setaria italica
  Transcript Sequence Number=SeqID_6865
  Gene Ontology: Mol. function=metal ion binding; Cellular component =CCR4-NOT core complex; Biological process=regulation of transcription from RNA polymerase II promoter
  Homolog annotation: Hit_ID=Q6MWE6; Match level="QueryCoverage=96%, HitCoverage=94%, E-value=7e-82, Identity=53%"; Hit description =B1358B12.22 protein
  Pfam annotation: Domain name=zf-C3HC4; Domain location=261-302; Score= 4.7; E_value=0.029; Accession=PF00097.17; Description=Zinc finger, C3HC4 type (RING finger)
SAAAARDAKKKRGNRTAAKLKQSKLETRREQWLSGQGKDGKETKVAALPTGAGSNAGSPILASPHPPLPRRRADTRSRGSDPEDREEAAAATLEVGGSDLDSPMHSPVSDKSQGGGCAQRKGFSGNGGGPSLSSGSSVWSSSRSVSDAEEDHTGCPEDESEVLDDWEAAADALYDDDSHCHQSSVPTTPPPAPTNAAPANAARPEPIRSKARAWAPDDIFRPQSLPSISKQASFPASIGNCWAGMGMSAAQQGILSLPLSCPICYEDLDPTDSSFLPCPCGFHLCLFCHNRILEADGRCPGCRKQYNTVPAAEGGGGPRATMIGREMANIAPVRLSRSCSMGPRY

SEQ ID NO: 72840 - protein, 160 aa, Setaria italica
  misc_feature (136)..(136): Xaa can be any naturally occurring amino acid
  Transcript Sequence Number=SeqID_6866
  Gene Ontology: Mol. function=nucleic acid binding
  Homolog annotation: Hit_ID=Q8S634; Match level="QueryCoverage=39%, HitCoverage=9%, E-value=1e-11, Identity=53%"; Hit description =Putative DNA binding protein
KAWSFFGHNKLIIKEQVLLNCSSTLPTWDKAASNLTLHSSKNDNIEDLDSGHSNIMSKGQSFILDFRTPKPAVLCSLRAKLLNTEVHKTAHPLGDNYTLSCVNPINDGFQSQLVAPNSSYKSHVPLLKPSFSRSDXAEKRKLRYSSEHPDADNSKQIKSS

SEQ ID NO: 72841 - protein, 181 aa, Setaria italica
  Transcript Sequence Number=SeqID_6867
  Gene Ontology: Mol. function=nucleic acid binding
  Homolog annotation: Hit_ID=Q8S634; Match level="QueryCoverage=57%, HitCoverage=17%, E-value=3e-21, Identity=51%"; Hit description =Putative DNA binding protein
  Pfam annotation: Domain name=SAP; Domain location=146-180; Score =31.1; E_value=4.6e-06; Accession=PF02037.19; Description=SAP domain
KGNSGLLWLLICCSKDYTPSIQEVTKAIPDIEKDVLTAKVVNTKLNSVVAKDEVTAEAKRKAKQDLDKNVLTAVTKQKTMPEIVKNEFATKVRDNQNDDLKKKVTKSRAKAVDKDILNSTRTKSKPDVASDELIAKVIDHHRRGELRLLTVADLKSFLGAKKSKVGGTKEVLIQRVTELLA

SEQ ID NO: 72842 - protein, 117 aa, Setaria italica
  misc_feature (35)..(35): Xaa can be any naturally occurring amino acid
  misc_feature (64)..(64): Xaa can be any naturally occurring amino acid
  misc_feature (77)..(77): Xaa can be any naturally occurring amino acid
  Transcript Sequence Number=SeqID_6868
  Subcellular localization annotation: CTP_CleavageSite=63; ConfidenceScore=5.53e-01
RNRAPSSSHSAYCTRPLWPPSPPPAPPRPPACWPXLPPRPPPRRPLPRPPPRSPPPSRSPSLSXADEGSPLPSGPPXPQLRQVSPQRPPPRPPPRPLPRQPPRPRPPPPPWPAAALI

SEQ ID NO: 72843 - protein, 120 aa, Setaria italica
  Transcript Sequence Number=SeqID_6869
  Homolog annotation: Hit_ID=B6TZT1; Match level="QueryCoverage=42%, HitCoverage=43%, E-value=1e-09, Identity=69%"; Hit description =Glycine-rich cell wall structural protein
  Pfam annotation: Domain name=GRP; Domain location=1-120; Score=21.9; E_value=4.1e-07; Accession=PF07172.3; Description=Glycine rich protein family
MAVKFVVPLGVVLAFLLIFQDLAYARELTEANESEGKNVKPGGVPGLKDKKRGGGYNGGYGNGGGYGGGYGGGYGPKYSGGYHHGGYGPGYGGGYGGPGYGSGYGQPGYGGGYGGGYGGG

SEQ ID NO: 72844 - protein, 80 aa, Setaria italica
  Transcript Sequence Number=SeqID_6870
SLGYDAQDEWVLCRVFKKSIEPPLVAAGGKRSSGPCVEVADVVGPSSMSMADDLAACALPPLMDVSGAAAAAPCRFLRWR

SEQ ID NO: 72845 - protein, 362 aa, Setaria italica
  Transcript Sequence Number=SeqID_6871
  Gene Ontology: Mol. function=DNA binding; Cellular component=nucleus; Biological process=regulation of transcription
  Homolog annotation: Hit_ID=B6SUW6; Match level="QueryCoverage=96%, HitCoverage=97%, E-value=1e-111, Identity=64%"; Hit description=NAC domain protein NAC5
  Pfam annotation: Domain name=NAM; Domain location=14-140; Score =290.6; E_value=3.5e-84; Accession=PF02365.7; Description=No apical meristem (NAM) protein
HHHQLLQQQQTMELPPGFRFHPTDEELITHYLTRKAADPRFAPRAVGEADLNKCEPWDLPARATMGEKEWYFFCVKDRKYPTGLRTNRATESGYWKATGKDREIFRGKALVGMKKTLVFYTGRAPRGGKTGWVMHEYRLDGKHAGTSNRSSLIPSIRAGASKDEWVLCRVFKKSIEPPLVAAGGKRSSGPCVEVADVVGPSSMSMADDLAACALPPLMDVSGGSGGGAMSLSAVAGIELPPPAQHVTCFSNALQGQFLNPPFLLPSAGPAAAADHHLAMASSASPFLASMMQAAQYDGAAGVGGMVHELLQEGGGWYSKLGERERLSGGGGASQDTGLTSEVNPGEISSRQHMDHAASLWGY

SEQ ID NO: 72846 - protein, 95 aa, Setaria italica
  Transcript Sequence Number=SeqID_6872
RLYEVAMCMCYAVYAGKNGDKYKRIKECIVRTNGLKHLERSGDGEHAGAAAHPLQSPHGGEAQRAASGEPQHLHYPKEKEPKKSRGRNQDDDLTT

SEQ ID NO: 72847 - protein, 117 aa, Setaria italica
  Transcript Sequence Number=SeqID_6873
  Gene Ontology: Mol. function=RNA binding; Cellular component =ribonucleoprotein complex
  Homolog annotation: Hit_ID=B6TUI7; Match level="QueryCoverage=58%, HitCoverage=56%, E-value=7e-22, Identity=76%"; Hit description =Plastid-specific ribosomal protein 6
  Subcellular localization annotation: CTP_CleavageSite=43; ConfidenceScore=5.49e-01
MSPVTALLAGTAVPAAPVPARPSRPTVGFPSLLGGGRAALAVECSSRPQKKGTKHHMKTRPKKTQPWDIKRRPTQYPPLPQLPPDWTLVASSATVDAEQAPAPVLEVAAAAAPAAAD

SEQ ID NO: 72848 - protein, 232 aa, Setaria italica
  Transcript Sequence Number=SeqID_6874
  Gene Ontology: Mol. function=protein serine/threonine kinase activity; Biological process=protein amino acid phosphorylation
  Homolog annotation: Hit_ID=B6U8H2; Match level="QueryCoverage=90%, HitCoverage=26%, E-value=1e-110, Identity=93%"; Hit description=ATP binding protein
DETPTSSGQSEASSSEPSWWPPDFLEKIESASISRKQDVLGNLRTSSWKASQLLWSQGSYSGLIPNGFYSIIPDKKLKETFPNIPSLDDLQALEADGLKADIIIVDTERDKKVFMLKQLSAALVKGLNSSPALVIKKIAGLVFDCFKRQNVDSSPARGSTEDTHFFGNKGPQLLGQIRHGSCRPRAILFKVLADAVGLESKLVVGLPDDGAVGFVDSYKHMSVVVSLNSMEL

SEQ ID NO: 72849 - protein, 366 aa, Setaria italica
  Transcript Sequence Number=SeqID_6875
  Gene Ontology: Mol. function=protein serine/threonine kinase activity; Biological process=protein amino acid phosphorylation
  Homolog annotation: Hit_ID=B6U8H2; Match level="QueryCoverage=83%, HitCoverage=38%, E-value=1e-141, Identity=83%"; Hit description=ATP binding protein
MDETPTSSGQSEASSSEPSWWPPDFLEKIESASISRKQDVLGNLRTSSWKASQLLCPSIDLPRAILFKVLADAVGLESKLVVGLPDDGAVGFVDSYKHMSVVVSLNSMELLVDLMRFPGQLIPFSAKAIFISHISAAGESDSAENDSCDSPLEPNSPLYGLSDKVEAEGIESSSNLSGRSLRNMMLRSRTFSEGKLSTSCSEPNIANAFWRRSQRKGVAEESRGASSSPEHPLMRARGRSILGGEKQPFQEYTESGSASRSDGLSGTSTSNARRIRRRSISITPEIGDDIVRAVRAMNETLKQNRLQRDHVEGSCSYVTEDQNNANDCPNDDDASRRVGATDNGSRNRTGSTQKAMSLPSSPLEYR

SEQ ID NO: 72850 - protein, 312 aa, Setaria italica
  misc_feature (292)..(292): Xaa can be any naturally occurring amino acid
  Transcript Sequence Number=SeqID_6876
  Gene Ontology: Mol. function=protein serine/threonine kinase activity; Biological process=protein amino acid phosphorylation
  Homolog annotation: Hit_ID=B6U8H2; Match level="QueryCoverage=95%, HitCoverage=37%, E-value=1e-160, Identity=90%"; Hit description=ATP binding protein
  Pfam annotation: Domain name=Pkinase; Domain location=131-309; Score =56.1; E_value=1.3e-13; Accession=PF00069.17; Description=Protein kinase domain
  Pfam annotation: Domain name=Pkinase_Tyr; Domain location=131-303; Score=51.8; E_value=3.6e-17; Accession=PF07714.9; Description =Protein tyrosine kinase
  Pfam module annotation: Pfam domain module=Pkinase::Pkinase_Tyr; Domain location=131-309::131-303
PRRIGDDIVRAVRAMNETLKQNRLQRDHVEGSCSYVTEDQNNANDCPNDDDASRRVGATDNGSRNRTGSTQKAMSLPSSPHEYRGQVTEKNDDFMSKEKMALAWNKVFQSSPFLNKPLLPFEEWNIDFSEITIGTRVGIGFFGEVFRGIWNGTDVAIKVFLEQDLTTENMEDFCNEIYILSRLRHPNVILFLGACITPPHLSMVTEYMEMGSLYYLIHMSGQKKKLSWRRRLKIIRDICRGLMCIHRMKIVHRDLKSANCLVNKHWTVKICDFGLSRVMIDSPMTDNSSAGXPEWIGPLVVFIPVIVTFSTS

SEQ ID NO: 72851 - protein, 197 aa, Setaria italica
  Transcript Sequence Number=SeqID_6877
  Gene Ontology: Mol. function=protein serine/threonine kinase activity; Cellular component=myosin complex; Biological process =protein amino acid phosphorylation
  Homolog annotation: Hit_ID=B6U8H2; Match level="QueryCoverage=100%, HitCoverage=24%, E-value=1e-115, Identity=98%"; Hit description=ATP binding protein
  Pfam annotation: Domain name=Pkinase; Domain location=1-189; Score =81.2; E_value=3.7e-21; Accession=PF00069.17; Description=Protein kinase domain
  Pfam annotation: Domain name=Pkinase_Tyr; Domain location=1-189; Score=65.5; E_value=4.4e-18; Accession=PF07714.9; Description =Protein tyrosine kinase
  Pfam module annotation: Pfam domain module=Pkinase::Pkinase_Tyr; Domain location=1-189::1-189
FLGACITPPHLSMVTEYMEMGSLYYLIHMSGQKKKLSWRRRLKIIRDICRGLMCIHRMKIVHRDLKSANCLVNKHWTVKICDFGLSRVMIDSPMTDNSSAGTPEWMAPELIRNEPFTEKCDIFSLGVIMWELCTLSRPWEGISPVQVVYAVANEGSRLEIPEGPLGRLIADCWAEPDNRPSCQEILTRLLDCEYAVS

SEQ ID NO: 72852 - protein, 57 aa, Setaria italica
  Transcript Sequence Number=SeqID_6878
MIPRAPSLFHLEEGVGASTSTPMAASSAGELVGLRLIIQPSPRKQQLPTVLRRSAVT

SEQ ID NO: 72853 - protein, 129 aa, Setaria italica
  misc_feature (89)..(89): Xaa can be any naturally occurring amino acid
  misc_feature (99)..(99): Xaa can be any naturally occurring amino acid
  misc_feature (113)..(113): Xaa can be any naturally occurring amino acid
  Transcript Sequence Number=SeqID_6879
  Gene Ontology: Mol. function=hydrolase activity
  Homolog annotation: Hit_ID=B4FNJ4; Match level="QueryCoverage=53%, HitCoverage=19%, E-value=4e-23, Identity=82%"; Hit description =Catalytic/ hydrolase
  Subcellular localization annotation: CTP_CleavageSite=32; ConfidenceScore=5.09e-01
MPAPPPPSAAVPRRRWQSRLSPTLVRDRCYTRSFHSAGLRPAAVPLPDGAVVHLWLPPTAATGANPLHPVLLLHGFGATATWQWAPFSXPLLAAGLAPXVPNLIFFGASASPXADRSPAYPKGPDPRTN

SEQ ID NO: 72854 - protein, 40 aa, Setaria italica
  Transcript Sequence Number=SeqID_6880
SNIVTKKTDSTISIHQTHEMSKARLYLLSEWRPFTAVRRP

SEQ ID NO: 72855 - protein, 32 aa, Setaria italica
  Transcript Sequence Number=SeqID_6881
TTPRLQAALPQGIVPFVFAKEYGVHPDILSTA

SEQ ID NO: 72856 - protein, 153 aa, Setaria italica
  misc_feature (11)..(11): Xaa can be any naturally occurring amino acid
  misc_feature (73)..(73): Xaa can be any naturally occurring amino acid
  Transcript Sequence Number=SeqID_6882
  Gene Ontology: Mol. function=transporter activity; Cellular component= auxin efflux carrier complex; Biological process=auxin mediated signaling pathway
  Homolog annotation: Hit_ID=Q67UL3; Match level="QueryCoverage=63%, HitCoverage=16%, E-value=9e-42, Identity=93%"; Hit description =Probable auxin efflux carrier component 1c
NSSLIGLQYWXLVCFRWNFEMPAIVLKSISILSDAGLGMAMFSLGLFMALQPRIIACGNKVATFAMAVRFLTXGPAVMAAASFAVGLRGTLLHVAIVQVLWVGGKGGRGTDRYHTHTDAQRGKSFAGCCRPRASASSQASSLCCFFPGPPLFL

SEQ ID NO: 72857 - protein, 51 aa, Setaria italica
  Transcript Sequence Number=SeqID_6883
  Gene Ontology: Mol. function=transporter activity; Cellular component= integral to membrane; Biological process=auxin mediated signaling pathway
  Homolog annotation: Hit_ID=Q67UL3; Match level="QueryCoverage=100%, HitCoverage=8%, E-value=1e-22, Identity=96%"; Hit description =Probable auxin efflux carrier component 1c
MITGTDFYHVMTAMVPLYVAMILAYGSVRWWRIFTPDQCSGINRFVALFAV

SEQ ID NO: 72858 - protein, 114 aa, Setaria italica
  Transcript Sequence Number=SeqID_6884
  Gene Ontology: Mol. function=transporter activity; Cellular component= integral to membrane; Biological process=auxin mediated signaling pathway
  Homolog annotation: Hit_ID=B2D1S1; Match level="QueryCoverage=100%, HitCoverage=19%, E-value=1e-56, Identity=99%"; Hit description =Putative auxin efflux carrier
  Pfam annotation: Domain name=Mem_trans; Domain location=1-109; Score=- 108.4; E_value=0.0082; Accession=PF03547.10; Description=Membrane transport protein
  Subcellular localization annotation: CTP_CleavageSite=47; ConfidenceScore=5.36e-01
ILSDAGLGMAMFSLGLFMALQPRIIACGNKVATFAMAVRFLTGPAVMAAASFAVGLRGTLLHVAIVQAALPQGIVPFVFAKEYGVHPDILSTAVIFGMLIALPITLVYYILLGL

SEQ ID NO: 72859 - protein, 113 aa, Setaria italica
  Transcript Sequence Number=SeqID_6885
  Gene Ontology: Mol. function=transporter activity; Cellular component= auxin efflux carrier complex; Biological process=auxin mediated signaling pathway
  Homolog annotation: Hit_ID=B6U8W0; Match level="QueryCoverage=100%, HitCoverage=19%, E-value=3e-46, Identity=84%"; Hit description=Auxin efflux carrier component 1c
MITALDLYHVLTAVVPLYVAMTLAYGSVRWWRIFTPDQCSGINRFVALFAVPLLSFHFISTNNPFAMNLRFLAADTLQKLAVLALLAIASSRISPVRRLLGLDWSITLFSLST

SEQ ID NO: 72860 - protein, 595 aa, Setaria italica
  misc_feature (97)..(97): Xaa can be any naturally occurring amino acid
  Transcript Sequence Number=SeqID_6886
  Gene Ontology: Mol. function=transporter activity; Cellular component= auxin efflux carrier complex; Biological process=auxin mediated signaling pathway
  Homolog annotation: Hit_ID=Q5SMQ9; Match level="QueryCoverage=100%, HitCoverage=100%, E-value=0.0, Identity=91%"; Hit description=Auxin efflux carrier component 1
  Pfam annotation: Domain name=Mem_trans; Domain location=9-590; Score =841.5; E_value=5.1e-250; Accession=PF03547.10; Description=Membrane transport protein
MITGADFYHVMTAMVPLYVAMILAYGSVRWWRIFSPDQCSGINRFVALFAVPLLSFHFISTNNPYTMNLRFIAADTLQKLMVLAMLTAWSHLSRRGXSLEWTITLFSLSTLPNTLVMGIPLLKGMYGDFSGSLMVQIVVLQCIIWYTLMLFMFEYRGARMLITEQFPDTAGAIASIVVDPDVVSLDGRRDAIETEAEVKEDGKIHVTVRRSNASRSDIYSRRSMGFSSTTPRPSNLTNAEIYSLQSSRNPTPRGSSFNHNDFYSMVGRSSNFGAADAFGIRTGATPRPSNYEDDASKPKYPLPVVNAAPGAGHYPAPNPAVAAAPKGAKKAATNGQAKGEDLHMFVWSSSASPVSDVFGGGAPDYNDAAAAKSPRKMDGAKERDDYVERDEFSFGNRGAMDRDAEAGDEKAAVAGGGDPNAVAAPTAMPPTSVMTRLILIMVWRKLIRNPNTYSSLIGLIWSLVCFRWNFEMPAIVLKSISILSDAGLGMAMFSLGLFMALQPRIIACGNKVATFAMAVRFLTGPAVMAAASFAVGLRGTLLHVAIVQAALPQGIVPFVFAKEYNVHPDILSTAVIFGMLIALPITLVYYILLGL

SEQ ID NO: 72861 - protein, 311 aa, Setaria italica
  misc_feature (67)..(67): Xaa can be any naturally occurring amino acid
  misc_feature (283)..(283): Xaa can be any naturally occurring amino acid
  Transcript Sequence Number=SeqID_6887
  Homolog annotation: Hit_ID=B9RDS4; Match level="QueryCoverage=98%, HitCoverage=13%, E-value=2e-76, Identity=47%"; Hit description=CRP, putative
  Subcellular localization annotation: CTP_CleavageSite=39; ConfidenceScore=5.12e-01
AKMQRNQFQPSPETHDAYGNHTSDLSNSGKGFVGRTAKVAAAVSALVVGAVVHGAVSLERMVAALKXKDGLDILQLLRGLKTSTNGVSRAAGTFRMENSTEVSAHWFRILLGNCRTVYDGLIADILGESYILALSRLQQTLPLSLIFPPAYSIFAMVLWRRYIFNREDPQLYQSLSNAINDITRHQPFREICFRNTHQLYNLLASDVGDSEFAAMLESHSPDRNSKILPFVPLRARLFLDALVDCNTPMTTQGDGASEPCDPKDNELKLSERLMQLLDTLQPXKFHWQWVEMRLLLDEQALMEKVAAGKTA

SEQ ID NO: 72862 - protein, 77 aa, Setaria italica
  Transcript Sequence Number=SeqID_6888
LATKDTRHGSTIHEHICIPIILPNNEYCTSLYVCDLHASILSIYVTINYLNLPLQSPMCSQPIHLLITLPTKHMYQQ

SEQ ID NO: 72863 - protein, 96 aa, Setaria italica
  Transcript Sequence Number=SeqID_6889
  Gene Ontology: Mol. function=drug transporter activity; Cellular component=membrane; Biological process=multidrug transport
  Homolog annotation: Hit_ID=B9RZD1; Match level="QueryCoverage=100%, HitCoverage=19%, E-value=8e-27, Identity=58%"; Hit description =Multidrug resistance pump, putative
LFTGPILRALRQPDDIAAVAGTYCRWVVPQLFAYAANFPLQKFFQSQSRVWVVTLISGAGLAAHVALNYVFVTRLGHGLLGAAIVGNVTWWLIIVA

SEQ ID NO: 72864 - protein, 49 aa, Setaria italica
  Transcript Sequence Number=SeqID_6890
KEMSNSCLHKALQVKATMFKHNYINTMPHSNFTLESADYFIQKHSLLWY

SEQ ID NO: 72865 - protein, 264 aa, Setaria italica
  misc_feature (32)..(32): Xaa can be any naturally occurring amino acid
  Transcript Sequence Number=SeqID_6891
  Gene Ontology: Mol. function=protein binding; Cellular component =membrane; Biological process=protein transport
  Homolog annotation: Hit_ID=B6TWZ4; Match level="QueryCoverage=87%, HitCoverage=80%, E-value=1e-116, Identity=90%"; Hit description =SNAP25 homologous protein SNAP30
  Pfam annotation: Domain name=SNARE; Domain location=204-263; Score =45.6; E_value=1.9e-10; Accession=PF05739.11; Description=SNARE domain
  Subcellular localization annotation: CTP_CleavageSite=44; ConfidenceScore=5.42e-01
KQQQQRPARASSRAAPDPNSGTPSSAPAPAAXHGGLFSSSAAPRNSHYRNDFRDAGGLEGQSVQELEGYAAHKAEETTRRAQGCVRIAEGMRDTASKTLVTVHQQGQQIHRTHMMAVDIDQDLSRSEKLLGDLGGLFSKKWKPKKNGTIRGPMLSRDDSFIRKGSHLEQRQKLGLADHPPRLNAPEFSSEPTSAFEKVEMEKAKQDDALSDLSDILTELKGMAVDMGSEIERQTKAMRDAEKDYDELNFRVKGANTRARRLLGR

SEQ ID NO: 72866 - protein, 99 aa, Setaria italica
  Transcript Sequence Number=SeqID_6892
  Subcellular localization annotation: CTP_CleavageSite=40; ConfidenceScore=5.30e-01
YYLFKSLSFGICAAMFSLSLLRMGVMTQLTCTKSASGFSRASEDETLKPLVEQRRSNRELGSTAWAQVGCISSRVWISGPSVASLIQIKRRKRFGTFVQ

SEQ ID NO: 72867 - protein, 51 aa, Setaria italica
  Transcript Sequence Number=SeqID_6893
STLVLVIQLQSLLNFFFTRVKIILILNTKHFWKLFSFSMPIFLMKCPQIVF

SEQ ID NO: 72868 - protein, 40 aa, Setaria italica
  misc_feature (8)..(8): Xaa can be any naturally occurring amino acid
  Transcript Sequence Number=SeqID_6894
  Homolog annotation: Hit_ID=B3V945; Match level="QueryCoverage=100%, HitCoverage=10%, E-value=1e-11, Identity=72%"; Hit description=PAE
PGVCFFPXNEVKQIQTPLFILNAAYDYWQVRNILVPGVAD

SEQ ID NO: 72869 - protein, 655 aa, Setaria italica
  Transcript Sequence Number=SeqID_6895
  Gene Ontology: Mol. function=ATP-dependent helicase activity; Cellular component=nucleus; Biological process=ribosome biogenesis
  Homolog annotation: Hit_ID=B6SSY5; Match level="QueryCoverage=96%, HitCoverage=81%, E-value=0.0, Identity=82%"; Hit description=ATP -dependent RNA helicase DRS1
  Pfam annotation: Domain name=DEAD; Domain location=69-239; Score =230.6; E_value=4e-66; Accession=PF00270.21; Description=DEADDEAH box helicase
  Pfam annotation: Domain name=Helicase_C; Domain location=309-385; Score=117.4; E_value=4.8e-32; Accession=PF00271.23; Description =Helicase conserved C-terminal domain
  Pfam annotation: Domain name=ResIII; Domain location=65-234; Score= -36.8; E_value=0.065; Accession=PF04851.7; Description=Type III restriction enzyme, res subunit
  Pfam module annotation: Pfam domain module=DEAD::Helicase_C::ResIII; Domain location=69-239::309-385::65-234
GNEQGEEEEEGAHEEEDTAEQDGATGTVDPSKFFASSEGASFHANSFLELNLSRPLVRACEALGYQKPTPIQAACIPLALTGRDICGSAITGSGKTAAFSLPVLERLLFRPKRVPAIRVLILTPTRELAAQVHSMIEKLAQFTDIRCCLIVGGLSSKIQEVALRSMPDIVVATPGRIIDHVRNSLSVGLEDLAVVILDEADRLLELGFSAEIQELIRMCPKRRQTMLFSATMTEEIDELVKLSLNKPVRLEADPSLKRPATLTEEFVRIRRARESNQEAVLLALCLKTFKQSVIIFSGTKLSAHRLKIIFGLNGMKAAELHGNLTQAQRLEALELFKKQEVDFLIATDVAARGIDIVGVRTVINFACPRDVKTYLHRVGRTARAGREGYAVTFVTDDDRSLLKAIAKKAGSQLKSRIVAEKPVADCAKLIEQLEDQISTIIREEREEMLVRKAEMELAKVENMMAHKDDIYSRPKKTWFTTEREKKLLAKAAKDCLDQGKTTSGVISAKQAEELRLKEKRRRENEKNLPRKKRRRLEAQREMLEGDDEDDEEAKENNKGGKKAKKGQSVVDVAYRKAKSMKATSRRGPGAGKGKNEKNSRQHSEKAPTRQEEMHDLFQNDMSEWKQGRALKKNNDFARKKSKNAFKSKARYKRRK

SEQ ID NO: 72870 - protein, 66 aa, Setaria italica
  Transcript Sequence Number=SeqID_6896
GRRNHGNQPCHKATEPRRYYPNTTCFTWHAKTPWMLARTPRASSRHQPTAVRSSHRTDRKLFLTDG

SEQ ID NO: 72871 - protein, 89 aa, Setaria italica
  Transcript Sequence Number=SeqID_6897
FGMKSAEIANLGRIMVLTKRFRPTTKFKLLLIHELPGHHFEHWIRSKHQKKANAATFMEQWRCHRHQRILIASAQTPARARRPRSRQAP

SEQ ID NO: 72872 - protein, 155 aa, Setaria italica
  Transcript Sequence Number=SeqID_6898
  Gene Ontology: Mol. function=structural molecule activity
  Homolog annotation: Hit_ID=Q8W4F1; Match level="QueryCoverage=100%, HitCoverage=53%, E-value=1e-43, Identity=58%"; Hit description =Probable plastid-lipid-associated protein 10, chloroplastic
  Pfam annotation: Domain name=PAP_fibrillin; Domain location=1-148; Score=11.5; E_value=2.2e-07; Accession=PF04755.4; Description=PAP _fibrillin
LLRLVQETRRGFAAGPDQRAAIEEAIVGVEELGAGEGAPLDLAALDGTWRLCYTSASDVLVLFEAAERLPLLQVGQIYQKFECKDQSEGGVVRNVVRWSIENLLEDQEGATLMVSAKFVILSKRNIFLQFEEVSVENIKISEQLQALIAPAILPR

SEQ ID NO: 72873 - protein, 101 aa, Setaria italica
  Transcript Sequence Number=SeqID_6899
KSFSIRAGSGEGGGRGFGVSIGHGGHDTSIGIGGGFGGGAGTTRGGGASVGGGAGAGVGIDVGRGGVDVGIGAGGGGAVSAGGVHAGGGGGGGVGVHIGHG

SEQ ID NO: 72874 - protein, 38 aa, Setaria italica
  Transcript Sequence Number=SeqID_6900
TKKMHKQVQGKLTLSKVRDLDIFCVKHVCQNGKNVTKD

SEQ ID NO: 72875 - protein, 93 aa, Setaria italica
  Transcript Sequence Number=SeqID_6901
  Subcellular localization annotation: CTP_CleavageSite=68; ConfidenceScore=5.53e-01
ARSDIPPKLAFAAALPRSRSPHDSSHPLTPPPQPPPPPPRWRRARPSAPPPSPPSPPPPTPPPSPGLPAASRSPSPRSSTTRFPPPPPHPTPG

SEQ ID NO: 72876 - protein, 65 aa, Setaria italica
  Transcript Sequence Number=SeqID_6902
  Homolog annotation: Hit_ID=Q2R928; Match level="QueryCoverage=95%, HitCoverage=14%, E-value=4e-12, Identity=62%"; Hit description=F-box domain containing protein, expressed
QDAVRTCVLAQSWRHHWRSAPAVRFAGCTGWAGGAYTFGPFVDGLLSARRGGAPLDSCDFDLDVN

SEQ ID NO: 72877 - protein, 50 aa, Setaria italica
  Transcript Sequence Number=SeqID_6903
SFPNYSSYYGCIDSHNSQMLIHGNFRLMESCCRGIIASSISHNFVRVHGD

SEQ ID NO: 72878 - protein, 89 aa, Setaria italica
  Transcript Sequence Number=SeqID_6904
LDLSSPFLQYTRAAQGRFRSRRRSRRLLIMYGDRPSAGGGEEPRDRWPVYIPSSYLVRLGLGFLASSTARQRLVYPGGFDLRLPVILSL

SEQ ID NO: 72879 - protein, 168 aa, Setaria italica
  Transcript Sequence Number=SeqID_6905
  Gene Ontology: Mol. function=protein binding; Cellular component =apoplast
  Pfam annotation: Domain name=DUF538; Domain location=24-140; Score =192.0; E_value=1.6e-54; Accession=PF04398.4; Description=Protein of unknown function, DUF538
MALIADELRAKAEVYYGDDICQQCAQLLLKEAGLPNGLLPLKDLIECGYVQETGYVWLKQKKRVDHVFQSLGRLVSYGTEITGYAEKGRIKKVKGIKTRELMVWVPVEEIALDEPATGKLICKSIAGITRTFPASAFHIPEKENQKKNFAAPKPVVLMEGAPQVVKNN

SEQ ID NO: 72880 - protein, 141 aa, Setaria italica
  Transcript Sequence Number=SeqID_6906
  Gene Ontology: Cellular component=integral to membrane
  Homolog annotation: Hit_ID=B6TWA3; Match level="QueryCoverage=100%, HitCoverage=37%, E-value=1e-35, Identity=58%"; Hit description=ATPUP5
  Pfam annotation: Domain name=DUF6; Domain location=3-109; Score=-1.8; E_value=0.096; Accession=PF00892.12; Description=Integral membrane protein DUF6
WILSWAAVAGWPLPALLLLPLYLLSKASPTPLSLALCSWYVLLGFLSAADNLMYAWAYAYLPASTASLVAASSLAFSALFARAIAKNRLNLSSINAVVVITAGVVIVALDSGSDRPPGVTARQYALGFVLDVLGSALHGLI

SEQ ID NO: 72881 - protein, 35 aa, Setaria italica
  Transcript Sequence Number=SeqID_6907
TFSLLEDWLLEDMPGQAMDGLMGISAGCCADPIMF

SEQ ID NO: 72882 - protein, 102 aa, Setaria italica
  Transcript Sequence Number=SeqID_6908
TLSFLETSIPEQNEGFATQVSTSQPTVRSGQNFDSGYAMKIDVIASIDDSVDNLLEGTSLCLSEPKETTTVQGPNTTPHDSVPTHSGPSNASDDFDSWFDSL

SEQ ID NO: 72883 - protein, 87 aa, Setaria italica
  Transcript Sequence Number=SeqID_6909
YVLCSSAHLLQPGRGPFRPDDTLQPGTVYFLLPQSVFQSESSAVDLACLMNRLTALARKGCATAAPAPNPVEALFAGATVAATPQQQ

SEQ ID NO: 72884 - protein, 116 aa, Setaria italica
  Transcript Sequence Number=SeqID_6910
  Subcellular localization annotation: CTP_CleavageSite=76; ConfidenceScore=5.32e-01
GIFGDPQDQPSPVSVLDGPFICDNNNRRLLYSSENFIASSPQALSRSPLIGSFSRSLSWEDPPLEVMSPNSLRLSRLFSKADEDLDSLTFIQKLVHSCGMDREGCILAEPLDPKFA

SEQ ID NO: 72885 - protein, 277 aa, Setaria italica
  misc_feature (21)..(21): Xaa can be any naturally occurring amino acid
  Transcript Sequence Number=SeqID_6911
TTGYKSSEFEENYRNIKLKKXSKCHQNQKAGLRHQHTWNGFSDQPSRINSSQSKYQGIEPCCEKRMSLVCEKFAEAKRLATDEKLLHSKEFQDALQFLSSNRELFLEFLDEPNPLLSSNRYEFQPAAPPSEVKQITILKPSEPTKRKGSVLVGRQLFLDGDESERNRYRRHQSLDVSPANSSLSEPTKIVVLKPGLANSHDPGIVGSPLSSAEDSEDESMMTVDETACSRRLAKEITWQMRMRLKDKQDEESMLSCEYPEFYIGDDSFSKSEVEIAK

SEQ ID NO: 72886 - protein, 392 aa, Setaria italica
  Transcript Sequence Number=SeqID_6912
MIMEILQSQDHETVDETACSRRLAKEITWQMRMRLKDKQDEESMLSCEYPEFYIGDDSFSKSEVEIAKEMSGETSEDLEFGTPTSGRSWDFLSRSGSPYSASCSSQTSHRREPSVVREGKKKILERWSMVSSTVSSEEEMEGRRSMGTLGDMLTISKVKDQEEIEGETVESQASELEAEEPFSCLPRSRSLPVSLSYGGIESNGVASGTHAAQKERIRKSSSFREKVSSLFSKNKKSTREKVDPSASDRLKHEGAVTNGDVKEDWNHLVLHNYGKQNTCLDTDEKNIMQGLVTSSCHTNNTANIPAKDISSMSSLGAPGIFGDPQDQPSPVSVLDGPFICDNNNRRLLYSSENFIASSPQALSRSPLIGSFSRSLSWEDPPLEVIVLPKLLL

SEQ ID NO: 72887 - protein, 43 aa, Setaria italica
  Transcript Sequence Number=SeqID_6913
ISLHTAFVLSVIVGGHCLGIVATYNSMSLSNRPHNDLVVCICR

SEQ ID NO: 72888 - protein, 148 aa, Setaria italica
  misc_feature (86)..(86): Xaa can be any naturally occurring amino acid
  Transcript Sequence Number=SeqID_6914
  Gene Ontology: Mol. function=protein binding; Cellular component =intracellular; Biological process=signal transduction
  Homolog annotation: Hit_ID=B6UEI4; Match level="QueryCoverage=87%, HitCoverage=22%, E-value=3e-65, Identity=89%"; Hit description=Appr -1-p processing enzyme family protein
MVFSSILVLLIHHHCMPFLQEFEPLIQKPYSIVYLHSAASLQPQPDLGFMKRLQQILGRKHQRNLHAIYVLHPTLGLRTANLAMQXFVDGEVWKKTVYIDRLVQLFRYVPREQLTIPEFVFQHDLEVNGGKGIIVDPRTKHVYQRPSG

SEQ ID NO: 72889 - protein, 173 aa, Setaria italica
  Transcript Sequence Number=SeqID_6915
  Gene Ontology: Mol. function=protein-lysine 6-oxidase activity; Cellular component=intracellular; Biological process=signal transduction
  Homolog annotation: Hit_ID=B6UEI4; Match level="QueryCoverage=68%, HitCoverage=20%, E-value=1e-55, Identity=82%"; Hit description=Appr -1-p processing enzyme family protein
MGLKMRTQTKALLKTGIVQVSYCETIIMHSVNNSVNFSSKSMVFTIIGSSLHGIFFILVLLIHHHCMPFLQEFEPLIQKPYSIVYLHSAASLQPQPDLGFMKRLQQILGRKHQRNLHAIYVLHPTLGLRTAILAMQLFVDGEVWKKTVYIDRLVQLFRYVPREQLTIPDFVFQ

SEQ ID NO: 72890 - protein, 53 aa, Setaria italica
  misc_feature (7)..(7): Xaa can be any naturally occurring amino acid
  Transcript Sequence Number=SeqID_6916
  Homolog annotation: Hit_ID=B6UEI4; Match level="QueryCoverage=100%, HitCoverage=9%, E-value=1e-17, Identity=87%"; Hit description=Appr-1- p processing enzyme family protein
MVVVGAXHFLLRCLDLERFVLYELEFEPLIQKPYSIVYLHSAASLQPQPDLGF

SEQ ID NO: 72891 - protein, 501 aa, Setaria italica
  Transcript Sequence Number=SeqID_6917
  Gene Ontology: Mol. function=molecular_function; Cellular component =cellular_component; Biological process=biological_process
  Homolog annotation: Hit_ID=B6U851; Match level="QueryCoverage=98%, HitCoverage=84%, E-value=0.0, Identity=92%"; Hit description=Appr-1 -p processing enzyme family protein
  Pfam annotation: Domain name=Macro; Domain location=37-149; Score =137.6; E_value=4e-38; Accession=PF01661.13; Description=Macro domain
RGARGRGASRFPVDHEINSKIYLWRGHPWNLEVDAVVNSTNENLDEAHSSPGLHAAAGPGLAEECATLGGCRTGMAKMTNAYDLPARKVIHTVGPKYAVKYHTAAENALSHCYRSCLELLIENGLDSIATGCIYTEAKNYPREPAAHVAIRTVRRFLEKQKDKIRAIVFCTTSSSDTEIYKRLLPLYFPRDKHEEEIAALKLPADVGDENGETVIDERKIRIKPLPAGAANSKTPIPTLADIPLPDSGLTRRRNSFKLDSYLDPAFMSIIKDPDLRHKEQWEKSAQANKGINFANLLGFGDLGSPPLSAAEEYSLHSRYLAKANSMNLSDIAEMKIIYRGGVDSEGRPVMVVVGAHFLLRCLDLERFVLYVVKEFEPLIQKPYSIVYLHSAASLQPQPDLGFMKRLQQILGRKHQRNLHAIYVLHPTLGLRTAILAMQLFVDGEVWKKTVYIDRLVQLFRYVPREQLTIPDFVFQHDLEVNGGKGIIVDPRTKHVYQRPSG

SEQ ID NO: 72892 - protein, 81 aa, Setaria italica
  Transcript Sequence Number=SeqID_6918
  Gene Ontology: Mol. function=ATP-dependent helicase activity; Cellular component=ribonucleoprotein complex; Biological process =regulation of alternative nuclear mRNA splicing, via spliceosome
  Homolog annotation: Hit_ID=Q84MP1; Match level="QueryCoverage=100%, HitCoverage=3%, E-value=9e-39, Identity=87%"; Hit description =Putative Sec63 domain containing protein
LHKCIHQLPKLNLSAHVQPFTRTVLGFELTITPDFQWDDKIHGYVEPFWVIVEDNDGEYILHHEYFLLKKQYVDEDHTLNF

SEQ ID NO: 72893 - protein, 114 aa, Setaria italica
  misc_feature (76)..(76): Xaa can be any naturally occurring amino acid
  misc_feature (99)..(99): Xaa can be any naturally occurring amino acid
  Transcript Sequence Number=SeqID_6919
  Gene Ontology: Mol. function=ATP-dependent helicase activity; Cellular component=ribonucleoprotein complex; Biological process=cis assembly of pre-catalytic spliceosome
  Homolog annotation: Hit_ID=Q84MP1; Match level="QueryCoverage=85%, HitCoverage=4%, E-value=1e-36, Identity=78%"; Hit description =Putative Sec63 domain containing protein
SNKAKVKRLQVHVLLYSHTTIERFSSMLTQKTKMKGLLEILASASEYAELPGRPGEEDFIERLVRHQRFSIEKPKXGDPHVKANALLQAHFSRHNVVGXLAADQREILLSAHRL

SEQ ID NO: 72894 - protein, 409 aa, Setaria italica
  misc_feature (359)..(359): Xaa can be any naturally occurring amino acid
  Transcript Sequence Number=SeqID_6920
  Gene Ontology: Mol. function=ATP-dependent helicase activity; Cellular component=ribonucleoprotein complex; Biological process =regulation of alternative nuclear mRNA splicing, via spliceosome
  Homolog annotation: Hit_ID=Q84MP1; Match level="QueryCoverage=100%, HitCoverage=57%, E-value=0.0, Identity=58%"; Hit description =Putative Sec63 domain containing protein
  Pfam annotation: Domain name=Helicase_C; Domain location=100-184; Score=44.3; E_value=4.7e-10; Accession=PF00271.23; Description =Helicase conserved C-terminal domain
  Pfam annotation: Domain name=Sec63; Domain location=305-409; Score= -119.3; E_value=0.0058; Accession=PF02889.8; Description=Sec63 domain
  Pfam module annotation: Pfam domain module=Helicase_C::Sec63; Domain location=100-184::305-409
DNSYRPCPLAQQYIGITVRKPLQRFQLMNEICYEKVMAAAGKHQVLIFVHSRKETAKTAKAIRDTALANDTVSRFLKNESASQEILGTHAELVKNNDLKDLLPYGFAIHHAGMARVDRELVEELFADKHIQVLVSTATLAWGVNLPAHTVIIKGTQIYNPEKGAWTELSPLDVMQMLGRAGRPQYDTHGEGIILTGHSELQFYLSLMNQQLPIESQFVSQLADQLNAEIVLGTIQNAREACSWLGYTYLYIRMLRNPALYGLPADIFESDKTLDGRRADLIHSAANLLDRNNLIKYDRKTGYFQVTDLGRIASYYYISHGTISTYNEYLKPTMGDIELCRLFSLSEEFKYVGVRQDEKXMELAKLLDRVPIPVKESLEEPSAKINVLLQAYISRLKLEGLSLSSDMVYI

SEQ ID NO: 72895 - protein, 78 aa, Setaria italica
  Transcript Sequence Number=SeqID_6921
MAAPPYGGGTDDSPEDYSAAATVVRFDPPLPLLRAPVPSAAPGEPHVLAFRDAASWRAAWDAAEASLVSQCEAGARSG

SEQ ID NO: 72896 - protein, 242 aa, Setaria italica
  Transcript Sequence Number=SeqID_6922
  Gene Ontology: Mol. function=transcription factor activity; Cellular component=nucleus; Biological process=regulation of transcription, DNA-dependent
  Homolog annotation: Hit_ID=A7XA01; Match level="QueryCoverage=86%, HitCoverage=84%, E-value=3e-36, Identity=45%"; Hit description =Ethylene-responsive factor-like transcription factor ERFL2a
  Pfam annotation: Domain name=AP2; Domain location=30-81; Score=84.4; E_value=4.1e-22; Accession=PF00847.12; Description=AP2 domain
MAPRTSEKTMTPAAAATGLALGGGGGAGGPHYRGVRKRPWGRYAAEIRDPAKKSRVWLGTFDTAEEAARAYDAAAREYRGAKAKTNFPFPSSSSMPPVATVAAAATGGSRSGDSSTVESFGGDVQAPMQAMPLPPSLELDLFHRAAAAGTHAGASVRFPFNSYPVTHPYYFFGQAAAAAAAGCHMQLKLAPTVTVAAVAPSDSSDSSSVVDLSPSPPAAVAAKKASAFDLDLNCPPPAEAEA

SEQ ID NO: 72897 - protein, 58 aa, Setaria italica
  Transcript Sequence Number=SeqID_6923
  Subcellular localization annotation: CTP_CleavageSite=11; ConfidenceScore=5.16e-01
MLSLGRPTVTVAAVAPSDSSDSSSVVDLSPSPPAAVAAKKASAFDLDLNCPPPAEAEA

SEQ ID NO: 72898 - protein, 80 aa, Setaria italica
  Transcript Sequence Number=SeqID_6924
  Gene Ontology: Mol. function=succinate dehydrogenase activity; Cellular component=membrane; Biological process=tricarboxylic acid cycle
  Homolog annotation: Hit_ID=B6UGG5; Match level="QueryCoverage=100%, HitCoverage=12%, E-value=2e-26, Identity=80%"; Hit description=Heat shock 70 kDa protein
DKVPAEVTKEIESAVSDLRAAMAEDDLDKIKQKLEAANKAVSKIGEHMQQGGGGSAGSGGTSSGDQTPEAEYQDAKEAKM

SEQ ID NO: 72899 - protein, 67 aa, Setaria italica
  Transcript Sequence Number=SeqID_6925
FDAPLVFMHKLTKLKEPNVTWFQQDVLLVFMHKLTKLKEPMSTPPKKSNQMSHGFNKILPLLPKCKT

SEQ ID NO: 72900 - protein, 237 aa, Setaria italica
  Transcript Sequence Number=SeqID_6926
MMDEAPADLRELVRLPDVLVVCSSTGWTNEKHMLYLQLLEETFVSQLHDGERSFKGLFNLSPRYCRQVKSSKQIVEYAKPDQGCHGIVDADRVKSCMKVELMDSPSCCGNQQDGKIHSTDDNASTTEPVEEAISQARTTSSGQSSTCYVGKYRHSPSRKNYSCIYSEGSDQNFDEETKGTGESRRGCSQKRLKSYNVMRDDEVQKAGLIACDKHEDKYNGSLKVDAGSLDAETGSPT

SEQ ID NO: 72901 - protein, 610 aa, Setaria italica
  Transcript Sequence Number=SeqID_6927
  Gene Ontology: Mol. function=binding
  Homolog annotation: Hit_ID=B9RYK4; Match level="QueryCoverage=89%, HitCoverage=93%, E-value=1e-112, Identity=44%"; Hit description=Yth domain-containing protein, putative
  Pfam annotation: Domain name=YTH; Domain location=428-518; Score =194.3; E_value=3.4e-55; Accession=PF04146.7; Description=YT521-B -like family
MEPKGELGQKPIEEAMDSLKIDASTKASNVNLPAKKDASSSDAVSCISSGDAASTVKESEMNQEASIGDQGMYYYGYYYPGSYGGWDENGYFVGYNGLEMHPAVVQGDNGSYLCYLPGYESGYASYSPVVPGGITSADGQYVSKEPYYSTAIPMQDPSTPGIFAQPIAYGPELVPAYSWDPSFVLLDGVQGHPVGVHQTNYAARPKYSSNKHGVPSSKAARSAKSAPETIKGSSSALETLPNAANSIPLSKGANKASGASTTKGYLPSSKFVTHSNNQGKSSVYQNKGINVKENGRSWINNEKLKTRSKLNGHGDSDISNENSHTDNSKHSLSPRGDVVGLSSAGDANETILSPVTISKNAYNLPDFVTKYEQALFFVIKSYSEDDIHKSIKYSVWASTPNGNKRLDNAYRLAQERMAEKGTKCPVFLFFSVNASGQFCGVAEMVGPVDFNRNMNFWQQDKWNGFFSVKWHIIKDVPNPQFRHIILENNENKPVTNSRDTQEVKFPQGTEMLNIFKNFSCKTSILDDFDFYENRQKVMQDRRGKPLTTSFDHPLPKAEKPAEIKKQTQLISGAQLDTTKKSEEQSNNVAEVLDVAQSNKELPSKVATEGR

SEQ ID NO: 72902 - protein, 115 aa, Setaria italica
  misc_feature (79)..(79): Xaa can be any naturally occurring amino acid
  Transcript Sequence Number=SeqID_6928
  Gene Ontology: Mol. function=nucleic acid binding; Cellular component= ribonucleoprotein complex
  Homolog annotation: Hit_ID=B6TAS3; Match level="QueryCoverage=98%, HitCoverage=23%, E-value=4e-37, Identity=70%"; Hit description=RNA -binding protein
  Subcellular localization annotation: CTP_CleavageSite=43; ConfidenceScore=5.20e-01
PFLSPLGLGNLGRGTGDSNYGLPSGNYVRSNSTGTIGEPFSASANAYESNNPGAYGSSSIYGDSTWRFTSSEVEMPPFXGHDLGNVDPDIKSDVSASYMGNYTVNNNQPSRGITS

SEQ ID NO: 72903 - protein, 471 aa, Setaria italica
  Transcript Sequence Number=SeqID_6929
  Gene Ontology: Mol. function=nucleic acid binding; Cellular component= ribonucleoprotein complex
  Homolog annotation: Hit_ID=B6TAS3; Match level="QueryCoverage=99%, HitCoverage=98%, E-value=0.0, Identity=71%"; Hit description=RNA -binding protein
  Pfam annotation: Domain name=RRM_1; Domain location=108-177; Score =84.9; E_value=2.9e-22; Accession=PF00076.14; Description=RNA recognition motif. (a.k.a. RRM, RBD, o
  Pfam annotation: Domain name=RRM_1; Domain location=8-76; Score=81.0; E_value=4.3e-21; Accession=PF00076.14; Description=RNA recognition motif. (a.k.a. RRM, RBD, o
  Pfam module annotation: Pfam domain module=RRM_1::RRM_1; Domain location=108-177::8-76
MEADSGKLFVGGISWETDEDRLREYFGRFGEVTEAVIMRDRNTGRARGFGFVVFADSAVAERVTTDKHMIDGRMVEAKKAVPRDDQSIASKNNGSSIGSPGPGRTRKIFVGGLASNVTEVEFRRYFEQFGVITDVVVMYDHNTQRPRGFGFITYDSEDAVDKALHKNFHELNGKMVEVKRAVPKEQSPGPIARSPAGGQNYAMSRVHNILNGFNHGYNPNPIGGYGMRVDGRYGLLTGARNGFSSFGPGFGMGMNMEGGMSGTFGANSGFINSSNGRQMGSYYNGSSNRLGSPIGYLGLNDDSGSMLSSMSRNVWGNGSLNYPSNPTNMNAFASPGNGGQVGITGDNWGGLPSAHAMGNISSLGSGNLGRGAGDNNFGLPSGSYGRSNSTGTIGEPFSASGNAYESNNPGAYGSSSIYGGSAWRFASSEVEMPSFGHDLGNIDPNIKSDVSASYMGNYTVNNNQPSRGITS

SEQ ID NO: 72904 - protein, 161 aa, Setaria italica
  Transcript Sequence Number=SeqID_6930
  Subcellular localization annotation: CTP_CleavageSite=66; ConfidenceScore=5.10e-01
FTKLVKSLGFIVGVDAVSLPRWSPKSAPQVRGDRNSADGAARESLVGSSCSDETWAPASLRAARSRATAASDRGRGCTDWGSMRTGAAAPRNELPFTDWNGTAKQARVCLLTNSRRNRSRISAPCVTPPHKRRCSMEGRGDSRVAGGEGGRRRERCYTHRC

SEQ ID NO: 72905 - protein, 52 aa, Setaria italica
  Transcript Sequence Number=SeqID_6931
PSLSDSSSRSARKESARLAMILAKVFLAAARAHVAFRPSLLIESEQLNLICK

SEQ ID NO: 72906 - protein, 64 aa, Setaria italica
  Transcript Sequence Number=SeqID_6932
DRGQKSSQAAKLEKWIHELFYICVHLYLSAPYAMAYSNTSLKLVLCMEFPNGFIASGFSNHKTP

SEQ ID NO: 72907 - protein, 98 aa, Setaria italica
  Transcript Sequence Number=SeqID_6933
  Subcellular localization annotation: CTP_CleavageSite=52; ConfidenceScore=5.53e-01
IISLAHSSRSQPYRQSRAGAAKAKAQQRAGTTAGTARRGAVTTRARESERERAMEDDDDFTFPTVVAAAPAPAPTEGQLGGPRPVAQLLHHQLPGSRP

SEQ ID NO: 72908 - protein, 69 aa, Setaria italica
  Transcript Sequence Number=SeqID_6934
HGIELATYLRNYRPIPSTAHHTGVCEPMRVYTIITTEFQERGCDNILISEGSHHTSTIFWWHVATFRER

SEQ ID NO: 72909 - protein, 90 aa, Setaria italica
  Transcript Sequence Number=SeqID_6935
SDDDSGEGRGGRRRMGLPPARLHHQHDASPDKVGHSPKVDEDPVAAAPDLTVLMPGHRYPTFLAQPAPLAPCPREGVRWPPHEHLRSFLP

SEQ ID NO: 72910 - protein, 111 aa, Setaria italica
  misc_feature (9)..(9): Xaa can be any naturally occurring amino acid
  misc_feature (16)..(16): Xaa can be any naturally occurring amino acid
  misc_feature (19)..(19): Xaa can be any naturally occurring amino acid
  misc_feature (30)..(30): Xaa can be any naturally occurring amino acid
  Transcript Sequence Number=SeqID_6936
  Gene Ontology: Mol. function=transferase activity, transferring phosphorus-containing groups; Cellular component=chloroplast; Biological process=phosphorylation
  Homolog annotation: Hit_ID=Q6AVA8; Match level="QueryCoverage=95%, HitCoverage=11%, E-value=4e-51, Identity=90%"; Hit description =Pyruvate, phosphate dikinase 1, chloroplastic
NCKILESHXEMMDIEXTVXENRLWMLQCRXGKRTGQGAVKIAVDMVNEGLVERRQAIKMVEPGHLDQLLHPQFENPSAYKDQVIATGLPASPGAAVGQIVFTAEDAVSSSS

SEQ ID NO: 72911 - protein, 125 aa, Setaria italica
  Transcript Sequence Number=SeqID_6937
  Gene Ontology: Mol. function=protein dimerization activity
  Homolog annotation: Hit_ID=B6U4H6; Match level="QueryCoverage=100%, HitCoverage=17%, E-value=1e-51, Identity=80%"; Hit description =Transposon protein
  Pfam annotation: Domain name=zf-BED; Domain location=35-81; Score =49.7; E_value=1.1e-11; Accession=PF02892.7; Description=BED zinc finger
MLEPVAMEVPIAGPVSNAVVPAPAVHNPRARKLRSAVWQDFTKERRADGNCVAVCNHCKKQLTATSRSGTTHLRNHLAICMTTSTRRAGKRRKLVVRRIHHNKSSADGRSGEGHASGEDNDNEGT

SEQ ID NO: 72912 - protein, 87 aa, Setaria italica
  misc_feature (17)..(17): Xaa can be any naturally occurring amino acid
  Transcript Sequence Number=SeqID_6938
  Gene Ontology: Mol. function=N-acetyltransferase activity; Biological process=metabolic process
TPPPLAAARRGIRGRGXLHRRLAASPMKDEPVISTNGGNEETVTDSLNVARGLSHPGLSSSLSNKASVVPTPLLPNEPSDLRFNRLR

SEQ ID NO: 72913 - protein, 129 aa, Setaria italica
  Transcript Sequence Number=SeqID_6939
  Gene Ontology: Mol. function=protein serine/threonine kinase activity; Cellular component=integral to membrane; Biological process=protein amino acid phosphorylation
  Homolog annotation: Hit_ID=A4L9R1; Match level="QueryCoverage=99%, HitCoverage=12%, E-value=3e-34, Identity=57%"; Hit description=LRR receptor-like protein kinase m3
  Pfam annotation: Domain name=LRR_1; Domain location=106-128; Score =11.8; E_value=1.7; Accession=PF00560.25; Description=Leucine Rich Repeat
  Pfam annotation: Domain name=LRR_1; Domain location=33-56; Score =14.0; E_value=0.62; Accession=PF00560.25; Description=Leucine Rich Repeat
  Pfam annotation: Domain name=LRR_1; Domain location=58-80; Score =12.8; E_value=1.1; Accession=PF00560.25; Description=Leucine Rich Repeat
  Pfam annotation: Domain name=LRR_1; Domain location=82-104; Score =15.7; E_value=0.19; Accession=PF00560.25; Description=Leucine Rich Repeat
  Pfam annotation: Domain name=LRR_1; Domain location=9-30; Score=6.1; E_value=20; Accession=PF00560.25; Description=Leucine Rich Repeat
  Pfam module annotation: Pfam domain module=LRR_1::LRR_1::LRR_1::LRR _1::LRR_1; Domain location=106-128::33-56::58-80::82-104::9-30
PDSFARFAKLQSLSLVYNLLGGEVPGFLGAVATLRELNLSYNPFAPGPLPPRLGDLSALRVLWLAGCNLVGAIPPSLGRLTNLTDLDLSTNALTGPIPPEITGLTSAIQIELYNNSLSGPIPPGFGKLQ

SEQ ID NO: 72914 - protein, 51 aa, Setaria italica
  Transcript Sequence Number=SeqID_6940
  Gene Ontology: Mol. function=transferase activity; Cellular component= cytoplasm; Biological process=isoprenoid biosynthetic process
  Homolog annotation: Hit_ID=P49353; Match level="QueryCoverage=76%, HitCoverage=11%, E-value=1e-11, Identity=82%"; Hit description =Geranyltranstransferase
KPYYVDLIEIWLRRIIQRHFKGKPYYVDLIDLFNEVEFKTASGQLLDLFTL

SEQ ID NO: 72915 - protein, 86 aa, Setaria italica
  misc_feature (72)..(72): Xaa can be any naturally occurring amino acid
  Transcript Sequence Number=SeqID_6941
  Gene Ontology: Mol. function=dimethylallyltranstransferase activity; Cellular component=cytoplasm; Biological process=cholesterol biosynthetic process
  Homolog annotation: Hit_ID=P49353; Match level="QueryCoverage=74%, HitCoverage=18%, E-value=7e-25, Identity=84%"; Hit description =Geranyltranstransferase
MAAGGNGAAGGGGTDTKAAFAQIYNTLKEELLADPAFEFTAESHQWIDRMIDYTVLGGKCNRGLSVVDSYKXLKGADVLGEEEMFH

SEQ ID NO: 72916 - protein, 65 aa, Setaria italica
  Transcript Sequence Number=SeqID_6942
  Gene Ontology: Mol. function=transferase activity; Cellular component= cytoplasm; Biological process=isoprenoid biosynthetic process
  Homolog annotation: Hit_ID=P49353; Match level="QueryCoverage=76%, HitCoverage=14%, E-value=1e-18, Identity=84%"; Hit description =Geranyltranstransferase
MATAGAVVANGSGGPDTRAAFKEIYSKLKEEMLEDPAFEFTDESLQWIDRMVDYNVLGGKCNRGL

SEQ ID NO: 72917 - protein, 38 aa, Setaria italica
  Transcript Sequence Number=SeqID_6943
  Gene Ontology: Mol. function=transferase activity; Cellular component= mitochondrion; Biological process=isoprenoid biosynthetic process
  Homolog annotation: Hit_ID=Q09152; Match level="QueryCoverage=78%, HitCoverage=7%, E-value=8e-11, Identity=96%"; Hit description =Geranyltranstransferase
ITILTFQLQAYFLVLDDIMDNSQTRRGQPCWFRVPQVR

SEQ ID NO: 72918 - protein, 96 aa, Setaria italica
  Transcript Sequence Number=SeqID_6944
  Gene Ontology: Mol. function=dimethylallyltranstransferase activity; Cellular component=cytoplasm; Biological process=cholesterol biosynthetic process
  Homolog annotation: Hit_ID=P49353; Match level="QueryCoverage=100%, HitCoverage=27%, E-value=5e-46, Identity=95%"; Hit description =Geranyltranstransferase
IGTDIEDYKCSWLVVQALERADESQKRILFENYGKKDPACVAKVKNLYIELNLEAVFQEYESESYKKLIADIEAQPSIAVQNVLKSFLHKIYKRQK

SEQ ID NO: 72919 - protein, 362 aa, Setaria italica
  Transcript Sequence Number=SeqID_6945
  Gene Ontology: Mol. function=dimethylallyltranstransferase activity; Cellular component=cytoplasm; Biological process=cholesterol biosynthetic process
  Homolog annotation: Hit_ID=P49353; Match level="QueryCoverage=93%, HitCoverage=97%, E-value=0.0, Identity=90%"; Hit description =Geranyltranstransferase
  Pfam annotation: Domain name=polyprenyl_synt; Domain location=54-325; Score=336.6; E_value=4.8e-98; Accession=PF00348.9; Description =Polyprenyl synthetase
GKVLWSVGLGNGNVGPDGAGGTDTKAAFEEIYNTLKEELLADPAFEFTAESHQWIDRMIDYTVLGGKCNRGLSVVDSYKLLKGADVLGEEEMFHACTLGWCIEWLQAFFLVLDDIMDGSHTRRGQPCWFRVPQVGFIAVNDGIILRNHICRILKRHFKGKPYYADLVDLFNEVEFKTASGQLLDLITTHEGEKDLTKYNITVHRRIVQYKTAYYSFYLPVACALLLSGENLENYGTVENILVEMGTYFQVQDDYLDCYGDPEFIGKIGTDIEDYKCSWLVVQALERADEDQKRILFENYGKSDPACVAKVKDLYKELNLEEVFHEYEKESYNKLIADIEAQPSKAVQTVLKSFLHKIYKRDK

SEQ ID NO: 72920 - protein, 153 aa, Setaria italica
  misc_feature (15)..(15): Xaa can be any naturally occurring amino acid
  Transcript Sequence Number=SeqID_6946
  Gene Ontology: Mol. function=ATPase activity, coupled to transmembrane movement of substances; Cellular component=integral to membrane; Biological process=transport
  Homolog annotation: Hit_ID=Q8GU72; Match level="QueryCoverage=95%, HitCoverage=11%, E-value=8e-53, Identity=63%"; Hit description=MDR -like ABC transporter
SKVSDEGEECRKVPXSRLISLNEPEMPVLLLGTMAAVVSGVIFPILGLLISGSIKSFYEPPHQLRKDSRFWTLMYVASGVVSFICLPVEYFLFGVAGGKLVERIRSLSFKSIVHQEISWFDKPSNASGTIGARLSVDASNIRRLVGDSLALHW

SEQ ID NO: 72921 - protein, 152 aa, Setaria italica
  misc_feature (117)..(117): Xaa can be any naturally occurring amino acid
  Transcript Sequence Number=SeqID_6947
  Gene Ontology: Mol. function=ATPase activity, coupled to transmembrane movement of substances; Cellular component=integral to membrane; Biological process=transport
  Homolog annotation: Hit_ID=B9RN48; Match level="QueryCoverage=96%, HitCoverage=11%, E-value=2e-19, Identity=39%"; Hit description =Multidrug resistance protein 1, 2, putative
  Subcellular localization annotation: CTP_CleavageSite=64; ConfidenceScore=5.01e-01
CCILPAIQLQDITGEPDACDAGYQRSTSAVRSVKSSKYIHSASLKRSISGGASFGSTSMHLITTASMIVRYSTHAELLSKVSDEGEECRKVPLSRLISLNEPEMPVLLLGTMAAVVXKGVIFPILGLLISGSIKSFYEPPHQLRKDSRFWTL

SEQ ID NO: 72922 - protein, 381 aa, Setaria italica
  misc_feature (178)..(178): Xaa can be any naturally occurring amino acid
  misc_feature (285)..(285): Xaa can be any naturally occurring amino acid
  misc_feature (342)..(342): Xaa can be any naturally occurring amino acid
  Transcript Sequence Number=SeqID_6948
  Gene Ontology: Mol. function=ATPase activity, coupled to transmembrane movement of substances; Cellular component=integral to membrane; Biological process=transport
  Homolog annotation: Hit_ID=Q7FMW2; Match level="QueryCoverage=97%, HitCoverage=86%, E-value=3e-78, Identity=44%"; Hit description=MDR -like ABC transporter
  Pfam annotation: Domain name=ABC_membrane; Domain location=1-190; Score=-23.3; E_value=0.016; Accession=PF00664.15; Description=ABC transporter transmembrane region
  Pfam annotation: Domain name=ABC_tran; Domain location=264-371; Score= 77.7; E_value=4.3e-20; Accession=PF00005.19; Description=ABC transporter
  Pfam module annotation: Pfam domain module=ABC_membrane::ABC_tran; Domain location=1-190::264-371
  Subcellular localization annotation: CTP_CleavageSite=23; ConfidenceScore=5.17e-01
MMKPACHYSFMSSGTIGARLSVDASNIRRLVGDSLALMVRSTVTVLAGFIIAMAANWRLALVATIVLPLGGLQGFLQIKFLEGFSADAKAMYEEATQVANDAVSIIRTVASFCAEAKVMKTYYRKCKAPVQQGIRQGIVSGSGFGVSFFILYCTYALCFYVGAKFMLDGKATFTEVFXVFFALLMATIGVSQTSALGSDSAKAKESASSIFALIDRKSKIDPNSDNGMVLADVAAELELRHVCFSCPSRPEMQILDLNLRIPSGKTVALVGESGCGKSTIIALRXRRLPWGYGTFAIERGAQLSGGQRQRVAIARAVLRDPRILLLDEATSALDAESERAVXAAAGRTAVVVAHRLPTIMGADVIAVLRDGGVVALGTHEQ

SEQ ID NO: 72923 - protein, 130 aa, Setaria italica
  Transcript Sequence Number=SeqID_6949
QESVAVAVADHRPPPVSQRTRGSAMTQHRRRQALEQEVADLQKQLSDEQTVHQILERALQPSSARSAVLSIPAFIPAKAKELLAELLLVEEEIARLEDQIKTMKQGGRGGMTMPPPEPDAPPPTTNSKSP

SEQ ID NO: 72924 - protein, 431 aa, Setaria italica
  misc_feature (21)..(21): Xaa can be any naturally occurring amino acid
  misc_feature (31)..(31): Xaa can be any naturally occurring amino acid
  Transcript Sequence Number=SeqID_6950
  Gene Ontology: Mol. function=nucleic acid binding; Cellular component= ribonucleoprotein complex; Biological process=RNA processing
  Homolog annotation: Hit_ID=Q2QVL9; Match level="QueryCoverage=59%, HitCoverage=53%, E-value=1e-100, Identity=70%"; Hit description =Transposon protein, putative, Mutator sub-class, expressed
  Pfam annotation: Domain name=La; Domain location=81-140; Score=101.6; E_value=2.6e-27; Accession=PF05383.9; Description=La domain
  Subcellular localization annotation: CTP_CleavageSite=38; ConfidenceScore=5.13e-01
APPQPPPPQAVVRLFPPPPPXAFFVAGPPPXPPPFEYYAAAVAGGGARFGGPPGAAAGAEQEVDAESPARDVGFDDPVHKIRKQVEYYFSDINLATTEHLMRFISKDPEGYVPISVVGGFKKIKALVQSNSMLASALRTSSKLVVSDDGTRVKRQQPFTESDLEELQARIVVAENLPDDHCYQNLMRLFSAAGSVRTIRTCYPQTPNGTGPATNRSAKLDMFFANKLHAFVEYDTMEDASRAIVELNDERNWRSGLRVRLLSTCMIKGGKGKKGGHEADGYGEEENVSTSDQRNDKQLEEAPQLSDAAGEHMTEDGTGDMGRGRGRGRGRGGRGRGRGYHQYNNNQQHQNQQQQHQNSSQHGNNRNGAHPVGTPPSGHQVKNEQQSQPQQPSAANKQPPGPRMPDGTRGFAMGRGKPQSSAPTVAASESEP

SEQ ID NO: 72925 - protein, 80 aa, Setaria italica
  Transcript Sequence Number=SeqID_6951
  Subcellular localization annotation: CTP_CleavageSite=49; ConfidenceScore=5.66e-01
MPPSPLLAPATALPAARLARVVAASSGSGGATQRGPPRRGRRGKPGFSRQSAIKKSFHQEQVVFSTPVPADPTVAVIGGG

SEQ ID NO: 72926 - protein, 70 aa, Setaria italica
  Transcript Sequence Number=SeqID_6952
  Gene Ontology: Mol. function=structural constituent of ribosome; Cellular component=ribonucleoprotein complex; Biological process =translation
  Homolog annotation: Hit_ID=B6TRR4; Match level="QueryCoverage=100%, HitCoverage=47%, E-value=3e-29, Identity=95%"; Hit description=60S ribosomal protein L36
  Pfam annotation: Domain name=Ribosomal_L36e; Domain location=1-62; Score=59.7; E_value=1.1e-14; Accession=PF01158.10; Description =Ribosomal protein L36e
MARGLIREVAGFAPYEKRITELLKVGKDKRALKVAKRKLGTHKRAKKKREEMANVLRKMRSAGTHTDKKK

SEQ ID NO: 72927 - protein, 85 aa, Setaria italica
  Transcript Sequence Number=SeqID_6953
  Gene Ontology: Cellular component=nucleus
  Homolog annotation: Hit_ID=Q84UX6; Match level="QueryCoverage=61%, HitCoverage=13%, E-value=3e-09, Identity=61%"; Hit description =Nucleosome/chromatin assembly factor group A
  Pfam annotation: Domain name=NAP; Domain location=1-79; Score=-117.4; E_value=0.012; Accession=PF00956.10; Description=Nucleosome assembly protein (NAP)
HLILKKKPKKGSKNAKPITKTEVCESFFNFFNPPEVPDDEEDIDEETADELQGQMEHDYDIGTTIRDKIIPHHHHPCPQNHQLAQ

SEQ ID NO: 72928 - protein, 157 aa, Setaria italica
  Transcript Sequence Number=SeqID_6954
  Gene Ontology: Cellular component=nucleus; Biological process =nucleosome assembly
  Homolog annotation: Hit_ID=Q84UX6; Match level="QueryCoverage=89%, HitCoverage=37%, E-value=8e-31, Identity=53%"; Hit description =Nucleosome/chromatin assembly factor group A
  Pfam annotation: Domain name=NAP; Domain location=1-86; Score=-85.5; E_value=7e-05; Accession=PF00956.10; Description=Nucleosome assembly protein (NAP)
NLLCKVFPRIPKEGSENAKPITKTEVCESFFNFFNPPEVPDDEEDIDEETADELQGQMEHDYDIGTTIRDKIIPHAVSWFTGEAVQADDFEDMGDDDEDDNEDEDDDEDEDEEEEEDEEDEEEESKPARKSGSGRKQKVTQKVTQGNAEQPPECKQQ

SEQ ID NO: 72929 - protein, 111 aa, Setaria italica
  Transcript Sequence Number=SeqID_6955
  Gene Ontology: Mol. function=structural constituent of ribosome; Cellular component=ribonucleoprotein complex; Biological process =translation
  Homolog annotation: Hit_ID=Q8L5X0; Match level="QueryCoverage=100%, HitCoverage=100%, E-value=2e-49, Identity=92%"; Hit description=60S ribosomal protein L36
  Pfam annotation: Domain name=Ribosomal_L36e; Domain location=5-103; Score=158.7; E_value=1.8e-44; Accession=PF01158.10; Description =Ribosomal protein L36e
  Subcellular localization annotation: CTP_CleavageSite=39; ConfidenceScore=5.26e-01
MAPPQPKSGLFVGINKGHVVTKRELPPRPSHRKGKATKRVTMVRGLIREVAGFAPYEKRITELLKVGKDKRALKVAKRKLGTHKRAKKKREEMANVLRKMRSAGTHTDKKK

SEQ ID NO: 72930 - protein, 861 aa, Setaria italica
  misc_feature (283)..(283): Xaa can be any naturally occurring amino acid
  Transcript Sequence Number=SeqID_6956
  Gene Ontology: Mol. function=DNA-directed DNA polymerase activity; Biological process=transcription
  Homolog annotation: Hit_ID=A2Q1A6; Match level="QueryCoverage=92%, HitCoverage=60%, E-value=0.0, Identity=48%"; Hit description=DNA polymerase V
  Pfam annotation: Domain name=DNA_pol_phi; Domain location=175-861; Score=104.4; E_value=3.8e-28; Accession=PF04931.5; Description=DNA polymerase phi
  Subcellular localization annotation: CTP_CleavageSite=45; ConfidenceScore=5.15e-01
DAAKLQPPATEAAAPANPTPAPAATGPGLHMNVFRDLASPEASVREAAAEALVSELREVQKAYEKGARKGEREAADGDASSQMEAEKDDGLDNCAPSVRYAIRRLIRGISSSREYARQGFALGLAVVLESIRAIRVEAVMKLIPNLLEYSSSMKGPEAKDNVLGRLFGFGAIVRSGRVSRQWTRDKSSPIVKDFVNEVVELSTKKRYLTEPAVAVILDLVRKLPDEAILSEVLEAPGVQDWFHRAANIGDPDALFLALKLQERTSVQKEIFGKLLPYPFSPEXLFAEQHLKSIAACFKESAFCLPRIHSLWLVIMEMLVREASQHDINTTSSKKHKKNKKASSSEDTKKNLQNFCEVVIEGSLLLSSHDRKHLAFNILLNLLPKLSPPAIQVVLSSKVVLGLMDILSNESSWLYNAGKHFLKELVGVVSDDNDRRAAVIINLQKYSGGRFDSMTKTKIVKELIGKFQSVEDCLCLVQNLMALFVDEESVTDEPSDQSQTTDEASEIGPTEEQGPLGQGNVDLLKSWVVNTISCVLKNLKLTSKGNSDSEMVKCIEEKFQVQTEVLKFLAVQGLFSASLGTEVTSFELQEKFKWPKNPISTSLRNECIEQLQFLLEDAQKDEALHVASEVKSNDLGYYFMHFINTVCNIPSVSLFRTLSGNDDNAFKKLLAIESMLFHEERKAGPGLDSTKMHVMRYLLIQLLLQVLLHPDEYWEAAVDVTICCKKSFPAIAQGDNSSGQESGEQGSQESDEDGSEQSGKDGPEDSNEEVSLEFMDVLVQTFLSILPHASGPVCFTIEQVFRVFCDDITETGLLDMLRVVKIDLKGRGQTDSDDEDDGRVDIEDDDETVMEDAGRVGRKLMM

SEQ ID NO: 72931 - protein, 386 aa, Setaria italica
  Transcript Sequence Number=SeqID_6957
  Gene Ontology: Cellular component=nucleus; Biological process =nucleosome assembly
  Homolog annotation: Hit_ID=Q84UX6; Match level="QueryCoverage=80%, HitCoverage=81%, E-value=1e-118, Identity=70%"; Hit description =Nucleosome/chromatin assembly factor group A
  Pfam annotation: Domain name=NAP; Domain location=59-308; Score =469.6; E_value=4.6e-138; Accession=PF00956.10; Description =Nucleosome assembly protein (NAP)
MGGEKDTFDLADLNASLPAAAAALSAEDRAGLVNALKDKLQSLAGQHADVLETLSPNVRKRVEFLREIQGQHDDIEAKFFEERAALEAKYQKLYEPLYTKRYEIVNGVVEVEGVSDEPTSENAAEGKESDAKGVPDFWLTAMKTNEILSEEIQERDEAALKYLKDIKWSRIEDPKGFKLEFFFDTNPFFKNSILTKTYHMVDEDDPILEKAIGTEIEWYPGKNLTQKILKKKPKKGSKNAKPITKTEVCESFFNFFNPPEVPDDEEDIDEETADELQGQMEHDYDIGTTIRDKIIPHAVSWFTGEAVQADDFEDMGDDDEDDNEDEDDDEDEDEEEEEDEEDEGRLVLTLIRRNRSSQVCEAGGDILLCLFFISVEPNRLVKVLVS

SEQ ID NO: 72932 - protein, 111 aa, Setaria italica; identical to SEQ ID NO: 72929
  Transcript Sequence Number=SeqID_6958
  Gene Ontology: Mol. function=structural constituent of ribosome; Cellular component=ribonucleoprotein complex; Biological process =translation
  Homolog annotation: Hit_ID=Q8L5X0; Match level="QueryCoverage=100%, HitCoverage=100%, E-value=2e-49, Identity=92%"; Hit description=60S ribosomal protein L36
  Pfam annotation: Domain name=Ribosomal_L36e; Domain location=5-103; Score=158.7; E_value=1.8e-44; Accession=PF01158.10; Description =Ribosomal protein L36e
  Subcellular localization annotation: CTP_CleavageSite=39; ConfidenceScore=5.26e-01

SEQ ID NO: 72933 - protein, 90 aa, Setaria italica
  Transcript Sequence Number=SeqID_6959
  Gene Ontology: Cellular component=plasma membrane; Biological process= vesicle docking during exocytosis
  Homolog annotation: Hit_ID=Q8RYE3; Match level="QueryCoverage=60%, HitCoverage=10%, E-value=5e-09, Identity=51%"; Hit description =Putative MYB family transcription factor
  Pfam annotation: Domain name=DUF641; Domain location=24-90; Score =32.0; E_value=5.4e-07; Accession=PF04859.4; Description=Plant protein of unknown function (DUF641)
MIRPGSKESQNYDNNNQKVHPQPIDENMNRNGDSMDTMIGRIFNNISSLKSAYIQLQEAHTPYDPDKIQEADKLVIEELTKLSELKHTYR

SEQ ID NO: 72934 - protein, 422 aa, Setaria italica
  Transcript Sequence Number=SeqID_6960
  Gene Ontology: Cellular component=plasma membrane
  Homolog annotation: Hit_ID=B2ZAQ7; Match level="QueryCoverage=91%, HitCoverage=58%, E-value=2e-66, Identity=36%"; Hit description=UNE1 -like protein
  Pfam annotation: Domain name=DUF641; Domain location=24-159; Score =256.0; E_value=9.2e-74; Accession=PF04859.4; Description=Plant protein of unknown function (DUF641)
MIRPGSKESQNYDNNNQKVHPQPIDENMNRNGDSMDTMIGRIFNNISSLKSAYIQLQEAHTPYDPDKIQEADKLVIEELTKLSELKHTYREKNPKPVAASPQDSRLLSEIQEQQNLLKTYEVMVKKFQSQIQTRDTEITHLQQQIDEAKLRKSKLEKKLKQRGLLNKESEESDEEENYFSIELTPSLFTSAVDNAYQSMHDFSKPLINMMKAAGWDLDAAANAIEPGVVYTRRAHKKYAFESYICQRMFSGFQEESFSIKDSNISVSNEAFFHQFLAVRAMDPLDVLSQNPDSIFGKFCRSKYLLLVHPKMEGSFFGNMDQRNYVMSGGHPRTPFYQAFLKLAKSIWLLHRLAYSFDPKVKVFQVKRGSEFADIHMESVVKNIILDEGAERPKVGLMVMPGFLIGTSIIQARVYLSGVKCAD

SEQ ID NO: 72935 - protein, 114 aa, Setaria italica
  Transcript Sequence Number=SeqID_6961
  Subcellular localization annotation: CTP_CleavageSite=47; ConfidenceScore=5.18e-01
ADVARLAAAVIASGEKARAARRRMRPASSPAATAKVAAVVAPPEVVEAAAAAAPLLETDASKPRAPRLEEMAVDDEAAAAEIEELKQRLSGGGRRSRRPTLETIQEESYAAARC

SEQ ID NO: 72936 - protein, 48 aa, Setaria italica
  Transcript Sequence Number=SeqID_6962
PMAFGCIYTRIWTALQHHSYFLWHTMLAFSYFYKSPMVLTTMDVFVCV

SEQ ID NO: 72937 - protein, 47 aa, Setaria italica
  Transcript Sequence Number=SeqID_6963
  Homolog annotation: Hit_ID=B6UBY6; Match level="QueryCoverage=100%, HitCoverage=12%, E-value=2e-15, Identity=82%"; Hit description =Vegetative cell wall protein gp1
RNDLWVSRFGTDAFNRKISSALWLSFIGFLMLALNALISTANLFSMV

SEQ ID NO: 72938 - protein, 329 aa, Setaria italica
  Transcript Sequence Number=SeqID_6964
  Gene Ontology: Mol. function=transferase activity; Cellular component= integral to membrane; Biological process=biosynthetic process
  Homolog annotation: Hit_ID=Q2QN13; Match level="QueryCoverage=98%, HitCoverage=70%, E-value=1e-167, Identity=86%"; Hit description =Glycosyl transferase, group 1 family protein, expressed
  Pfam annotation: Domain name=Glycos_transf_1; Domain location=121 -303; Score=116.2; E_value=1e-31; Accession=PF00534.12; Description =Glycosyl transferases group 1
PNFNPQITNFDTSGYAFTYPLALLFGCKVISYTHYPTISCDMIGRVKQRSSMYNNNSRIAGSIWLSRCKILYYTIFSWLYELVGSCAHLVMVNSSWTKSHIINIWKIPERTKRVYPPCDTSALQMLPLERSTTPPVFISVAQFRPEKAHGFQLEAFALALTRLDPEFPKPKLQFVGSCRNKEDLERLQKLKDRAIELHINELVEFHKDISYMDLVQLLGGAIAGLHSMTDEHFGIVVVEYMAAGAIPIAHKSAGPMMDIVLDEDGHRTGFLASEKEEFADAIIKVLRMSEQERQEMAAASRKRAQRFSGQRFHEDFTEAVRPILLLRES

SEQ ID NO: 72939 - protein, 263 aa, Setaria italica
  Transcript Sequence Number=SeqID_6965
  Homolog annotation: Hit_ID=B8Q8A2; Match level="QueryCoverage=95%, HitCoverage=98%, E-value=2e-71, Identity=61%"; Hit description=SKIP interacting protein 16
MVGSTAPPPQMEDASRVPPLPGGAEEYVRDSIHSSLGLPVSDRSLRLKLLASEDQRHRLQDHVFSLEEDLRAAHRRIDLLKAEAAMNAAGLRRCVEDKEAMAAAYAELNAKCAKECDLYERDLERAMESCDDLARENNDLRARLNQNADLAALTARVQELERDKEALKMNLDTAEAEVITLSEDNRVLDEENKRLLGLLEKERQRRSERKKSASTSTKNKRKSSSLRDGSPAGRALDFGGADSSRHPLSPLPHNSPDYRAHKK

SEQ ID NO: 72940 - protein, 214 aa, Setaria italica
  Transcript Sequence Number=SeqID_6966
  Gene Ontology: Mol. function=transporter activity; Cellular component= membrane; Biological process=oligopeptide transport
  Homolog annotation: Hit_ID=B9RU48; Match level="QueryCoverage=100%, HitCoverage=34%, E-value=5e-73, Identity=59%"; Hit description =Nitrate transporter, putative
  Pfam annotation: Domain name=PTR2; Domain location=1-214; Score= -50.6; E_value=0.00015; Accession=PF00854.13; Description=POT family
LHTNQLTFLDRAAIVTPGDISDSGQPNLWRLSTVHRVEELKSIIRLLPIWSAGIMLATAGSHNYTFTIMQARTMDRHMRPYFQFPPATLSIFSTAAMLVTLAFYDRAFVPLARRVTGLPSGITYFQRMGIGLAISILSVASAALVETKRRDAAARHGLLDNPATVVPLSVFWLVPQFAVHGIGDAFSSVALMEFLYDQAPESMRSSAVALFWLA

SEQ ID NO: 72941 - protein, 130 aa, Setaria italica
  misc_feature (94)..(94): Xaa can be any naturally occurring amino acid
  Transcript Sequence Number=SeqID_6967
  Gene Ontology: Mol. function=serine-type endopeptidase activity; Cellular component=cell wall; Biological process=negative regulation of catalytic activity
  Homolog annotation: Hit_ID=B9SV70; Match level="QueryCoverage=90%, HitCoverage=22%, E-value=4e-38, Identity=65%"; Hit description =Peptidase, putative
  Subcellular localization annotation: CTP_CleavageSite=36; ConfidenceScore=5.34e-01
LLSAVKAGIFVVQAAGNTGPSPKSMSSYSPWIFTVGASAHDRVYNNYVVLGNNLTIQGVGLAPGTDGDCMYTLIAAPHALKNNTASPTELSLGXCQDSSRLDADLIKGKILVCSYSIRFVTLVLFFLVVN

SEQ ID NO: 72942 - protein, 60 aa, Setaria italica
  misc_feature (58)..(58): Xaa can be any naturally occurring amino acid
  Transcript Sequence Number=SeqID_6968
  Subcellular localization annotation: CTP_CleavageSite=38; ConfidenceScore=5.05e-01
NNGRSENMSGRGAAAGEHAQRASPFRERRRPPHLRRPRGAAAVLPPHRRVLSRTCLNXTN

SEQ ID NO: 72943 - protein, 108 aa, Setaria italica
  misc_feature (61)..(61): Xaa can be any naturally occurring amino acid
  Transcript Sequence Number=SeqID_6969
  Gene Ontology: Mol. function=hydrolase activity; Cellular component =mitochondrion
  Homolog annotation: Hit_ID=B6SQG1; Match level="QueryCoverage=94%, HitCoverage=54%, E-value=9e-42, Identity=82%"; Hit description=Nudix hydrolase 13
MCDLVARTGRHQQRYEDGRRLVAGCIPFRYRANNDETSDDKHKKLVEVLMINSQSGPGLLXPKGGWENDETVEEAAAREAIEEAGVRGDIVHLLGFYDFKSKDTSRCV

SEQ ID NO: 72944 - protein, 191 aa, Setaria italica
  Transcript Sequence Number=SeqID_6970
  Gene Ontology: Mol. function=hydrolase activity; Cellular component =mitochondrion
  Homolog annotation: Hit_ID=B6SQG1; Match level="QueryCoverage=94%, HitCoverage=90%, E-value=6e-82, Identity=83%"; Hit description=Nudix hydrolase 13
  Pfam annotation: Domain name=NUDIX; Domain location=31-174; Score =54.1; E_value=5.2e-13; Accession=PF00293.20; Description=NUDIX domain
MCDLVARTGRHQQRYEDGRRLVAGSGICSLFCRCIPFRYRANNDETSDDKHKKLVEVLMINSQSGPGLLFPKGGWENDETVEEAAAREAIEEAGVRGDIVHLLGFYDFKSKTHQDACCPEGMCRAAVFALHVKEELTSWPEQSTRQRTWLTVPEAASQCRYQWMQEALLTGFSEWHDKWSRSGGGTDCDPA

SEQ ID NO: 72945 - protein, 88 aa, Setaria italica
  misc_feature (56)..(56): Xaa can be any naturally occurring amino acid
  Transcript Sequence Number=SeqID_6971
  Gene Ontology: Mol. function=cinnamoyl-CoA reductase activity; Biological process=cellular metabolic process
  Homolog annotation: Hit_ID=B6T555; Match level="QueryCoverage=86%, HitCoverage=21%, E-value=9e-21, Identity=64%"; Hit description =Dihydroflavonol-4-reductase
MASSATTSQPPRVCVTGGGGYVASWLVKLLLSHGYAVHATVRDPSGPKNAHLRRLXGAPERLLLFKADVLDRAALAAAVAGCQGVFHV

SEQ ID NO: 72946 - protein, 198 aa, Setaria italica
  Transcript Sequence Number=SeqID_6972
DVGIGGSCSDLLDYLYSSLSSGQVRIRFPVDQGPGTATAKLVATKAKGLPLITLSLHPVAASELEDAIADFSIALYASYKTTQEHASREQERLSQLMDSLASEREKNEVMQKQLEALSFLDKRKATKQKLVTDQVPSVSGAPPVSDQVIVPVQQQTSVASPSKVPPAKAVKRVAPVPRRARVRGALLQDTEENDDCDS

SEQ ID NO: 72947 - protein, 110 aa, Setaria italica
  Transcript Sequence Number=SeqID_6973
  Gene Ontology: Mol. function=protein serine/threonine kinase activity; Biological process=protein amino acid phosphorylation
  Homolog annotation: Hit_ID=P51567; Match level="QueryCoverage=41%, HitCoverage=10%, E-value=2e-11, Identity=71%"; Hit description =Serine/threonine-protein kinase AFC2
  Subcellular localization annotation: CTP_CleavageSite=44; ConfidenceScore=5.83e-01
YGRPSTFPSPTSSSSQFPNSQPPPRSGTRANRSTTSNRNGGQVRCRRGRSGHRPPPQAPEAWLGRGAGCRDKIYRKMGEGTFGQVLECWDRESKEMVAIKVIRSVQKYSD

SEQ ID NO: 72948 - protein, 69 aa, Setaria italica
  Transcript Sequence Number=SeqID_6974
RNHDSMLLQHRRCHRVMVSSQDMVKGGLYDISDSEEAFSHGFFTKSRDMAIGSRYDISDECSVASSEMS

SEQ ID NO: 72949 - protein, 79 aa, Setaria italica
  Transcript Sequence Number=SeqID_6975
  Gene Ontology: Mol. function=protein serine/threonine kinase activity; Biological process=protein amino acid phosphorylation
  Homolog annotation: Hit_ID=B9T436; Match level="QueryCoverage=81%, HitCoverage=18%, E-value=6e-18, Identity=63%"; Hit description=Afc, putative
MGWHDLFLLYPDVCLSFLAVMHRLQLIHTDLKPENILLVSSDYVKLPDSKDGSFSRKLPKSSAIKLIDFGSAAYHHQDR

SEQ ID NO: 72950 - protein, 159 aa, Setaria italica
  Transcript Sequence Number=SeqID_6976
  Gene Ontology: Mol. function=protein serine/threonine kinase activity; Biological process=protein amino acid phosphorylation
  Homolog annotation: Hit_ID=P51566; Match level="QueryCoverage=86%, HitCoverage=29%, E-value=2e-57, Identity=76%"; Hit description =Serine/threonine-protein kinase AFC1
  Pfam annotation: Domain name=Pkinase; Domain location=18-159; Score= -62.4; E_value=8.9e-05; Accession=PF00069.17; Description=Protein kinase domain
TCCSHRNGTVLIYFFFSDKIYRKMGEGTFGQVLECWDRESKEMVAIKVIRSVQKYSDAAMIEIDVLQKLARNDASGKHCVQIRNWFDYRSHICIVCEKLGPSLYDFLRKTGYRPFPIDLVRQIGEQLLESVAFMHRLQLIHTDLKPENILLVSVRYYCY

SEQ ID NO: 72951 - protein, 248 aa, Setaria italica
  Transcript Sequence Number=SeqID_6977
  Gene Ontology: Mol. function=protein serine/threonine kinase activity; Biological process=protein amino acid phosphorylation
  Homolog annotation: Hit_ID=P51567; Match level="QueryCoverage=91%, HitCoverage=53%, E-value=1e-94, Identity=72%"; Hit description =Serine/threonine-protein kinase AFC2
  Pfam annotation: Domain name=Pkinase; Domain location=97-248; Score= -24.6; E_value=5e-07; Accession=PF00069.17; Description=Protein kinase domain
  Pfam annotation: Domain name=Pkinase_Tyr; Domain location=97-248; Score=-168.4; E_value=0.016; Accession=PF07714.9; Description =Protein tyrosine kinase
  Pfam module annotation: Pfam domain module=Pkinase::Pkinase_Tyr; Domain location=97-248::97-248
MAAKCAAAAADLATGRPRKRPRLGWDVAPAAEAQIGTFCGQEVGGVASLLLSANHSDHTCSSLLPKGVARNASPPWREDDKDGHYVFAVGENLTSRYKIYRKMGEGTFGQVLECWDRESKEMVAIKVIRSVQKYSDAAMIEIDVLQKLARNDASGKHCVQIRNWFDYRSHICIVCEKLGPSLYDFLRKTGYRPFPIDLVRQIGEQLLESVAFMHRLQLIHTDLKPENILLVSSDYVKLPDSKVLLPFT

SEQ ID NO: 72952 - protein, 65 aa, Setaria italica
  Transcript Sequence Number=SeqID_6978
  Gene Ontology: Mol. function=protein serine/threonine kinase activity; Cellular component=nucleus; Biological process=protein amino acid phosphorylation
  Homolog annotation: Hit_ID=B9T436; Match level="QueryCoverage=98%, HitCoverage=16%, E-value=1e-25, Identity=78%"; Hit description=Afc, putative
DGSFSRKLPKSSAIKLIDFGSAAYHHQDRSYIVSTRHYRAPEVILGHGWSYPCDIWDVGCILVES

SEQ ID NO: 72953 - protein, 225 aa, Setaria italica
  Transcript Sequence Number=SeqID_6979
  Gene Ontology: Mol. function=protein serine/threonine kinase activity; Cellular component=nucleus; Biological process=protein amino acid phosphorylation
  Homolog annotation: Hit_ID=O49967; Match level="QueryCoverage=97%, HitCoverage=52%, E-value=4e-95, Identity=73%"; Hit description=PK12 protein kinase
  Pfam annotation: Domain name=Pkinase; Domain location=1-216; Score =20.7; E_value=1e-09; Accession=PF00069.17; Description=Protein kinase domain
TRGNLLESVAFMHRLQLIHTDLKPENILLVSSDYVKLPDSKDGSFSRKLPKSSAIKLIDFGSAAYHHQDRSYIVSTRHYRAPEVILGHGWSYPCDIWSVGCILVELCSGETLFQTHENLEHLAMMERVLGSLPRHMLEKADQHAEKYVRRGKLNWPEGATTRESIRAVLKLPRLQNLVMQHVDHSAGDFIDLLKRLLAYEPSARLTAEEALSHGFFTRYGERRSL

SEQ ID NO: 72954 - protein, 228 aa, Setaria italica
  Transcript Sequence Number=SeqID_6980
  Gene Ontology: Mol. function=polyribonucleotide nucleotidyltransferase activity; Cellular component=chloroplast; Biological process=mRNA catabolic process
  Homolog annotation: Hit_ID=B9SI65; Match level="QueryCoverage=100%, HitCoverage=24%, E-value=9e-76, Identity=62%"; Hit description =Polyribonucleotide nucleotidyltransferase, putative
  Pfam annotation: Domain name=PNPase; Domain location=93-220; Score =30.5; E_value=2.9e-06; Accession=PF03726.6; Description =Polyribonucleotide nucleotidyltransferase, RNA binding domain
  Pfam annotation: Domain name=RNase_PH_C; Domain location=1-63; Score =55.8; E_value=1.6e-13; Accession=PF03725.7; Description=3' exoribonuclease family, domain 2
  Pfam module annotation: Pfam domain module=PNPase::RNase_PH_C; Domain location=93-220::1-63
LAGVRVGLINGQFVINPTTEQMENSELDLMMAGTDSAILMIEGYCDFLTEEKLLEAVEAGQVAIREICKAIDVLVQNCGKKKMVDAIALPPPELYRHVEDISGDELVKALQIKEKIPRRKALSAVEEKVITILSEQGYVCKDISSGVAESLDDIVEDEDEDEVIVDGEVDEGDVHIKPVSRKPPRQLFAEVDVKLVFKEVSSKYLRRRIVEGGKRSDGRSPWELRPIN

SEQ ID NO: 72955 - protein, 49 aa, Setaria italica
  Transcript Sequence Number=SeqID_6981
IPVTTYTCRSRRPLTVPKEPSFLKLKCCIGGEFHRHFCYNGAAAKAIKS

SEQ ID NO: 72956 - protein, 200 aa, Setaria italica
  Transcript Sequence Number=SeqID_6982
  Homolog annotation: Hit_ID=Q2QN69; Match level="QueryCoverage=66%, HitCoverage=33%, E-value=1e-10, Identity=33%"; Hit description =Targeting protein for Xklp2 containing protein, expressed
  Pfam annotation: Domain name=TPX2; Domain location=93-149; Score =28.7; E_value=2.3e-05; Accession=PF06886.3; Description=Targeting protein for Xklp2 (TPX2)
  Subcellular localization annotation: CTP_CleavageSite=63; ConfidenceScore=5.30e-01
MAREMEKARKATSSPKSSTINTGPKSPVRNGGGSPPHKKNVTEPRGRKNEQQNIRKVGQDLVSHDEGKRRSPTSQTSPKRSPRHEQPLSYCRLHTEERAIRRAGYNYQVASKINTQEIIRRFEEKLEQLMEEREIKLMRKEMVPKAQLMPAFDKPFHPQRSRRPLTVPKEPSFLKLKCCIGGEFHRHFCYNGAAAKAIKS

SEQ ID NO: 72957 - protein, 83 aa, Setaria italica
  misc_feature (44)..(44): Xaa can be any naturally occurring amino acid
  Transcript Sequence Number=SeqID_6983
  Gene Ontology: Mol. function=signal transducer activity; Cellular component=nucleus; Biological process=ubiquitin-dependent protein catabolic process
  Homolog annotation: Hit_ID=Q2R2W1; Match level="QueryCoverage=78%, HitCoverage=7%, E-value=8e-18, Identity=70%"; Hit description=Adagio- like protein 3
MGEQRAAAIVVADAAEADFPVIYVNAAFEAATGYRAHEVLGRNXGLLKHLTNCVHSNLSFSRFLQFRDPRAQRRHPLVDPMVV

SEQ ID NO: 72958 - protein, 87 aa, Setaria italica
  Transcript Sequence Number=SeqID_6984
  Gene Ontology: Mol. function=signal transducer activity; Cellular component=nucleus; Biological process=ubiquitin-dependent protein catabolic process
  Homolog annotation: Hit_ID=Q2R2W1; Match level="QueryCoverage=80%, HitCoverage=11%, E-value=6e-36, Identity=98%"; Hit description =Adagio-like protein 3
GEQRAAAIVVADAAEADFPVIYVNAAFEAATGYRAHEVLGRNCRFLQFRDPRAQRRHPLVDPMVVSEIRRCLNEGIEFQGELLNFRK

SEQ ID NO: 72959 - protein, 549 aa, Setaria italica
  Transcript Sequence Number=SeqID_6985
  Gene Ontology: Mol. function=signal transducer activity; Cellular component=nucleus; Biological process=ubiquitin-dependent protein catabolic process
  Homolog annotation: Hit_ID=Q2R2W1; Match level="QueryCoverage=96%, HitCoverage=83%, E-value=0.0, Identity=91%"; Hit description=Adagio -like protein 3
  Pfam annotation: Domain name=F-box; Domain location=140-188; Score =29.5; E_value=1.4e-05; Accession=PF00646.25; Description=F-box domain
  Pfam annotation: Domain name=Kelch_1; Domain location=235-283; Score =21.0; E_value=0.0051; Accession=PF01344.17; Description=Kelch motif
  Pfam annotation: Domain name=Kelch_1; Domain location=287-335; Score =7.3; E_value=0.46; Accession=PF01344.17; Description=Kelch motif
  Pfam annotation: Domain name=Kelch_1; Domain location=340-388; Score =12.3; E_value=0.11; Accession=PF01344.17; Description=Kelch motif
  Pfam annotation: Domain name=Kelch_1; Domain location=392-444; Score =4.4; E_value=1; Accession=PF01344.17; Description=Kelch motif
  Pfam annotation: Domain name=Kelch_2; Domain location=235-283; Score =20.2; E_value=0.0086; Accession=PF07646.7; Description=Kelch motif
  Pfam annotation: Domain name=Kelch_2; Domain location=288-335; Score =22.8; E_value=0.0014; Accession=PF07646.7; Description=Kelch motif
  Pfam annotation: Domain name=Kelch_2; Domain location=339-388; Score =13.8; E_value=0.63; Accession=PF07646.7; Description=Kelch motif
  Pfam annotation: Domain name=Kelch_2; Domain location=393-444; Score =17.2; E_value=0.071; Accession=PF07646.7; Description=Kelch motif
  Pfam annotation: Domain name=Kelch_2; Domain location=453-501; Score =31.4; E_value=3.6e-06; Accession=PF07646.7; Description=Kelch motif
  Pfam annotation: Domain name=Kelch_2; Domain location=507-546; Score =1.0; E_value=32; Accession=PF07646.7; Description=Kelch motif
  Pfam module annotation: Pfam domain module=F-box::Kelch_1::Kelch _1::Kelch_1::Kelch_1::Kelch_2::Kelch_2::Kelch_2::Kelch_2::Kelch _2::Kelch_2; Domain location=140-188::235-283::287-335::340-388::392 -444::235-283::288-335::...
  Pfam module annotation: Domain location=339-388::393-444::453 -501::507-546
  Subcellular localization annotation: CTP_CleavageSite=30; ConfidenceScore=5.09e-01
KLTEGLLKHLTNCVHSNLSFSRFLQFRDPRAQRRHPLVDPMVVSEIRRCLNEGIEFQGELLNFRKDGAPLYNRLRLIPMHGDDGSVTHVIGIQLFSEANIDLSNISYPVYKQQSNHRPTIQDLNSASHEHTPKIQSSDYCGILQLSDEVLAHNILSRLSPRDVASIGSVCTRMHELTKNDHLRKMVCQNAWGRDVTVKLEMSTKMLRWGRLARELTTLEAASWRKFTVGGRVEPSRCNFSACAVGNRLVLFGGEGVNMQPMDDTFVLNLEAPTPEWRRVKVSASPPGRWGHTLSWLNGSWLVVFGGCGQRGLLNDVFVLDLDAQQPTWREVASEGPPLPRSWHSSCTLDGSKLVVSGGCTESGVLLSDTFLLDLTKEKPAWREIPTSWSPPSRLGHTMSVYGTTKLFMYGGLAKSGSLRLRSSDAYTLDVGEDSPQWRQLATTGFPNVGPPPRLDHVAVSLPCGRIIIFGGSIAGLHSPAQLFLIDPAEEKPAWRILNVPGQPPKFAWGHSTCVVGGTRVLVLGGHTGEEWILNELHELCLASRPDEDE

SEQ ID NO: 72960 - protein, 82 aa, Setaria italica
  Transcript Sequence Number=SeqID_6986
MDPSQMMFPMWGAPPPAAMPPPSEDPAAAPNAQPFLPPPNRGWKRKNPAAAYQPPALGDLQVQNRAKARRWFKSSNPNPKPP

SEQ ID NO: 72961 - protein, 158 aa, Setaria italica
  Transcript Sequence Number=SeqID_6987
  Gene Ontology: Mol. function=protein serine/threonine kinase activity; Cellular component=chloroplast; Biological process=protein amino acid phosphorylation
  Homolog annotation: Hit_ID=Q7XQK6; Match level="QueryCoverage=100%, HitCoverage=33%, E-value=5e-80, Identity=90%"; Hit description =OSJNBa0017B10.2 protein
  Pfam annotation: Domain name=Pkinase; Domain location=1-157; Score= -1.5; E_value=2.1e-08; Accession=PF00069.17; Description=Protein kinase domain
  Pfam annotation: Domain name=Pkinase_Tyr; Domain location=1-158; Score=-59.7; E_value=9.2e-10; Accession=PF07714.9; Description =Protein tyrosine kinase
  Pfam module annotation: Pfam domain module=Pkinase::Pkinase_Tyr; Domain location=1-157::1-158
NFLGRLSHPNLVRLLGYCVEDRELLLVYEFMPKGNLENHLFRKGGAFEPIPWNLRLRIAIGAARGLAFLHSSERQIIYRDFKASNILLDTNYNAKLSDFGLAKHGPTGGDSHVTTRVMGTYGYAAPEYVATGHLYVKSDVWAFGVVLLEMLTGLRALD

SEQ ID NO: 72962 - protein, 37 aa, Setaria italica
  Transcript Sequence Number=SeqID_6988
  Gene Ontology: Mol. function=thiamin diphosphokinase activity; Biological process=thiamin diphosphate biosynthetic process
  Homolog annotation: Hit_ID=B6U8T8; Match level="QueryCoverage=100%, HitCoverage=13%, E-value=2e-12, Identity=97%"; Hit description =Thiamin pyrophosphokinase 1
KMRFGSMISTSNIVQSEKVTVQSDADLLWTISLRNLT

SEQ ID NO: 72963 - protein, 156 aa, Setaria italica
  Transcript Sequence Number=SeqID_6989
  Gene Ontology: Mol. function=thiamin diphosphokinase activity; Biological process=thiamin diphosphate biosynthetic process
  Homolog annotation: Hit_ID=B6U8T8; Match level="QueryCoverage=99%, HitCoverage=58%, E-value=5e-80, Identity=93%"; Hit description =Thiamin pyrophosphokinase 1
  Pfam annotation: Domain name=TPK_B1_binding; Domain location=80-148; Score=89.3; E_value=1.3e-23; Accession=PF04265.6; Description =Thiamin pyrophosphokinase, vitamin B1 binding domain
PKFTDNTHNQETTDLHKCISRIHLRTPDHEKPNLCVLVTGALGGRFDHEAANINVLYLFSDMRIVLLSDDCLIRLLPKTHHHELYIESSVEGPHCGLFPVGAPSTSTTTTGLKWNLSESKMRFGSMISTSNIVQSEKVTVQSDADLLWTISLRNLT

SEQ ID NO: 72964 - protein, 442 aa, Setaria italica
  misc_feature (257)..(257): Xaa can be any naturally occurring amino acid
  Transcript Sequence Number=SeqID_6990
  Gene Ontology: Mol. function=isomerase activity; Cellular component =endoplasmic reticulum; Biological process=cell redox homeostasis
  Homolog annotation: Hit_ID=Q5EUD0; Match level="QueryCoverage=100%, HitCoverage=82%, E-value=0.0, Identity=83%"; Hit description=Protein disulfide isomerase
  Pfam annotation: Domain name=Thioredoxin; Domain location=312-417; Score=29.0; E_value=9.6e-07; Accession=PF00085.12; Description =Thioredoxin
ERSAQLMPRFAEAAAALRAMGSAVAFAKLDGERYPKAAASVGVKGFPTVLLFVNGTEHAYHGLHTKDAIVTWVRKKTGAPVIMLQSKDSAKEFLKKDQTFVIGLFKNFKGAEYEEFVKAATTDDEVQFVETSDRSVAKILFPGITSEEQFVGLVKSEPEKFEKFDGDFEEKAILRFVELNKFPLITVFTELNSGKVYSSPIKLQVFTFSEAYDFEDLESMVEEVARAFKTKIMFIYVDTAEENLAKPFLTLYGLESXEKKPTVTAFDTSNGAKYVMEADINAKNLREFCLSLLDGTLPPYHKSEPVPQGKGLVEKVVGRTFDSSVLESPQNVFLEVYTPWCVDCEAISKNIEKLAKHFSGLETLKFARIDASVNEHPKLKVNNYPTLFIYPAEDKNNPIKVSKKLSVKDMAKFIKEKLQISDVETVAATDNAPAAENIKDEL

SEQ ID NO: 72965 - protein, 47 aa, Setaria italica
  Transcript Sequence Number=SeqID_6991
HHFHKISVNNGCTPKQFAVVLIKIWIYFDLIEPSMLKLLKYGNVRFS

SEQ ID NO: 72966 - protein, 99 aa, Setaria italica
  Transcript Sequence Number=SeqID_6992
  Gene Ontology: Mol. function=heat shock protein binding
  Homolog annotation: Hit_ID=B6TPQ8; Match level="QueryCoverage=84%, HitCoverage=28%, E-value=3e-38, Identity=91%"; Hit description=Heat shock protein binding protein
  Pfam annotation: Domain name=RRM_1; Domain location=46-99; Score=9.7; E_value=0.025; Accession=PF00076.14; Description=RNA recognition motif. (a.k.a. RRM, RBD, o
TAKQAAAAGATASSAYGDKKGGASQDGVKTDKGKILKVSWDGSADSYTAAKLEELFQKFGKVEDIVIKTRKSRSKGSAIVVMGTKEAALLAIQNHFSLF

SEQ ID NO: 72967 - protein, 125 aa, Setaria italica
  Transcript Sequence Number=SeqID_6993
  Gene Ontology: Mol. function=oxidoreductase activity
  Homolog annotation: Hit_ID=Q7FS90; Match level="QueryCoverage=51%, HitCoverage=10%, E-value=2e-29, Identity=90%"; Hit description =Putative aldose reductase-related protein
  Pfam annotation: Domain name=Kelch_1; Domain location=26-72; Score =26.6; E_value=0.00011; Accession=PF01344.17; Description=Kelch motif
  Pfam annotation: Domain name=Kelch_1; Domain location=83-125; Score =21.6; E_value=0.0033; Accession=PF01344.17; Description=Kelch motif
  Pfam annotation: Domain name=Kelch_2; Domain location=26-68; Score =19.7; E_value=0.012; Accession=PF07646.7; Description=Kelch motif
  Pfam annotation: Domain name=Kelch_2; Domain location=83-125; Score =18.6; E_value=0.026; Accession=PF07646.7; Description=Kelch motif
  Pfam module annotation: Pfam domain module=Kelch_1::Kelch_1::Kelch _2::Kelch_2; Domain location=26-72::83-125::26-68::83-125
MQQLQPKQMHWVRADSSDFGGDRPAPRSGHTAVSIGKSKVVVFGGFADKRFLSDVSVYDVENKLWYTPECTINGSDGQAGPSPRAFHVAVVIDCNMFIFGGRSGGKRLGDFWMLDTDLWQWSEIS

SEQ ID NO: 72968 - protein, 187 aa, Setaria italica
  Transcript Sequence Number=SeqID_6994
  Homolog annotation: Hit_ID=B9SC17; Match level="QueryCoverage=91%, HitCoverage=21%, E-value=2e-68, Identity=70%"; Hit description=Lipid binding protein, putative
  Pfam annotation: Domain name=PH; Domain location=14-122; Score=16.1; E_value=0.055; Accession=PF00169.21; Description=PH domain
SGSSGSGSGGRSAAEYSGWVYHLGVNSIGHEYCHLRFLVIRGRTVAMYKRDPHDHPGLEPIRKGAVGHTLMVEELGRRRVNHGDVYVLRLYNRLDQTKKGEIACATPGEARKWIEAFEQAKQQADQDLMRGVSWNRLQNENEINLDGHRPRVRRYAQGLGKLVRIGKGPEMLLRQSSDLRNQERVNT

SEQ ID NO: 72969 - protein, 67 aa, Setaria italica
  Transcript Sequence Number=SeqID_6995
NRHDYWPSCQLARDNPTDATGTDHRLASIISSAFFHGRTTKSHWFLQRETKSLASSSASIDRVRIHV

SEQ ID NO: 72970 - protein, 97 aa, Setaria italica
  Transcript Sequence Number=SeqID_6996
LASPRPPSQRRNLDALMRRLALLSALLDSLLLVLGDEGEAAFSDAANLCFRELYVVLFRADLLVSYVASAGRSWALLRGPHLAASFRDLDAELAVVL

SEQ ID NO: 72971 - protein, 262 aa, Setaria italica
  Transcript Sequence Number=SeqID_6997
  Gene Ontology: Mol. function=oxidoreductase activity; Cellular component=cytoplasm; Biological process=oxidation reduction
  Homolog annotation: Hit_ID=A4UUE0; Match level="QueryCoverage=100%, HitCoverage=52%, E-value=1e-112, Identity=75%"; Hit description =Cytosolic aldehyde dehydrogenase
  Pfam annotation: Domain name=Aldedh; Domain location=1-262; Score =226.0; E_value=9.9e-65; Accession=PF00171.14; Description=Aldehyde dehydrogenase family
PWNFPTTMFGIKVAPCPAAGCTVVVKPAEQTPLSALYLADLAKQAGIPDGVINVVPGFGPTAGAAIASHMNVDIVSFTGSTEVGRLIMEASAKSNLKPVSLELGGKSPLIIFDDADLDMAVELAISANFFNKGEACVAASRVYVQDSIYDRFEKKLAERMKSWVVGDPLNDPRVDQGPQVDKAQYERVLSFIDRGKREGATLLTGGKPCGKKGYYIEPTIFTNVKEDMVIAKEEIFGPVMCLMKFKTVEEAIARANGTRYGL

SEQ ID NO: 72972 - protein, 94 aa, Setaria italica
  Transcript Sequence Number=SeqID_6998
  Subcellular localization annotation: CTP_CleavageSite=69; ConfidenceScore=5.45e-01
YARLSAEGAAGEPAHPPPLPPAGSPPRGRASLAGRRLAPPLLPPWLPPSTRRPSRRRRMPGSGGGWPPRAADLNRRTLGRHPLRPRASVSRLVR

SEQ ID NO: 72973 - protein, 63 aa, Setaria italica
  Transcript Sequence Number=SeqID_6999
MAEAPENAAPTATPAPPPPAPAPAPATSSPPPKSGIPARYDLDAKWDACLDLSIRRVAYSSLA

SEQ ID NO: 72974 - protein, 297 aa, Setaria italica
  misc_feature (81)..(81): Xaa can be any naturally occurring amino acid
  misc_feature (111)..(111): Xaa can be any naturally occurring amino acid
  misc_feature (197)..(197): Xaa can be any naturally occurring amino acid
  misc_feature (207)..(207): Xaa can be any naturally occurring amino acid
  misc_feature (211)..(211): Xaa can be any naturally occurring amino acid
  misc_feature (221)..(221): Xaa can be any naturally occurring amino acid
  misc_feature (237)..(237): Xaa can be any naturally occurring amino acid
  Transcript Sequence Number=SeqID_7000
  Gene Ontology: Mol. function=nucleic acid binding; Cellular component= cytosol; Biological process=transcription-coupled nucleotide-excision repair
  Homolog annotation: Hit_ID=Q7F2E4; Match level="QueryCoverage=100%, HitCoverage=24%, E-value=1e-115, Identity=73%"; Hit description =Cockayne syndrome group B
  Pfam annotation: Domain name=SNF2_N; Domain location=136-297; Score= -86.2; E_value=0.00086; Accession=PF00176.15; Description=SNF2 family N-terminal domain
ASRIAKFAQSMQQIAQSRPMTKLLDPESLPKLDAPTAPFQRLGRPLKRPVSPSSEEQEKKRRRNKTKRDLPDKKWRKANSXKESLMETDDEDDGDIAASVSEDEDQAAEGXDGLPPVILEGGLRIPGTVYDQLFDYQKVGVQWLWELHCQRAGGIIGDEMGLGKTVQVLTFLGSLHNSGMYKPSIVICPVTLLQQWXREASRWYPKXFKVXILHDSANGSXKKSKAYSDSDSEASWXDGDQEEIRRAKPAKKWDDLISSVVNSGSGLLLTTYEQLIILGEKLLDIEWGYAVLDEGHR

SEQ ID NO: 72975 - protein, 663 aa, Setaria italica
  misc_feature (638)..(638): Xaa can be any naturally occurring amino acid
  Transcript Sequence Number=SeqID_7001
  Gene Ontology: Mol. function=2 iron, 2 sulfur cluster binding; Cellular component=peroxisome; Biological process=regulation of epithelial cell differentiation
  Homolog annotation: Hit_ID=B9RIB6; Match level="QueryCoverage=95%, HitCoverage=46%, E-value=0.0, Identity=60%"; Hit description =Xanthine dehydrogenase, putative
  Pfam annotation: Domain name=CO_deh_flav_C; Domain location=461-572; Score=167.8; E_value=3.3e-47; Accession=PF03450.9; Description=CO dehydrogenase flavoprotein C-terminal domain
  Pfam annotation: Domain name=FAD_binding_5; Domain location=274-454; Score=242.8; E_value=8.4e-70; Accession=PF00941.13; Description=FAD binding domain in molybdopterin dehydrogenase
  Pfam annotation: Domain name=Fer2; Domain location=30-99; Score=42.4; E_value=1.7e-09; Accession=PF00111.19; Description=2Fe-2S iron-sulfur cluster binding domain
  Pfam annotation: Domain name=Fer2_2; Domain location=108-184; Score =145.0; E_value=2.3e-40; Accession=PF01799.12; Description=[2Fe-2S] binding domain
  Pfam module annotation: Pfam domain module=CO_deh_flav_C::FAD_binding_ 5::Fer2::Fer2_2; Domain location=461-572::274-454::30-99::108-184
MGSLTREAEEETAAAAVAAAAEEWSDEAVIYVNGVRRVLPDGLAHLTLLQYLRDIGLRGTKLGCGEGGCGACTVMVSCYDRTTKKSLHFAINACLAPLYSVEGMHIITVEGLGDRQRGLHPVQECLAKAHGSQCGFCTPGFVMSMYALLRSSKEPPTEEQIEDCLAGNLCRCTGYRPIIDAFRVFAKTDNLVYTNSSSQNTDGQAICPSTGKPCSCKNEPDANANGSSLSSSVERYSPCSYNEIDGNAYDDKELIFPPELQLRKVMPLKLNGFNETRWFRPLKLNQVLHLKSCYPDAKLIIGNSEVGVETKFKNAHYKVMISVTHVPELNTLKVEEDGIHIGSAVRLAQLQNFLKRVIAERDLPETSSCQAIVSQLKWFAGTQIRNVASVGGNICTASPISDLNPLWMAVGAKFQIIDVNSSVRTTLAKDFFLGYRKVDIKPDEILLSVILPWTRPFEFVKEFKQAHRREDDIALVNAGMRVYLRETEGKWIISDVSIVYGGVAAVPLSASTTENFLTGKKWNSELLDDTFNLLKEDIPLSENAPGGMVEFRRSLTLSFFFKFFLSVTHDMNMKGLLEDGLHADHVSAIQPYVRPVTVGTQGYEMVRQGTSVGQPMVHMSAMLQVTGEAEYTDDTPTXPPNTLHAALVLSRKAHARILSIDDS

SEQ ID NO: 72976 - protein, 211 aa, Setaria italica
  Transcript Sequence Number=SeqID_7002
  Homolog annotation: Hit_ID=B6U1C0; Match level="QueryCoverage=100%, HitCoverage=36%, E-value=3e-94, Identity=82%"; Hit description =Microtubule-associated protein MAP65-1a
TIKEQLAAISPSLELLCRKRDSRVKEFADVQLQIQTLRGEITGNLQSGELLETPHVNEDDLSVKKLNEFLFELQALQKEKSNRLHKILESVSSVHDLCSVLGMNFVGTVTEVHPSLDDSVGVQSKSISDETLSKLSKMVIGLQEEKSKRFAKIQALASQLSDLWNLMDARVEERQPFHHITCNMSSTLDEVTVPGALALDVIEQAELEVER

SEQ ID NO: 72977 - protein, 241 aa, Setaria italica
  misc_feature (58)..(58): Xaa can be any naturally occurring amino acid
  Transcript Sequence Number=SeqID_7003
  Gene Ontology: Cellular component=chloroplast
  Homolog annotation: Hit_ID=Q9XIE5; Match level="QueryCoverage=79%, HitCoverage=64%, E-value=2e-59, Identity=59%"; Hit description =F23H11.16 protein
  Subcellular localization annotation: CTP_CleavageSite=9; ConfidenceScore=5.26e-01
RGIISSSTPAANAADGARPRLGRRLPFGAFSPPQPLSDVREHGCCVSRALRPRQEWVXGWVRSNDTLVRSLPILVGGASLVAVLLNRAVSGIAAVADASSSQSRADILTLALSVTDILAGLVWLSIRPKSISPVVPRGVECKRVGPGVSSSALHELLWTWDSLTTATCCKSLVVVYGGNCILQIGVAAGSPEDGNALTVDTQKFIQGSLYKSAMESKESKSYLANLALYPGRSELPFLPAN

SEQ ID NO: 72978 - protein, 136 aa, Setaria italica
  Transcript Sequence Number=SeqID_7004
  Gene Ontology: Cellular component=chloroplast
  Homolog annotation: Hit_ID=Q9XIE5; Match level="QueryCoverage=91%, HitCoverage=43%, E-value=3e-46, Identity=66%"; Hit description =F23H11.16 protein
LFLIFLTNRTWDSLTTATCCKSLVVVYGGNCILQIGVAAGSPEDGNALTVDTQKFIQGSLYKSAMESKKQSYLANLALYPGRSELPFLPANTQALILQPIGDKGIAVVGGDTIRGFTSIDQAWIAMIADKLDATLS

SEQ ID NO: 72979 - protein, 235 aa, Setaria italica
  Transcript Sequence Number=SeqID_7005
  Gene Ontology: Cellular component=chloroplast
  Homolog annotation: Hit_ID=Q9XIE5; Match level="QueryCoverage=94%, HitCoverage=75%, E-value=1e-79, Identity=65%"; Hit description =F23H11.16 protein
LFLIFLLFYAAVLVLPILVGGASLIAVLLNRAVSGIAAVADASSSQSRADILTLALSVTDILAGLVWLSIRPKSISPVVPRGVECKRVGPGVSSSALHELLWTWDSLTTATCCKSLVVVYGGNCILQIGVAAGSPEDGNALTVDTQKFIQGSLYKSAMESKKQFFILANLALYPGRSELPFLPANTQALILQPIGDKGIAVVGGDTIRGFTSIDQAWIAMMADKLDATLSKSYNP

SEQ ID NO: 72980 - protein, 174 aa, Setaria italica
  Transcript Sequence Number=SeqID_7006
  Gene Ontology: Mol. function=electron carrier activity; Biological process=electron transport chain
  Homolog annotation: Hit_ID=B6TG00; Match level="QueryCoverage=56%, HitCoverage=54%, E-value=2e-42, Identity=80%"; Hit description =Copper ion binding protein
  Pfam annotation: Domain name=Cu_bind_like; Domain location=38-121; Score=160.5; E_value=5.1e-45; Accession=PF02298.9; Description =Plastocyanin-like domain
MGVGGAARRAAAVAALAVTVLAGVASAAVYEVGDKTGWTIMGNPDYAAWASGKRFKVNDVVVFTYNKQFHNVMAVSKADYKNCDANKPMATWNSGNDSVVLNTTGHHYFLCGIPGHCAGGQKVDIRVAASSSAAPSMAPTPEPSSGGGSGGATAAPSPHPNAAPKALLAGRSVA

SEQ ID NO: 72981 - protein, 135 aa, Setaria italica
  Transcript Sequence Number=SeqID_7007
  Gene Ontology: Mol. function=phosphoprotein phosphatase activity; Cellular component=chloroplast; Biological process=mRNA processing
  Homolog annotation: Hit_ID=B4FVM8; Match level="QueryCoverage=100%, HitCoverage=68%, E-value=9e-70, Identity=94%"; Hit description =Protein SSU72
  Pfam annotation: Domain name=Ssu72; Domain location=2-135; Score =185.7; E_value=1.3e-52; Accession=PF04722.5; Description=Ssu72-like protein
AIYDDLRRKDPDLYKRNGLLPMLKRNTSVKLAPQRWQDNAGDGLFDMIMTFEERVFDLVVEDMNNREPKLMKSVPIINMDVKDNHEEAGVGAKLAVELCQKLEAIDGDWEEIIDDLITGFEKQHKRRLAYSIAFY

SEQ ID NO: 72982 - protein, 233 aa, Setaria italica
  Transcript Sequence Number=SeqID_7008
  Gene Ontology: Mol. function=catalytic activity; Biological process =cellular metabolic process
  Homolog annotation: Hit_ID=B6T842; Match level="QueryCoverage=75%, HitCoverage=51%, E-value=2e-51, Identity=60%"; Hit description =Leucoanthocyanidin reductase
SRFLRIITQAYPVSKVLMEQAASKFAEEHGLSLVTLCPSVTVGEAPDRQVYTTVPAILSLLSGDDKELGVLKGIERASGSVPLVHVHDVCRAEIFVAEAEAAAGRYICNALDTTIVEIARFLADKYPQYNVNTELSGDLLKKPIALLPSTKLEKDGFEFEFKTLEHIYDDMVEYGKALGILAQLILYVIGVMRHLYCTRRISPCRAVGCLLSPPQGAKYSLRDVAPVMCLRSF

SEQ ID NO: 72983 - protein, 338 aa, Setaria italica
  Transcript Sequence Number=SeqID_7009
  Gene Ontology: Mol. function=catalytic activity; Biological process =cellular metabolic process
  Homolog annotation: Hit_ID=B6T842; Match level="QueryCoverage=98%, HitCoverage=98%, E-value=1e-122, Identity=66%"; Hit description =Leucoanthocyanidin reductase
  Pfam annotation: Domain name=3Beta_HSD; Domain location=14-304; Score= -61.8; E_value=4.1e-06; Accession=PF01073.11; Description=3-beta hydroxysteroid dehydrogenaseisomerase family
  Pfam annotation: Domain name=Epimerase; Domain location=13-274; Score= 54.7; E_value=3.4e-13; Accession=PF01370.13; Description=NAD dependent epimerasedehydratase family
  Pfam annotation: Domain name=NAD_binding_4; Domain location=15-251; Score=-39.0; E_value=1.2e-06; Accession=PF07993.4; Description=Male sterility protein
  Pfam annotation: Domain name=NmrA; Domain location=15-211; Score= -103.4; E_value=0.03; Accession=PF05368.5; Description=NmrA-like family
  Pfam annotation: Domain name=adh_short; Domain location=11-146; Score= -48.1; E_value=0.02; Accession=PF00106.17; Description=short chain dehydrogenase
  Pfam module annotation: Pfam domain module=3Beta_HSD::Epimerase::NAD _binding_4::NmrA::adh_short; Domain location=14-304::13-274::15 -251::15-211::11-146
MAAAAGEERKKTACVTGGNGYIASMLIKMLLEKGYVVKTTVRHPENKEDNSHLEDMKKLGTLEVFRADLGEEGSYDEAVAGCDYAFLLAAPVDYTSKNPEKELMELGVQGTLNVMRSCVKAGTVKRVILTSSTAAVSSKPLQGDGHVLDEESFSDVEYLTAKRTGLWAYPVSKVLMEQAASKFAEEHGLSLVTLCPSVTVGEAPDRQVYTTVPAILSLLSGDDKELGVLKGIERASGSVPLVHVHDVCRAEIFTDVPTGRYICNALDTTIVEIARFLADKYPQYNVNTELSGDLLKKPIALLPSTKLEKDGFEFEFKTLEHIYDDMVEYGKALGILRS

SEQ ID NO: 72984 - protein, 78 aa, Setaria italica
  Transcript Sequence Number=SeqID_7010
  Gene Ontology: Mol. function=oxidoreductase activity, acting on the CH-OH group of donors, NAD or NADP as acceptor; Cellular component =cytoplasm; Biological process=oxidation reduction
  Homolog annotation: Hit_ID=Q0DWH1; Match level="QueryCoverage=83%, HitCoverage=17%, E-value=2e-27, Identity=96%"; Hit description =Alcohol dehydrogenase class-3
PCVPCLSPVACLRPLDKVCLLGCGVSTGLGAVWNTAKVEAGSVVAVFGLGTVGLAVAEGAKSAGASRIIGIDIDSKKF

SEQ ID NO: 72985 - protein, 204 aa, Setaria italica
  Transcript Sequence Number=SeqID_7011
  Pfam annotation: Domain name=DUF1950; Domain location=82-200; Score =296.5; E_value=5.8e-86; Accession=PF09187.2; Description=Domain of unknown function(DUF1950)
MKRAAPWEEPQDVSSGGSSSADSDQEAGKDTKRGAPGEEAEDVSSDDSLSSDSDDEAGKGNGWNAFRLPNSSKAASPAEGALIRRAEMYQHYMKHIPVPAYRDSLIPFTSWMGLARSLKQLYKQPLHYLTNVLLKRWDQQRIGSDDEHRRLDAVVHPVRAETLIWATEEVHRLTTSGRHLASLWASDPLYHAYIDPVFPSIKLD

SEQ ID NO: 72986 - protein, 226 aa, Setaria italica
  Transcript Sequence Number=SeqID_7012
MKRAAPWEEPQDVSSGGSSSADSDQEAGKGKFGSVSKAAAAAEDTKRGAPGEEAEDVSSDDSLSSDSDDEAGKGNGWNAFRLPNSSKAASPAEVAVSKRKKTGGVDFSALSRHGYRGGPSVLTVRPQEESNWSWSTGKDRDDKEDAPESYEERERTRAAVTEGEKLIGVQNAPLNQLLLEKDHKNASFSQKEKRKRDRGQASRGKNYVEEEKRLLRGSGVYSGFDI

SEQ ID NO: 72987 - protein, 374 aa, Setaria italica
  Transcript Sequence Number=SeqID_7013
  Gene Ontology: Mol. function=kinase activity
  Homolog annotation: Hit_ID=B6T2N8; Match level="QueryCoverage=100%, HitCoverage=100%, E-value=0.0, Identity=89%"; Hit description =Ribokinase
  Pfam annotation: Domain name=PfkB; Domain location=65-354; Score =108.2; E_value=2.8e-29; Accession=PF00294.16; Description=pfkB family carbohydrate kinase
MGAEAEHPQQPPSSLRPGWEAAAAAAPAVLGLQLSALIDHVARVDWSLLDRVPGDRGGSQQVSIEELNHILTEVNAHILPSRNDLTPITTMAGGSVANTIRGLSAGFGISTGIIGACGDDNQAILFVDNMSFSGVDLTRLRPKKGHTAQCACLVDASGNRTMRPCLSSAVKLQANEFREEDFKGSKWLVVRYAQQNMEQIIEAIRIAKQEGLSVSLDLASFEMVRDSRLNLINLLETGNIDLCFANEDEARELIEGGPTSDPEEALAFMGKYCKWAVVTLASKGCMAKHGKQVVKVPAIGESNAVDTTGAGDLFASGFLYGLVKGLPLEDCCKVGACSGGSVTRALGGEVRPENWQWMYKQMHARGLLLPELKN

SEQ ID NO: 72988 - protein, 97 aa, Setaria italica
  Transcript Sequence Number=SeqID_7014
  Gene Ontology: Mol. function=nucleic acid binding
  Homolog annotation: Hit_ID=B9UK63; Match level="QueryCoverage=63%, HitCoverage=18%, E-value=8e-11, Identity=61%"; Hit description =R1MYB1 protein
  Subcellular localization annotation: CTP_CleavageSite=74; ConfidenceScore=5.30e-01
CSSCGNNGHNSRTCSGYRGHENSISTSSNSSGNTSCGGLRLFGVQLQVGSHPLKKCLSMECLSPAAYYGAAAAAAAAASSLSPSVSSSSSSLVSIEE

SEQ ID NO: 72989 - protein, 131 aa, Setaria italica
  misc_feature (60)..(60): Xaa can be any naturally occurring amino acid
  misc_feature (90)..(90): Xaa can be any naturally occurring amino acid
  misc_feature (112)..(112): Xaa can be any naturally occurring amino acid
  Transcript Sequence Number=SeqID_7015
  Gene Ontology: Mol. function=transporter activity; Cellular component= integral to membrane; Biological process=transport
  Homolog annotation: Hit_ID=Q6DXR6; Match level="QueryCoverage=100%, HitCoverage=27%, E-value=2e-48, Identity=68%"; Hit description =Putative permease
LVWAYAQILTSGGAYKNSTEVTQINCRTDRANLISSAPWIKIPYPLQWGAPTFNAGQSFXTASYKAAARLASATPPPAHILSRGIGWQGXSGILLDGLFGTGTGSTVSVENXGLLGSTRIGSRRVIQISAG

SEQ ID NO: 72990 - protein, 358 aa, Setaria italica
  Transcript Sequence Number=SeqID_7016
  Gene Ontology: Mol. function=transporter activity; Cellular component= membrane; Biological process=transport
  Homolog annotation: Hit_ID=B6U234; Match level="QueryCoverage=99%, HitCoverage=68%, E-value=1e-167, Identity=77%"; Hit description =Permease
  Pfam annotation: Domain name=Xan_ur_permease; Domain location=1-272; Score=-15.4; E_value=1.8e-07; Accession=PF00860.12; Description =Permease family
VALLGFGLFERGFPVVGRCVEVGLPMLILFVVLSQYLKNIQIKDIPILERFSLFICIALVWAYAQILTSGGAYKNSTEVTQINCRTDRANLISSAPWIKIPYPLQWGAPTFNAGQSFGMVSAVLVSLVESTASYKAAARLASATPLPAHILSRGIGWQGIGILLDGLFGTGTGSTVSVENVGLLGSTRIGSRRVIQISAGFMIFFSMLGKFGALFASIPFTIFAAVYCVLFGLVAAVGLSFLQFTNMNSMRNLFIVGVSIFLGLSVPEYFFRYTMAAQRGPAHTKAGWFNDYINTIFSSPPTVGLIVAVFLDNTLETKDAGNDRGLPWWVRFRSFKGDSRNEEFYSLPFNLNRFFPPA

SEQ ID NO: 72991 - protein, 66 aa, Setaria italica
  Transcript Sequence Number=SeqID_7017
  Subcellular localization annotation: CTP_CleavageSite=31; ConfidenceScore=5.05e-01
RRTSRRRRPRATGRSRRPQPPRACRSRRPCHCQAPTGTENSGKQAIALMPRLFTTAQRQYLEQHRI

SEQ ID NO: 72992 - protein, 112 aa, Setaria italica
  Transcript Sequence Number=SeqID_7018
  Subcellular localization annotation: CTP_CleavageSite=74; ConfidenceScore=5.24e-01
ENISKPAPVCRLNLTRSIHPCTWSPSAGTRKRATSKRAADKQVLRLAHLSNHSSAPQALQRFPVSDACNGMQCRVQQKSPPHHSPGLFPAEFSVPVGAWQWHGLLERQALGG

SEQ ID NO: 72993 - protein, 93 aa, Setaria italica
  Transcript Sequence Number=SeqID_7019
  Subcellular localization annotation: CTP_CleavageSite=44; ConfidenceScore=5.30e-01
RTCSAPWPRPATPRPPRRTARPPPPAPAPPRPPFPPPSPPPPPPCAQAQAMDGDRPTHAHVAGTPGRRQRVWLEWDATRLGARTHASSPACQV

SEQ ID NO: 72994 - protein, 82 aa, Setaria italica
  Transcript Sequence Number=SeqID_7020
GTKSIIATCHCTPVPAWPWLLVVSLCPCEARARSRKKGMASYRWPLRDARELRACLGDGHSLLRPKSKATLVARFCAGKARG

SEQ ID NO: 72995 - protein, 51 aa, Setaria italica
  Transcript Sequence Number=SeqID_7021
RNHVRSAMFLFVDGWEVEFLCRSDMFSCLSCHAPAICGDFRSLIWESWGCF

SEQ ID NO: 72996 - protein, 701 aa, Setaria italica
  misc_feature (34)..(34): Xaa can be any naturally occurring amino acid
  misc_feature (43)..(43): Xaa can be any naturally occurring amino acid
  misc_feature (246)..(246): Xaa can be any naturally occurring amino acid
  Transcript Sequence Number=SeqID_7022
  Gene Ontology: Mol. function=phosphotransferase activity, alcohol group as acceptor; Cellular component=peroxisome; Biological process= protein modification process
  Homolog annotation: Hit_ID=B9RLG3; Match level="QueryCoverage=93%, HitCoverage=100%, E-value=0.0, Identity=58%"; Hit description =Inositol or phosphatidylinositol kinase, putative
  Pfam annotation: Domain name=PI3_PI4_kinase; Domain location=216-473; Score=205.7; E_value=1.2e-58; Accession=PF00454.19; Description =Phosphatidylinositol 3- and 4-kinase
SLLVTSLSHSSAEVDERRRKQERSNKACIVAAPXSSLASIPLXVSAMSRNLESPVQTQMAVSALDRALSSEYPTKSRSEARVGRWKRLFVQTDTGCVLDVQLDRGDNVHTVKRRMQVALNFPTEESSLVLGDRVLKNDLSTIRNDSPLLLTKNSMHRSSSTPCMSPTGNDLQQQRDKGRSIELLVCPSRCSRTRLLVKDVAKAIRKGVDPVPVSGGLGGAYYFRNSKGQNAAIVKPNDEEPFAPKXFVVPQPGLKSPVRVGETCIREVAAYLLDYDNSANVPPTVLVRISHPAFHINEGVNCANKNVVEGGTQAVSKIASFQQFIPHDFDASDYGTSSFPVSAVHRIAILDIRIFNTDRHAGNLLVRKQTGAGKFGNLTELIPIDHGLCLPECLEDPYFEWIHWPQASVPFSEDELEYIENLDPVKDADMLRMELPMIHEACLRVLILSTIFLKEATAFGLCLAEIGEMMSREFTGMEDQPSELEFICMEARRLATEQDDNSSEHDSGDEDLTQFELDSEDHEIPKEPSAHQFDIKRGNSRNQLSKLDEGDDDDEEEEEEEEEEEEEDDIEEVESDAGKLASPKPVNKWLANISKLSTSLKGVSLTDKTQRQLSAGPKVVDSVKTSKSNSNNNGSQLCNWGSANDMLPASVSFVKLADMGPEMWGLFLEKFRELLPEAFRSRKCSVTAQRAKQRLGTSCQF

SEQ ID NO: 72997 - protein, 65 aa, Setaria italica
  Transcript Sequence Number=SeqID_7023
SQTVGASVLYSKFRSKKKNLELCQFSDPLLVQGIGMSDVGQPLISPKLATCVHTSIVSVFKIIVN

SEQ ID NO: 72998 - protein, 59 aa, Setaria italica
  Transcript Sequence Number=SeqID_7024
YKYHLNMFLKYTRVDSNDFIKSTRTHLSLHYSIYTIMTIETFGHDNLSTHESDRRINYT

SEQ ID NO: 72999 - protein, 96 aa, Setaria italica
  Transcript Sequence Number=SeqID_7025
  Subcellular localization annotation: CTP_CleavageSite=65; ConfidenceScore=5.14e-01
SWGSWSSATRTSSSVPCTGMYTLAILPVLLTPPSPPEGEKPLAAGWSAFACSQAATDGRRPTGLVGMQTTGARGRGRRRLSKGRESPTGLLELWKA

SEQ ID NO: 73000 - protein, 51 aa, Setaria italica
  Transcript Sequence Number=SeqID_7026
MEAPPGPEPMALDAPPAAGDATAAAAAVAPAGDEKKKEGEGGDKMPGHIIS

SEQ ID NO: 73001 - protein, 183 aa, Setaria italica
  Transcript Sequence Number=SeqID_7027
  Gene Ontology: Mol. function=nucleotide binding; Biological process =defense response
  Homolog annotation: Hit_ID=Q2QZR9; Match level="QueryCoverage=73%, HitCoverage=12%, E-value=6e-14, Identity=30%"; Hit description=NB -ARC domain containing protein
  Subcellular localization annotation: CTP_CleavageSite=54; ConfidenceScore=5.44e-01
ALSPFLFLSLLPCSASPPTFFFLQQRWASIAMVLDSFVRRCTASLHNFAGQDSCAALGVGDDVRALLATLSRINAIVSHEERRRVLTAKLDAWVAQVKDAMYDIDDVLDVCIIEAGKILADDRPPTPKVRCFSCFKPAGPRKFRHEIGFSIRDIDLRLREVEEEMPRLPVGSTHYDAKKLVQS

SEQ ID NO: 73002 - protein, 87 aa, Setaria italica
  Transcript Sequence Number=SeqID_7028
  Gene Ontology: Mol. function=protein serine/threonine kinase activity; Cellular component=integral to membrane; Biological process=protein amino acid phosphorylation
  Homolog annotation: Hit_ID=B6E503; Match level="QueryCoverage=82%, HitCoverage=7%, E-value=2e-20, Identity=66%"; Hit description =Putative leucine rich repeat transmembrane protein kinase
RARRDAEHDGAPTSPASRSSSYDVTSFHKLSFDQHEILEALIDKNIVGHGGSGTVYKIELSSGELVAVKKLWVSAARRTKQQHDVQV

SEQ ID NO: 73003 - protein, 99 aa, Setaria italica
  misc_feature (44)..(44): Xaa can be any naturally occurring amino acid
  Transcript Sequence Number=SeqID_7029
RRGAGRGGDAARGGDGQGMPRRRGAPPRRQGGVRSEGRKGGIGXRPDATTERQESPAVTPRSALRTVPSIWFRSMFLFFSMHVCNGCCIAELKKKKKKK

SEQ ID NO: 73004 - protein, 87 aa, Setaria italica
  Transcript Sequence Number=SeqID_7030
  Gene Ontology: Mol. function=protein serine/threonine kinase activity; Biological process=protein amino acid phosphorylation
  Homolog annotation: Hit_ID=Q5JKA2; Match level="QueryCoverage=93%, HitCoverage=10%, E-value=2e-16, Identity=51%"; Hit description=KI domain interacting kinase 1-like protein
LSLALAVAAFLCFIFYSPLFRRYRKGSRRTQDLQGHEELVWDGKNSEFSVFDFEQVLEATNHFSEENKLGQGGFGAVYKGQFADGLE

SEQ ID NO: 73005 - protein, 82 aa, Setaria italica
  Transcript Sequence Number=SeqID_7031
  Gene Ontology: Mol. function=transferase activity, transferring glycosyl groups; Cellular component=cell wall
  Homolog annotation: Hit_ID=B6SPG7; Match level="QueryCoverage=71%, HitCoverage=7%, E-value=9e-24, Identity=86%"; Hit description =Phosphoribosylanthranilate transferase
MAGVLPRFGPFGPLPPPPLDEFGIKETRPRLAGGRAGGYDLVERMEYLYVRVVKARDLKWTGAFDPFADVKLGGYSCATRHI

SEQ ID NO: 73006 - protein, 256 aa, Setaria italica
  Transcript Sequence Number=SeqID_7032
  Gene Ontology: Mol. function=protein serine/threonine kinase activity; Cellular component=cell surface; Biological process =protein amino acid phosphorylation
  Homolog annotation: Hit_ID=B6SVG2; Match level="QueryCoverage=88%, HitCoverage=32%, E-value=1e-119, Identity=91%"; Hit description =Lectin-like receptor kinase 7
  Pfam annotation: Domain name=Pkinase; Domain location=1-194; Score= -26.9; E_value=6.9e-07; Accession=PF00069.17; Description=Protein kinase domain
  Pfam annotation: Domain name=Pkinase_Tyr; Domain location=2-194; Score=-95.6; E_value=2.3e-07; Accession=PF07714.9; Description =Protein tyrosine kinase
  Pfam module annotation: Pfam domain module=Pkinase::Pkinase_Tyr; Domain location=1-194::2-194
MVNGSLDKHLFDAGKPAALSWERRAKIVRDVAAGLLYLHEGWEQVVVHRDIKSANVLLDADMNGRLSDFGLARLYDHGSNPQTTHVIGTLGYLAPEMSKTGKATTSTDVFAFGAFLLEVACGRRPMERNDDLDSPGLVDLVLEHWKAGRIMDARDPKIGEGDEADVELVLKLGLLCSHPDPRCRPSMRQVVQILEGAAPVPETPPKDLENNNRLFYGYIESFDEFATVFPTSGTTTVTTQPSSSHSNDEQQEVISG

SEQ ID NO: 73007 - protein, 132 aa, Setaria italica
  misc_feature (56)..(56): Xaa can be any naturally occurring amino acid
  Transcript Sequence Number=SeqID_7033
  Gene Ontology: Mol. function=protein serine/threonine phosphatase activity; Cellular component=protein serine/threonine phosphatase complex; Biological process=protein amino acid dephosphorylation
  Homolog annotation: Hit_ID=Q653S3; Match level="QueryCoverage=93%, HitCoverage=34%, E-value=2e-35, Identity=61%"; Hit description =Probable protein phosphatase 2C 70
VLPDPFYRDFLFFEQILLRIALFFDQVKLSEDDEFIVLACDGIWDCMSSQEVVDFXHKHLETEDKLSDVCEKLLNHCVAPTSGGEGCDNMTVIIVQFKKPLSSAATSSTEKSAATAEEMRPNELNGPDDPLK

SEQ ID NO: 73008 - protein, 79 aa, Setaria italica
  Transcript Sequence Number=SeqID_7034
  Gene Ontology: Mol. function=protein serine/threonine phosphatase activity; Cellular component=protein serine/threonine phosphatase complex; Biological process=protein amino acid dephosphorylation
  Homolog annotation: Hit_ID=Q653S3; Match level="QueryCoverage=72%, HitCoverage=15%, E-value=9e-21, Identity=80%"; Hit description =Probable protein phosphatase 2C 70
MDCMSSQEVVDFVHKHLETEDKLSDVCEKLLNHCVAPTSGGEGCDNMTVIIVQFKKPLSSAATSSTEKSAATAEEMRPK

SEQ ID NO: 73009 - protein, 354 aa, Setaria italica
  Transcript Sequence Number=SeqID_7035
  Gene Ontology: Mol. function=protein serine/threonine phosphatase activity; Cellular component=protein serine/threonine phosphatase complex; Biological process=protein amino acid dephosphorylation
  Homolog annotation: Hit_ID=Q653S3; Match level="QueryCoverage=93%, HitCoverage=91%, E-value=1e-160, Identity=81%"; Hit description =Probable protein phosphatase 2C 70
  Pfam annotation: Domain name=PP2C; Domain location=22-317; Score =293.6; E_value=4.2e-85; Accession=PF00481.13; Description=Protein phosphatase 2C
MGVYLSTPKTDKASADGENDRVRFGLSSMQGWRTTMEDAHAALPDLDDCTSFFGVYDGHGGKAVSKFCARHLHKQVLINEANSSGDLPASVYKAFLRMDEMMKGQRGWRELTELGDKGNKISGMLEGIIWSPKGGDAEDLGGGWGTEEGPNSNFPGPTSGSTACVAVIRNDQLIVANAGDSRCVISRKGQAYNLSTDHKPDLEGEKERILNAGGFVVAGRVNGSLNLSRAIGDMELKQNEVLPAEKQIVTAEPELKTVKLSEDDEFIVLACDGIWDCMSSQEVVDFVHKHLETEDKLSDVCEKLLNHCVAPTSGGEGCDNMTVIIVQFKKPLSSAATSSTEKSAATAEEMRPKI

SEQ ID NO: 73010 - protein, 386 aa, Setaria italica
  Transcript Sequence Number=SeqID_7036
  Gene Ontology: Mol. function=ATP binding; Cellular component=soluble fraction; Biological process=cellular metal ion homeostasis
  Homolog annotation: Hit_ID=A6MCZ4; Match level="QueryCoverage=91%, HitCoverage=96%, E-value=0.0, Identity=89%"; Hit description =Arsencial pump-driving ATPase
  Pfam annotation: Domain name=ArsA_ATPase; Domain location=49-344; Score=458.6; E_value=8.9e-135; Accession=PF02374.7; Description =Anion-transporting ATPase
  Pfam annotation: Domain name=CbiA; Domain location=51-234; Score= -8.7; E_value=0.00025; Accession=PF01656.15; Description=Cobyrinic acid a,c-diamide synthase
  Pfam annotation: Domain name=MipZ; Domain location=51-240; Score= -183.1; E_value=0.1; Accession=PF09140.3; Description=ATPase MipZ
  Pfam module annotation: Pfam domain module=ArsA_ATPase::CbiA::MipZ; Domain location=49-344::51-234::51-240
FVFPPFYFSLPRSGLPYSVVYWSFRRSVGWYAGDAPEPTVQNLLDQDTLKWVFVGGKGGVGKTTCSSILSVLLASVRQSVLVISTDPAHNLSDAFQQRFTKFPTLVRGFTNLYAMEIDPKVENDDLSNEGMEGFLSELTNAIPGVDEAMSFAEMLKLVQTMDYSVVVFDTAPTGHTLRLLQFPATLEKGLEKMMELKNRFGGLLNQASRLFGLGDELNEDAMLGRLEGMKDVIEQVNRQFKDPDLTTFVCVCIPEFLSLYETERLVQELAKFEIDSHNIIINQVIFDEEPVESKLLKARVKMQQKYIDQFHMLYDDFNITKLPLLSEEVCGVQALQNFSQHFLTPYKSAIKRGTVEELEQRISILKSALQEAESELDRVRKGKQSA

SEQ ID NO: 73011 - protein, 64 aa, Setaria italica
  Transcript Sequence Number=SeqID_7037
  Gene Ontology: Mol. function=phosphotransferase activity, alcohol group as acceptor; Cellular component=cytoplasm; Biological process =metabolic process
  Homolog annotation: Hit_ID=O23461; Match level="QueryCoverage=100%, HitCoverage=5%, E-value=2e-20, Identity=70%"; Hit description =Galactokinase like protein
MRVRDGDGGGEVTAPPQHLVFAYYITGHGFGHATRALEVVRHLVAAGHDVHVVTAAPEFVFTTE

SEQ ID NO: 73012 - protein, 173 aa, Setaria italica
  Transcript Sequence Number=SeqID_7038
  Gene Ontology: Mol. function=ubiquitin-protein ligase activity; Cellular component=ubiquitin ligase complex; Biological process =ubiquitin-dependent protein catabolic process
  Homolog annotation: Hit_ID=B6SV72; Match level="QueryCoverage=100%, HitCoverage=37%, E-value=1e-73, Identity=79%"; Hit description =Ubiquitin-protein ligase
  Pfam annotation: Domain name=U-box; Domain location=34-108; Score =59.2; E_value=1.6e-14; Accession=PF04564.7; Description=U-box domain
PGDCGPGDAGKQPVELRKMMDELDAAGDGGGDEAVPAVFICPISLEPMVDPVTLCTGQTYERANISRWLALGHRTCPTTMQELWDDALTPNATLRQLIAAWFSRRYTRFKKRSADFHGRAADLVHGLRGTAVPRRQPLKGQARIAALRELRTLAATHQSVTKAIAEAGGVALL

SEQ ID NO: 73013 - protein, 187 aa, Setaria italica
  misc_feature (148)..(148): Xaa can be any naturally occurring amino acid
  Transcript Sequence Number=SeqID_7039
  Gene Ontology: Mol. function=protein serine/threonine kinase activity; Biological process=protein amino acid phosphorylation
  Homolog annotation: Hit_ID=C4P7U9; Match level="QueryCoverage=100%, HitCoverage=37%, E-value=1e-74, Identity=75%"; Hit description=CBL -interacting protein kinase 29
  Pfam annotation: Domain name=NAF; Domain location=132-186; Score =67.6; E_value=4.6e-17; Accession=PF03822.6; Description=NAF domain
LAPEVLSRKGYDGAKADIWSCGVILFVLVAGYLPFHDTNLIEMYRKISRADFRCPRGFSTELKDLLHRILDPDPSTRISISRIKRSAWYRKPFEVNAKKNETETTENACTGEATTSGSTECSTSEGNQGSLSLPNLNAFDIISLSTGXFNLSGFFEDKYRREERFTTRQPVMTVLAKLKELSKRLKL

SEQ ID NO: 73014 - protein, 111 aa, Setaria italica
  misc_feature (61)..(61): Xaa can be any naturally occurring amino acid
  Transcript Sequence Number=SeqID_7040
  Gene Ontology: Mol. function=delta14-sterol reductase activity; Cellular component=membrane
  Homolog annotation: Hit_ID=B4FS76; Match level="QueryCoverage=69%, HitCoverage=20%, E-value=1e-22, Identity=70%"; Hit description =Delta(14)-sterol reductase
RIHDTSMKPNLSAIMSHVEVMLVFGDLVFIPFTFTIQGWWLLRNEVKLSPLAGLANFCIFXLIGYLVFRGANKQKHVFKKDHIKIKDTKTLLFSEKPVTVFGIRNPEEIPW

SEQ ID NO: 73015 - protein, 290 aa, Setaria italica
  Transcript Sequence Number=SeqID_7041
  Gene Ontology: Mol. function=delta14-sterol reductase activity; Cellular component=membrane; Biological process=steroid biosynthetic process
  Homolog annotation: Hit_ID=B4FS76; Match level="QueryCoverage=86%, HitCoverage=67%, E-value=1e-122, Identity=85%"; Hit description =Delta(14)-sterol reductase
  Pfam annotation: Domain name=ERG4_ERG24; Domain location=1-290; Score= -109.7; E_value=7.6e-09; Accession=PF01222.9; Description=Ergosterol biosynthesis ERG4ERG24 family
MEAATAAAAAVLPALVPSGSAVVVLFAYLGYLAAAGAILPGKLVAGAVLQDSSRLHYRCNGLLSLLLLLGLLAFGSYMGWMSPTVVADRGLELLSATFIFSVIVTFALYFAGTKSRHKSSSLRPHVSGSFIQDWWLGVQLNPHFMGVDLKFFFVRAGMMGWLFINLSLLAKSYLAGSVNLSVILYQFFCAWYIIDYFVHEEFMTSTWDIIAERLGFMLVFGDLVFIPFTFTIQGWWLLRNEVKLSPLAGLANFCIFIIGYLVFRGANKQKHVFKKDPKAPIWGKPPKVAY

SEQ ID NO: 73016 - protein, 107 aa, Setaria italica
  Transcript Sequence Number=SeqID_7042
  Homolog annotation: Hit_ID=Q9MAL7; Match level="QueryCoverage=79%, HitCoverage=17%, E-value=1e-16, Identity=53%"; Hit description =T25K16.17
PYAGFPAPHTAALLHPARARPRGWGSTGAVFAELIEAVRPEVIVELGAFLGASALHMAAVSRNLSLSPAILCVDDFRGWPAFRDRFRRDVPPPRHGDALLLPQFMAN

SEQ ID NO: 73017 - protein, 312 aa, Setaria italica
  Transcript Sequence Number=SeqID_7043
  Gene Ontology: Mol. function=phenylalanine-tRNA ligase activity; Cellular component=cytoplasm; Biological process=tRNA aminoacylation for protein translation
  Homolog annotation: Hit_ID=B4FI54; Match level="QueryCoverage=99%, HitCoverage=69%, E-value=1e-178, Identity=95%"; Hit description=ATP binding protein
  Pfam annotation: Domain name=FDX-ACB; Domain location=222-312; Score =110.9; E_value=4.2e-30; Accession=PF03147.6; Description=Ferredoxin -fold anticodon binding domain
  Pfam annotation: Domain name=tRNA-synt_2d; Domain location=2-209; Score=111.0; E_value=4.1e-30; Accession=PF01409.12; Description=tRNA synthetases class II core domain (F)
  Pfam module annotation: Pfam domain module=FDX-ACB::tRNA-synt_2d; Domain location=222-312::2-209
YKFDDLCPLVSVKQNFDDVLVPADHVSRSYNDTYYVDSQTVLRCHTSAHQAELLRDGHTHFLVTGDVYRRDSIDSTHYPVFHQMEGFRVFSPDDWLGSDMDGTAYAAADLKKTLEGLARHLFGDVQMRWVDTYFPFTNPSFELEIYFQDDWLEVLGCGVTEQEILKRNGRTDHVAWAFGLGLERLAMVLFDIPDIRLFWSNDKRFTSQFSEGKLGVKFKAFSKFPPCYKDMSFWINDAFTENNLCEVVRGIAGDLVEEVKLIDNFTNKKGMTSHCYRIAYRSMERSLTDEEINNLQLNVREAVKDKLNVELR

SEQ ID NO: 73018 - protein, 47 aa, Setaria italica
  Transcript Sequence Number=SeqID_7044
  Gene Ontology: Mol. function=UDP-glucose:glycoprotein glucosyltransfer ase activity; Cellular component=rough endoplasmic reticulum; Biological process=protein amino acid glycosylation
  Homolog annotation: Hit_ID=Q6ESI8; Match level="QueryCoverage=91%, HitCoverage=2%, E-value=8e-20, Identity=95%"; Hit description =Putative UDP-glucose:glycoprotein glucosyltransferase
PSCCQDVIPHMAQEYGFEYELITYKWPTWLHKQKEKQRIIWAYKILF

SEQ ID NO: 73019 - protein, 63 aa, Setaria italica
  Transcript Sequence Number=SeqID_7045
LNAGTISYKFVNTLDLESLTPEVCHHQTCTSIQVFGFTNCFRTFNPIKWWGCCVRYGYPVSIG

SEQ ID NO: 73020 - protein, 508 aa, Setaria italica
  Transcript Sequence Number=SeqID_7046
  Gene Ontology: Mol. function=UDP-glucose:glycoprotein glucosyltransfer ase activity; Cellular component=rough endoplasmic reticulum; Biological process=protein amino acid glycosylation
  Homolog annotation: Hit_ID=Q6ESI8; Match level="QueryCoverage=99%, HitCoverage=32%, E-value=0.0, Identity=90%"; Hit description =Putative UDP-glucose:glycoprotein glucosyltransferase
  Pfam annotation: Domain name=Glyco_transf_8; Domain location=262-498; Score=-66.1; E_value=0.054; Accession=PF01501.12; Description =Glycosyl transferase family 8
  Pfam annotation: Domain name=UDP-g_GGTase; Domain location=2-148; Score=182.1; E_value=1.6e-51; Accession=PF06427.3; Description=UDP -glucose:Glycoprotein Glucosyltrans
  Pfam module annotation: Pfam domain module=Glyco_transf_8::UDP-g _GGTase; Domain location=262-498::2-148
PHLLRILWKQIQPSMRIVLNPISSLADLPLKNFYRFVLPSMDDFSSTDYSVHGPKAFFANMPLSKTLTMNIDVPEPWLVEPVVAIHDLDNILLENLGDVRTLQAVFELEALLLTGHCMEKDRDPPRGLQFILGTKQRPHLVDTLVMANLGYWQMKVSPGVWYLQLAPGRSADLYELPPKLIAIDSLRGKLMHIEVQKKKGKEREELLNAADDHHFQEKMDNKGWNNNLLKWASSLINGDASSKNKADKITDRKDARQGETINIFSVASGHLYERFLKIMILSVLKKTQRPVKFWFIKNYLSPQFKDVIPHMAQEYGFEYELITYKWPTWLHKQKEKQRIIWAYKILFLDVIFPLSLRKVIFVDADQIVRADMGELYDMNLKGRPLAYTPFCDNNKDMDGYRFWKQGFWKDHLRGRPYHISALYVVDLAKFRQTAAGDTLRVIYEQLSKDPNSLSNLDQDLPNYAQHTVPIFSLPQEWLWCESWCGNATKARAKTIDLCNNPMTKEPKL

SEQ ID NO: 73021 - protein, 182 aa, Setaria italica
  Transcript Sequence Number=SeqID_7047
  Gene Ontology: Mol. function=UDP-glucose:glycoprotein glucosyltransfer ase activity; Cellular component=ER-Golgi intermediate compartment; Biological process=protein amino acid glycosylation
  Homolog annotation: Hit_ID=Q6ESI8; Match level="QueryCoverage=84%, HitCoverage=9%, E-value=7e-87, Identity=95%"; Hit description =Putative UDP-glucose:glycoprotein glucosyltransferase
PLAYTPFCDNNKDMDGYRFWKQGFWKDHLRGRPYHISALYVVDLAKFRQTAAGDTLRVIYEQLSKDPNSLSNLDQDLPNYAQHTVPIFSLPQEWLWCESWCGNATKARAKTIDLCNNPMTKEPKLQGARRIVPEWVGLDSEARHFTARILGDNLESPEATSPPSETPKPDDKDTDQNVKDEL

SEQ ID NO: 73022 - protein, 142 aa, Setaria italica
  Transcript Sequence Number=SeqID_7048
  Subcellular localization annotation: CTP_CleavageSite=37; ConfidenceScore=5.46e-01
GACRTDPRRQRRRRGAFDASPSRQSRRPRRGRRRRARCTAAAPPAPPLLTAWILTAWIRGTDGVGDASTGPRNGGAKNRGAEREMRSAGERGLGWVGGGVRGSGGRGGRWVGGSSEKGGGLGASGRWREGAEAAIARCSALG

SEQ ID NO: 73023 - protein, 174 aa, Setaria italica
  Transcript Sequence Number=SeqID_7049
LVDAEEGQGESEGVDANQEEVSYPDQIDEKKRELNEKLDILNKKKHDLVQMLKQVLNAEEEIRRRSMHASLRVAMPQPSENATDGSSISRLGPRMTVDVNFGDVAGDSDAGSNQGTPGRPLHHFHSISPSTASFVRSPFGSLQGHTPRSPATFSMAKSNTTTLDKTKTGQPKEQ

SEQ ID NO: 73024 - protein, 102 aa, Setaria italica
  Transcript Sequence Number=SeqID_7050
  Gene Ontology: Mol. function=oxidoreductase activity; Biological process=oxidation reduction
  Homolog annotation: Hit_ID=B6SUN2; Match level="QueryCoverage=100%, HitCoverage=27%, E-value=2e-19, Identity=48%"; Hit description=1 -aminocyclopropane-1-carboxylate oxidase
FNELPAAERSAHYGRSMAGGVSYFSNVDLFRTSAASWRDTVQIAFGPQRADPARIPAVCREELLEWDAHATAVGRALLGLLSEGLGLGSTRLEEASCLEGRV

SEQ ID NO: 73025 - protein, 149 aa, Setaria italica
  misc_feature (91)..(91): Xaa can be any naturally occurring amino acid
  Transcript Sequence Number=SeqID_7051
  Subcellular localization annotation: CTP_CleavageSite=67; ConfidenceScore=5.53e-01
APGRRATATPWPAGSRTSPTSICSGPPPRASATPFGPQRLDPARIPAVGMLKQVLNAEEEIQRRSMQASLRVAMHQPSKKAKDGSFVSKLXPRMTVDVNFGDLTGDSDAGSNQGTPGQPLHHFHSISPSTASFVRSPFGSLQVSCLNGH

SEQ ID NO: 73026 - protein, 284 aa, Setaria italica
  misc_feature (36)..(36): Xaa can be any naturally occurring amino acid
  Transcript Sequence Number=SeqID_7052
GEEEADRLEELVGQQPQQQHQDGEGEQQQQAEEGGXEEEQQQQQQALAEEVEQEEGAVEDADMNDAGEIVVVGDGNGDAEEGQGESEGVDANQEEVSYPDQIDEKKRELNEKLDILNKKKHDLVQMLKQVLNAEEEIRRRSMHASLRVAMPQPSENATDGSSISRLGPRMTVDVNFGDVAGDSDAGSNQGTPGRPLHHFHSISPSTASFVRSPFGSLQGHTPRSPATFSMASPSRFAASGHQGQHPGLHSASLPGGNYVASSPSPAASGGSSSVFRDPRPPSST

SEQ ID NO: 73027 - protein, 40 aa, Setaria italica
  Transcript Sequence Number=SeqID_7053
ADVARVDDSESGMERRTPAKGKKDSAASATPNAKWRKSTS

SEQ ID NO: 73028 - protein, 94 aa, Setaria italica
  Transcript Sequence Number=SeqID_7054
  Homolog annotation: Hit_ID=Q5JKJ9; Match level="QueryCoverage=87%, HitCoverage=57%, E-value=9e-14, Identity=53%"; Hit description=Non -phototropic hypocotyl 3-like
QEVRRLREDVARLQVQCNALQAQVDRLSSDRRRRGGGGGGFFRWSAFWFGGGMGADVARVDDSESGMERRTPAKGKKDSAASATPNAKWRKSTS

SEQ ID NO: 73029 - protein, 100 aa, Setaria italica
  Transcript Sequence Number=SeqID_7055
RYLRYPYLVLRVGFPSSVGSFLRSPVTVRGQQDARAAAQWGLLTIRPGNGLTYMIYIDIILAKVIREGCCKIVPVWNLLDVQIVDGLLRAVFFVSFFFPM

SEQ ID NO: 73030 - protein, 214 aa, Setaria italica
  misc_feature (104)..(104): Xaa can be any naturally occurring amino acid
  Transcript Sequence Number=SeqID_7056
  Gene Ontology: Mol. function=transporter activity; Cellular component= integral to membrane; Biological process=transport
  Homolog annotation: Hit_ID=Q9ATL5; Match level="QueryCoverage=64%, HitCoverage=52%, E-value=1e-65, Identity=93%"; Hit description =Aquaporin TIP4-2
  Pfam annotation: Domain name=MIP; Domain location=18-214; Score=97.0; E_value=6.6e-26; Accession=PF00230.12; Description=Major intrinsic protein
MATKLMQKFVDSCDDGGDAGQQDAGCVRAVLAELVLTFLFVFTVVSAAMAAGSGVKAGEAMPMAALAAVAITNALAAGVLVTAGFHVSGGHLNPAVTVAMMVRXGHLSKLRTVLYVAAQLLASSLACILLRYLTGGMVTPVHALGAGIRPMQGLVMEVILTFSLLFVTYAMILDPRSQVRTIGPLLTGLIVGANSLAGGNFTGASMNPARSFGP

SEQ ID NO: 73031 - protein, 124 aa, Setaria italica
  Transcript Sequence Number=SeqID_7057
  Gene Ontology: Mol. function=transporter activity; Cellular component= integral to membrane; Biological process=transport
  Homolog annotation: Hit_ID=Q9ATL5; Match level="QueryCoverage=99%, HitCoverage=47%, E-value=2e-61, Identity=94%"; Hit description =Aquaporin TIP4-2
  Pfam annotation: Domain name=MIP; Domain location=1-106; Score=-30.2; E_value=8.8e-08; Accession=PF00230.12; Description=Major intrinsic protein
MVTPVHALGAGIRPMQGLVMEVILTFSLLFVTYAMILDPRSQVRTIGPLLTGLIVGANSLAGGNFTGASMNPARSFGPALATGDWTHHWVYWLGPLLGGSLAAVVYESLFVVNKTHEPLLNGDC

SEQ ID NO: 73032 - protein, 63 aa, Setaria italica
  Transcript Sequence Number=SeqID_7058
  Subcellular localization annotation: CTP_CleavageSite=38; ConfidenceScore=5.13e-01
LVRRRRASFIEPASVSHSSQSFCFILFFVPCCCCCCCCLSTITIRPRLLGRLLFSRLLARHCN

SEQ ID NO: 73033 - protein, 50 aa, Setaria italica
  Transcript Sequence Number=SeqID_7059
HDYSLSHTHIPQRLRVRSIKKTFSGRQRATLIFDANQYIILAAQGTQGIG

SEQ ID NO: 73034 - protein, 78 aa, Setaria italica
  Transcript Sequence Number=SeqID_7060
VKVSPYLKLFVFLHESWMLNKLDSSFICVFFLLLSVSLFVTFHYVLQMDQLLHGIILVAHPANKMIQLRLVKQMGIHG

SEQ ID NO: 73035 - protein, 506 aa, Setaria italica
  Transcript Sequence Number=SeqID_7061
  Gene Ontology: Mol. function=protein binding; Biological process =ethylene mediated signaling pathway
  Homolog annotation: Hit_ID=Q2R1Z8; Match level="QueryCoverage=100%, HitCoverage=57%, E-value=0.0, Identity=94%"; Hit description=ETO1 -like protein 1, putative, expressed
  Pfam annotation: Domain name=TPR_1; Domain location=329-362; Score =23.6; E_value=0.00079; Accession=PF00515.20; Description =Tetratricopeptide repeat
  Pfam annotation: Domain name=TPR_1; Domain location=458-491; Score =19.0; E_value=0.02; Accession=PF00515.20; Description=Tetratricopepti de repeat
  Pfam annotation: Domain name=TPR_2; Domain location=1-33; Score=0.5; E_value=30; Accession=PF07719.9; Description=Tetratricopeptide repeat
  Pfam annotation: Domain name=TPR_2; Domain location=129-162; Score =2.1; E_value=19; Accession=PF07719.9; Description=Tetratricopeptide repeat
  Pfam annotation: Domain name=TPR_2; Domain location=221-254; Score =7.8; E_value=3.6; Accession=PF07719.9; Description=Tetratricopeptide repeat
  Pfam annotation: Domain name=TPR_2; Domain location=255-288; Score =5.4; E_value=7.3; Accession=PF07719.9; Description=Tetratricopeptide repeat
  Pfam annotation: Domain name=TPR_2; Domain location=329-360; Score =7.3; E_value=4.2; Accession=PF07719.9; Description=Tetratricopeptide repeat
  Pfam annotation: Domain name=TPR_2; Domain location=361-394; Score =13.2; E_value=0.78; Accession=PF07719.9; Description=Tetratricopeptid e repeat
  Pfam annotation: Domain name=TPR_2; Domain location=425-457; Score =5.5; E_value=6.9; Accession=PF07719.9; Description=Tetratricopeptide repeat
  Pfam annotation: Domain name=TPR_2; Domain location=458-491; Score =18.9; E_value=0.021; Accession=PF07719.9; Description=Tetratricopepti de repeat
  Pfam module annotation: Pfam domain module=TPR_1::TPR_1::TPR_2::TPR _2::TPR_2::TPR_2::TPR_2::TPR_2::TPR_2::TPR_2; Domain location=329 -362::458-491::1-33::129-162::221-254::255-288::329-360::361-394::425- 457::458-491
LALHQLACTKFLRKDYAEAERLFNAAFSAGHFYSVVGLARLASLRGNKHFALKLLDSVMSSRWPLGWMYQERALYLDGDSKLENLNKATELDPTLTYPYMFRAASLMKRQSVEAALMEINRILGFKLVLECLELRFCCYLALEDYRAALCDVQAILTLAPEYRMIGGRVAAKQLRMLVLENVEQWTTADCWMQLYDRWSSVDDIGSLSVIYQMLESDTAKGVLYFRQSLLLLRLNCPEAAMRSLQLAREHAASDHERLVYEGWILYDTGHCEEGLQKAEASIAIQRSFEAFFLKAYALADSSLDPSTSATVVSLLEDALRCPSDRLRKGQALNNLGSVYVDCGKLDLAAECYINALKIGHTRAHQGLARVHFLRNNRTGAYDEMTKLIEKARNNASAYEKRSEYCDRELTKADLQMVTKLDPLRVYPYRYRAAVLMDNHKEKEAIAELTKAIAFKADLNLLHLRAAFHEHIGDISSALRDCRAALSVDPNHQEMLELHHRVNSQEP

SEQ ID NO: 73036 - protein, 421 aa, Setaria italica
  Transcript Sequence Number=SeqID_7062
  Gene Ontology: Mol. function=protein binding; Biological process =ethylene mediated signaling pathway
  Homolog annotation: Hit_ID=Q2R1Z8; Match level="QueryCoverage=96%, HitCoverage=46%, E-value=0.0, Identity=89%"; Hit description=ETO1 -like protein 1, putative, expressed
  Pfam annotation: Domain name=BTB; Domain location=49-156; Score=-4.2; E_value=0.031; Accession=PF00651.23; Description=BTBPOZ domain
AWLKYEKKGEEAISDLLSSCGKCSQEFRLLDFVSQVSTGSHDMSYDDESDEFRGSAVVHFRIRDDMIACDRRKLAALSTPLYAMLNGGFRESYLEVIDMSRNGISPIGMRAISKFSLSGRLPYLSADAILEMLDFANKFCCKGLKDACERKLASFVSSRQDAIDFMECALELGCSILAASCLQVLLNELPECLNDEQVVRIFSSANKQQRLTMAGNASFSLYCLLSEVSMSTNPTSDVTVSFLEKLVESALDSRQKQLALHQLACTKFLRKDYAEAERLFNAAFSAGHFYSVVGLARLASLRGNKHFALKLLDSVMSSRWPLGWMYQERALYLDGDSKLENLNKATELDPTLTYPYMFRAASLMKRQSVEAALMEINQILGFKLVLRFCCYLALKDYRAASCYVQAIIEKPFGFTGLSSDQ

SEQ ID NO: 73037 - protein, 120 aa, Setaria italica
  Transcript Sequence Number=SeqID_7063
  Gene Ontology: Mol. function=protein binding; Cellular component=cell wall
  Homolog annotation: Hit_ID=B6TPE6; Match level="QueryCoverage=82%, HitCoverage=24%, E-value=4e-24, Identity=59%"; Hit description =Receptor-like protein kinase
  Pfam annotation: Domain name=LRR_1; Domain location=24-46; Score=9.0; E_value=5.8; Accession=PF00560.25; Description=Leucine Rich Repeat
  Pfam annotation: Domain name=LRR_1; Domain location=48-70; Score=8.3; E_value=7.7; Accession=PF00560.25; Description=Leucine Rich Repeat
  Pfam annotation: Domain name=LRR_1; Domain location=72-95; Score=9.1; E_value=5.4; Accession=PF00560.25; Description=Leucine Rich Repeat
  Pfam module annotation: Pfam domain module=LRR_1::LRR_1::LRR_1; Domain location=24-46::48-70::72-95
VAGVDLNHGDIAGFLPPELGLLADLALLHLNSNRFCGVLPPTLRRLRLLHELDLSNNRFVGPFPGVVLDLPALRFLDLRFNDFEGAVPPRLFDRPLDAILLRHHHLHHRHRHHRHRHHHH

SEQ ID NO: 73038 - protein, 74 aa, Setaria italica
  Transcript Sequence Number=SeqID_7064
  Gene Ontology: Mol. function=DNA binding; Biological process =regulation of transcription, DNA-dependent
  Homolog annotation: Hit_ID=B6U2G7; Match level="QueryCoverage=100%, HitCoverage=62%, E-value=3e-14, Identity=62%"; Hit description =HMG1/2-like protein
  Subcellular localization annotation: CTP_CleavageSite=41; ConfidenceScore=5.45e-01
MKTRSQTAPKPLKMVALAPRPGSPKRRPRPRPKPVGKGDPRAPKKPPTAFFYFMEDFRKTYKQENPSVKSMQEI

SEQ ID NO: 73039 - protein, 407 aa, Setaria italica
  misc_feature (231)..(231): Xaa can be any naturally occurring amino acid
  misc_feature (384)..(384): Xaa can be any naturally occurring amino acid
  misc_feature (397)..(397): Xaa can be any naturally occurring amino acid
  Transcript Sequence Number=SeqID_7065
  Homolog annotation: Hit_ID=A2Q3C0; Match level="QueryCoverage=30%, HitCoverage=20%, E-value=1e-23, Identity=48%"; Hit description =Legume lectin, beta domain
  Pfam annotation: Domain name=DUF936; Domain location=4-407; Score =409.2; E_value=6.7e-120; Accession=PF06075.4; Description=Plant protein of unknown function (DUF936)
MASLVPGVLLKLLQHMNSDVKVAGEHRSSLLQVISIVPALAGSDLFTNQGFYLKVSDSSHATYVTLPDEQHDLILSDTIQLGQFIHVDRFEAATPVPILRGVRPVPGRHACVGNPEDLVVTSSSSFLGSKKAQPSVNGNAKDALSLEKEQSKLEKINASVKNNGTESKKPQLTKSNSSLSKQALNSLTDKKDIVSSKAKCTTARSTPSSPTSVHSLPASFDRFSNDMKQRXKTKGAEKPSPSRLSLLEKAASVLKATTAGRRSSIGNSLSNTILSIESGPKALRRSWEGNADAKAKGNSDSKPAKAEKKSENRSSSTPRRKSVAEEKSLHKDDSKIQTPPRKSSASAPADDADKVVNKHSSPIRRTSGVLSNPNTTNLVKVAAXSKKLTDANTSWTXLPPSLAKIKE

SEQ ID NO: 73040 - protein, 509 aa, Setaria italica
  misc_feature (117)..(117): Xaa can be any naturally occurring amino acid
  misc_feature (497)..(497): Xaa can be any naturally occurring amino acid
  Transcript Sequence Number=SeqID_7066
  Homolog annotation: Hit_ID=Q2QX94; Match level="QueryCoverage=100%, HitCoverage=62%, E-value=0.0, Identity=86%"; Hit description=ZW18 protein, putative, expressed
  Pfam annotation: Domain name=DUF676; Domain location=407-508; Score= -28.4; E_value=1.6e-05; Accession=PF05057.6; Description=Protein of unknown function (DUF676)
SFYTQPFRIKYARQDIYLSVMVSFNIFNSEEEGPAASGRMLKFELIYAPTLDNGSELQASSVTSSAAVHEFRIPRRALLGLHSYCPVHFDAFHSVLVDLTLHIVYLKAGATKPSLKXPDEGLGPVSYHIVKALLTSRKMLLEELKKISDAIGKRIDDLDGADLNLGKYEPVNPSNSGLPNSSKVFPATGKGVGQLAGILHDFLERPNDVVNGTEDSMLYALPKEELLELFLTVSGQLSLLWNAFLKFHRANKTKILDYLHDVWAIDRKAEWSIWTVHSKIEIPHRYLRSMNDDSSHRHSLLRVSGSRKFHDDPVQNSASRAELHRKSIAQMKINTQSVQDMHIYADPSRVPVVLIEQHVMVVPQHGSGKDLALNASEQKDTIVLPKLQGDSLAAKSSAGKKSGRILRAVIFVHGFQGHHLDLRLVRNQWLLLDPGADCLMSEANEDKTSGDFKEMGSRLAGEVVAFLKKKVDKLSRYGGCKELKLSFVGHSIGNIIXRSALAEPALQPY

SEQ ID NO: 73041 - protein, 263 aa, Setaria italica
  Transcript Sequence Number=SeqID_7067
  Homolog annotation: Hit_ID=Q2QX94; Match level="QueryCoverage=98%, HitCoverage=31%, E-value=1e-145, Identity=93%"; Hit description=ZW18 protein, putative, expressed
  Pfam annotation: Domain name=DUF676; Domain location=1-183; Score =160.8; E_value=4.2e-45; Accession=PF05057.6; Description=Protein of unknown function (DUF676)
VLEGLNRKLLLDPGADCLMSEANEDKTSGDFKEMGSRLAGEVVAFLKKKVDKLSRYGGCKELKLSFVGHSIGNIIIRSALAEPALQPYLKNLHTYMSISGPHLGYWYSSNSLFNSGLWLLKKLKGAQCIHQLTFSDDQDPQNTYFYKLCKLKTLENFKNIILLSSPQDGYVPYHSARIELCPAASSDTSRKGQVFTEMLNNCLDQIRAPSSDTRIFMRCDVNFDQSNQGRSLNTMIGRAAHIEFLETDLYAKFIMWSFPDLFR

SEQ ID NO: 73042 - protein, 112 aa, Setaria italica
  Transcript Sequence Number=SeqID_7068
MSYQKAPHEESYPPPGYNPSQQYPYPPPSQGYGHPPPGAYPPPQGQGPYPPPGYQGYFNDQQHPYYPPPQQQPPPYGGYQHQEQEDSSCGFLKGCLAALCCCCVLEECCGLF

SEQ ID NO: 73043 - protein, 105 aa, Setaria italica
  Transcript Sequence Number=SeqID_7069
MVTPGRRSPSYSPVRRDRYSSRYSPDRERSYSPYSRRRSYSPYDRRRSHSPYDRRRSYSPYDRRRSYSPYDRRRSYSPYYSSRYRSRSPYRYRRRRSPSYDRSRF

SEQ ID NO: 73044 - protein, 176 aa, Setaria italica
  Transcript Sequence Number=SeqID_7070
  Gene Ontology: Mol. function=nucleic acid binding; Cellular component= ribonucleoprotein complex
  Homolog annotation: Hit_ID=Q10NM2; Match level="QueryCoverage=46%, HitCoverage=23%, E-value=2e-38, Identity=93%"; Hit description=RNA recognition motif family protein, expressed
  Pfam annotation: Domain name=RRM_1; Domain location=7-77; Score=73.9; E_value=6e-19; Accession=PF00076.14; Description=RNA recognition motif. (a.k.a. RRM, RBD, o
ENPGNNLYVTGLSARVTDQDLEKHFSTEGEVIDASIVHDPWTRESRGFGFVTMATVKEADRCIKYLDRSVLEGRVITVEKIFLAATGAKRRRGRTPTPGKYLGTKSSRGRRSPSYSPVRRDRYSSRYSPDRERSYSPYSRRRSYSPYDRRRSHSPYDRRRSYSPYDRRRSYSPYDR

SEQ ID NO: 73045 - protein, 232 aa, Setaria italica
  Transcript Sequence Number=SeqID_7071
  Gene Ontology: Mol. function=nucleic acid binding; Cellular component= ribonucleoprotein complex
  Homolog annotation: Hit_ID=Q10NM2; Match level="QueryCoverage=42%, HitCoverage=28%, E-value=9e-49, Identity=94%"; Hit description=RNA recognition motif family protein, expressed
  Pfam annotation: Domain name=RRM_1; Domain location=42-112; Score =73.9; E_value=6e-19; Accession=PF00076.14; Description=RNA recognition motif. (a.k.a. RRM, RBD, o
MSYSRGSRYESRSPYRRSSYSRYRSRSRSVDSSDAENPGNNLYVTGLSARVTDQDLEKHFSTEGEVIDASIVHDPWTRESRGFGFVTMATVKEADRCIKYLDRSVLEGRVITVEKAKRRRGRTPTPGKYLGTKSSRGRRSPSYSPVRRDRYSSRYSPDRERSYSPYSRRRSYSPYDRRRSHSPYDRRRSYSPYDRRRSYSPYDRRRSYSPYYSSRYRSRSPYRYRRRRSPSY

SEQ ID NO: 73046 - protein, 229 aa, Setaria italica
  Transcript Sequence Number=SeqID_7072
  Subcellular localization annotation: CTP_CleavageSite=45; ConfidenceScore=5.22e-01
CQRRLLIESHITQAKRRRGRTPTPGKYLGTKSSRGRRSPSYSPVRRDRYSSRYSPDRERSYSPYSRRRSYSPYDRRRSHSPYDRRRSYSPYDRRRSYSPYDRRRSYSPYYSSRYRSRSPYRYRRRRSPSYDRSASPYYSRRRYRSVSRSPSASPRARGRSYSRSLSPQGSYSRSCSPVSERSTSYSPKKGHSRRERTRSRSSGKRRRSRESYSHSRSSYSRSVSRERSA

SEQ ID NO: 73047 - protein, 204 aa, Setaria italica
  Transcript Sequence Number=SeqID_7073
  Homolog annotation: Hit_ID=B6U8E5; Match level="QueryCoverage=100%, HitCoverage=59%, E-value=1e-101, Identity=90%"; Hit description=SURF1
PRSRSISGVTENGYYVITPLIPRSTEPGSLQSPILVNRGWVPRGWRYKNVKDHQILHEASEPKAVKQPDGKSSWWKFWSNEPKSSPEIEKPREPPVRVIGVIRGSEKPSIFVPANEPSSGQWFYVDVPMIARACGLPENTVYIEDINEDVLPTNPYPVPKDVNTLIRHSVMPEDHLKYTFTWYTLSAAVTYMASKRIKAKKVRL

SEQ ID NO: 73048 - protein, 213 aa, Setaria italica
  misc_feature (54)..(54): Xaa can be any naturally occurring amino acid
  Transcript Sequence Number=SeqID_7074
  Gene Ontology: Mol. function=hydrolase activity, hydrolyzing O -glycosyl compounds; Cellular component=anchored to membrane; Biological process=carbohydrate metabolic process
  Homolog annotation: Hit_ID=B6TCY1; Match level="QueryCoverage=100%, HitCoverage=43%, E-value=1e-110, Identity=89%"; Hit description =Glucan endo-1,3-beta-glucosidase 4
  Pfam annotation: Domain name=X8; Domain location=83-168; Score=144.9; E_value=2.6e-40; Accession=PF07983.5; Description=X8 domain
TVDNALAYNTNLIRHVLNNSGTPSQPMNQSSTYIFELFNEDLRSGPVSEKSWGXMFPNATTVYSLSFEDVATTIPESPALRGMFCVANSSAPHGALKHSLDWACGPGSANCSAIQPGQPCYESDNIVAVASYAFNDYYHRTQSSGGTCSFNGTAMITSTDPSHGSCIFAGSTGANGSDGGTASGPVSPDSFASKSQSCWLTHLVAALLAILVM

SEQ ID NO: 73049 - protein, 140 aa, Setaria italica
  misc_feature (133)..(133): Xaa can be any naturally occurring amino acid
  Transcript Sequence Number=SeqID_7075
  Gene Ontology: Mol. function=RNA methyltransferase activity; Biological process=RNA processing
  Homolog annotation: Hit_ID=Q10T58; Match level="QueryCoverage=92%, HitCoverage=7%, E-value=7e-52, Identity=79%"; Hit description=RNA methyltransferase, TrmH family protein, expressed
KKKNKRNKREPKDPLKIGLIRRNLLNEGSKSPRTIRLAALHLSGLWLMYPETLRFYMDELKQLSLYGSVAFDEDFEAELSENHEAKFEVSMLSQSPDREFTEVFINTELYARVSVAVLFHQLWKQIKRKEYIXTEEALQS

SEQ ID NO: 73050 - protein, 114 aa, Setaria italica
  Transcript Sequence Number=SeqID_7076
  Gene Ontology: Mol. function=DNA-directed RNA polymerase activity; Cellular component=nucleoplasm; Biological process=regulation of transcription
  Homolog annotation: Hit_ID=B6U3L3; Match level="QueryCoverage=100%, HitCoverage=100%, E-value=3e-56, Identity=87%"; Hit description=DNA -directed RNA polymerase II 14.5 kDa polypeptide
  Pfam annotation: Domain name=RNA_POL_M_15KD; Domain location=4-59; Score=61.9; E_value=2.4e-15; Accession=PF02150.8; Description=RNA polymerases M15 Kd subunit
MSALKFCRECNNMLYPREDKETRTLLYACQSCEHQEVASDTCVYKRVLRKPSGEPKDVLKDVAADPSLPRTRSVRCYNCNHPEAAFFQAPTKGEKAMTLYFICCNPSCGHRWRD

SEQ ID NO: 73051 - protein, 57 aa, Setaria italica
  Transcript Sequence Number=SeqID_7077
  Gene Ontology: Mol. function=protein serine/threonine kinase activity; Biological process=protein amino acid phosphorylation
RLAERLRRYQQHPWAQAHANPEERQTLLPREQQDLPLLFRQQDVLDLEEGSTYTYSL

SEQ ID NO: 73052 - protein, 70 aa, Setaria italica
  Transcript Sequence Number=SeqID_7078
AVEQGDGCDSPSGGGGGGMVAAACPRCFLYVLISRSDPRCPRCESHVPAPAAPAASKKPRIDLNVGFLGT

SEQ ID NO: 73053 - protein, 106 aa, Setaria italica
  Transcript Sequence Number=SeqID_7079
  Gene Ontology: Cellular component=intracellular; Biological process =RNA processing
QQELKIYYELISLLFSEFVDLYGGVEELRKAWARHSKLFPHSTGNMSQHYPTIGNSVQENNKRRKTEHSIVAHDHSLEDIRKLKQTTKTDNFSLIFDKEVESQVER

SEQ ID NO: 73054 - protein, 219 aa, Setaria italica
  misc_feature (63)..(63): Xaa can be any naturally occurring amino acid
  misc_feature (212)..(212): Xaa can be any naturally occurring amino acid
  Transcript Sequence Number=SeqID_7080
  Gene Ontology: Mol. function=triacylglycerol lipase activity; Biological process=lipid metabolic process
  Homolog annotation: Hit_ID=B4F9H3; Match level="QueryCoverage=100%, HitCoverage=47%, E-value=1e-110, Identity=88%"; Hit description =Calmodulin-binding heat-shock protein
FDNIPRSRIKCYALAPARCMSLNLAVKYADVVSSVVLQDDFLPRTPTPLEYIFGSIFWPLYFXSLPCLLFLICLRDTFKQDKRKFKDPRRLYAPGRMYHIVERKFCRCGRFPPEVRTAIPVEGRFEHVVLSCSTTSDHAIAWIERESQKALELMKESENAMAPPPQQKMERLQSFEEEHKSALQRAKTLDVPHAADLSEEEIQEDGSTAPPXDTHSETT

SEQ ID NO: 73055 - protein, 116 aa, Setaria italica
  Transcript Sequence Number=SeqID_7081
  Gene Ontology: Mol. function=triacylglycerol lipase activity; Biological process=lipid metabolic process
  Homolog annotation: Hit_ID=B4F9H3; Match level="QueryCoverage=92%, HitCoverage=23%, E-value=1e-42, Identity=81%"; Hit description =Calmodulin-binding heat-shock protein
MSTFIYLSQLMKESENAMAPPPQQKMERLQSFEEEHKSALQRAKTLDVPHAADLSEEEIQEDGSTAPPSDTHSETTMEPKSAGRSSWDELMEKLFTRDEDGKLVVKKDMAKEIVVE

SEQ ID NO: 73056 - protein, 297 aa, Setaria italica
  Transcript Sequence Number=SeqID_7082
  Gene Ontology: Mol. function=triacylglycerol lipase activity; Biological process=lipid metabolic process
  Homolog annotation: Hit_ID=B4F9H3; Match level="QueryCoverage=93%, HitCoverage=61%, E-value=1e-133, Identity=82%"; Hit description =Calmodulin-binding heat-shock protein
  Pfam annotation: Domain name=Lipase_3; Domain location=45-184; Score =113.8; E_value=5.5e-31; Accession=PF01764.17; Description=Lipase (class 3)
PVVPPYLIYADVDPKGIVKRATYDDVGNRCPPYLIYVDEAHKEIILAVRGLNLVRNADYKVLMDNKLGMQMFDGGYVHHGLLKAAQYILERETETLRDLLRRYGPEYKLIFTGHSLGSGIAALMTVLVVNNRKEFDNIPRSRIKCYALAPARCMSLNLAVKYADVVSSVVLQDDFLPRTPTPLEYIFGSIFCLPCLLFLICLRDTFKQDKRKFKDPRRLYAPGRMYHIVERKFCRCGRFPPEVRTAIPVEGRFEHVVLSCSTTSDHAIAWIERESQKALEVYTCYTTCLLVYFHSFP

SEQ ID NO: 73057 - protein, 309 aa, Setaria italica
  Transcript Sequence Number=SeqID_7083
  Gene Ontology: Mol. function=zinc ion binding; Cellular component =nucleus
  Homolog annotation: Hit_ID=Q94IQ6; Match level="QueryCoverage=91%, HitCoverage=93%, E-value=1e-138, Identity=87%"; Hit description =Methyl-binding domain protein MBD111
  Pfam annotation: Domain name=MBD; Domain location=135-212; Score =32.5; E_value=1.7e-06; Accession=PF01429.11; Description=Methyl-CpG binding domain
  Pfam annotation: Domain name=zf-CW; Domain location=75-128; Score =81.7; E_value=2.7e-21; Accession=PF07496.7; Description=CW-type Zinc Finger
  Pfam module annotation: Pfam domain module=MBD::zf-CW; Domain location=135-212::75-128
MESSKSPQSSKKSRVVVPSDINGPRFENDDFSSESASNQMVVFNHEAGDKEQDELGENRSQKSVITRGISPSIGAFTVQCAKCFKWRLIPTKQKYEEIRERIIQEPFVCKRAREWRPNVTCNDPEDISQDGSRLWAIDKPNIAQPPPGWERQIRIRGEGGTKFADVYYTSPTGRKLRSLVEIDRFLQENPEYVAQGVTLAQFSFQIPRPLRQDYVKKKPKLVNPSDEASTVISKSFQPEEVNPISWAVPTAHEGDASEEASHADETIGSEEIELTRKRKTGSSLSEESNHLSDELKPKLEDAQNGDTST

SEQ ID NO: 73058 - protein, 101 aa, Setaria italica
  Transcript Sequence Number=SeqID_7084
  Gene Ontology: Mol. function=acyltransferase activity; Biological process=metabolic process
  Subcellular localization annotation: CTP_CleavageSite=35; ConfidenceScore=5.09e-01
MVKKPSTLPRSFLSLRRLLWRSISGGHYRRSTTARAAPAVPAQEKLRDRTVLVDVEGWLLRSPLSTFPYFMLVAIEAGSFLRGLLLLLMYPVLPSSVGRPP

SEQ ID NO: 73059 - protein, 164 aa, Setaria italica
  misc_feature (88)..(88): Xaa can be any naturally occurring amino acid
  Transcript Sequence Number=SeqID_7085
  Gene Ontology: Mol. function=intramolecular transferase activity, phosphotransferases; Cellular component=chloroplast; Biological process=carbohydrate metabolic process
  Homolog annotation: Hit_ID=Q53QR8; Match level="QueryCoverage=99%, HitCoverage=25%, E-value=1e-74, Identity=90%"; Hit description =Phosphoglucomutase/phosphomannomutase, C-terminal domain, putative
  Pfam annotation: Domain name=PGM_PMM_III; Domain location=34-163; Score=118.3; E_value=2.5e-32; Accession=PF02880.8; Description =Phosphoglucomutasephosphomannomutase, alphabetaalpha domain III
LVFTMFGTRAPDFGAASDGDGDRNMILGKRFFVTPSDSVAIIAANAQTAIPYFQSGIKGLARSMPTSGALDCVAEKLNVPFFEWCHFXVPTGWKLFGNLMDAGKLSICGEESFGTGSDHIREKDGIWAVLAWLSILAHRNKDKKVGERLVSVEDVAREHWANYS

SEQ ID NO: 73060 - protein, 94 aa, Setaria italica
  Transcript Sequence Number=SeqID_7086
  Gene Ontology: Mol. function=intramolecular transferase activity, phosphotransferases; Cellular component=chloroplast; Biological process=carbohydrate metabolic process
  Homolog annotation: Hit_ID=Q53QR8; Match level="QueryCoverage=78%, HitCoverage=12%, E-value=5e-35, Identity=94%"; Hit description =Phosphoglucomutase/phosphomannomutase, C-terminal domain, putative
  Pfam annotation: Domain name=PGM_PMM_I; Domain location=1-94; Score =14.5; E_value=2.7e-05; Accession=PF02878.8; Description =Phosphoglucomutasephosphomannomutase, alphabetaalpha domain I
LVLGGDGRYFNKDASQIIIKIAAGNGVGKILVGRNGLLSTPAVSSVIRKREANGGFIMSASHNPGGPDNDWGIKVIGNKNCGLVFLLQQCFVES

SEQ ID NO: 73061 - protein, 168 aa, Setaria italica
  Transcript Sequence Number=SeqID_7087
  Gene Ontology: Mol. function=intramolecular transferase activity, phosphotransferases; Cellular component=chloroplast; Biological process=carbohydrate metabolic process
  Homolog annotation: Hit_ID=Q53QR8; Match level="QueryCoverage=97%, HitCoverage=26%, E-value=1e-75, Identity=92%"; Hit description =Phosphoglucomutase/phosphomannomutase, C-terminal domain, putative
  Pfam annotation: Domain name=PGM_PMM_II; Domain location=17-126; Score=100.2; E_value=7.1e-27; Accession=PF02879.8; Description =Phosphoglucomutasephosphomannomutase, alphabetaalpha domain II
RLVSYGDFTVEVIDPVSDYLELMENVFDFQLIKDLLSRPDFRFIFDAMHAITGAYAGPIFVEKLGADPDCILNGVPLEDFGNGHPDPNLTYAKELVFTMFGTRAPDFGAASDGDGDRNMILGKRFFVTPSDSVAIIAANAQTAIPYFQSGIKGLARSMPTSGALGISS

SEQ ID NO: 73062 - protein, 502 aa, Setaria italica
  Transcript Sequence Number=SeqID_7088
  Gene Ontology: Mol. function=intramolecular transferase activity, phosphotransferases; Cellular component=chloroplast; Biological process=carbohydrate metabolic process
  Homolog annotation: Hit_ID=Q53QR8; Match level="QueryCoverage=99%, HitCoverage=82%, E-value=0.0, Identity=92%"; Hit description =Phosphoglucomutase/phosphomannomutase, C-terminal domain, putative
  Pfam annotation: Domain name=PGM_PMM_I; Domain location=1-101; Score =37.7; E_value=4.7e-08; Accession=PF02878.8; Description =Phosphoglucomutasephosphomannomutase, alphabetaalpha domain I
  Pfam annotation: Domain name=PGM_PMM_II; Domain location=130-239; Score=100.2; E_value=7.1e-27; Accession=PF02879.8; Description =Phosphoglucomutasephosphomannomutase, alphabetaalpha domain II
  Pfam annotation: Domain name=PGM_PMM_III; Domain location=241-365; Score=133.4; E_value=7.2e-37; Accession=PF02880.8; Description =Phosphoglucomutasephosphomannomutase, alphabetaalpha domain III
  Pfam annotation: Domain name=PGM_PMM_IV; Domain location=390-491; Score=38.1; E_value=3.5e-08; Accession=PF00408.12; Description =Phosphoglucomutasephosphomannomutase
  Pfam module annotation: Pfam domain module=PGM_PMM_I::PGM_PMM_II::PGM_ PMM_III::PGM_PMM_IV; Domain location=1-101::130-239::241-365::390-491
YLGVDGRYFNKDASQIIIKIAAGNGVGKILVGRNGLLSTPAVSSVIRKFPSNGGFIMSASHNPGGPDNDWGIKFNYSSGQPAPEIITDQIYGNTLSISEIKTADIPDVDLSSIGVVSYGDFTVEVIDPVSDYLELMENVFDFQLIKDLLSRPDFRFIFDAMHAITGAYAGPIFVEKLGADPDCILNGVPLEDFGNGHPDPNLTYAKELVFTMFGTRAPDFGAASDGDGDRNMILGKRFFVTPSDSVAIIAANAQTAIPYFQSGIKGLARSMPTSGALDCVAEKLNVPFFEVPTGWKFFGNLMDAGKLSICGEESFGTGSDHIREKDGIWAVLAWLSILAHRNKDKKVGERLVSVEDVAREHWATYGRNFFSRYDYEACESDGANKMMDHLRDVIASSKPGEKYGDYTLQFADDFSYTDPVDGSTVSKQGLRFVFTDGSRIIFRLSGTGSAGATIRLYVEQFESDTSKHSLDAPTALKPLIDLALSISKLKDFTGRDKPTVIT

SEQ ID NO: 73063 - protein, 72 aa, Setaria italica
  misc_feature (63)..(63): Xaa can be any naturally occurring amino acid
  Transcript Sequence Number=SeqID_7089
  Gene Ontology: Mol. function=cation transmembrane transporter activity; Cellular component=membrane; Biological process=cation transport
  Homolog annotation: Hit_ID=B6TZ73; Match level="QueryCoverage=90%, HitCoverage=17%, E-value=8e-10, Identity=52%"; Hit description=Metal tolerance protein C3
MDANGRGEDGDARAPLLAGPGRRRNSVASMRGEFVSRLPKKVLDAVDPERPSHVDFSRSKGLXEGEREYYEK

SEQ ID NO: 73064 - protein, 92 aa, Setaria italica
  Transcript Sequence Number=SeqID_7090
  Homolog annotation: Hit_ID=B6TCP0; Match level="QueryCoverage=44%, HitCoverage=10%, E-value=1e-11, Identity=82%"; Hit description =Protein transporter
SIFRIAQNVVVTRTEVPLPETRTEPNNESLSTRLNEAQQEVHAQPASDTRFFLPLVSDHLEPYFTFRFTHFSRFFLKFWFFWLKYDVSCATS

SEQ ID NO: 73065 - protein, 199 aa, Setaria italica
  Transcript Sequence Number=SeqID_7091
  Gene Ontology: Cellular component=intracellular; Biological process =intracellular protein transport
  Homolog annotation: Hit_ID=B6TCP0; Match level="QueryCoverage=98%, HitCoverage=47%, E-value=4e-77, Identity=77%"; Hit description =Protein transporter
  Pfam annotation: Domain name=GAT; Domain location=1-80; Score=14.5; E_ value=6.6e-05; Accession=PF03127.6; Description=GAT domain
EVLRDVLNSMDPRHPEGATDEFVLDLVEQCTFQKQRIMHLVMTSRDEALVSQAIELNEELHKVLVRHDALLSVQPTTAVASNPEEEEEEDAESLYRRLRKGKALSQDYTDDSVPSFRSIPDDKMRRPLTIQPPLPDKKLGALNIRSPDREEPRPELAPLIPPPPAKHAERERFFREKSIDGLASLTKEPKPKRKRGKTK

SEQ ID NO: 73066 - protein, 55 aa, Setaria italica
  Transcript Sequence Number=SeqID_7092
  Subcellular localization annotation: CTP_CleavageSite=41; ConfidenceScore=5.12e-01
RYVSRSSTNGPQQAARVARSGASATQRTLAFPNGYYSFDLKGSMEVHRMSPCLQA

SEQ ID NO: 73067 - protein, 404 aa, Setaria italica
  Transcript Sequence Number=SeqID_7093
  Gene Ontology: Cellular component=intracellular; Biological process =intracellular protein transport
  Homolog annotation: Hit_ID=B6TCP0; Match level="QueryCoverage=95%, HitCoverage=95%, E-value=0.0, Identity=82%"; Hit description=Protein transporter
  Pfam annotation: Domain name=GAT; Domain location=174-273; Score =39.2; E_value=1.6e-08; Accession=PF03127.6; Description=GAT domain
  Pfam annotation: Domain name=VHS; Domain location=1-134; Score=42.2; E_value=2.1e-09; Accession=PF00790.11; Description=VHS domain
  Pfam module annotation: Pfam domain module=GAT::VHS; Domain location =174-273::1-134
MASEMVKAATSDKLKEMDWAKNIEICELVAQDPGKAKDVIKSIKKCIGGRSKSTQLHAVMLLEMLMNNCGEPIHRQVIDNGLLPILVKIVKKKTELPVREKIFLLLDATQTSLGGAKARFPQYYEAYYELVSAGVQFSNCPNVVVTRTEVPLPETRTEPNNESLSTRLNEAQQEVHAQPASDTSIVRKASSVMEVLRDVLNSMDPRHPEGATDEFVLDLVEQCTFQKQRIMHLVMTSRDEALVSQAIELNEELHKVLVRHDALLSVQPTTAVASNPEEEEEEDAESLYRRLRKGKALSQDYTDDSVPSFRSIPDDKMRRPLTIQPPLPDKKLGALNIRSPDREEPRPELAPLIPPPPAKHAERERFFREKSIDGLASLPGHLRGLSQHSRDGSSSCSGSTDYGD

SEQ ID NO: 73068 - protein, 126 aa, Setaria italica
  misc_feature (117)..(117): Xaa can be any naturally occurring amino acid
  Transcript Sequence Number=SeqID_7094
  Gene Ontology: Mol. function=serine-type endopeptidase activity; Cellular component=plasma membrane; Biological process=negative regulation of catalytic activity
  Homolog annotation: Hit_ID=Q8LGA0; Match level="QueryCoverage=97%, HitCoverage=15%, E-value=6e-38, Identity=65%"; Hit description =Subtilisin-like serine protease
GMAPKARLAAYKVCWSGGCFDSDILAAFDAAVADGVDVVSLSVGGVVVPYYLDAIAIGAFGATEAGIVVSASAGNGGPGGLTVTNVAPWMATVGAGSMDRAFPANVRLGDGQVLDGXSVYGGPWSP

SEQ ID NO: 73069 - protein, 178 aa, Setaria italica
  Transcript Sequence Number=SeqID_7095
  Gene Ontology: Cellular component=oxygen evolving complex; Biological process=photosynthesis
  Homolog annotation: Hit_ID=Q0JG75; Match level="QueryCoverage=100%, HitCoverage=100%, E-value=2e-74, Identity=78%"; Hit description =Photosystem II reaction center PSB28 protein, chloroplastic
  Pfam annotation: Domain name=Psb28; Domain location=70-176; Score =217.6; E_value=3.1e-62; Accession=PF03912.6; Description=Psb28 protein
  Subcellular localization annotation: CTP_CleavageSite=63; ConfidenceScore=5.89e-01
MAAVMKALAVASPVSARAQPRRCVAGTPSHQNLQSSFNGMSLQCRPAPRPRPCSSRSSSVQVVMMAKPSIQFIQGTDEQTIPDVRLTKSRDGTNGVAIFTFEQPSVFDSSAELGDITGFYMIDEEGTLQSVDVSAKFVNGKPARIEAKYVMRTPRDWDRFMRFMERYSQANGLQFVKN

SEQ ID NO: 73070 - protein, 92 aa, Setaria italica
  Transcript Sequence Number=SeqID_7096
VSPPPKPVASPSPQLLAFLDFASRLYELHAPLLASRLAKLLMISSTRALAVTKIAAAKRDFGLQDDFLVSLVPKYPELFRLVGDPGPEHLGT

SEQ ID NO: 73071 - protein, 343 aa, Setaria italica
  misc_feature (76)..(76): Xaa can be any naturally occurring amino acid
  misc_feature (79)..(79): Xaa can be any naturally occurring amino acid
  Transcript Sequence Number=SeqID_7097
  Gene Ontology: Mol. function=protein serine/threonine kinase activity; Biological process=protein amino acid phosphorylation
  Homolog annotation: Hit_ID=B9S555; Match level="QueryCoverage=63%, HitCoverage=19%, E-value=7e-46, Identity=45%"; Hit description =Serine/threonine protein kinase, putative
  Pfam annotation: Domain name=PB1; Domain location=102-189; Score =98.2; E_value=2.9e-26; Accession=PF00564.16; Description=PB1 domain
MNNQVGSNHQKNLNVVYQDLTKDQGLSRFDSENLSDVSTTVFPLKGIMDPTKLVHLKTVPSENGLKTVENSSDDLXNRXSESPLAGKVKFMCSFGGKILPRPSDGKLRYVGGETRLISINRNFSWKELMQKTLTICSQPHIIKYQLPDEDLDALISLSCDEDFQNMMEEYDNLEKANGSVRLRIFLVSLTECEDPSLDSKSLESEPEYHFVVAVNNLARLDRSISGNNLTSHSNHQLDNSPVPYGDSPLCQTNTQTGAKDSLGAALNESSSQFFLAPYTQQMVVESSTTPSPCSGQQRTMQQSRMQPPADESTTNVNRSEVCNSSNLKAMPPGHINKNLVDAG

SEQ ID NO: 73072 - protein, 149 aa, Setaria italica
  Transcript Sequence Number=SeqID_7098
  Gene Ontology: Mol. function=metal ion binding
VMDDLEIMCDEQQSVAGSSDGDDQEANGGTAEGMDEGDSKAEIREECPSPPKRGPSSSDPNPDSRMSIADVLQASMEDELMAARESGLLAGGAGTSRRCHGENSKEWGRSSWRALPDAMDSVPTKRLPSAGRSCFSSKSGRGRDSDLPM

SEQ ID NO: 73073 - protein, 452 aa, Setaria italica
  Transcript Sequence Number=SeqID_7099
  Gene Ontology: Mol. function=isochorismate synthase activity; Cellular component=chloroplast; Biological process=biosynthetic process
  Homolog annotation: Hit_ID=B9R951; Match level="QueryCoverage=90%, HitCoverage=72%, E-value=1e-148, Identity=62%"; Hit description =Isochorismate synthase, putative
  Pfam annotation: Domain name=Chorismate_bind; Domain location=163 -429; Score=60.9; E_value=3e-21; Accession=PF00425.10; Description =chorismate binding enzyme
  Subcellular localization annotation: CTP_CleavageSite=34; ConfidenceScore=5.44e-01
FSARAPLPDTPALAACGSSNGNGSLSDQWKQPVSVAGVGSAVFFRGTEPFSLADWRAIKRFLSRDCPLIRAYGVIRFDATSDVSVEWADYGSFYFIVPQVEINELEESSVLATTIAWDDSLSWTWHNALTDLQSLLQKISPCSVQVNKSSLQTTIMSLNHVPTKASWDLAVTKALQMIKGRQRDLVKVVLARCSRYITDTCIDPVELLACLKVEGPNAYQFCIQPSDAPAFVGNSPEKLFHRKYLNISSEYLAGTRAKGENKGKNDFQIGQDLLLSSKEDIEFTIVRDSIKKKLEMICDEVVVHPSKALRKLPRVQHLSAQLAARIRNEDDEFEILNTLHPTPAVCGLPTEESRRFIREYEIFDRGMYAGPVGWFGGAESEFAVGIRSALLGKGHSTLVYAGVGIVDGTNPSFEWDELDLKASQFAKLLQYQEQHIRYQEAENMGTVIRIEK

SEQ ID NO: 73074 - protein, 61 aa, Setaria italica
  Transcript Sequence Number=SeqID_7100
  Homolog annotation: Hit_ID=B6UGF3; Match level="QueryCoverage=80%, HitCoverage=28%, E-value=5e-18, Identity=89%"; Hit description =Plasma membrane associated protein
  Pfam annotation: Domain name=AWPM-19; Domain location=15-61; Score= -57.4; E_value=0.0029; Accession=PF05512.3; Description=AWPM-19-like family
MASSAQRSMASALLFLNLIMYVVVAAIAGWAINYSIDESMNSLQGASPPVRLFPIYFPIGN

SEQ ID NO: 73075 - protein, 314 aa, Setaria italica
  misc_feature (194)..(194): Xaa can be any naturally occurring amino acid
  Transcript Sequence Number=SeqID_7101
SNRLWDPKSIRRLIQLFEQGPFGMQLLSSAPPSEELFTHSVTDYIYNSTGYTDANALSLEASIQKSVEEELYSSLEEKDVRVEHHLHRGRALAAFRHLLVKRASQLKSASACQVIPAQSNVQADVQLILAPLSQAERSILISVAPLAITNFEDSALVASCIFLLELCGLCANMLRLDIAALRRISSYYKSVQQXKHFDLSSPKAPELHMQSHGADIAPALARALAEDYVQSDHLHVLEQTQTSMAPKREQTPQPLIAILQHLEKASLPSLDEGKTCGFWLLTGIGDASVYRSQQNEASQHWNLVTEFCQAHTRT

SEQ ID NO: 73076 - protein, 193 aa, Setaria italica
  Transcript Sequence Number=SeqID_7102
  Gene Ontology: Mol. function=transcription regulator activity; Cellular component=nucleus; Biological process=regulation of transcription
  Homolog annotation: Hit_ID=B9RJU4; Match level="QueryCoverage=93%, HitCoverage=40%, E-value=2e-10, Identity=35%"; Hit description =Transcription factor, putative
SNETNVTDVGAEETEGIHENTDEINALLDSDSDEGYEKVQELNRVRKPSPAENDTLSVESVASAGASAGSVRPAKKRKLSSGTDKSVVDTASSARLDHSIEQKLLVNDSDAQSCCIGEVESDHKFFLGEGEAAEGDNPDDQNRRRERIQETVAALRKIVPGGIAKDATAVLDEAICYLQYLKLKVKTLGAVSL

SEQ ID NO: 73077 - protein, 138 aa, Setaria italica
  Transcript Sequence Number=SeqID_7103
  Homolog annotation: Hit_ID=A9P324; Match level="QueryCoverage=92%, HitCoverage=58%, E-value=9e-43, Identity=64%"; Hit description=TPR repeats-like protein
  Pfam annotation: Domain name=TPR_2; Domain location=43-76; Score=1.6; E_value=22; Accession=PF07719.9; Description=Tetratricopeptide repeat
  Pfam annotation: Domain name=TPR_2; Domain location=6-39; Score=17.5; E_value=0.055; Accession=PF07719.9; Description=Tetratricopeptide repeat
  Pfam module annotation: Pfam domain module=TPR_2::TPR_2; Domain location=43-76::6-39
RRVGEAVGLLELGRELQARGEFPEALASFTRVVREYADLALSEYARVGRALVLYEIGDRDESIAEMEDVSIALKGYPEIHAALAAALYADKHAALLAENQFAIATLLDPHYTDLTYVRDTKHWPPSLVASLHDFITLS

SEQ ID NO: 73078 - protein, 318 aa, Setaria italica
  misc_feature (296)..(296): Xaa can be any naturally occurring amino acid
  Transcript Sequence Number=SeqID_7104
  Gene Ontology: Mol. function=binding; Cellular component=cellular _component; Biological process=biological_process
  Homolog annotation: Hit_ID=Q5N8Y4; Match level="QueryCoverage=92%, HitCoverage=25%, E-value=1e-142, Identity=83%"; Hit description=SF21- like protein
SLGFQSIRVIMNEGLATIPVQCLDECILVTGAYGTQKTEINISLTAVGLLWTATDFVVKGLISNSVEQANHMNEEAQLGATIIEANIKQVPPKQVVDYSKLFFSVFSVLQKLGSDDRPEVRNSAVRTLFQTLSTHGQKLSKSMWEDCLWSYVFPMLEHVSHLASTSSRDEWQGKELGTRAGKAVHMLIHHSRNTAQKQWDETIVLVLGGIARLLRSFFPFLQQLSKFSSGWVLLLDFIKNSILNGSKEVALAAINCLQTFVGANCPKGNLESSYVKSVLDIYELVLQTSPNFKMTXTEKVKQEVLRGLGDLYVQAQSL

SEQ ID NO: 73079 - protein, 462 aa, Setaria italica
  Transcript Sequence Number=SeqID_7105
  Homolog annotation: Hit_ID=Q7XVC5; Match level="QueryCoverage=86%, HitCoverage=67%, E-value=1e-155, Identity=70%"; Hit description =OSJNBa0072D21.15 protein
MLLEADAAGARRSLVPWSGGSTEMSKRSRSRSKILEADGKGSRRSGYGRWFSADMMSNGSTMEVGTCSQDDVSRCPEEKTFNLQDLQNSLIASKELVKVLAHIWGPGELNPSTVSLISALRSELDVARAHVRRLMREQKSDAHEIKGLKKQLTEEMESWKVKQKEKAANALQFIVSELDSEKKSRKRAEKANKKLSVALANTETSLQAVTKELERERKSKERVEKICSELIRGIDEDKAEVEALKRETEKAHEELQKEREMLQLADEWREQRVQMKLLEARLQFEEKNAAVNQLRDELQAYLDTRQEQEPVTDPMQLSHASETGAAAADAVACRNGGNCSEGSTDDASEGSEMHSIELNVDGIGKTYTWSYTPSSKGRQRHESFSDRGMDGANSCRLERSFRDLDDELEGDWAEGCSNGMLNFEHDEERYQAIKNLREQMLAGSGFILSQGRENDEREYCGL

SEQ ID NO: 73080 - protein, 59 aa, Setaria italica
  Transcript Sequence Number=SeqID_7106
  Subcellular localization annotation: CTP_CleavageSite=28; ConfidenceScore=5.59e-01
ASCSSLSLSFILLASPRRFQALGGTRSRSSKLSTFFAFFSLLICSFNYSRINLCSILTC

SEQ ID NO: 73081 - protein, 192 aa, Setaria italica
  Transcript Sequence Number=SeqID_7107
  Gene Ontology: Mol. function=microtubule motor activity; Cellular component=microtubule associated complex; Biological process =microtubule-based movement
  Homolog annotation: Hit_ID=Q2R2P7; Match level="QueryCoverage=95%, HitCoverage=28%, E-value=3e-86, Identity=84%"; Hit description =Centromeric protein E, putative, expressed
  Pfam annotation: Domain name=Kinesin; Domain location=1-77; Score= -168.4; E_value=0.00033; Accession=PF00225.15; Description=Kinesin motor domain
YINKSLLMLGNVINKLSENGKQRGHIPYRDSKLTRILQPALGGNAKTSIICTAAPEEMHIDETRGTLKFASRAKCVSYCAQVNEILTDAALLKRPKTGIEELRKKLQGSHSEGLEQVVLKLRNDMHKSELERDRLAMELEEERKLRMTLEHHLTEQQKQLEGLDNTSILADQFTDSIQLDALKTQILSICQD

SEQ ID NO: 73082 - protein, 57 aa, Setaria italica
  Transcript Sequence Number=SeqID_7108
  Gene Ontology: Mol. function=protein dimerization activity; Cellular component=nucleus; Biological process=regulation of transcription, DNA-dependent
  Homolog annotation: Hit_ID=Q653U3; Match level="QueryCoverage=84%, HitCoverage=5%, E-value=4e-13, Identity=85%"; Hit description=Auxin response factor 17
LLRPTRKVDKQMGKQGLELLSSAAPARRLGSSCDDYVSRQESRSLSTGIASVGSVEF

SEQ ID NO: 73083 - protein, 253 aa, Setaria italica
  Transcript Sequence Number=SeqID_7109
  Gene Ontology: Mol. function=protein dimerization activity; Cellular component=nucleus; Biological process=regulation of transcription, DNA-dependent
  Homolog annotation: Hit_ID=Q6H6V4; Match level="QueryCoverage=95%, HitCoverage=26%, E-value=1e-131, Identity=94%"; Hit description =Auxin response factor 6
  Pfam annotation: Domain name=B3; Domain location=133-238; Score =116.4; E_value=9.4e-32; Accession=PF02362.13; Description=B3 DNA binding domain
MKLSPSAAGGLQDQPASPEEAEENKCLNSELWHACAGPLVSLPAVGSRVVYFPQGHGEQVAASTNKEMESQIPNYPSLPPQLICQLHNVTMHADAETDEVYAQMTLQPLSPQELKDPFLPAELGGASKQPTNYFCKTLTASDTSTHGGFSVPRRAAEKVFPPLDFNQQPPAQELIAKDLHGNEWKFRHIFRGQPKRHLLTTGWSVFVSAKRLVAGDSVLFIWNDNNQLLLGIRRANRPQTVYCPILFLSLLFL

SEQ ID NO: 73084 - protein, 621 aa, Setaria italica
  Transcript Sequence Number=SeqID_7110
  Gene Ontology: Mol. function=protein dimerization activity; Cellular component=nucleus; Biological process=regulation of transcription, DNA-dependent
  Homolog annotation: Hit_ID=Q6H6V4; Match level="QueryCoverage=100%, HitCoverage=68%, E-value=0.0, Identity=66%"; Hit description=Auxin response factor 6
  Pfam annotation: Domain name=Auxin_resp; Domain location=1-57; Score =86.8; E_value=7.7e-23; Accession=PF06507.5; Description=Auxin response factor
LANYVKAVYHTRISVGMRFRMLFETEESSVRRYMGTITGISDLDPVRWPNSHWRSVKVGWDESTAGEKQPRVSLWEIEPLTTFPMYPSPFALGLKRPWPTGLPSLYGGRDDGLTSSLMWLRDGTNPSFQSLNFGGLGTSPSPWMQPRMDNSLLGLQSDMYQTIAAAAALQGTTKQISPSLMQFQQPQNIVGRSALLSNQIMQQVQPQFQQMYNQNINDNTVQGHTQAEYLQQQLQRCHSFSEQKPQLHPQQQRQESQQQQECVQTPQNQQLHCLPNALSAFSQLSSVTQSPSSTLPAVPAFSHQQNFADTNISALSPSGGSSMQGMLGQLPSDAPSSLPCVARNTPLSISDPWSSKRVAVESVNPSRPHVVSAQIEQLDMTPCNLPQNSALAPLPGRGCLVDQDESSDPQNHLLFGVNIDSQSLLMQGGIPGHQNDNDSSTIPYSTSNFLSPSQNDFPLGQPLPSTGCLDESSYVPSAENSEQANQQFATFVKVYKSGTVGRLLDITRFSSYDELRSEVGRLFGLEGQLEDPLRSGWQLVFVDGEDDVLLVGDDPWQEFVNSVSCIKILSLEEVQQMGKQGIELLSSAPARRLSNGCDSYVSRQESKNLSTGMTPVGSVEF

SEQ ID NO: 73085 - protein, 913 aa, Setaria italica
  Transcript Sequence Number=SeqID_7111
  Gene Ontology: Mol. function=protein dimerization activity; Cellular component=nucleus; Biological process=regulation of transcription, DNA-dependent
  Homolog annotation: Hit_ID=Q653U3; Match level="QueryCoverage=100%, HitCoverage=100%, E-value=0.0, Identity=82%"; Hit description=Auxin response factor 17
  Pfam annotation: Domain name=AUX_IAA; Domain location=720-871; Score=- 95.9; E_value=0.015; Accession=PF02309.8; Description=AUXIAA family
  Pfam annotation: Domain name=Auxin_resp; Domain location=260-343; Score=195.9; E_value=1.1e-55; Accession=PF06507.5; Description=Auxin response factor
  Pfam annotation: Domain name=B3; Domain location=133-238; Score =116.6; E_value=8e-32; Accession=PF02362.13; Description=B3 DNA binding domain
  Pfam module annotation: Pfam domain module=AUX_IAA::Auxin_resp::B3; Domain location=720-871::260-343::133-238
MRLSSSSGSVLPAQAGSPEAVEEHKCLNSELWHACAGPLVSLPAVGSRVVYFPQGHSEQVAASTNKEMESQIPNYPNLPPQLICQLHNVTMHADAETDEVYAQMTLQPLNPQELKDPYLPAELGSANKQPTNYFCKTLTASDTSTHGGFSVPRRAAEKVFPPLDFTQQPPCQELIAKDLHGNEWKFRHIFRGQPKRHLLTTGWSVFVSAKRLVAGDSVLFIWNDNNQLLLGIRRASRPQTVMPSSVLSSDSMHIGLLAAAAHAASTNSRFTIFYNPRASPSEFVIPLAKYVKAVYHTRISVGMRFRMLFETEESSVRRYMGTITGISDLDSVRWPNSHWRSVKVGWDESTAGERQPRVSLWEIEPLTTFPMYPSPFPLRLKRPWPTGLPSLHGGKDDDLTNSLMWLRDTANPGFQSLNFGGLGVNPWMQPRLDASLLGLQPDMYQAMATAAFQDPTKQVSPTILQFQQPQNIAGRAAPLLSSQILQQVQPQFQQQPYLQNISESTIHGQGQAELLKQQIQRSHSFNEQKPQLQPQQQQQESQQQSQCLQVPQHQQMQQQNNMTNYQSVSNALSAFSQLSSAPQSSPVALQTILPFSQAQSFAETNMSSLSPSNATAMQNTLRPFSAEAASQLSMPRPTAVPVADPWSSKRVAVESLLPSRPQVTSQMEQLNSAPPSIPQSSALAPLPGRGCLDQDVNSDPQNHLLFGVSIDSQSLLMQGGIPGLQNGNDSTAIPYSTSNFLSPSQNDFSLDHTLNSSGCLDDAGYVPCSDNSDQVNRLPATFVKVYKSGTYGRSLDITRFSSYHELRRELGRLFGLEGQLEDPMRSGWQLVFVDREEDVLLVGDDPWQEFVSTVSCIKILSPQEVQQMGKQGLELLSSAAPARRLGSSCDDYVSRQESRSLSTGIASVGSVEF

SEQ ID NO: 73086 - protein, 92 aa, Setaria italica
  Transcript Sequence Number=SeqID_7112
  Subcellular localization annotation: CTP_CleavageSite=23; ConfidenceScore=5.08e-01
VPLHSPPRGPAPPPLRRRSRSPVALTLPPARPEIGEGCGVISPEEAARQWPGGSSPRRRPGATSAAATRSTTTARTCSASTCGARRRPFRHP

SEQ ID NO: 73087 - protein, 35 aa, Setaria italica
  Transcript Sequence Number=SeqID_7113
  Gene Ontology: Mol. function=ribulose-phosphate 3-epimerase activity; Cellular component=cytoplasm; Biological process=carbohydrate metabolic process
  Homolog annotation: Hit_ID=Q9SE42; Match level="QueryCoverage=100%, HitCoverage=15%, E-value=2e-11, Identity=94%"; Hit description =Ribulose-phosphate 3-epimerase, cytoplasmic isoform
IAPSMLSSDFANLASEAERMVRLGADWLHMDIMDG

SEQ ID NO: 73088 - protein, 225 aa, Setaria italica
  Transcript Sequence Number=SeqID_7114
  Gene Ontology: Mol. function=ribulose-phosphate 3-epimerase activity; Cellular component=cytoplasm; Biological process=carbohydrate metabolic process
  Homolog annotation: Hit_ID=Q9SE42; Match level="QueryCoverage=98%, HitCoverage=96%, E-value=1e-120, Identity=93%"; Hit description =Ribulose-phosphate 3-epimerase, cytoplasmic isoform
  Pfam annotation: Domain name=Ribul_P_3_epim; Domain location=5-205; Score=334.9; E_value=1.6e-97; Accession=PF00834.11; Description =Ribulose-phosphate 3 epimerase family
MASAKIAPSMLSSDFANLASEAERMVRLGADWLHMDIMDGHFVPNLTIGAPVIQSLRKHTKAYLDCHLMVTNPSDYVESLGKAGASGFTFHIEVTRENWQELIQSIKSKGMRPGVSLRPGTPVEEVFPLVEAENPVELVLVMTVEPGFGGQKFMPEMMDKVRTLRRKYPTLDIEVDGGLGPSTIDVAASAGANCIVAGSSIFGAADPGEVISVLRKSVEGPQNKS

SEQ ID NO: 73089 - protein, 45 aa, Setaria italica
  Transcript Sequence Number=SeqID_7115
  Gene Ontology: Mol. function=zinc ion binding; Biological process =intracellular protein transport
  Homolog annotation: Hit_ID=B9SCM9; Match level="QueryCoverage=100%, HitCoverage=4%, E-value=4e-14, Identity=80%"; Hit description =Vacuolar protein sorting vps41, putative
LGRMGNAKEALSTIINKLENIEEAVEFVMDQHDDELWDELIRQCL

SEQ ID NO: 73090 - protein, 519 aa, Setaria italica
  misc_feature (98)..(98): Xaa can be any naturally occurring amino acid
  misc_feature (206)..(206): Xaa can be any naturally occurring amino acid
  Transcript Sequence Number=SeqID_7116
  Gene Ontology: Mol. function=zinc ion binding; Cellular component =cytoplasm; Biological process=intracellular protein transport
  Homolog annotation: Hit_ID=B9SCM9; Match level="QueryCoverage=99%, HitCoverage=55%, E-value=0.0, Identity=68%"; Hit description =Vacuolar protein sorting vps41, putative
  Pfam annotation: Domain name=Clathrin; Domain location=187-335; Score= -5.0; E_value=0.011; Accession=PF00637.12; Description=Region in Clathrin and VPS
  Pfam annotation: Domain name=zf-C3HC4; Domain location=449-514; Score= 6.4; E_value=0.019; Accession=PF00097.17; Description=Zinc finger, C3HC4 type (RING finger)
  Pfam module annotation: Pfam domain module=Clathrin::zf-C3HC4; Domain location=187-335::449-514
RQGPTELLDEVGSRYLDHLIIERKYAEAAQRCPKLLRGSPSAWERWVFHFAHLRQLPVLVPYIPTENPQLSDTAYEVALVALTTNPSFHELLLTTVKXWPPTLYSASPVISAIEPQLDSSSMTDTLKEALAELYVINSQYEKALSLYAELLKPEVFEFIEKYNLHDAIRDKVVNLMILDSKRTVHLLIQHRDIIPPYEVVEQLLHXQIKKCDKRHFLHLYLHALFEIDIHAGKDFHDMQVELYADYEQRMLLPFLRTSQHYRLDKAYEIFAQRELVREQVFVLGRMGNAKEALSTIINKLENIEEAVEFVMDQHDDELWDELIRQCLQKPEMVGMLLEHTVGNLDPLYIVSLVPDGLEIPRLRDRLVKIVTDYRTETSLRNGCNDILKADCVNLLVKYYHEARRGVYMASMDEEVHGNRVDDGSSRANERSSSVRALDIKSRTRCGARCCLCFDPLPIQDISVILFYCCHAYHLSCLEGGLDLMRSNSNQDTDNGSDDEDGSPSGESRMRCVLCTTASA

SEQ ID NO: 73091 - protein, 149 aa, Setaria italica
  Transcript Sequence Number=SeqID_7117
  Gene Ontology: Mol. function=hydrolase activity
  Homolog annotation: Hit_ID=B6UDV1; Match level="QueryCoverage=98%, HitCoverage=44%, E-value=2e-53, Identity=72%"; Hit description =Catalytic/ hydrolase
MGASLSLVPVLDYFARREFLAAGLRPNAATLPYPDGGAGATCTVHYWAPPGEPRLPPLLLVHGFGPRATWQWRCQVGPLSRHFHVIVPDLLGFGGSAYPFETAPPPSEATQAATLAALLDALPGLEGRRVAAAGTSYGGFVTYWLARAV

SEQ ID NO: 73092 - protein, 103 aa, Setaria italica
  Transcript Sequence Number=SeqID_7118
KLRLSYPQDAKCCPSSPLNILVVAARQWPRSHSTTHTARAREREGAAMAAALYYHPAAGKAGLEAVAASSPSLALRPSQSKVLCVGSSRWWMRRRRWGGEASG

SEQ ID NO: 73093 - protein, 137 aa, Setaria italica
  Transcript Sequence Number=SeqID_7119
  Gene Ontology: Mol. function=transcription factor activity; Cellular component=chromatin; Biological process=regulation of transcription, DNA-dependent
  Homolog annotation: Hit_ID=B6UC13; Match level="QueryCoverage=90%, HitCoverage=22%, E-value=1e-61, Identity=91%"; Hit description=PWWP domain containing protein
GNGTGHDGQLLVSYFGDKAFAWCDAAELRPYEPYFPVAELYDDGGDDFDAAVEASLDEFSLRVEAALATPARPFVPADFLASLHDLAADRMGFTNRVQAAIAKAHLRAFDAFRALPDPPHYTLELGLPPPHSYPSSS

SEQ ID NO: 73094 - protein, 154 aa, Setaria italica
  Transcript Sequence Number=SeqID_7120
  Gene Ontology: Mol. function=ATP-dependent helicase activity; Cellular component=nucleus; Biological process=ribosome biogenesis
  Homolog annotation: Hit_ID=Q6YS30; Match level="QueryCoverage=100%, HitCoverage=30%, E-value=4e-78, Identity=90%"; Hit description=DEAD -box ATP-dependent RNA helicase 5
  Pfam annotation: Domain name=Helicase_C; Domain location=31-107; Score=123.8; E_value=5.6e-34; Accession=PF00271.23; Description =Helicase conserved C-terminal domain
LALLDKYHQAQSNRFGFLWLYKKEAARVETMLQRRGWNAVSVHGDKAQHDRTKALSLFKEGKCPLMIATDVASRGLDIPDVEVVINYSYPLTTEDYVHRIGRTGRAGKKGVAHTFFTQENKGLAGELVNVLREAGQVVPQALMKFGTHVKKKES

SEQ ID NO: 73095 - protein, 117 aa, Setaria italica
  misc_feature (71)..(71): Xaa can be any naturally occurring amino acid
  Transcript Sequence Number=SeqID_7121
  Gene Ontology: Mol. function=ATP-dependent helicase activity; Cellular component=nucleus; Biological process=ribosome biogenesis
  Homolog annotation: Hit_ID=Q6YS30; Match level="QueryCoverage=100%, HitCoverage=28%, E-value=4e-44, Identity=65%"; Hit description=DEAD -box ATP-dependent RNA helicase 5
  Pfam annotation: Domain name=Helicase_C; Domain location=44-111; Score=58.2; E_value=3.1e-14; Accession=PF00271.23; Description =Helicase conserved C-terminal domain
PNPIKVVIGSEDLAANHDVMQIVEVLDDRSRDSRLLALLDKYHQAQSNRVLVFVLYKKEAARVETMLQRRXATDVASRGLDIPDVEVVINYSYPLTTEDYVHRIGRTGRAGKKGVAH

SEQ ID NO: 73096 - protein, 480 aa, Setaria italica
  Transcript Sequence Number=SeqID_7122
  Gene Ontology: Mol. function=ATP-dependent helicase activity; Cellular component=nucleus; Biological process=ribosome biogenesis
  Homolog annotation: Hit_ID=Q6YS30; Match level="QueryCoverage=90%, HitCoverage=84%, E-value=0.0, Identity=86%"; Hit description=DEAD -box ATP-dependent RNA helicase 5
  Pfam annotation: Domain name=DEAD; Domain location=84-257; Score =231.2; E_value=2.5e-66; Accession=PF00270.21; Description=DEADDEAH box helicase
  Pfam annotation: Domain name=Helicase_C; Domain location=329-405; Score=124.5; E_value=3.4e-34; Accession=PF00271.23; Description =Helicase conserved C-terminal domain
  Pfam module annotation: Pfam domain module=DEAD::Helicase_C; Domain location=84-257::329-405
EAEAEAEAAAAAAVEEVAKSGKKKKRAEDGPGGGGGEAENGAEKAVAVTGKGSEDTKYAPLRSFSAAELPSQVLDCCKEFARPSPIQAHAWPFLLDGRDFIGIAATGSGKTIAFGVPALMHIRQKVGGKTGKKAVPRCLVLSPTRELAQQIADVLSEAGTPCGINSVCLYGGTSKGPQIAALKSGVDIVIGTPGRMKDLIEMGVCKLNEVSFVVLDEADRMLDLGFEPEVRAILSQTSSVRQMVMFSATWPLAVHKLAQEFMDPNPIKVVIGSEDLAANHDVMQIVEVLDDRSRDSRLLALLDKYHQAQSNRVLVFVLYKKEAARVETMLQRRGWKAVSVHGDKAQHDRTKALSLFKEGKCPLMIATDVASRGLDIPDVEVVINYSYPLTTEDYVHRIGRTGRAGKKGVAHTFFTQENKGLAGELVNVLREAGQVVPQALMKFGTHVKKKESKLYGSHFKEITADAPKATKITFGDSDED

SEQ ID NO: 73097 - protein, 59 aa, Setaria italica
  Transcript Sequence Number=SeqID_7123
LKNTIWKKFEIQAGSARDLEGDHTKDALQGFSNISLQPISRDSGSNVMNENSPKKSFRK

SEQ ID NO: 73098 - protein, 146 aa, Setaria italica
  Transcript Sequence Number=SeqID_7124
SRKKTTMVHNLMIETCSFCCLLAYCYLLLNVVAAWTGLLVLARWASRTETATWATRPADARGLLVWLVHWWAAPAASPPGPLTTCTACCASLWPARRWAGLPARPLQLARSLCLANVCFSFRESTTPCKREKQRRTARTSKNTTQT

SEQ ID NO: 73099 - protein, 52 aa, Setaria italica
  Transcript Sequence Number=SeqID_7125
MLAPCLASTWNLCSFQLDQRFRYHCKYLAHNAFLGEAWILCAAKALHVTCLM

SEQ ID NO: 73100 - protein, 117 aa, Setaria italica
  Transcript Sequence Number=SeqID_7126
LQASRGAASESDQHVREQQAGSVRRGPAEHCRRPRPRRIQPAGGPGSVAAQLRHQASPTPGTCTNAGSSSFHARPKQGTWPRQPSSKLRAPRQIHTHRPSFILDSTVSFYCSFIYSK

SEQ ID NO: 73101 - protein, 53 aa, Setaria italica
  Transcript Sequence Number=SeqID_7127
IHETNPEKLKYSSLILEKTETLTQQHVLEEIQNPSRIRERFGRGMNQKCSLRS

SEQ ID NO: 73102 - protein, 98 aa, Setaria italica
  Transcript Sequence Number=SeqID_7128
ILELFRICFMDLFALGVLHPCLKFHVDPRSMGRRSYDLKFVIVLRLFLVFLSLFAQVLWIAEHQARWRKRTCRARSSARAHVQRAVQRAVSRPHQTQL

SEQ ID NO: 73103 - protein, 178 aa, Setaria italica
  misc_feature (114)..(114): Xaa can be any naturally occurring amino acid
  Transcript Sequence Number=SeqID_7129
  Gene Ontology: Mol. function=transcription factor activity; Cellular component=nucleus; Biological process=regulation of transcription, DNA-dependent
  Homolog annotation: Hit_ID=Q852D5; Match level="QueryCoverage=87%, HitCoverage=11%, E-value=4e-26, Identity=45%"; Hit description =Powdery mildew resistance protein PM3b, putative, expressed
LVTERLTKLQFLCSSCTSSTFGKLKDLKLVCLENFDRFYDQVVQEELVAFPQLEKLHIDGCRKLTALPEAGVLRKWYDGGEYTMVRSAFPGLKSLILIGLWSFERWEAAIELKXEHALFPLLETVRIYHCDKLTTLPRAPKLRELCLFGANRQRSLGATRYMTSLSNLKLEGVEVDGK

SEQ ID NO: 73104 - protein, 126 aa, Setaria italica
  Transcript Sequence Number=SeqID_7130
IRVSVFSKISDEYLSFLRVVSWIYLTLGYCILISSFVSNRGVSRKEFWIEVWPAFLLCSSVLSVLPCAGVEQSDSQQQEQHARVQRRPNRQQRAGLSKVGPVRTCQTAQRAKLSSRLGLARACQAA

SEQ ID NO: 73105 - protein, 130 aa, Setaria italica
  Transcript Sequence Number=SeqID_7131
  Subcellular localization annotation: CTP_CleavageSite=45; ConfidenceScore=5.05e-01
YSRILKKVASFLSKLQAVLSSKNAWRMSVGLVHALACLPRAWACRSALLECPDGLLAGLLRVLGCYLAKLGLVHCCTYLPAGPPCWACCSWPACTCYSLLWLARCLASLFLRTNRQRENKNSKNTTQASN

SEQ ID NO: 73106 - protein, 159 aa, Setaria italica
  Transcript Sequence Number=SeqID_7132
  Gene Ontology: Mol. function=protein binding; Cellular component =nucleus; Biological process=defense response
  Homolog annotation: Hit_ID=Q852D7; Match level="QueryCoverage=70%, HitCoverage=30%, E-value=7e-21, Identity=50%"; Hit description =Leucine Rich Repeat family protein
AGRPTTDVIMASTAVQEDLSSSLETLKINKCDGLLEVLNLPSSLEEIKIYCCSQLQILSGELDALKKLTVCECPELRSLESCMIEIPALEELFLAFCKNLTSLPSGTGEYSSLSDLSVSNCPGIKSLVSDLRERYGIPLNPRDAILEERSPSLLGRLCS

SEQ ID NO: 73107 - protein, 91 aa, Setaria italica
  Transcript Sequence Number=SeqID_7133
  Subcellular localization annotation: CTP_CleavageSite=80; ConfidenceScore=5.13e-01
AFCNLSHGSICSWGIASLSQVSFRSAEYERRSHDLKLRVFLPFLFLFFVSFCSCVQVLQASRGSSKQIGPAREEAAARLRASRPSSSRRPT

SEQ ID NO: 73108 - protein, 140 aa, Setaria italica
  Transcript Sequence Number=SeqID_7134
WDGDGGGRVKRDGGESSTRPGSRERKTWRRQKLGGDWTRVDIEEVAWRPSGNGRFGWFGPQNHSAGRFAGLGLKTGSEPGSAGASRTVRGIIAKLASRRSKVVKVACPSDERRKTWTKIPYVGNYPSCSCRGSLILRPRL

SEQ ID NO: 73109 - protein, 70 aa, Setaria italica
  Transcript Sequence Number=SeqID_7135
SLKEIEIRTCSQLQILSGELDTLKKLTVWSCPELRSLESCMIEIPALEELTLVRCENLRINGGHPWMMSD

SEQ ID NO: 73110 - protein, 88 aa, Setaria italica
  misc_feature (26)..(26): Xaa can be any naturally occurring amino acid
  Transcript Sequence Number=SeqID_7136
  Gene Ontology: Mol. function=protein binding; Biological process =defense response
  Homolog annotation: Hit_ID=Q852D7; Match level="QueryCoverage=80%, HitCoverage=19%, E-value=2e-09, Identity=52%"; Hit description =Leucine Rich Repeat family protein
LKINECDGLVEVLNLPSSLKEIRNSXTCSQLQILSGELDTLKKLTVWSCPELRSLESCMIEIPALEELTLVRCENLRINGGHPWMMSD

SEQ ID NO: 73111 - protein, 68 aa, Setaria italica
  Transcript Sequence Number=SeqID_7137
QDALHSCLGVSAPSFLLLRGFCVKTTRPVVGLGHVGHGAGTLHGISQYMPSFIRVNLLSKGWQRVMWW

SEQ ID NO: 73112 - protein, 161 aa, Setaria italica
  Transcript Sequence Number=SeqID_7138
VMARPTWKNAPEARLVFGWNDAAARKGLRRSPSLPLRRALLLNVVAAWTGLLVLARWASRTETATWATRPADARGLLAWLVHWWAAPAASQPGPLTTCIACCASLWPARRWAGLPARPLQLARSLCLANACFSFRESTTPCKREKQRRTARTSKSMNETSR

SEQ ID NO: 73113 - protein, 62 aa, Setaria italica
  Transcript Sequence Number=SeqID_7139
IENLYQSITFIKEIEIRTCSQLQILSGELDTLKKLTVWSCPELRSLESCMIEIPALEELTLV

SEQ ID NO: 73114 - protein, 187 aa, Setaria italica
  Transcript Sequence Number=SeqID_7140
LFVINKRTIKAHRAVQDEAGPVRVNLPWSSRFAGRLPGPSSLLGPCVEAAAACVGARAWCWTCLMAQLSCNRSAAWAACWLNPPGPRPATVLLLACLELLGRDTPSRPVAPSRASLIRLLLPSTPEAPARMKNEKPRTRRTPVTLQFKIPFSILHDSTRNLRQGCNTPRANISMRQLSKRSSIHRGF

SEQ ID NO: 73115 - protein, 153 aa, Setaria italica
  Transcript Sequence Number=SeqID_7141
VRVSVFSKISDEFLSFSGLVSWIYLPLGYCILVSSFISIHEDLKENFSFEVGGVVLGVLAVLRCSCVCSCVAFLLRRRHRAAHVHGTHTCQQRSRSEQGGGPASSKSCGPGTRAAGQQAAVHAAAVVGRQRNRPPGRTSTGRTQGNFGLAVQD

SEQ ID NO: 73116 - protein, 148 aa, Setaria italica
  Transcript Sequence Number=SeqID_7142
  Subcellular localization annotation: CTP_CleavageSite=40; ConfidenceScore=5.30e-01
RVSGLRQASRLTRPMPSPSCHALSPFRAPCGPPVTSPGLLGSIGPSLLAFILHRPWSIGMNLSLDLHRTPSTATSHPTPAHHKPRATSNQHNVVNHSSSKGDHHWSSISPLMSALTTPHKFIVLKQKNKKLKIENSQSPKIRATALHN

SEQ ID NO: 73117 - protein, 732 aa, Setaria italica
  Transcript Sequence Number=SeqID_7143
  Gene Ontology: Mol. function=transcription factor activity; Cellular component=nucleus; Biological process=regulation of transcription, DNA-dependent
  Homolog annotation: Hit_ID=Q852D5; Match level="QueryCoverage=91%, HitCoverage=52%, E-value=1e-127, Identity=44%"; Hit description =Powdery mildew resistance protein PM3b, putative, expressed
  Pfam annotation: Domain name=FNIP; Domain location=592-631; Score =12.6; E_value=0.051; Accession=PF05725.4; Description=FNIP Repeat
  Pfam annotation: Domain name=LRR_1; Domain location=140-161; Score =1.1; E_value=1.9e+02; Accession=PF00560.25; Description=Leucine Rich Repeat
  Pfam annotation: Domain name=LRR_1; Domain location=305-326; Score =9.1; E_value=5.5; Accession=PF00560.25; Description=Leucine Rich Repeat
  Pfam annotation: Domain name=LRR_1; Domain location=374-395; Score =2.4; E_value=1.1e+02; Accession=PF00560.25; Description=Leucine Rich Repeat
  Pfam annotation: Domain name=LRR_1; Domain location=468-491; Score =2.6; E_value=97; Accession=PF00560.25; Description=Leucine Rich Repeat
  Pfam annotation: Domain name=LRR_1; Domain location=49-70; Score =10.7; E_value=2.7; Accession=PF00560.25; Description=Leucine Rich Repeat
  Pfam annotation: Domain name=LRR_1; Domain location=493-517; Score =2.2; E_value=1.1e+02; Accession=PF00560.25; Description=Leucine Rich Repeat
  Pfam annotation: Domain name=LRR_1; Domain location=622-644; Score =7.2; E_value=13; Accession=PF00560.25; Description=Leucine Rich Repeat
  Pfam annotation: Domain name=LRR_1; Domain location=667-689; Score =9.7; E_value=4.2; Accession=PF00560.25; Description=Leucine Rich Repeat
  Pfam annotation: Domain name=LRR_1; Domain location=691-710; Score =4.0; E_value=53; Accession=PF00560.25; Description=Leucine Rich Repeat
  Pfam annotation: Domain name=LRR_1; Domain location=72-94; Score =11.6; E_value=1.8; Accession=PF00560.25; Description=Leucine Rich Repeat
  Pfam module annotation: Pfam domain module=FNIP::LRR_1::LRR_1::LRR _1::LRR_1::LRR_1::LRR_1::LRR_1::LRR_1::LRR_1::LRR_1; Domain location =592-631::140-161::305-326::374-395::468-491::49-70::493-517::622 -644::667-689::691-710::72-94
MLVDELHYSSKYRDVRNSSNNSSLRALALPASKYSAYKYLPMKPKHLHHLRYLDISWSRVEALPDDISILYNLQTLKLSGCENLSMLPKQMKYMTALCHLYTDGCTKLQCMPPELGRLTSLQTLTCFVVSSDSDCSSLGELKNLNIGGSLELKQLENVTEARNAKQANLGNKKELRQLSLRWTSGKEEEQQCNEVLEVLEVHDRLLALEIEAYQGTKFPLWMGVLRNMVELRLSGCSKSEQLPPLGQLPALQLLHLVGLTKLQFLCSSCTSSTFGKLKDLKLVYLHNFDRFYDQVVQEELVAFPQLEKLYIQGCGKLTALPEAGVLRKWYDGGEYTMVRSAFPGLKILILSNLPSFERWEAAIEIEVEHALFPLLETVGIDCCNKLTTLPRAPKLRELGLSMSDVENQQRSLGATRYMTSLSNLVLQGVEVDGKDKWDYISSVTNMHLNYCSLFFQSHALALWACFRQLQDLDICSSNDLIYWPENEFQNLVSLRRLKIGHCKSLVGYAPDQAILERSQLLPCLESLFIFDCDSLVEVFNPTPALKKMDVRYCKNLKTISFKQQDKTSLNAGRPSTDVIMASTAVQEDLSPSGRSNFLPSSLETLRIDGCGGLLEVLNLPSSLKEIYIHRCSQLQILSGELDALKKLTVLECPELRSLESCMIEIPALEKLTLEGCKNLTSLPSGTGECSSLRDLSVYNCPGIKSLVSDLRERYGIPLNPRYAILEEVPGSN

SEQ ID NO: 73118 - protein, 85 aa, Setaria italica
  Transcript Sequence Number=SeqID_7144
SSPSESRAGRRKTICSEAKGEIEEEAKMIYRNWSLLSSTVVIWGGVATAGLAGIFLFGGKEKFQDYLCREGERLRRQDRAAMGRN

SEQ ID NO: 73119 - protein, 216 aa, Setaria italica
  Transcript Sequence Number=SeqID_7145
  Gene Ontology: Mol. function=zinc ion binding; Cellular component =intracellular
  Homolog annotation: Hit_ID=Q7XSH7; Match level="QueryCoverage=93%, HitCoverage=46%, E-value=4e-61, Identity=56%"; Hit description =OSJNBa0073L13.11 protein
  Pfam annotation: Domain name=zf-C2H2; Domain location=84-107; Score =26.4; E_value=0.00011; Accession=PF00096.18; Description=Zinc finger, C2H2 type
  Subcellular localization annotation: CTP_CleavageSite=66; ConfidenceScore=5.53e-01
GASLCAMRDVVDAASSAAASASADRDTAPLNRRRAHRAGSSSSSSAAAGGGSHSSLRGLSGCYECRAINVEPMSRRYPRPRELCACPQCGEVFTKADSLEHHQAIRHAVSELGPEDSGRNIVEIIFKSSWQKRDRPICHIDRILKVHNAPRTVARFEAYRDAVRSRCRATAARAAADGNELLRFHSAPLACALGLSGATSLCAGAAADPSSIRSSN

SEQ ID NO: 73120 - protein, 46 aa, Setaria italica
  Transcript Sequence Number=SeqID_7146
GINAEVEELIWIKPTLQIIADDVKCTHGAAISGELDPNEYTSRHLR

SEQ ID NO: 73121 - protein, 375 aa, Setaria italica
  misc_feature (43)..(43): Xaa can be any naturally occurring amino acid
  Transcript Sequence Number=SeqID_7147
  Gene Ontology: Mol. function=protein binding; Cellular component =chloroplast; Biological process=iron-sulfur cluster assembly
  Homolog annotation: Hit_ID=B9T968; Match level="QueryCoverage=83%, HitCoverage=64%, E-value=6e-83, Identity=50%"; Hit description =Protein sufD, putative
  Pfam annotation: Domain name=UPF0051; Domain location=102-337; Score =129.1; E_value=1.4e-35; Accession=PF01458.9; Description =Uncharacterized protein family (UPF0051)
  Subcellular localization annotation: CTP_CleavageSite=28; ConfidenceScore=5.20e-01
LPSKAPDLAPPASPFPSHVLFSDGLLVSASGVHVSALADLPPXRARDRAAAALAASAEFAHKDLFYDFNAVGARDVVVVHVPEGVKVADDPVHIMFTYTNCGAESMLMSNPRVLVVAEKEAEVAIVEEHFGAGEEGGCYWANPVAEIIIDAGARVVHSYVQRQSFAAAHTKWTVVQQDTSSKYEFVEVSTGAKLNRHNLHIQQLGPETETELSTLHLTSQNKQIHDLHSKLILDHPRGFSRQLHKCIACATGNSIFDGNIKVNRYAQQTDAGQETKCLILSPKALVNVKPNLQIIADDVKCTHGAAISGELDPNELFYFQARGINAETATDALLYFFGAHVIKRIPFKPINENALAQFKELLASSRQTTYDALLS

SEQ ID NO: 73122 - protein, 74 aa, Setaria italica
  misc_feature (22)..(22): Xaa can be any naturally occurring amino acid
  Transcript Sequence Number=SeqID_7148
  Gene Ontology: Mol. function=nucleic acid binding
  Homolog annotation: Hit_ID=B6TCK0; Match level="QueryCoverage=98%, HitCoverage=22%, E-value=3e-20, Identity=73%"; Hit description =ZmMybst1
HAQKYFIRQSNMSRRKRRSSLXFDMVPDESMDLPPLPGSQEPEASVLNQPPLPPPVEEEVESMESDTSAVAESP

SEQ ID NO: 73123 - protein, 315 aa, Setaria italica
  Transcript Sequence Number=SeqID_7149
  Gene Ontology: Mol. function=nucleic acid binding
  Homolog annotation: Hit_ID=B6TCK0; Match level="QueryCoverage=100%, HitCoverage=100%, E-value=1e-135, Identity=76%"; Hit description =ZmMybst1
  Pfam annotation: Domain name=Myb_DNA-binding; Domain location=91-138; Score=46.0; E_value=1.5e-10; Accession=PF00249.23; Description=Myb -like DNA-binding domain
  Pfam annotation: Domain name=zf-CCHC; Domain location=3-20; Score =9.6; E_value=0.017; Accession=PF00098.15; Description=Zinc knuckle
  Pfam module annotation: Pfam domain module=Myb_DNA-binding::zf-CCHC; Domain location=91-138::3-20
  Subcellular localization annotation: CTP_CleavageSite=29; ConfidenceScore=5.18e-01
MTRRCSHCSHNGHNSRTCPNRGVKIFGVRLTDGSAIRKSASMGNLSLLSAGSTSGGASPADGPDLADGGGGYASDDFVQGSSSASRERKKGVPWTEEEHRRFLLGLQKLGKGDWRGISRNFVVSRTPTQVASHAQKYFIRQSNMSRRKRRSSLFDMVPDESMDLPPLPGSQEPEASVLNQPPLPPPVEEEVESMESDTSAVAESPAASAVMPENMHPSYPVILPAYFSPFLQFSVPFWPNQKDGDDLPQETHEIVKPVAVHSKNPINVDELVGMSKLSIGESGQETVSTSLSLNLLGGQNRQSAFHANPQTRAQA

SEQ ID NO: 73124 - protein, 208 aa, Setaria italica
  Transcript Sequence Number=SeqID_7150
  Gene Ontology: Mol. function=nucleic acid binding
  Homolog annotation: Hit_ID=Q10KQ7; Match level="QueryCoverage=46%, HitCoverage=44%, E-value=2e-35, Identity=76%"; Hit description=RNA recognition motif family protein, expressed
  Pfam annotation: Domain name=RRM_1; Domain location=39-109; Score =90.1; E_value=7.9e-24; Accession=PF00076.14; Description=RNA recognition motif. (a.k.a. RRM, RBD, o
  Subcellular localization annotation: CTP_CleavageSite=25; ConfidenceScore=5.05e-01
MGRGYDYSPSPPRGYRRRARSPSPRGRYGGRARDLPTSLLVRNLRRDCRPDDLRRPFGKFGRVKDVYLPRDYYTGDPRGFGFIQYFDPDDAADAKYHMDGQMFLGREITVVFAEENRKKPTEMRARERVSGRGRSYDRRLRSRSPGYSGSPRGRSRSRSRSYSPAPKPKHHSRSPSRSLSRSPVDSRSRSASPAVRSPRRERSLSVSQ

SEQ ID NO: 73125 - protein, 58 aa, Setaria italica
  Transcript Sequence Number=SeqID_7151
KARPHLCSYRSINCPFSSKFQTNMPQTNCPDQWIQAPNVGKGNSIETVKLTCRSELDG

SEQ ID NO: 73126 - protein, 46 aa, Setaria italica
  Transcript Sequence Number=SeqID_7152
LPDANPGSFISVPHFLLDHQVAETVLEQSPVLLRSICSERSTLLLP

SEQ ID NO: 73127 - protein, 59 aa, Setaria italica
  misc_feature (47)..(47): Xaa can be any naturally occurring amino acid
  misc_feature (52)..(52): Xaa can be any naturally occurring amino acid
  Transcript Sequence Number=SeqID_7153
WWCTHGTYMDGCSSKFLEELIHVMLGKCISNAHPSIDNFASRQGFFXSKAHXGHVQGIS

SEQ ID NO: 73128 - protein, 87 aa, Setaria italica
  Transcript Sequence Number=SeqID_7154
  Gene Ontology: Mol. function=nucleotidyltransferase activity
DSSQEYSVNVLGEQGTSATNQDWVRSDSLKTVENTAIPVIMLVADVPCDTNMFNEYSSVLDSSQEYSVNVLGEQGSPPRSELEVSAS

SEQ ID NO: 73129 - protein, 314 aa, Setaria italica
  misc_feature (48)..(48): Xaa can be any naturally occurring amino acid
  misc_feature (54)..(54): Xaa can be any naturally occurring amino acid
  misc_feature (56)..(56): Xaa can be any naturally occurring amino acid
  misc_feature (60)..(60): Xaa can be any naturally occurring amino acid
  misc_feature (62)..(62): Xaa can be any naturally occurring amino acid
  misc_feature (225)..(225): Xaa can be any naturally occurring amino acid
  misc_feature (267)..(267): Xaa can be any naturally occurring amino acid
  Transcript Sequence Number=SeqID_7155
  Gene Ontology: Mol. function=nucleotidyltransferase activity; Cellular component=integral to membrane; Biological process=sister chromatid cohesion
  Homolog annotation: Hit_ID=B9RD63; Match level="QueryCoverage=99%, HitCoverage=22%, E-value=1e-115, Identity=66%"; Hit description =Nucleotidyltransferase, putative
  Pfam annotation: Domain name=PAP_assoc; Domain location=204-257; Score=39.1; E_value=1.7e-08; Accession=PF03828.11; Description =PAP25A associated domain
SDVDLVVSLPPVRNLEPIKEAGILEGRNGIKETCLQHAARCLTNQDWXVRSDSXKXVENXAXVPCDTNMFNEYSSVLDSSQEYSVNVLGEQGSPPRSDTSSSEGSNMLVSSKLNKDDCDIVQSIRLDISFKSPSHTGLQTTELVRELTQQFPAVVPLALILKKFLADRSLDHPYSGGLSSYCLVLLIVRFLQHEHHLGRPINQNLGSLLMDFLYFFGNIFDPRHXRISIQGSGIYLNRERGHSIDPIHIDDPLCPANNVGRNCFRIXHQCIKAFADAFAVLENELLQFSSECSMPESSFNILKKIIPSIDTDEL

SEQ ID NO: 73130 - protein, 56 aa, Setaria italica
  Transcript Sequence Number=SeqID_7156
HCKESNQHLRSHVKEGEILLQCKGGKRTGRNKGTRPAPIQSNHIIQPRQSPWRVQV

SEQ ID NO: 73131 - protein, 482 aa, Setaria italica
  misc_feature (291)..(291): Xaa can be any naturally occurring amino acid
  Transcript Sequence Number=SeqID_7157
  Gene Ontology: Mol. function=hydroperoxide dehydratase activity; Cellular component=chloroplast; Biological process=fatty acid biosynthetic process
  Homolog annotation: Hit_ID=B6SUP5; Match level="QueryCoverage=100%, HitCoverage=100%, E-value=0.0, Identity=84%"; Hit description =Cytochrome P450 CYP74A19
  Pfam annotation: Domain name=p450; Domain location=15-469; Score= -150.5; E_value=0.00021; Accession=PF00067.14; Description=Cytochrome P450
MASSDQGSSGAPKPVPGSYGLPVIGAVRDRLDFYYFQGQDKYFESRVERYGSTVVRINVPPGPFMAKDPRVVAVLDAKSFPVLFDMDKVEKKNLFTGTYMSSTSLTGGYRVCSYLDPSEPTHTKVKQMLFNLLLSRKDEVIPTFRSNFSSLLATVESELAKSGKAAFNKLNDVTSFDFIGEAYFGVRPSATNLGSSGPTKAAKWLIWQLHPLVTLGLPMVLEEPLLHTFHLPPFLIKGDYKALYNYYSTAGKQALDMAETLGLSREEACHNLLFATTFNSYGGLKVLFPGXLANIANAGEKLHERLVAEIRGAVAEAGGKVTLAALEKMELTKSVVWESLRLDPPVKFQYGHAKKDLEIASHDGVFQVKKGEMLFGYQPCATKDARVFGSTAREFVPDRFVGDEGSKLLQYVYWSNGRETESPSVDNKQCPGKNFVVLVGRLFVVELFLRYDTFTATVSTELLGASVNFTSVTKATSGPGSE

SEQ ID NO: 73132 - protein, 110 aa, Setaria italica
  Transcript Sequence Number=SeqID_7158
  Gene Ontology: Mol. function=metal ion binding; Cellular component =nucleus; Biological process=cell differentiation
  Homolog annotation: Hit_ID=Q7X9M7; Match level="QueryCoverage=94%, HitCoverage=34%, E-value=3e-19, Identity=56%"; Hit description =Yabby9 protein
  Pfam annotation: Domain name=YABBY; Domain location=5-108; Score =12.6; E_value=5.7e-12; Accession=PF04690.5; Description=YABBY protein
  Subcellular localization annotation: CTP_CleavageSite=4; ConfidenceScore=5.35e-01
LTPVAAAAPASEQLCYVHCHFCDTVLVVSVPTSSLFKTVTVRCGHCSSLLTVNMRGLLFQGTPTNTAAPPADVTSTTTTITTEPPAAADASVNNGQFHFHHSLNLNPPQP

SEQ ID NO: 73133 - protein, 346 aa, Setaria italica
  misc_feature (89)..(89): Xaa can be any naturally occurring amino acid
  Transcript Sequence Number=SeqID_7159
  Gene Ontology: Mol. function=metal ion binding; Cellular component =nucleus; Biological process=cell differentiation
  Homolog annotation: Hit_ID=Q7X9M6; Match level="QueryCoverage=91%, HitCoverage=92%, E-value=7e-88, Identity=59%"; Hit description =Yabby10 protein
  Pfam annotation: Domain name=YABBY; Domain location=42-305; Score =208.9; E_value=1.4e-59; Accession=PF04690.5; Description=YABBY protein
  Subcellular localization annotation: CTP_CleavageSite=41; ConfidenceScore=5.28e-01
MSSSSSSSSAASASAVFPPSPQPPPPLLVENLPPLHQLTPVAAAAPASEQLCYVHCHFCDTVLVVRDRTPPSPDLFFSLYPHAALHVIXFFKISKILRKPEACAWVQVSVPTSSLFKTVTVRCGHCSSLLTVNMRGLLFQGTPTNTAAPPADVTSTTTTITTEPPAAADASVNNGQFHFHHSLNLNPPHQQSLLDEISSSANPSLQLLEQHGLGGLIPSGRNAAAPPPPHPPAAAAKGTKEPSPRTNPVVNRPPEKRQRVPSAYNRFIKDEIQRIKAGNPDISHREAFSAAAKNWAHFPHIHFGLMPDHQGLKKTSLLPHQDHQRKDGLLKDGLYAAAANMGVAPY

SEQ ID NO: 73134 - protein, 48 aa, Setaria italica
  Transcript Sequence Number=SeqID_7160
APASFTPDGCGRMCEIPPVSLESTRPALRWVGCDVNFYPWMPNGTSIS

SEQ ID NO: 73135 - protein, 95 aa, Setaria italica
  misc_feature (28)..(28): Xaa can be any naturally occurring amino acid
  Transcript Sequence Number=SeqID_7161
VAEEPGTPSRGVKDDISELTETLARRFXGVASFVAPPSTPPEASTPRTGAAAGGDRRGGDRRRGARARCHRGGADRRGGARGVRQAHLHVAREMV

SEQ ID NO: 73136 - protein, 58 aa, Setaria italica
  Transcript Sequence Number=SeqID_7162
ATERFHNEMMTSEDIQLLSKACQHHAAKDTEIPMSNKVNLRMAYSTPVQLSLCSTFHN

SEQ ID NO: 73137 - protein, 287 aa, Setaria italica
  Transcript Sequence Number=SeqID_7163
  Homolog annotation: Hit_ID=A3B9A0; Match level="QueryCoverage=27%, HitCoverage=7%, E-value=1e-10, Identity=50%"; Hit description=Auxin response factor 16
LAQQQQQQHPILQQQQVQPLQQNSAILQQQQAQLLQQNAIHLQQQQEQLQRQHSQPPQQLKATASLQPMDQHKLKEQQPSGGQAVSQAQLLNQILQPSSSQIQQLGLPKSPTQRPGLPGLTTMGSLPQPQLTQTPQLQQTAEYQQALLQSQQPQLQQLSQSELQLQLLQKIQQQNLLSQLNPQHQSQLIQQLSQKSQEILQQQVLQHQLGGADTMGQLKHLQQTPLNHMTGSMTPQQLVRSHSALAESEEPSSSTAPSGSRVSPINSLSRAQQGSRNLPEIPSTPHI

SEQ ID NO: 73138 - protein, 82 aa, Setaria italica
  Transcript Sequence Number=SeqID_7164
VRCGGNCGPIVVDDSKGDNAKSGGCGTFKASTMTEGQAKSGGCGSGCGGGGGCGTLLNSNAKGDHGQAKSAGCGSGCGSGCG

SEQ ID NO: 73139 - protein, 191 aa, Setaria italica
  Transcript Sequence Number=SeqID_7165
  Subcellular localization annotation: CTP_CleavageSite=29; ConfidenceScore=5.48e-01
EKPPHIRSKHGWFKFAASCTLSTSGASVSASTALPLVIRDKSSGDSDSVRQTRFTEMLAVQIYRIAFLIMKFLCSQAKEAVKRAEELEFLDLAHFPELPMPDILHGLQDQVVSIVTEVFEANGSSTLNPETERVCHLLLVTLEMSLYMELCVSQSCGIRPVLGRFEDFCKGIKAMLQAIEKHSSFKALARS

SEQ ID NO: 73140 - protein, 563 aa, Setaria italica
  misc_feature (131)..(131): Xaa can be any naturally occurring amino acid
  misc_feature (429)..(429): Xaa can be any naturally occurring amino acid
  Transcript Sequence Number=SeqID_7166
VLFPLLSGQVELLLTLARILFDQAKQNKKSSHLYPDIVLLMKTSVASTSFLVDLLSSTHALKQPVKALLVLLLSSYEFMYSKVDIKDLPDNVNIFGELAVLSVSLLPVLCKFAENREFSDLAVASMDLILXGFVPSEVCVPILQKHFHLQAILHRCQHGGLLSTQVILNFLLTLGRTKDGATVLQSANIFAFLKVLLSQLSLDDSCLRNSLSAQVKDVNQWGLGLAIVASLNHCLDDDISRNNVANSTISFLSGQVPLMSSYLSAQSVTAHQNKKRALSQKSQTSLSTLSLTENILILLCILAKYHFPRDTGKKEVDSELREIIIHLLAFVSKGSVKASSSSNWNSSFFCPAVVKEELALNEKPPHIRSKHGWFKFAASCTLSTSGASVSASTALPLVIRDKSSGDSDSVRQTRFTEMLAVQNRIYLLXKYKAVKRTEELEFLDLAHFPELPMPDILHGLQDQVVSIVTEVFEANGSSTLNPETERVCHLLLVTLEMSLYMELCVSQSCGIRPVLGRFEDFCKGIKAMLQAIEKHSSFKALARSLTQITTLLYPGIVQTNLFM

SEQ ID NO: 73141 - protein, 139 aa, Setaria italica
  Transcript Sequence Number=SeqID_7167
  Gene Ontology: Mol. function=microtubule motor activity; Cellular component=microtubule associated complex; Biological process =microtubule-based movement
  Homolog annotation: Hit_ID=B6TA17; Match level="QueryCoverage=99%, HitCoverage=50%, E-value=1e-44, Identity=70%"; Hit description =Kinesin heavy chain isolog
GSLLRNAQPELMDTLIQASKDGGDSKLDTLLSENALLVEEEEVEDLPDEEEDDEEYMKVADRWFDGLLCKDISVTNEVYAVHNVEFDRQELRKLVRRVHMVQESTQIKDGEEGSSGKLSRAKKPLLRFLRSLAKEACAE

SEQ ID NO: 73142 - protein, 222 aa, Setaria italica
  Transcript Sequence Number=SeqID_7168
  Gene Ontology: Mol. function=microtubule motor activity; Cellular component=microtubule associated complex; Biological process =microtubule-based movement
  Homolog annotation: Hit_ID=B6TA17; Match level="QueryCoverage=75%, HitCoverage=62%, E-value=6e-64, Identity=72%"; Hit description =Kinesin heavy chain isolog
  Pfam annotation: Domain name=DUF615; Domain location=10-136; Score= -73.1; E_value=0.00012; Accession=PF04751.6; Description=Protein of unknown function (DUF615)
HRRRRGQRTNPDAGDGAAVPFRRSRNALKRDARRAVRWGMELAKFPPPQIKRILRAASLETEVFDALMIVKRFGPDVREGKRRQYNYIGSLLRNAQPELMDTLIQASKDGGDSKLDTLLSENALLVEEEEVEDLPDEEEDDEEYMKVADRWFDGLLCKDISVTNEVYAVHNVEFDRQVSSVLTFNISFNNVTRVFAYAMEICSTRPLRTVWLPMFKPCCISI

SEQ ID NO: 73143 - protein, 75 aa, Setaria italica
  Transcript Sequence Number=SeqID_7169
  Homolog annotation: Hit_ID=B6TA17; Match level="QueryCoverage=78%, HitCoverage=21%, E-value=2e-13, Identity=71%"; Hit description =Kinesin heavy chain isolog
LIQLSQLHYYGSIYGSCQLLTFRQQELRKLVRRVHMVQESTQIKDGEEGSSGKLSRAKKPLLRFLRSLAKEACAE

SEQ ID NO: 73144 - protein, 181 aa, Setaria italica
  misc_feature (19)..(19): Xaa can be any naturally occurring amino acid
  misc_feature (32)..(32): Xaa can be any naturally occurring amino acid
  Transcript Sequence Number=SeqID_7170
  Gene Ontology: Mol. function=oxidoreductase activity, acting on NADH or NADPH; Cellular component=mitochondrial respiratory chain; Biological process=mitochondrial electron transport, NADH to ubiquinone
  Homolog annotation: Hit_ID=Q42577; Match level="QueryCoverage=87%, HitCoverage=72%, E-value=1e-75, Identity=84%"; Hit description=NADH -ubiquinone oxidoreductase 20 kDa subunit, mitochondrial
  Pfam annotation: Domain name=Oxidored_q6; Domain location=56-165; Score=221.7; E_value=1.9e-63; Accession=PF01058.14; Description=NADH ubiquinone oxidoreductase, 20 Kd sub
  Subcellular localization annotation: CTP_CleavageSite=22; ConfidenceScore=5.24e-01
SAAAAAGASPASPAPYGGXPPPAMSKTAEFVXSKVDDLMNWARKGSIWPMTFGLACCAVEMMHAGASRYDFDRFGVIFRPSPRQSDCMIVAGTLTNKMAPALRKVYDQMPEPRWVISMGSCANGGGYYHYSYSVVRGCDRIVPVDIYVPGCPPTAEALLYGVLQLQKKINRRKDFHHWWTK

SEQ ID NO: 73145 - protein, 219 aa, Setaria italica
  Transcript Sequence Number=SeqID_7171
  Gene Ontology: Mol. function=metal ion binding; Cellular component =plasma membrane
  Homolog annotation: Hit_ID=Q6YUB8; Match level="QueryCoverage=100%, HitCoverage=56%, E-value=7e-78, Identity=66%"; Hit description =Protein Brevis radix-like 1
  Pfam annotation: Domain name=DZC; Domain location=1-30; Score=56.6; E_ value=9.5e-14; Accession=PF08381.3; Description=Disease resistancezinc fingerchromosome co
  Pfam annotation: Domain name=DZC; Domain location=183-218; Score =77.2; E_value=5.9e-20; Accession=PF08381.3; Description=Disease resistancezinc fingerchromosome co
  Pfam module annotation: Pfam domain module=DZC::DZC; Domain location =1-30::183-218
KRIRFSREMFNNWQAQRWWAENYDKVMELYNVQRFNQTVPLPTTPKSEDESSKEDSPVTPPLDKERLPHTLHRPMSSGGAMGYSSSDSLEHHLNRYCNGHHHHHGHQFCDSMGLASTPKLSSISGAKTETSSMDASMRTSSSPEEVDRSGELSVSISNASDQEREWVEEDEPGVYITIRALPGGIRELRRVRFSREKFSEMHARLWWEENRARIHEQYL

SEQ ID NO: 73146 - protein, 492 aa, Setaria italica
  misc_feature (299)..(299): Xaa can be any naturally occurring amino acid
  misc_feature (328)..(328): Xaa can be any naturally occurring amino acid
  Transcript Sequence Number=SeqID_7172
  Gene Ontology: Mol. function=protein tyrosine kinase activity; Cellular component=plasma membrane; Biological process=protein amino acid phosphorylation
  Homolog annotation: Hit_ID=B6UD08; Match level="QueryCoverage=100%, HitCoverage=100%, E-value=0.0, Identity=91%"; Hit description=TPR -containing protein kinase
  Pfam annotation: Domain name=Pkinase; Domain location=55-311; Score= -20.8; E_value=3e-07; Accession=PF00069.17; Description=Protein kinase domain
  Pfam annotation: Domain name=Pkinase_Tyr; Domain location=68-308; Score=-54.7; E_value=4.3e-10; Accession=PF07714.9; Description =Protein tyrosine kinase
  Pfam annotation: Domain name=TPR_2; Domain location=418-451; Score =9.9; E_value=2; Accession=PF07719.9; Description=Tetratricopeptide repeat
  Pfam annotation: Domain name=TPR_2; Domain location=452-485; Score =12.0; E_value=1.1; Accession=PF07719.9; Description=Tetratricopeptide repeat
  Pfam module annotation: Pfam domain module=Pkinase::Pkinase_Tyr::TPR _2::TPR_2; Domain location=55-311::68-308::418-451::452-485
MGARCSKLSVCWWPPHFKSPMLENGAVDDDGSGVPVFAEYSLDELRAATDGFAPDRIVSEHGEKAPNVVYRGTLFSSGRTVAIKRFGRSAWPDSRQFLEEARAVGQLRSGRLANLIGCCCESGERLLVAEFMPHETLAKHLFHWETNPLSWAMRMRAALYVAQALEYCSSKGRALYHDLHAYRVVFDVDGNPRLSCFGLMKNSRDGKSYSTNLAFTPPEYLKTGRVSPESVVYSFGTVLLDLLSGKHIPPSHALDLIRGKNFLVLMDSCLEGHVSNSDGTDLMRLASRCLQYEARDRPXNLKAVVSGLASLQKDASTPSHTLLGIQHXKKSSDHVPLSAIGKAFARADLNDVHEILQDDGYNEDDMANAELSLQSWTGELSESFVVKRHADNAFKSKDFATAVECYSRFLDSGAAVAPTMLARRCFAYVVAGKLQEGLEDAKRAEDIAPGWPMGHYLQALVLHNLGREAESHEALKKGTMLEAERNSRARTV

SEQ ID NO: 73147 - protein, 209 aa, Setaria italica
  Transcript Sequence Number=SeqID_7173
  Gene Ontology: Mol. function=asparaginase activity
  Homolog annotation: Hit_ID=Q2PW34; Match level="QueryCoverage=91%, HitCoverage=56%, E-value=4e-79, Identity=76%"; Hit description=L -asparaginase 2
  Pfam annotation: Domain name=Asparaginase_2; Domain location=1-208; Score=26.8; E_value=2e-13; Accession=PF01112.10; Description =Asparaginase
SIMDGRGRRCGAVSGVSTVKNPVSLARRVMDKSPHSYLAFDGAEEFAREQGLETVDNSYFITEDNVGMLKLAKEAGTILFDYRIPLTGTDTCSLQAGADSNHNRNGMVMNGLPISIYAPETVGCAVVDSNGFCAAATSTGGLMNKMTGRIGDSPLIGSGTYACDACAVSCTGEGEAIIRSTLARDVAAVMEVTKGPRPTRQRKGTVTKL

SEQ ID NO: 73148 - protein, 337 aa, Setaria italica
  Transcript Sequence Number=SeqID_7174
  Gene Ontology: Mol. function=asparaginase activity
  Homolog annotation: Hit_ID=Q2PW34; Match level="QueryCoverage=100%, HitCoverage=100%, E-value=1e-146, Identity=76%"; Hit description=L -asparaginase 2
  Pfam annotation: Domain name=Asparaginase_2; Domain location=2-337; Score=381.9; E_value=1.1e-111; Accession=PF01112.10; Description =Asparaginase
MAPWAIAIHGGAGVDPNLPEHRQEEAKRVLARCLQAGVDLLRAGASALDVVEAVVRELETDPFFNSGRGSALTRRGTVEMEASIMDGRGRRCGAVSGVSTVKNPVSLARRVMDKSPHSYLAFDGAEEFAREQGLETVDNSYFITEDNVGMLKLAKEAGTILFRSTFDYRIPLTGTDTCSLQAGADSNHNRNGMVMNGLPISIYAPETVGCAVVDSNGFCAAATSTGGLMNKMTGRIGDSPLIGSGTYACDACAVSCTGEGEAIIRSTLARDVAAVMEYKGLPLQEAVDFCVKERLDEGFAGLIAVSKTGEVAYGFNCTGMFRGCATEDGFMEVGIWE

SEQ ID NO: 73149 - protein, 257 aa, Setaria italica
  Transcript Sequence Number=SeqID_7175
  Homolog annotation: Hit_ID=Q7XX33; Match level="QueryCoverage=100%, HitCoverage=28%, E-value=1e-137, Identity=89%"; Hit description =OSJNBa0060B20.9 protein
  Pfam annotation: Domain name=PPR; Domain location=23-57; Score=12.0; E_value=0.34; Accession=PF01535.12; Description=PPR repeat
  Pfam annotation: Domain name=PPR; Domain location=89-123; Score=7.0; E_value=1.3; Accession=PF01535.12; Description=PPR repeat
  Pfam module annotation: Pfam domain module=PPR::PPR; Domain location =23-57::89-123
MVDKGLDYFDSMRRDYGVVASAEHYACVIDLLARSGRLDKAWKTVQEMPMEPTAVIWVALLSACRVHSNVELAEYALNKLVDMKAENDGSYTLISNIYATARRWKDVARIRLLMKKSGIKKRPGCSWVQGKKGTASFFVGDRSHPLSPEIYALLERLINRIKAMGYVPETNFALHDVDDEEKNNLLTEHSEKLALAYGLLTTSPGCPIRITKNLRVCGDCHIAFTYISKIVDHEIIVRDSSRFHHFKKGSCSCGGYW

SEQ ID NO: 73150 - protein, 194 aa, Setaria italica
  Transcript Sequence Number=SeqID_7176
  Gene Ontology: Biological process=cell redox homeostasis
  Homolog annotation: Hit_ID=B6TC88; Match level="QueryCoverage=65%, HitCoverage=39%, E-value=9e-15, Identity=38%"; Hit description =Thioredoxin family protein
VGTRYLVLEDAEDGMNFSLGQFFDKITIKAEKKDDADEEDDTGNQGDKEIVWEDDNYIKPIRDVKTQDWDASVFTDFGPMVVLVHNRYKRPQENEMARAELTKAIELFWEHNLPSPRCVAVDACAEADLVDALKVSGFPEILFTNAGRIIHREKVVRSAEAWSRMMAFFYYKAARPPFLCEADGKGQEKVPLMS

SEQ ID NO: 73151 - protein, 199 aa, Setaria italica
  Transcript Sequence Number=SeqID_7177
  Gene Ontology: Mol. function=aspartate kinase activity; Cellular component=chloroplast; Biological process=amino acid biosynthetic process
  Homolog annotation: Hit_ID=B4FA80; Match level="QueryCoverage=98%, HitCoverage=35%, E-value=5e-97, Identity=86%"; Hit description =Aspartokinase
  Pfam annotation: Domain name=AA_kinase; Domain location=26-197; Score= -49.8; E_value=0.042; Accession=PF00696.20; Description=Amino acid kinase family
RAVGAAIVEKKDAQEGASSGGAEPELTVVMKFGGSSVASAERMREVADLILSFPEERPVIVLSAMGKTTNKLLMAGEKAVHCGATNVSELDELSFIKKLHLGTVDQLGLDSSIVCGLLDELEQLLKGISMMKELTLRTRDYLVSFGECMSTRIFAALLNKIGVKARQYDAFEIGFITTDDFTNADILEATYPAICLKRS

SEQ ID NO: 73152 - protein, 402 aa, Setaria italica
  Transcript Sequence Number=SeqID_7178
  Gene Ontology: Mol. function=binding
  Homolog annotation: Hit_ID=Q7XIC0; Match level="QueryCoverage=51%, HitCoverage=25%, E-value=1e-38, Identity=42%"; Hit description =Putative BLE2 protein
MFPGALQLTSRLRQHQRLLLWALLVALLLITGLQIHTSIENIYRDRHGTPHRAMRVYTVTWPLDRTDMLVDLLLWCLFQLVLVLAVLLLNLRPLSIANLTGSLCGRKLLSSAKLILALCLGGDMLFLHSPLQGLGISLIILVLSLGSLQTPVDSTLFGRWANIFLYICFLGELESTSSPCMMVVIIMLTVILVGNLQIPAAVARIVLSSLRLSDLVALNVYPQGKDSNRNLVPSIMVFYVLALCQGTLYLMACIVELFGFFPRRSLVRHSRFRGQWGARAVNVYYQCAYVTCMETGVLAAGRTMSLANFSIESLSSTSREMQLAGVSVLDALLQQRNFSEELLLRISSSSNVVRTLVGMLGWTAQQDRDIRLFAARVIAELAGSLRLASVPSMLKLVSVIIS

SEQ ID NO: 73153 - protein, 104 aa, Setaria italica
  misc_feature (77)..(77): Xaa can be any naturally occurring amino acid
  Transcript Sequence Number=SeqID_7179
LEGHFPVFDVRMRSCLFAPRMETTGADPIYIPAGGRLFALADGTFDRLDPLDPPPVQFYRPAYGEEARAWSWLELPXPPFERRHVAAYAVHPDGHTIFRQHHEG

SEQ ID NO: 73154 - protein, 77 aa, Setaria italica
  misc_feature (10)..(10): Xaa can be any naturally occurring amino acid
  Transcript Sequence Number=SeqID_7180
  Gene Ontology: Cellular component=exocyst; Biological process =exocytosis
  Homolog annotation: Hit_ID=B6SWM6; Match level="QueryCoverage=81%, HitCoverage=10%, E-value=7e-21, Identity=76%"; Hit description=Exo70 exocyst complex subunit family protein
RDAWAARRRXRLARHVASYAESCWGTAIALLETPVCGRGKPAKVLAEFDAAFTRARDSEACREVPDPALRAALRNAV

SEQ ID NO: 73155 - protein, 53 aa, Setaria italica
  Transcript Sequence Number=SeqID_7181
IFYLVKGQAISILQMQPLCKVRRTRGRNVGSANFNLIYCSCLNHSMQAKCILI

SEQ ID NO: 73156 - protein, 93 aa, Setaria italica
  Transcript Sequence Number=SeqID_7182
RTSSWYVYYLWLLGLVDSFQWDDLMSLACRSYFIYMYNAKKSHNIFRVWSYITKSRAYKLRNQIDFCDTPKFKTKLGSRFLFVYVFFSIHTLI

SEQ ID NO: 73157 - protein, 90 aa, Setaria italica
  misc_feature (77)..(77): Xaa can be any naturally occurring amino acid
  Transcript Sequence Number=SeqID_7183
  Gene Ontology: Mol. function=acyltransferase activity; Cellular component=integral to membrane; Biological process=metabolic process
  Homolog annotation: Hit_ID=B6TCX0; Match level="QueryCoverage=100%, HitCoverage=18%, E-value=5e-11, Identity=41%"; Hit description =Glycerol-3-phosphate acyltransferase 8
QLRSHAILHDGRLARRPTATNTLLTFLWMPLGFALALLRVRLHLLLPARAVSYAYKLVGVKLVVRGHPPPPPRKGRXGVLFVSNHRTALD

SEQ ID NO: 73158 - protein, 116 aa, Setaria italica
  Transcript Sequence Number=SeqID_7184
  Subcellular localization annotation: CTP_CleavageSite=25; ConfidenceScore=5.73e-01
NYSARTASSSFSSSSSRASSTDRRRSSSRSSSSLNEVFQALVKPQEPTPGTRLDASISVIAHRPSLRQEKEDHRSAATDGNSSPGLPATATQTDNPAGMPRSPTLSQKSRRTTKFR

SEQ ID NO: 73159 - protein, 57 aa, Setaria italica
  Transcript Sequence Number=SeqID_7185
CRERDLSYGWKWYRDNNLLPSHIQLSASPWISYLPWAMRCADELCDWWLSAVAHTLS

SEQ ID NO: 73160 - protein, 117 aa, Setaria italica
  Transcript Sequence Number=SeqID_7186
  Gene Ontology: Cellular component=vacuole
  Homolog annotation: Hit_ID=Q6K796; Match level="QueryCoverage=91%, HitCoverage=2%, E-value=2e-48, Identity=84%"; Hit description =Vacuolar protein sorting 13C protein-like
AGVALDKLRKSVELHRLAIYHDSDSNPWKLNKKWEDLNPTEWSEIFQDGIDDHSGNSIWAANRNYLVSPINGTLKYKRLGKNERGDPDTPVEKASLVLSDVSLTVTEAQYYDGIKLV

SEQ ID NO: 73161 - protein, 101 aa, Setaria italica
  Transcript Sequence Number=SeqID_7187
AAYKTKTKRDYCLSKILELNINSKFPFQILGHRICFLYQGPHSLASCVSLLSVANDQDVHVFSLVIRRTDEDIMILSCAKAECTSQNASPDEDNKISRKIY

SEQ ID NO: 73162 - protein, 189 aa, Setaria italica
  misc_feature (12)..(12): Xaa can be any naturally occurring amino acid
  Transcript Sequence Number=SeqID_7188
  Gene Ontology: Mol. function=binding; Cellular component=chloroplast
  Homolog annotation: Hit_ID=C3SA77; Match level="QueryCoverage=100%, HitCoverage=97%, E-value=4e-99, Identity=63%"; Hit description=PPR protein (Fragment)
  Pfam annotation: Domain name=PPR; Domain location=101-135; Score =34.8; E_value=3.5e-07; Accession=PF01535.12; Description=PPR repeat
  Pfam annotation: Domain name=PPR; Domain location=136-170; Score =35.4; E_value=2.3e-07; Accession=PF01535.12; Description=PPR repeat
  Pfam annotation: Domain name=PPR; Domain location=31-65; Score=42.3; E_value=1.9e-09; Accession=PF01535.12; Description=PPR repeat
  Pfam annotation: Domain name=PPR; Domain location=66-100; Score=28.7; E_value=2.4e-05; Accession=PF01535.12; Description=PPR repeat
  Pfam module annotation: Pfam domain module=PPR::PPR::PPR::PPR; Domain location=101-135::136-170::31-65::66-100
MINLLGEQERWXGVEVMLSEMKEQGLVPNIITYTTLVDVYGRSGRYKEAIDCIEAMKADGLKPSPTMYHALVNAYAQRGLADHALNVVKAMKADGLEVSILVLNSLINAFGEDRRVVEAFSVLQFMKENGLRPDVITYTTLMKALIRVEQFDKVPVIYEEMITSGCAPDRKARAMLRSALRYMKHMRVA

SEQ ID NO: 73163 - protein, 75 aa, Setaria italica
  Transcript Sequence Number=SeqID_7189
  Homolog annotation: Hit_ID=B4FHI4; Match level="QueryCoverage=100%, HitCoverage=26%, E-value=9e-15, Identity=60%"; Hit description =Protein binding protein
MFSLLVLRTAGILFPILVMVRAMAGFHRRRWLQESRETYRSSSESEEEDEEEEEDDAVTNSAAPNYSQPRLIPVY

SEQ ID NO: 73164 - protein, 96 aa, Setaria italica
  Transcript Sequence Number=SeqID_7190
AVVRRKNIALIVAAEAQREAAAAAYLVKGLGIFAEIRESSEVDPHAAITKFFQLHRLIVQQSAVWKAYSPEPGKESRPEKEKPLRKVSASQNKAAL

SEQ ID NO: 73165 - protein, 593 aa, Setaria italica
  misc_feature (15)..(15): Xaa can be any naturally occurring amino acid
  Transcript Sequence Number=SeqID_7191
  Pfam annotation: Domain name=DUF936; Domain location=4-592; Score =707.7; E_value=9.7e-210; Accession=PF06075.4; Description=Plant protein of unknown function (DUF936)
MASLTPGILLKVLKXINSDVKVCGEYRSILLQVISIVPAITGSELWPDHGFFIKVSDSSHSTYVSLSKEDNELILSNKLQLGQFIYVEKVQSSIPVPVLVGVRPVPGRNPCIGNPKDLMQMSTPSGVMEALDHQRKTSKSADLSESEKENLQRKVVIKEQKSVVASRYMLGVSSNNGKITNLNSSIDSDKSNGGSSVCESNQKSVAPKVRQEAKPKERPNNTSPSNAKLVSTKQEINKDAHKNSGTSPSSNGSAVVKKQMPKESKKESATERRSPPKLYRSSPTPVRTSPTNLSSPAKQNGNSGPVPSVSSVKRRVTEAISWDSLPTSLIKSGKAVVRRKNIALIVAAEAQREAAAAAYLVRPWLVLLHLALIVAAEAQREAAAAAYLVKGLGIFAEIRESSEVDPHAAITKFFQLHRLIVQQSAVWKAYSPEPGKESRPEKEKPLRKVSASQNKAALCNTTKNSEDARTSEKMEWAQDDGFKEICRSWVALKKESQSWFLSFLEDALESGFKFEDQTKNTRERLRGQSKGGDGRIAVRLSQLKETSNWLDQLQDEAVNPENGLVETIEQLKQKVYKCLLGTVETAASALEGR

SEQ ID NO: 73166 - protein, 47 aa, Setaria italica
  Transcript Sequence Number=SeqID_7192
ISCGAVTASGQQNQKGRQDYLSRGIQFKCTNNAKCFIRIGAFTNNAK

SEQ ID NO: 73167 - protein, 128 aa, Setaria italica
  Transcript Sequence Number=SeqID_7193
  Homolog annotation: Hit_ID=B6TE92; Match level="QueryCoverage=55%, HitCoverage=38%, E-value=1e-13, Identity=59%"; Hit description =Nucleolin
MEALLGSNNHVEAKAADFAQLLVAEVALEVQRSLVGLVAVMLSLHHKIFTSAEEKDLINRILGKSKTETAPENKDDGESDDDNEEEEGDDEDAENQEEDDGGEEGSDDDGNEEEEEEEEDPAANGEGG

SEQ ID NO: 73168 - protein, 31 aa, Setaria italica
  Transcript Sequence Number=SeqID_7194
DRRKPVISGEYTLVYEDEEGDRVLVGDVPWE

SEQ ID NO: 73169 - protein, 79 aa, Setaria italica
  Transcript Sequence Number=SeqID_7195
MATPRPRIRAVPFRPLLLLLLVPLIYSVSRLHPWAPEKGVCLPPPAAPKRPDRLVIGPAAGQGRPDRLQCQGLKALNNI

SEQ ID NO: 73170 - protein, 99 aa, Setaria italica
  Transcript Sequence Number=SeqID_7196
VGSTPRRVWARPAPAGGHTWWPKLQASAAGPLYIAPIYSNATCLKRMPQRNTRDRRRELSKFLVTCSFGFREKFWSKFKHLAVRPRQANCDMIKYSILM

SEQ ID NO: 73171 - protein, 113 aa, Setaria italica
  Transcript Sequence Number=SeqID_7197
  Gene Ontology: Mol. function=protein disulfide oxidoreductase activity; Biological process=cell redox homeostasis
  Homolog annotation: Hit_ID=Q1SN07; Match level="QueryCoverage=61%, HitCoverage=25%, E-value=5e-15, Identity=55%"; Hit description =Thioredoxin fold
  Pfam annotation: Domain name=Glutaredoxin; Domain location=53-113; Score=33.5; E_value=8.4e-07; Accession=PF00462.16; Description =Glutaredoxin
DPELLASIERELSEEGAHIKRMVGSEKPKHPKAAPPAIVADGKCPPGGADAVVLYTTTLRGIRRTFEECNAVRAAIEAHDVKVIERDVSMDSGYREELRLLLGGREVRVPAVF

SEQ ID NO: 73172 - protein, 176 aa, Setaria italica
  Transcript Sequence Number=SeqID_7198
  Gene Ontology: Mol. function=hydrolase activity; Cellular component =cytosol
  Homolog annotation: Hit_ID=Q9FIZ7; Match level="QueryCoverage=99%, HitCoverage=13%, E-value=4e-85, Identity=83%"; Hit description=5 -oxoprolinase
  Pfam annotation: Domain name=Hydantoinase_A; Domain location=1-159; Score=60.5; E_value=6.5e-15; Accession=PF01968.10; Description =Hydantoinaseoxoprolinase
SVGAHPGPVCYRKGGDLAITDANLILGTVIPEYFPSIFGPNEDMPLDYEATRKAFEDLAAEINSHRKSQDSSVKDMTVEEIALGFVNVANETMCRPIRQLTEMKGHDTKNHALACFGGAGPQHACAMARSLGMSEVLVHRYCGILSAYGMGLADVIEDLQEPYSAVYNADSAAEAS

SEQ ID NO: 73173 - protein, 112 aa, Setaria italica
  misc_feature (6)..(6): Xaa can be any naturally occurring amino acid
  Transcript Sequence Number=SeqID_7199
  Gene Ontology: Mol. function=binding
  Homolog annotation: Hit_ID=B9RNX0; Match level="QueryCoverage=92%, HitCoverage=19%, E-value=3e-13, Identity=48%"; Hit description =Ubiquitin-protein ligase, putative
  Pfam annotation: Domain name=Arm; Domain location=38-81; Score=17.1; E_value=0.072; Accession=PF00514.15; Description=Armadillobeta -catenin-like repeat
EALEEXKGVVAALQAGGGEPCMSRVEAAMAVRRKAKDEAAAREMLAMLGAIPPLVAMLDEGGDGGQEVTAAALYALLNLGIGNDTNKAAIVQAGAVHKMLRIAQGGASSALT

SEQ ID NO: 73174 - protein, 158 aa, Setaria italica
  misc_feature (28)..(28): Xaa can be any naturally occurring amino acid
  Transcript Sequence Number=SeqID_7200
  Gene Ontology: Mol. function=protein serine/threonine kinase activity; Cellular component=plasma membrane; Biological process =protein amino acid phosphorylation
  Homolog annotation: Hit_ID=B9SBN3; Match level="QueryCoverage=100%, HitCoverage=38%, E-value=2e-57, Identity=69%"; Hit description =Protein kinase APK1B, chloroplast, putative
DFKTSNILLDGGFNAKLSDFGLAKDGPXVGEQSHVSTRVMGTYGYAAPEYMMTGHLTASSDVYSYGVVLLELITGRRSLDRSRPPREQALTDWALPALPHKKRVMGIVDPRLMMGGGGEGDDGGAPPARAVQKAAMLAYHCLNRNPKARPLMRDVVAS

SEQ ID NO: 73175 - protein, 44 aa, Setaria italica
  Transcript Sequence Number=SeqID_7201
CEFVKQCSGTLVDQTVLHLQKSNVKTMCRASQNIYKTNIFSCIY

SEQ ID NO: 73176 - protein, 88 aa, Setaria italica
  Transcript Sequence Number=SeqID_7202
  Subcellular localization annotation: CTP_CleavageSite=48; ConfidenceScore=5.08e-01
QNGTLRPPLAGLPHRLHHWLHAKPFQRVTRKTAPPREPRNTRSLEQIGGAGAKKTGSPRLPHCLCVCYYQIAQRVSKNHTKIATASPP

SEQ ID NO: 73177 - protein, 232 aa, Setaria italica
  Transcript Sequence Number=SeqID_7203
MDCDWFCRDVLSQLATLKSVKTERNGFVHRQELERILQEKLRNQLQGSNWRAGASFQGSDVINLLLKLELCYEQDPGNPNTLLLVPAILEESKEGTQQWHLTIPECRYVGRRLKCKDTHMFLTSDFFPRLQVRLHNKIMCLGQQQGALYTLEKNLIYTVINGVHLRVELGKKDSSIDVLACSSKSVTDMVRIFHKLIIPTILNLSSSLMFEESIIRPDCVKYLIPHRFLQTQ

SEQ ID NO: 73178 - protein, 86 aa, Setaria italica
  Transcript Sequence Number=SeqID_7204
  Homolog annotation: Hit_ID=B6SPR5; Match level="QueryCoverage=67%, HitCoverage=67%, E-value=4e-28, Identity=98%"; Hit description=Fb14
MASGWGINGNKGRCYDFWLEFSECMSRCRQPSDCGLLREDYIECLHHSKEFQRRNRIYKEEQRQIRAAARKAKEEAEGAPAVAAHH

SEQ ID NO: 73179 - protein, 569 aa, Setaria italica
  Transcript Sequence Number=SeqID_7205
  Homolog annotation: Hit_ID=B9R7B1; Match level="QueryCoverage=88%, HitCoverage=78%, E-value=3e-73, Identity=37%"; Hit description=DNA binding protein, putative
  Pfam annotation: Domain name=Remorin_C; Domain location=450-562; Score=45.0; E_value=3e-10; Accession=PF03763.5; Description=Remorin, C-terminal region
GVEVDDGYSPSSTGGGGSSCCDSFGCDSPLAGFVRPDGDPDTDLETDGLATSSSSASAAFTERQDDEEVLCGVKEEEWAKVQESAKNLAGRATPECHNERYGTEAAVLLHGRKGSKQRPASLDLSSPGFHGATFSPSFVVGGVGLMKASHIRSDVFHSPGTPNYPRHRASVLGFQKGWCSERVPHPSKASRRYPGSSMAFPYSNGRTLPSKWEDAERWIFSPNSSDALIRSTVAHARRPKSKSGPLGPPGRLGGQYSSVSSVSLLDSGRAGPITSNSPFMAGVLMPEHVCGGKNANGMYLGRPAGDETAIGSSVRFCAPNGVSHAIRSSRVRRQLDAAVESSASLPSTQESIQGEQVEITEDSATTFASMISRKDAATQTSPELSRSSSPNTRPTFTRSLSTQQVKESESCFSDLEIRDVQMDDRVTLTRWSKKNVTRSSNKNSTNIIEWKEKTVESKSSSWGFAEAKCISRIEREDAKITAWENIQKAKAEAAIQKLVIKLEKKRSSSLDKILNTLKSAQRKAQVMRERDAATANQDEKGSRKAKKTAQLSKNGQISSLSGCFTCHAF

SEQ ID NO: 73180 - protein, 55 aa, Setaria italica
  Transcript Sequence Number=SeqID_7206
  Gene Ontology: Cellular component=cell wall
  Homolog annotation: Hit_ID=B6TFK6; Match level="QueryCoverage=100%, HitCoverage=31%, E-value=5e-23, Identity=92%"; Hit description =Disease resistance response protein 206
AIMGRNAVFNAVREMAVVGGTGVFRMARGYAQARTHTFDLKTGDATVEYNIYIKH

SEQ ID NO: 73181 - protein, 190 aa, Setaria italica
  Transcript Sequence Number=SeqID_7207
  Gene Ontology: Cellular component=cell wall
  Homolog annotation: Hit_ID=B6TFK6; Match level="QueryCoverage=80%, HitCoverage=87%, E-value=2e-77, Identity=90%"; Hit description =Disease resistance response protein 206
  Pfam annotation: Domain name=Dirigent; Domain location=8-176; Score =243.3; E_value=5.8e-70; Accession=PF03018.6; Description=Dirigent -like protein
MAAAVPLLLLPLLLATTAASAASSGGGEKQTHIKLYWHDVVSGPSPTAVQVAHAAVTNTSKTGFGAVVVIDDPLTEGPDLKSSKPLGRAQGTYIAAGKDEVSLMMNMNFVFQAGKYNGSTVAIMGRNAVFNAVREMAVVGGTGVFRMARGYAQARTHTFDLKTGDATVEYNIYIKHSMIRADDVTWRLHH

SEQ ID NO: 73182 - protein, 70 aa, Setaria italica
  Transcript Sequence Number=SeqID_7208
  Subcellular localization annotation: CTP_CleavageSite=24; ConfidenceScore=5.49e-01
SMSLITALQVSNTSSKTVCVLSLSQSSYRAPCWSRMLSMLAYILPCFVFPIQICFCYYRLMRPPPSCLAL

SEQ ID NO: 73183 - protein, 82 aa, Setaria italica
  Transcript Sequence Number=SeqID_7209
KFHIACLPSCIYFTLFRLNLALHVSHEQNYYTRIELRTTFHLPSLSNTLYLHVYYSLDHCIKDDNIFSPPITPTRATWNIAI

SEQ ID NO: 73184 - protein, 87 aa, Setaria italica
  Transcript Sequence Number=SeqID_7210
TIPRDQITTIRLWGARFRQREGKGMECGLTKTGCGRSPSYRCQERKEERGRCVAVHGLRRRRERAAPGAASPGEGATESRGRSICSG

SEQ ID NO: 73185 - protein, 76 aa, Setaria italica
  Transcript Sequence Number=SeqID_7211
  Gene Ontology: Mol. function=nucleoside-triphosphatase activity; Cellular component=signal recognition particle; Biological process =SRP-dependent cotranslational protein targeting to membrane
  Homolog annotation: Hit_ID=B6TZA9; Match level="QueryCoverage=100%, HitCoverage=21%, E-value=8e-25, Identity=78%"; Hit description=Cell division protein ftsY
  Subcellular localization annotation: CTP_CleavageSite=32; ConfidenceScore=5.60e-01
MAAPSHVLPFLSPASTASSVRVSPGRRSGLLRCAAAAGQAGFFTRLGRLIKEKAKSDVEKLFSGFSKTRENLSVVD

SEQ ID NO: 73186 - protein, 168 aa, Setaria italica
  misc_feature (73)..(73): Xaa can be any naturally occurring amino acid
  misc_feature (143)..(143): Xaa can be any naturally occurring amino acid
  misc_feature (157)..(157): Xaa can be any naturally occurring amino acid
  Transcript Sequence Number=SeqID_7212
  Gene Ontology: Mol. function=pyridoxal phosphate binding; Cellular component=chloroplast; Biological process=amino acid metabolic process
  Homolog annotation: Hit_ID=O04981; Match level="QueryCoverage=93%, HitCoverage=34%, E-value=1e-75, Identity=78%"; Hit description =Cystathionine gamma-synthase
  Pfam annotation: Domain name=Cys_Met_Meta_PP; Domain location=2-168; Score=-100.4; E_value=1.4e-12; Accession=PF01053.12; Description =CysMet metabolism PLP-dependent enzyme
MFCLLCDTVCAQMTVIRPADMDALQNALDNNNVSLFFTETPTNPFLRCIDVELVANMCHSKGALLCIDSTFAXPINQKALTVVGGCVSGRDELVSKVRIYHHVVGGVLNPNAAYLILRGMKTLHLRVQCQNTLLCGWPNFLEXHPKIARVYYPGLPXSPEHHIAKTQM

SEQ ID NO: 73187 - protein, 41 aa, Setaria italica
  Transcript Sequence Number=SeqID_7213
IASHVFPCEYDWSLLREHMTCNAFDFIQLFYLSIHITNKRY

SEQ ID NO: 73188 - protein, 69 aa, Setaria italica
  Transcript Sequence Number=SeqID_7214
  Gene Ontology: Mol. function=pyridoxal phosphate binding; Cellular component=chloroplast; Biological process=amino acid metabolic process
  Homolog annotation: Hit_ID=O04981; Match level="QueryCoverage=65%, HitCoverage=8%, E-value=1e-19, Identity=97%"; Hit description =Cystathionine gamma-synthase
LEKVILQILEILHSNAEPDQVVLDAIMSYWDSKEQRDIYGIKDNLIRFSIGVEDFEDLKNDLVQALEKV

SEQ ID NO: 73189 - protein, 118 aa, Setaria italica
  Transcript Sequence Number=SeqID_7215
  Gene Ontology: Mol. function=pyridoxal phosphate binding; Cellular component=chloroplast; Biological process=amino acid metabolic process
  Homolog annotation: Hit_ID=O04981; Match level="QueryCoverage=92%, HitCoverage=21%, E-value=4e-52, Identity=88%"; Hit description =Cystathionine gamma-synthase
  Pfam annotation: Domain name=Cys_Met_Meta_PP; Domain location=2-117; Score=-180.3; E_value=4.2e-08; Accession=PF01053.12; Description =CysMet metabolism PLP-dependent enzyme
IQCILESIHVSRPNNNVSLFFTETPTNPFLRCIDVELVANMCHSKGALLCIDSTFASPINQKALTLGADLVIHSATKYIAGHNDVVGGCVSGRDELVSKVRIYHHVVGGVLNPVSLDL

SEQ ID NO: 73190 - protein, 42 aa, Setaria italica
  Transcript Sequence Number=SeqID_7216
WTRSFFRSLRRSKHLIVHINKIYQSSAQIFSLISMKYRATMN

SEQ ID NO: 73191 - protein, 150 aa, Setaria italica
  misc_feature (73)..(73): Xaa can be any naturally occurring amino acid
  Transcript Sequence Number=SeqID_7217
  Gene Ontology: Mol. function=pyridoxal phosphate binding; Cellular component=chloroplast; Biological process=amino acid metabolic process
  Homolog annotation: Hit_ID=O04981; Match level="QueryCoverage=90%, HitCoverage=26%, E-value=3e-73, Identity=96%"; Hit description =Cystathionine gamma-synthase
  Pfam annotation: Domain name=Cys_Met_Meta_PP; Domain location=2-150; Score=-86.2; E_value=2.2e-13; Accession=PF01053.12; Description =CysMet metabolism PLP-dependent enzyme
MFCLLCDTVCAQMTVIRPADMDALQNALDNNNVSLFFTETPTNPFLRCIDVELVANMCHSKGALLCIDSTFAXPINQKALTLGADLVIHSATKYIAGHNDVVGGCVSGRDELVSKVRIYHHVVGGVLNPNAAYLILRGMKTLHLRVQIST

SEQ ID NO: 73192 - protein, 106 aa, Setaria italica
  misc_feature (67)..(67): Xaa can be any naturally occurring amino acid
  Transcript Sequence Number=SeqID_7218
  Gene Ontology: Mol. function=cystathionine gamma-synthase activity; Cellular component=chloroplast; Biological process=amino acid metabolic process
  Homolog annotation: Hit_ID=O04981; Match level="QueryCoverage=96%, HitCoverage=24%, E-value=2e-34, Identity=67%"; Hit description =Cystathionine gamma-synthase
  Subcellular localization annotation: CTP_CleavageSite=68; ConfidenceScore=5.61e-01
MATVSLTPQVVFSTESGGALSSATILRFPPNFVRQLSTKARRNCSNIGVAQIVAAAWSDRPAARPNXAAAEVSAIPNAKVAQPSAVVQAERKLLGSDASLAVPTTG

SEQ ID NO: 73193 - protein, 107 aa, Setaria italica
  Transcript Sequence Number=SeqID_7219
  Gene Ontology: Cellular component=membrane
  Homolog annotation: Hit_ID=B9SAE9; Match level="QueryCoverage=51%, HitCoverage=44%, E-value=8e-10, Identity=60%"; Hit description =Transmembrane protein 14, putative
  Pfam annotation: Domain name=Tmemb_14; Domain location=18-93; Score =8.8; E_value=0.00017; Accession=PF03647.5; Description=Transmembrane proteins 14C
ALEYWHRRLPRSDKGKAPWCSRWSNRGEIRWLQSLKRTSADGYPEQGRNGFAVCAVVLTVVMGIRYFKTRKIMPAGIIAAISAIVLIFYVYKISTGGNKDYIPVSAE

SEQ ID NO: 73194 - protein, 144 aa, Setaria italica
  misc_feature (98)..(98): Xaa can be any naturally occurring amino acid
  Transcript Sequence Number=SeqID_7220
  Gene Ontology: Mol. function=acylphosphatase activity
  Homolog annotation: Hit_ID=B6SJD3; Match level="QueryCoverage=65%, HitCoverage=59%, E-value=1e-25, Identity=69%"; Hit description =Acylphosphatase
  Pfam annotation: Domain name=Acylphosphatase; Domain location=1-107; Score=69.2; E_value=1.5e-17; Accession=PF00708.10; Description =Acylphosphatase
  Subcellular localization annotation: CTP_CleavageSite=27; ConfidenceScore=5.28e-01
MATSAPADAPSPPAPQPQPESARKAVRVVVKGHVTGVGFRDWTASTAESLGLAGWVRNRRDGSVEALLSGDPAKIEDMITRRFPVGPPASTVTAVVPXPGRARRSVRRVRDQVHRVIHPSRGRFASRRAFLDRYVLLVKIRRFT

SEQ ID NO: 73195 - protein, 884 aa, Setaria italica
  Transcript Sequence Number=SeqID_7221
  Gene Ontology: Mol. function=protein serine/threonine kinase activity; Cellular component=plasma membrane; Biological process =protein amino acid phosphorylation
  Homolog annotation: Hit_ID=B9SRU2; Match level="QueryCoverage=96%, HitCoverage=97%, E-value=0.0, Identity=63%"; Hit description=Kinase, putative
  Pfam annotation: Domain name=Adeno_E3_CR2; Domain location=439-476; Score=11.4; E_value=0.036; Accession=PF02439.7; Description =Adenovirus E3 region protein CR2
  Pfam annotation: Domain name=Pkinase; Domain location=531-802; Score =117.0; E_value=6.3e-32; Accession=PF00069.17; Description=Protein kinase domain
  Pfam annotation: Domain name=Pkinase_Tyr; Domain location=531-802; Score=116.4; E_value=9.3e-32; Accession=PF07714.9; Description =Protein tyrosine kinase
  Pfam module annotation: Pfam domain module=Adeno_E3_CR2::Pkinase::Pkin ase_Tyr; Domain location=439-476::531-802::531-802
MRALLLLALLLAACAAAAAQAAGGRNSTAFVPRDDILLDCGAKGQGNDTDGRMWGGDEGSKYAPPSNLAAAAPASGQDPSVPQVPYLTARVSASPFTYSFPLGPGRKFLRLHFYPANYSNRDAADGVFSVSVGKLTLLSNFSAYQTAAAITFSYLVREFSVNVSSTLDLTFTPEKSHPNAYAFVNGIEVVSSPDLFGLTPPNMVTGDGNNQPFSIDASVAMQTMYRLNVGGQAISPSKDTGGYRSWDDDSPYIFGASFGVSYPSDPNVTITYPSNVPEYVAPMDVYSTARSMGPDKNVNLNYNLTWMLQVDAGFNYLVRMHFCEIQYPITKINQRVFDIYINNQTAMNGADVIAWASVSGATTGIGTPVYQDYVVSTYGLGPMDLWVALHPDVDSKPERYDAILNGLEVFKLQLSNGSLAGLNPIPSVEPTDDGETKKKSAVGPIVGGVVGGLVLLALGYCLFVFCRRRSAGKDAGMSDGHSGWLPLSLYGNSHTSSSAKSHTTGSYASSLPSNLCRHFSFAEIKAATNNFDESLILGVGGFGKVYRGEVDGGTTKVAIKRGNPLSEQGIHEFQTEIEMLSKLRHRHLVSLIGYCEEKNEMILVYDYMAHGTLREHLYKTQKPPLTWRQRLDICIGAARGLHYLHTGAKHTIIHRDVKTTNILLDEKWVAKVSDFGLSKTGPSMDHTHVSTVVKGSFGYLDPEYFRRQQLTEKSDVYSFGVVLFEVLCARPALNPTLAKEEVSLAEWALHCQKKGILDQIVDPYLKGKIAPQCFKKFAETAEKCVSDQGIDRPSMGDVLWNLEFALQMQESAEESGSLGCGMSDEGTPLVMVGKKDPNDPSIESSTTTTTTTSISMGDQSVASMDSDGLTPSAVFSQIMNPKGR

SEQ ID NO: 73196 - protein, 308 aa, Setaria italica
  misc_feature (276)..(276): Xaa can be any naturally occurring amino acid
  Transcript Sequence Number=SeqID_7222
  Gene Ontology: Mol. function=ATP-dependent helicase activity; Cellular component=chloroplast
  Homolog annotation: Hit_ID=Q6H601; Match level="QueryCoverage=100%, HitCoverage=54%, E-value=1e-142, Identity=78%"; Hit description=DEAD- box ATP-dependent RNA helicase 22
  Pfam annotation: Domain name=DEAD; Domain location=13-223; Score= -6.4; E_value=0.00012; Accession=PF00270.21; Description=DEADDEAH box helicase
IEKLCSKSSTAEDDNSQNAAPGAHDIVLVLCPNVMLCEQVVRMANSLLDESGEPLKSAAAVCGPKGWPAVHPDILVATPAALLNYLFDYDPEKRRRERFMRNVKFIVFDEADMLLCGSFENQVIRLIHMLRFDEKQLSRAQDSGKEVLPGSDDEYHEDSDSEGAEFSGFDEENEGDLVRNKPVKAENSPVGARRDWRRVRKTYKRSKQYIFVAATLPQSGKKTAGGVLKRMFPDAVWVSGTYLHRHNPRLERRWMEVTADTQVDALLDAVKYGLKXDHDAPKRTMVFTNTVDAANSVSDILQRVGIPC

SEQ ID NO: 73197 - protein, 242 aa, Setaria italica
  Transcript Sequence Number=SeqID_7223
  Gene Ontology: Mol. function=ATP-dependent helicase activity; Cellular component=chloroplast; Biological process=translation
  Homolog annotation: Hit_ID=Q6H601; Match level="QueryCoverage=99%, HitCoverage=42%, E-value=1e-123, Identity=87%"; Hit description=DEAD- box ATP-dependent RNA helicase 22
  Pfam annotation: Domain name=Helicase_C; Domain location=126-201; Score=83.5; E_value=7.6e-22; Accession=PF00271.23; Description =Helicase conserved C-terminal domain
DLVRNKPVKAENSPVGARRDWRRVRKTYKRSKQYIFVAATLPQSGKKTAGGVLKRMFPDAVWVSGTYLHRHNPRLERRWMEVTADTQVDALLDAVKYGLKNKDHDAPKRTMVFTNTVDAANSVSDILQRVGIPCILYHRESSLEERANNLQSFRDNGGVLVCTDAAARGLDVPNVCHVIQAEFAACAVDFLHRVGRTARAGQSGIVTSLYTEANRDLVRAVRQAEELAQPVERAFSRKRSFR

SEQ ID NO: 73198 - protein, 95 aa, Setaria italica
  Transcript Sequence Number=SeqID_7224
  Gene Ontology: Mol. function=protein serine/threonine kinase activity; Biological process=protein amino acid phosphorylation
  Homolog annotation: Hit_ID=Q10P10; Match level="QueryCoverage=95%, HitCoverage=12%, E-value=7e-10, Identity=45%"; Hit description =Protein kinase domain containing protein, expressed
MTNGHPDGGCDDDVSVVAESTVTTIVNWEGNVAPKSLEDDEGFTSASPAEAASTSGFDKTSVDSGMNSRSCNGGSCTGGATTSGTGNDWWWRQDN

SEQ ID NO: 73199 - protein, 82 aa, Setaria italica
  Transcript Sequence Number=SeqID_7225
  Gene Ontology: Mol. function=nucleotide binding; Cellular component =nucleus; Biological process=DNA replication initiation
  Homolog annotation: Hit_ID=O80786; Match level="QueryCoverage=100%, HitCoverage=11%, E-value=1e-22, Identity=60%"; Hit description =Putative DNA replication licensing factor, mcm5
LVQTIVPGTRLTVVGIYSVYQASANQKSAVGVKQPYIRVVGLEQSRDNNSNGPSNFTLDEEMEFKEFAQRPDAYAKLCSMIG

SEQ ID NO: 73200 - protein, 84 aa, Setaria italica
  Transcript Sequence Number=SeqID_7226
  Gene Ontology: Cellular component=integral to membrane; Biological process=electron transport chain
  Homolog annotation: Hit_ID=Q8H112; Match level="QueryCoverage=92%, HitCoverage=24%, E-value=4e-18, Identity=57%"; Hit description=PGR5 -like protein 1A, chloroplastic
SSGRYAYAKIVQTYTASFSLYTLCTTARIAIVKDFLILKGPCPNCGNENLSFFGTILSVPSGGAKNNVKCANCGTELEYDSASR

SEQ ID NO: 73201 - protein, 92 aa, Setaria italica
  Transcript Sequence Number=SeqID_7227
  Gene Ontology: Cellular component=integral to membrane; Biological process=electron transport chain
  Homolog annotation: Hit_ID=Q8H112; Match level="QueryCoverage=100%, HitCoverage=28%, E-value=3e-34, Identity=71%"; Hit description=PGR5 -like protein 1A, chloroplastic
LPEPFSFIFTWFAALPLIFWIAQAITNAIVKDFLILKGPCPNCGNENLSFFGTILSVPSGGAKNNVKCANCGTELEYDSASRLITLPELAEA

SEQ ID NO: 73202 - protein, 51 aa, Setaria italica
  misc_feature (21)..(21): Xaa can be any naturally occurring amino acid
  Transcript Sequence Number=SeqID_7228
  Gene Ontology: Cellular component=integral to membrane; Biological process=electron transport chain
  Homolog annotation: Hit_ID=Q8H112; Match level="QueryCoverage=100%, HitCoverage=15%, E-value=2e-13, Identity=70%"; Hit description=PGR5 -like protein 1A, chloroplastic
NCGNENLSFFGTILSVPSGGXKNNVKCANCGTELEYDSASRLITLPELAEA

SEQ ID NO: 73203 - protein, 98 aa, Setaria italica
  misc_feature (24)..(24): Xaa can be any naturally occurring amino acid
  Transcript Sequence Number=SeqID_7229
  Gene Ontology: Cellular component=integral to membrane; Biological process=electron transport chain
  Homolog annotation: Hit_ID=Q8H112; Match level="QueryCoverage=100%, HitCoverage=30%, E-value=2e-36, Identity=70%"; Hit description=PGR5 -like protein 1A, chloroplastic
ITYLLELPEPFSFIFTWFAALPLXFWIAQAITNAIVKDFLILKGPCPNCGNENLSFFGTILSVPSGGAKNNVKCANCGTELEYDSASRLITLPELAEA

SEQ ID NO: 73204 - protein, 43 aa, Setaria italica
  misc_feature (12)..(12): Xaa can be any naturally occurring amino acid
  Transcript Sequence Number=SeqID_7230
FGTILSVPSGGXAKNNVKCANCGTELEYDSASRLITLPELAEA

SEQ ID NO: 73205 - protein, 112 aa, Setaria italica
  Transcript Sequence Number=SeqID_7231
  Subcellular localization annotation: CTP_CleavageSite=63; ConfidenceScore=5.11e-01
LTIWNGGSTMLLTSQLYGYSFKNQTYSGKQLKCLGKFVRSSRTYIATSVYKIILTTWIFLDFTSRMEGPWCLIYIYSTIVQSKTDFESGDNCVVMFVHSMHDRTYRHCVNSV

SEQ ID NO: 73206 - protein, 66 aa, Setaria italica
  Transcript Sequence Number=SeqID_7232
  Subcellular localization annotation: CTP_CleavageSite=12; ConfidenceScore=5.52e-01
GRCASCGRCCCSASTAVSSSSPAGTPVRGLRHVLTRADAWASYVRRAASVPNATPCVCSAPSGFRS

SEQ ID NO: 73207 - protein, 199 aa, Setaria italica
  Transcript Sequence Number=SeqID_7233
  Gene Ontology: Mol. function=receptor activity
  Homolog annotation: Hit_ID=Q75IZ0; Match level="QueryCoverage=90%, HitCoverage=66%, E-value=1e-39, Identity=55%"; Hit description =Protein kinase family protein, putative
  Subcellular localization annotation: CTP_CleavageSite=39; ConfidenceScore=5.20e-01
EANASAAVRCWGPRGSAVQADFANATSVRYLAAGGTRACAVLASGAALCSGSDSTSGSANASAVLPRDLSPYGLAVGDSHACALRRTNHTAVCWSLGGPTTTVYYPAVGTAFQFLVADGNITCGVASIDFSVMCWSLGSDATTVSLPRILPGVCVRDESSCGGCGYLWQSQQFCGGSGGICRLCDGSSAPPPRGPVSPP

SEQ ID NO: 73208 - protein, 112 aa, Setaria italica
  misc_feature (96)..(96): Xaa can be any naturally occurring amino acid
  Transcript Sequence Number=SeqID_7234
  Subcellular localization annotation: CTP_CleavageSite=41; ConfidenceScore=5.13e-01
MDAGSHIPPRMSRSNRKSSRGLDLKLNLSLPATGDSSRRLMADEESSPSSCLSSENEHGLQWSNSPEATSMVLAACPRCFIYVMLPQDDPRCPQCXKTPVLLDFLQDNNNKL

SEQ ID NO: 73209 - protein, 440 aa, Setaria italica
  Transcript Sequence Number=SeqID_7235
  Gene Ontology: Mol. function=binding; Cellular component =intracellular; Biological process=mRNA processing
  Homolog annotation: Hit_ID=B9S078; Match level="QueryCoverage=91%, HitCoverage=55%, E-value=1e-139, Identity=58%"; Hit description =Plant RNA cleavage stimulation factor, putative
  Pfam annotation: Domain name=Suf; Domain location=38-330; Score =367.9; E_value=1.8e-107; Accession=PF05843.6; Description=Suppressor of forked protein (Suf)
DSELLKYAFAEMEESRGAIQTAKTIYESLLGENASVTSLAHIQFIRFLRRTEGIEAARKYFLDARKSPSCTYHVYVAYATMAFCIDKDAKVAQSVFEAGLKRFMHEPGYILEYADFLCRLNDDRNVRALFERALSLLPPEKSTEVWKRFVQFEQTYGDLSSMLKVEQRRKEALSRTSEDVLSASENTLHDVVSRYSYMDLWPCSSKELDYLVRQEWLAKNIVKKVDRSTLLNSSNMLDKGTLGISANTRLLPQSAKVVRPETSQMVIYDPRQMKGPEFSAATSGYTKEVEDMLKTLSPATASFIKNLPAIEGPSPDIDVVLSVLLQSTLPVTQNAGKASGASELSGVGKSGLNQNGSVHRPPRERRKDAGRHGVQEEEDAATVQSQAAVPRDIFRLRQIQRSRGLGVGGAAAASQQSGSSAFSFSGGGSAFSGDHSASTD

SEQ ID NO: 73210 - protein, 167 aa, Setaria italica
  Transcript Sequence Number=SeqID_7236
  Gene Ontology: Mol. function=transporter activity; Cellular component= membrane; Biological process=oligopeptide transport
  Homolog annotation: Hit_ID=Q9LYR6; Match level="QueryCoverage=100%, HitCoverage=26%, E-value=5e-72, Identity=77%"; Hit description =Peptide transporter-like protein
AFFIFGNEMAERMAYFGLSVNMVIFMFKVMHRPFTKSANAVNNFLGISQASSVLGGFLADAYLGRYWTIAIFTTMYLLGLIALTVSASVPALVPSQEGCDTLAMLLGACAPAKSWQMAYLQTALYVTALGAAGIRPCVSSFGADQFDERSPGYKRRLDRFFNLFYLA

SEQ ID NO: 73211 - protein, 289 aa, Setaria italica
  misc_feature (11)..(11): Xaa can be any naturally occurring amino acid
  Transcript Sequence Number=SeqID_7237
  Gene Ontology: Mol. function=transporter activity; Cellular component= membrane; Biological process=oligopeptide transport
  Homolog annotation: Hit_ID=Q9LYR6; Match level="QueryCoverage=100%, HitCoverage=46%, E-value=1e-110, Identity=68%"; Hit description =Peptide transporter-like protein
  Pfam annotation: Domain name=PTR2; Domain location=1-272; Score= -10.6; E_value=3.8e-06; Accession=PF00854.13; Description=POT family
FVGTPLYRLLXGADQLTRVAQVLVAAFRKRNAAFDSGGFVGLYEVAGAKSAVRGSAKIEHTDDFRWLDKAALQLEGDLAGGGEDPWRLCTVTQVEEVKILLRLLPVPACTVMLSVVLTEFLTLSVQQAYTLNTRVAALHLPVACMPVFPCLAIFLILALYYQTFAPLARRLTGHPHGASQLQRVGLGLFFSILSVAWAGLFERYRRGYAIRHGYLALFLTPMPDLSAYWLLIQYCLIGVAEVFCLVALLEFLYQEAPDAMRSVGSAYAAVAGGLGCFLASALNTAVDAA

SEQ ID NO: 73212 - protein, 180 aa, Setaria italica
  Transcript Sequence Number=SeqID_7238
  Gene Ontology: Mol. function=disulfide oxidoreductase activity; Cellular component=cytoplasm; Biological process=cell redox homeostasis
  Homolog annotation: Hit_ID=B6SHZ5; Match level="QueryCoverage=95%, HitCoverage=88%, E-value=1e-87, Identity=90%"; Hit description =Thioredoxin-like protein 1
  Pfam annotation: Domain name=DUF1000; Domain location=53-165; Score =162.1; E_value=1.6e-45; Accession=PF06201.5; Description=Domain of Unknown Function (DUF1000)
PAPAAPAAPVQVPRGQVDLADFIDWTGVECLNQDSSHSITNALKQGYRDDEGLYLASDSDEQLLIYIPFMQVVKLHSALFKGPEEEGPKTVKLFSNKEHMGFSNVNDYPPSDTLDLSADHLAENKPATLKYVKFQNVRSLTIFIEDNQSGSDVTKIHKIALYGTTVDTTNMKDLKKIEEH

SEQ ID NO: 73213 - protein, 64 aa, Setaria italica
  Transcript Sequence Number=SeqID_7239
LRGRRRRRLRPALETRKTSTLSISYFSPLSDGCCYNPPRRRRLRRCHGPPAAASFEAATRGKEE

SEQ ID NO: 73214 - protein, 151 aa, Setaria italica
  Transcript Sequence Number=SeqID_7240
  Gene Ontology: Mol. function=phospholipase C activity; Biological process=intracellular signaling cascade
  Homolog annotation: Hit_ID=B6SZ51; Match level="QueryCoverage=94%, HitCoverage=86%, E-value=2e-33, Identity=54%"; Hit description=Metal ion binding protein
  Pfam annotation: Domain name=HMA; Domain location=89-149; Score=53.2; E_value=9.9e-13; Accession=PF00403.18; Description=Heavy-metal -associated domain
EVKGTASAMRRRLRLGRVLDCFSLSLQCAGTCACIRAPGDEDEEAVAVEREALVASDRRQQLQDQVLRLRDLVDGSRTLGFHLQPKTVELRVSMHCNGCARKVQKHISKMEGVTWFEVDLESKKVVVKGDVTPFEVLQSVSKVKFAQLWIA

SEQ ID NO: 73215 - protein, 357 aa, Setaria italica
  Transcript Sequence Number=SeqID_7241
  Gene Ontology: Mol. function=transferase activity
  Homolog annotation: Hit_ID=B9RAT8; Match level="QueryCoverage=100%, HitCoverage=56%, E-value=1e-116, Identity=54%"; Hit description =Pentatricopeptide repeat-containing protein, putative
  Pfam annotation: Domain name=PPR; Domain location=101-135; Score =15.2; E_value=0.14; Accession=PF01535.12; Description=PPR repeat
  Pfam annotation: Domain name=PPR; Domain location=136-170; Score =50.1; E_value=8.7e-12; Accession=PF01535.12; Description=PPR repeat
  Pfam annotation: Domain name=PPR; Domain location=171-205; Score =31.1; E_value=4.5e-06; Accession=PF01535.12; Description=PPR repeat
  Pfam annotation: Domain name=PPR; Domain location=206-240; Score =10.5; E_value=0.51; Accession=PF01535.12; Description=PPR repeat
  Pfam annotation: Domain name=PPR; Domain location=242-276; Score =17.4; E_value=0.058; Accession=PF01535.12; Description=PPR repeat
  Pfam annotation: Domain name=PPR; Domain location=29-63; Score=2.7; E_ value=4.3; Accession=PF01535.12; Description=PPR repeat
  Pfam module annotation: Pfam domain module=PPR::PPR::PPR::PPR::PPR::PP R; Domain location=101-135::136-170::171-205::206-240::242-276::29-63
RALGREESVPEFWDLIQEMKAAGVHVDIDTYVKLSRNFQKRHMIREAVELYEHMMDGPFKPAQKDAPLIIRRISLSPSPDLDLAIRVVSKYESVWDKKTKELFDAIHRVLTSNGSFDEAAEVVQRMRAEGHQPDNVTYSQLVYGLCKAGKLDDARKVFDEMEAEGCIPDLKTWTMLVQGHCAAGDVDRALQCLTEMIDKNLDADADLLDVMVKGLCSHEKVDAAYTLFVQMVDKAHLRPWQGTYKHVIDELLRLKKLGEALALLRSMKARSFPPFTEPFPPYIAKHGMVEDARDFLKALTVNTKCPTPATYLHVLKSFFAEGRYSEAQDLLYKCPIHIRKHPHVTKLFESVKVESAS

SEQ ID NO: 73216 - protein, 100 aa, Setaria italica
  Transcript Sequence Number=SeqID_7242
  Gene Ontology: Mol. function=DNA photolyase activity; Biological process=DNA repair
  Homolog annotation: Hit_ID=Q2I7K1; Match level="QueryCoverage=72%, HitCoverage=25%, E-value=2e-29, Identity=84%"; Hit description =Cryptochrome 1b (Fragment)
NLLLQDKPTRQYVRREAVAPSVSEASSSWTGREGAVVPVWSPPAASGHSETFAADEADVSSRSYLDRHPQSHRLMNWSQLPQSLTTGWELENSVQPNLIG

SEQ ID NO: 73217 - protein, 550 aa, Setaria italica
  Transcript Sequence Number=SeqID_7243
  Gene Ontology: Mol. function=DNA photolyase activity; Cellular component=cytoplasm; Biological process=DNA repair
  Homolog annotation: Hit_ID=Q8H6B3; Match level="QueryCoverage=100%, HitCoverage=78%, E-value=0.0, Identity=88%"; Hit description =Cryptochrome 2 apoprotein
  Pfam annotation: Domain name=FAD_binding_7; Domain location=71-348; Score=380.9; E_value=2.3e-111; Accession=PF03441.6; Description=FAD binding domain of DNA photolyase
WEVVDDEGQPFTMFAPFWNRCLSMPYDPPAPLLPPKKINSGDLTMCPSDDLIFEDESERGSNALLARAWTPGWQNADKALTAFLNGPLADYSVNRKKADSASTSLLSPHLHFGELSVRKVFHLVRMKQLVWSNDGNHAAEESCTLFLGSIGLREYSRYLSFNHPSSHERPLLAHLRFFPWVVNECYFKIWRQGRTGYPLVDAGMRELWATGWLHDRIRVVVSSFFVKVLQLPWRWGMKYFWDTLLDADLESDALGWQYITGSLPDGRELDRIDNPQFEGYKFDPHGEYVRRWIPELARLPTEWIHHPWDAPVSVLQAAGIELGSNYPLPIIELDAAKARLQEALSEMWQLEAASRATMNNGMEEGLGDSSEVPPIEFPRELHMEIDRQPAQATANVPTTARRRQDQMVPTMTSSLNRAETAVSADLGNSEDTRAQVPFHAHIEPRVQREDANAIQNAEGPALRIHGVHQPNFFQQPQHRRREAVAPSVSEASSSWTGREGAVVPVWSPPAASGHSETFAADEADVSSRSYLDRHPQSHRLMNWSQLPQSL

SEQ ID NO: 73218 - protein, 77 aa, Setaria italica
  Transcript Sequence Number=SeqID_7244
  Gene Ontology: Mol. function=protein serine/threonine kinase activity; Biological process=protein amino acid phosphorylation
SIRYDGYSDEIEVVFRLGVLCTADMPSSRPTMNDVLQILVKCSEQTYHKGKTERGPEYEAALLPKRGSRRKQLSNDS

SEQ ID NO: 73219 - protein, 94 aa, Setaria italica
  Transcript Sequence Number=SeqID_7245
QILRKRKSGSLEDYVRELSKIVVTRSQKRGDREQEELDRAMQLIEEDGIEEGSELYCHALYLCKNVVYRRAFTKMKMKEGRLNWIQFNGDRENK

SEQ ID NO: 73220 - protein, 123 aa, Setaria italica
  misc_feature (37)..(37): Xaa can be any naturally occurring amino acid
  Transcript Sequence Number=SeqID_7246
  Gene Ontology: Mol. function=protein prenyltransferase activity; Biological process=protein amino acid prenylation
  Homolog annotation: Hit_ID=O80601; Match level="QueryCoverage=82%, HitCoverage=24%, E-value=1e-23, Identity=52%"; Hit description =T27I1.12 protein
  Pfam annotation: Domain name=PPTA; Domain location=35-65; Score=26.9; E_value=8.5e-05; Accession=PF01239.14; Description=Protein prenyltransferase alpha subunit repeat
  Pfam annotation: Domain name=PPTA; Domain location=77-107; Score =18.1; E_value=0.036; Accession=PF01239.14; Description=Protein prenyltransferase alpha subunit repeat
  Pfam module annotation: Pfam domain module=PPTA::PPTA; Domain location=35-65::77-107
IGYKKPRRWSVFVSILSCRKMVLSEKYDLTKLKDELXQLCALILSYSPKNESTWSHRRWVLKQVAEQNQDMAQLVEKESVLVKEIAERSKMNYRAWRHRCWLIPYMTRKQVQINHFRLLVSHS

SEQ ID NO: 73221 - protein, 269 aa, Setaria italica
  misc_feature (77)..(77): Xaa can be any naturally occurring amino acid
  misc_feature (108)..(108): Xaa can be any naturally occurring amino acid
  misc_feature (171)..(171): Xaa can be any naturally occurring amino acid
  misc_feature (246)..(246): Xaa can be any naturally occurring amino acid
  Transcript Sequence Number=SeqID_7247
  Gene Ontology: Mol. function=protein prenyltransferase activity; Biological process=protein amino acid prenylation
  Homolog annotation: Hit_ID=O80601; Match level="QueryCoverage=93%, HitCoverage=63%, E-value=3e-43, Identity=38%"; Hit description =T27I1.12 protein
  Pfam annotation: Domain name=PPTA; Domain location=111-141; Score =13.8; E_value=0.13; Accession=PF01239.14; Description=Protein prenyltransferase alpha subunit repeat
  Pfam annotation: Domain name=PPTA; Domain location=17-47; Score=4.8; E_value=1.9; Accession=PF01239.14; Description=Protein prenyltransferase alpha subunit repeat
  Pfam annotation: Domain name=PPTA; Domain location=176-206; Score =11.8; E_value=0.24; Accession=PF01239.14; Description=Protein prenyltransferase alpha subunit repeat
  Pfam annotation: Domain name=PPTA; Domain location=54-82; Score=16.9; E_value=0.051; Accession=PF01239.14; Description=Protein prenyltransferase alpha subunit repeat
  Pfam module annotation: Pfam domain module=PPTA::PPTA::PPTA::PPTA; Domain location=111-141::17-47::176-206::54-82
ARDAYYNTRNAPSQAVHLMSLTKVLLILCPDMLTAWNSRKMVLSEKYDLTKLKDELQLCALILSYSPKNESTWSHRXSKMNYRAWRHRCWLIPYMTRKQLHLISVSEXVLDELKKSTRWSELHVACNCCFHYRRSLLLALLDSCLGNGEDSVSWESETCMLWKKTKDAHAXTHIIDELRWNEMLIRRYQGRESLWNHRRFLSQWWIRQLFSVEETCPSTTSQVDLFITQEIGLLSECLNVPADEFXESCVQAELSALYILWISKQVPAV

SEQ ID NO: 73222 - protein, 96 aa, Setaria italica
  misc_feature (40)..(40): Xaa can be any naturally occurring amino acid
  Transcript Sequence Number=SeqID_7248
  Gene Ontology: Mol. function=protein prenyltransferase activity; Biological process=protein amino acid prenylation
  Homolog annotation: Hit_ID=Q1KS95; Match level="QueryCoverage=98%, HitCoverage=48%, E-value=4e-11, Identity=38%"; Hit description =Protein prenyltransferase alpha subunit-related
QDELRWNEMLIRRYQGRESLWNHRRFLSQWWIRQLFSVEXTCPSTTSQVDLFITQEIGLLSECLNDPADEFGESCVQAELSALYILWISKQVPAVK

SEQ ID NO: 73223 - protein, 403 aa, Setaria italica
  misc_feature (314)..(314): Xaa can be any naturally occurring amino acid
  Transcript Sequence Number=SeqID_7249
  Gene Ontology: Mol. function=protein prenyltransferase activity; Biological process=protein amino acid prenylation
  Homolog annotation: Hit_ID=B9S7L2; Match level="QueryCoverage=87%, HitCoverage=89%, E-value=4e-77, Identity=42%"; Hit description =Protein farnesyltransferase alpha subunit, putative
  Pfam annotation: Domain name=PPTA; Domain location=112-142; Score =4.8; E_value=1.9; Accession=PF01239.14; Description=Protein prenyltransferase alpha subunit repeat
  Pfam annotation: Domain name=PPTA; Domain location=149-179; Score =38.0; E_value=3.8e-08; Accession=PF01239.14; Description=Protein prenyltransferase alpha subunit repeat
  Pfam annotation: Domain name=PPTA; Domain location=191-221; Score =18.1; E_value=0.036; Accession=PF01239.14; Description=Protein prenyltransferase alpha subunit repeat
  Pfam annotation: Domain name=PPTA; Domain location=227-257; Score =13.4; E_value=0.15; Accession=PF01239.14; Description=Protein prenyltransferase alpha subunit repeat
  Pfam annotation: Domain name=PPTA; Domain location=280-310; Score =11.8; E_value=0.24; Accession=PF01239.14; Description=Protein prenyltransferase alpha subunit repeat
  Pfam module annotation: Pfam domain module=PPTA::PPTA::PPTA::PPTA::PPT A; Domain location=112-142::149-179::191-221::227-257::280-310
MEQEDESEGAAAEQPADEAEEQLADDLLLHFERVLHSDPLIDEVGFLHPTQFGSLGCGQDGDSASQAPEFQHRYFWCRDHKLAICSEILPKLYRAARDAYYNTRNAPSQAVHLMSLTKVLLILCPDMLTAWNSRKMVLSEKYDLTKLKDELQLCALILSYSPKNESTWSHRRWVLKQVAEQNQDMAQLVEKESVLVKEIAERSKMNYRAWRHRCWLIPYMTRKQVLDELKKSTRWSELHVADNCCFHYRRSLLLALLDSCLGNGEDSVSWESETCMLWKDELRWNEMLIRRYQGRESLWNHRRFLSQWWIRQLXSVEETCPSTTSQVDLFITQEIGLLSECLNDPADEFGESCVQAELSALYILWISKQVPAVKGKLEERLHSAPSLPFHSWDLLRYPQNVEC

SEQ ID NO: 73224 - protein, 124 aa, Setaria italica
  Transcript Sequence Number=SeqID_7250
  Gene Ontology: Mol. function=protein prenyltransferase activity; Biological process=protein amino acid prenylation
VVLQSLWNHRRFLSQWWIRQLFSVEETCPSTTSQVDLFITQEIGLLSECLNDPADEFGESCVQAELSALYILWISKQVPAVKGKLEERLHSVSIVGLKDVLVRACRPEKRWLWMNLLGLPDRSQ

SEQ ID NO: 73225 - protein, 59 aa, Setaria italica
  Transcript Sequence Number=SeqID_7251
LETKARHMFGATGQSQVGRVRMLLLLDLLYLLPKFIETKDENGVLRKSNGGDHGVLSVS

SEQ ID NO: 73226 - protein, 56 aa, Setaria italica
  Transcript Sequence Number=SeqID_7252
IVGDEDFTSLYICIYLHLPSYIYSKLFLLPLATKIDKKNGKNLNVVTLILLDPASE

SEQ ID NO: 73227 - protein, 171 aa, Setaria italica
  Transcript Sequence Number=SeqID_7253
VRATANHQQQRPAAANNWAGNDANTLLVVATLITTLTYQLGSSIPGGYWQDTQLPVDGKRPHTAGDPVMRDLHPQRYWVFMVASWMGFAGSMLMTLSLLVRMPVDSRHVRWSFAVAYASLVLTFRLSQPKTHISLDILIWVAVTAFLWLMISVRTEHRARIVRLFCCAGDN

SEQ ID NO: 73228 - protein, 89 aa, Setaria italica
  Transcript Sequence Number=SeqID_7254
  Gene Ontology: Mol. function=flavin-containing monooxygenase activity; Cellular component=intrinsic to endoplasmic reticulum membrane; Biological process=oxidation reduction
  Homolog annotation: Hit_ID=B9RLT7; Match level="QueryCoverage=100%, HitCoverage=19%, E-value=3e-29, Identity=64%"; Hit description =Dimethylaniline monooxygenase, putative
HLHLQIECLCEDGLIMSSDGSCVVADAVIYCTGYDLSFPFLDTGGLVTVDDNRVGPLYEHTFPPSLAPSLSFIGLPRTVAVPLFYEVQA

SEQ ID NO: 73229 - protein, 109 aa, Setaria italica
  misc_feature (6)..(6): Xaa can be any naturally occurring amino acid
  Transcript Sequence Number=SeqID_7255
  Gene Ontology: Mol. function=translation initiation factor activity; Biological process=translational initiation
  Homolog annotation: Hit_ID=B6U4Q2; Match level="QueryCoverage=100%, HitCoverage=18%, E-value=4e-41, Identity=73%"; Hit description =Eukaryotic translation initiation factor 3 subunit 7
PRFGPXWRFNQRPQLPQRQDEEVESRRRLAENCVSQRERHFQSNRSHHHPGFRGNQSSSSAKPSVDIQPDWTMREQIPFANFTKLSFSVADQPEDLLVCGAVEFYDRTY

SEQ ID NO: 73230 - protein, 145 aa, Setaria italica
  Transcript Sequence Number=SeqID_7256
  Gene Ontology: Mol. function=translation initiation factor activity; Cellular component=eukaryotic translation initiation factor 3 complex; Biological process=translational initiation
  Homolog annotation: Hit_ID=B6U4Q2; Match level="QueryCoverage=94%, HitCoverage=23%, E-value=1e-71, Identity=94%"; Hit description =Eukaryotic translation initiation factor 3 subunit 7
  Pfam annotation: Domain name=eIF-3_zeta; Domain location=1-145; Score= -177.5; E_value=4.6e-09; Accession=PF05091.4; Description=Eukaryotic translation initiation factor 3 subunit 7 (eIF-3)
KKGTTFRIEPNPFATEGEEAASVAYRYRRWKLDDETSLVARCEVHAVNVDPRGERQFLTLNALNEFDPKVTGVDWRKKLETQRGAVLATELKNNANKLARWTAQALLAGADMMKLGYVSRLHPRDHYNHSILSVIGYKPRDFACH

SEQ ID NO: 73231 - protein, 106 aa, Setaria italica
  Transcript Sequence Number=SeqID_7257
  Gene Ontology: Mol. function=translation initiation factor activity; Cellular component=eukaryotic translation initiation factor 3 complex; Biological process=translational initiation
  Homolog annotation: Hit_ID=B6U4Q2; Match level="QueryCoverage=66%, HitCoverage=12%, E-value=8e-29, Identity=82%"; Hit description =Eukaryotic translation initiation factor 3 subunit 7
AQIIINTANMWGIVKSIVDICMKFEEGKYVFVKDPAKPQVRIYEVPSDAFENDYVEEPLPEEEQVRPLADVDATAQEMDAAAEAEANGTSAANGGQGDKSAEVTAA

SEQ ID NO: 73232 - protein, 415 aa, Setaria italica
  misc_feature (171)..(171): Xaa can be any naturally occurring amino acid
  Transcript Sequence Number=SeqID_7258
  Gene Ontology: Mol. function=transferase activity; Biological process= biosynthetic process
  Homolog annotation: Hit_ID=B9R7Z9; Match level="QueryCoverage=87%, HitCoverage=76%, E-value=1e-161, Identity=73%"; Hit description =Glycosyltransferase, putative
  Pfam annotation: Domain name=Glycos_transf_1; Domain location=200 -383; Score=75.6; E_value=1.8e-19; Accession=PF00534.12; Description =Glycosyl transferases group 1
SASLTAAAADGSPLGFMRSKLVLLVSHELSLSGGPLLLMELAFLLRHVGSQVVWITNQRSEETNDITHSLEHKMLNHGVQVLPARGQEAVDTARKADLVVLNTAVAGKWLDPVLKDHVPEVLPKILWWIHEMRGHYFKLEFVKHLPFVAGAMIDSHTTAEYWKSRTSDRLXMPQTYVVHLGNSKELMEVAEDNIARRVLREHIRESLGVRSEDLLFAIINSVSRGKGQDLFLQAFYQSLQLIQQQKLKVPTMHAVVVGSDMNAQTKFETQLRDFVVKNGIHERVHFVNKTLAVAPYLAAIDVLVQNSQARGECFGRITIEAMAFKLPVLGTAAGGTTEIILDGLTGLLHPAGKEGVAPLAKNIVRLASHAEQRASMGKKGYDRVRDRFMEHHMAERIAAVLKEVLKKSQEQHTRS

SEQ ID NO: 73233 - protein, 89 aa, Setaria italica
  Transcript Sequence Number=SeqID_7259
  Gene Ontology: Mol. function=protein binding
  Homolog annotation: Hit_ID=A9UKL6; Match level="QueryCoverage=71%, HitCoverage=6%, E-value=5e-09, Identity=51%"; Hit description=NBS -LRR resistance-like protein (Fragment)
IQETWESVIEDPSNIKEGTSSYFLSAKNGLSLPPKMFQQSYRLRVLKLSGCNFSFYSPPFCCCHSLRFLGLDKCKDQPQEEEDKQRRPT

SEQ ID NO: 73234 - protein, 58 aa, Setaria italica
  Transcript Sequence Number=SeqID_7260
MAGPAAAASEAWDKVTGFLHSQINDEENWANNYKIAKAIGLFAGSIFFMRTCGDIMAV

SEQ ID NO: 73235 - protein, 313 aa, Setaria italica
  Transcript Sequence Number=SeqID_7261
  Gene Ontology: Mol. function=binding
  Homolog annotation: Hit_ID=B9SQ20; Match level="QueryCoverage=87%, HitCoverage=20%, E-value=8e-75, Identity=50%"; Hit description =Symplekin, putative
  Pfam annotation: Domain name=HEAT; Domain location=14-50; Score=3.4; E_value=19; Accession=PF02985.14; Description=HEAT repeat
  Pfam annotation: Domain name=HEAT; Domain location=51-87; Score=26.9; E_value=8.2e-05; Accession=PF02985.14; Description=HEAT repeat
  Pfam module annotation: Pfam domain module=HEAT::HEAT; Domain location=14-50::51-87
HRGAPPPPARPSQGACSPSRLARIADLHTDEASPVRKHVAEIIGEVGSKHMAYLPDIIPCLLHLLNDEVPAVVRQAIKTGTVLFAQLLQHLVIQGLFSTGGIDDALKLSWERLLKFKSTVSLMAFQTTGNEGVRLLAVKFVEKTVLMYTPDPNIPSDPPSKATKDMGFNVAWLRGGHSLLNVGDLAMEASQNLGLLLEQLKSPKVKSLSTSMIIVFVTSLSAIAQRRPSFYGRILPVLLSLDPASSIIKLRVPGAFHALKRAFSACLKCTHSSAEPWRARLLEAQNIINQGSIEDTDKMLLRIWGHIKHRKNT

SEQ ID NO: 73236 - protein, 94 aa, Setaria italica
  Transcript Sequence Number=SeqID_7262
  Subcellular localization annotation: CTP_CleavageSite=60; ConfidenceScore=5.75e-01
FLERSSPTGHPPLPPSPRPAPPPPLSRSRRSATSAHPPPPPHPSSRLSCHEPTTPPPSVVAPKSGAWAPAPWGYEMELPWIQGSAHSDFQRFLL

SEQ ID NO: 73237 - protein, 141 aa, Setaria italica
  misc_feature (51)..(51): Xaa can be any naturally occurring amino acid
  Transcript Sequence Number=SeqID_7263
  Gene Ontology: Mol. function=transferase activity; Cellular component= membrane
  Homolog annotation: Hit_ID=B6TD30; Match level="QueryCoverage=82%, HitCoverage=27%, E-value=7e-48, Identity=75%"; Hit description =Secondary cell wall-related glycosyltransferase family 47
MKMRSVLAIAILATTTAAVLFLGSEAQEVKKDHRTYRISGSAGDVLEDDPXGRLKVYVYDLPAKYNTKLVEDDPRCLTHMFATEVFVHRSLLSSAVRTLDPEEADWFYAPVYTTCDLTASGHPMPFDSPRMMRAAIRLISR

SEQ ID NO: 73238 - protein, 342 aa, Setaria italica
  Transcript Sequence Number=SeqID_7264
  Gene Ontology: Mol. function=transferase activity; Cellular component= membrane
  Homolog annotation: Hit_ID=B6T2U9; Match level="QueryCoverage=99%, HitCoverage=80%, E-value=1e-156, Identity=75%"; Hit description =Secondary cell wall-related glycosyltransferase family 47
  Pfam annotation: Domain name=Exostosin; Domain location=1-270; Score =224.3; E_value=3e-64; Accession=PF03016.7; Description=Exostosin family
QSNVFVHRSLLSSAVRTLDPEEADWFYAPVYTTCDLTASGHPMPFDSPRMMRAAIRLISRRWPYWNRTEGADHFFVTPHDFGACFHFKEAKAVARGILPVLRRATLVQTFGQSGHACMKEEGGGSITVPPYAPPGRMEARLLPPGTPRSVFAYFRGLFYDAGNDPGGGYYARGARAAVWENFRSSPLFDISAERPATYYEDMQRAVFCLCPLGWAPWSPRLVEAVVFGCIPVVIADGIVLPFADAIPWAEIGVFVAEEDVPRLDTILTSIPPEEVLRKQRFLASPAVKRAVQFPQPSQPGDAFHQILNGLARKLPHGEGVFLSPGQTVLNWTDGPPGDLKPW

SEQ ID NO: 73239 - protein, 449 aa, Setaria italica
  misc_feature (11)..(11): Xaa can be any naturally occurring amino acid
  misc_feature (26)..(26): Xaa can be any naturally occurring amino acid
  misc_feature (349)..(349): Xaa can be any naturally occurring amino acid
  Transcript Sequence Number=SeqID_7265
  Gene Ontology: Mol. function=ATP-dependent helicase activity; Cellular component=intracellular; Biological process=RNA processing
  Homolog annotation: Hit_ID=Q01HF5; Match level="QueryCoverage=98%, HitCoverage=27%, E-value=0.0, Identity=70%"; Hit description =OSIGBa0157K09-H0214G12.2 protein
  Pfam annotation: Domain name=Ribonuclease_3; Domain location=37-146; Score=125.8; E_value=1.4e-34; Accession=PF00636.18; Description =RNase3 domain
  Pfam annotation: Domain name=dsrm; Domain location=173-237; Score =34.7; E_value=3.6e-07; Accession=PF00035.17; Description=Double -stranded RNA binding motif
  Pfam annotation: Domain name=dsrm; Domain location=363-436; Score =35.5; E_value=2.2e-07; Accession=PF00035.17; Description=Double -stranded RNA binding motif
  Pfam module annotation: Pfam domain module=Ribonuclease _3::dsrm::dsrm; Domain location=37-146::173-237::363-436
TFTELEELIGXKFKHKGLLLQAFVHXFIHKHSGGCYQRMEFLGDAVLEYLMVSYLYSAYPDLKPGQITDLKSLAVNNTSFAYVAIKKSMHKYLIKDSKYLMAAVNKFENYFNLSNSEKDLSEEPACPKVLGDIVESCVGAVLLDSGFNLNHAWKLMLMLLKPILSFCDMHINPLRELRELCQCNGFDLGLPKPIKADGEFHVKVEVNVNGKMISCTAANQNSKHARKLAAQDTLSKLKNYGYKHKSKSLEEILRTATKKEPELIGYDEEPIKVDGVPLEMKNLQMNGEMEENIFFGNNEAFFIGRSATSIQRTGEDNKVDRNDANNGRINKSNVVTQNGCLPRGEAAKXNKKEYHGDMVHKTARSFLYELCAANYWKPPEFELCKDEGPSHLRKFTCKVLVQIMGPSATLLECYSDPKLQKKAAQEHAAQGALWCLKQLGYLPKDETHV

SEQ ID NO: 73240 - protein, 171 aa, Setaria italica
  Transcript Sequence Number=SeqID_7266
  Gene Ontology: Mol. function=structural constituent of ribosome; Cellular component=intracellular; Biological process=translation
  Homolog annotation: Hit_ID=B6UAJ3; Match level="QueryCoverage=70%, HitCoverage=96%, E-value=1e-57, Identity=93%"; Hit description=30S ribosomal protein S13
  Pfam annotation: Domain name=Ribosomal_S13; Domain location=48-152; Score=196.9; E_value=5.7e-56; Accession=PF00416.14; Description =Ribosomal protein S13S18
  Subcellular localization annotation: CTP_CleavageSite=23; ConfidenceScore=5.25e-01
MATLSMVSVPIAPSSLPLSTRGRCSSVSFPSPKKGGIGHGSLRIECIRIGGVEIPNHKRVEYSLQYIHGIGRSRSRQILLDLNFDNKITKELSEEEVITLRKEVGKYMIEGDLKRFNRVAIERLKEIRCYKGIRHKLGLPVRGQRTKNNCRTLKGKRASVAKKKSSSSQEE

SEQ ID NO: 73241 - protein, 347 aa, Setaria italica
  Transcript Sequence Number=SeqID_7267
  Gene Ontology: Mol. function=nucleic acid binding; Cellular component= nucleus; Biological process=biological_process
  Homolog annotation: Hit_ID=Q7X8Z7; Match level="QueryCoverage=98%, HitCoverage=37%, E-value=1e-160, Identity=80%"; Hit description =OSJNBa0070C17.5 protein
  Pfam annotation: Domain name=RRM_1; Domain location=230-294; Score =34.5; E_value=4.1e-07; Accession=PF00076.14; Description=RNA recognition motif. (a.k.a. RRM, RBD, o
  Pfam annotation: Domain name=RRM_1; Domain location=35-105; Score =74.3; E_value=4.6e-19; Accession=PF00076.14; Description=RNA recognition motif. (a.k.a. RRM, RBD, o
  Pfam module annotation: Pfam domain module=RRM_1::RRM_1; Domain location=230-294::35-105
GRQKETKIREDKYNEDEDASLITDEKKLALETGRLYICNLPYATTEDDLVELCSQYGDVEQAHIVVDKTTRFSTGRGYVLFNLPDSAVRALDELDNSSFQGRLLRVKAAKPLNNKKLESTHATVEVKMNLKQQKLEQKKASEISGDTRAWNIFYMRQDTVAENIARKNGISKSQLLDREADDLATRLALGEAYVIGETKKYLSRSGVNVAALEEFASNKNEKSKRSNNVILVKNLPFSTSEEELAAMFQKHGSLDKIILPPTRVLALVIFVEATEARHAFKKLLYTRYKDTPLYLEWAPENILSPSSAPVDDDEKNVIGERIVTKAIIEQSVEGVSAEEIDPDRVEV

SEQ ID NO: 73242 - protein, 47 aa, Setaria italica
  Transcript Sequence Number=SeqID_7268
MDYSGELDDFSLQLIREQLLGGEALACLPVGPDAAAAYSASSVHPAA

SEQ ID NO: 73243 - protein, 254 aa, Setaria italica
  misc_feature (32)..(32): Xaa can be any naturally occurring amino acid
  misc_feature (71)..(71): Xaa can be any naturally occurring amino acid
  Transcript Sequence Number=SeqID_7269
  Gene Ontology: Mol. function=endonuclease activity
  Homolog annotation: Hit_ID=B0RNQ3; Match level="QueryCoverage=93%, HitCoverage=68%, E-value=5e-23, Identity=33%"; Hit description =Putative exported protein
LSLCTHLGYEQFGISRKGSQDTADEYCTIFYXEKEKVELTEGGTFWLSESPSVPGSISWGATAPCIATWAXTFQLKRVEPPGFSFQIVNTNLDEVSPRARRRSALLTWQHIASLPPNLPVIYCGGFNTQKESMTGRFLLGRSREHGVVGDMRDAWPNARVRKNVSLIHTYHGFKGEKQGAVEFLKLIFRALCLCWDRQTQDLHIDWILFRGRPLVPALCEVINDNIDGVYPSSHFPIFAEFLLPRSVRLAETAS

SEQ ID NO: 73244 - protein, 178 aa, Setaria italica
  Transcript Sequence Number=SeqID_7270
  Homolog annotation: Hit_ID=B6SWN0; Match level="QueryCoverage=100%, HitCoverage=37%, E-value=1e-85, Identity=92%"; Hit description=mTERF family protein
EGPLLAWLSSTRLASSSTPPEYEMPSVTWGVIQGRKERLVSRVLALDFLRSAGVSDPAGELEAVELPSSLEVLQERLDFLLRLGLSTDDLSNYPLLLACSLRKNVIPVLSYLEKLGVTRARLPAFVRAYPACLHASVAVDLSPVVKALRGLDVDRQDIPRVLERYPDVLGLKPDGTIS

SEQ ID NO: 73245 - protein, 138 aa, Setaria italica
  misc_feature (78)..(78): Xaa can be any naturally occurring amino acid
  Transcript Sequence Number=SeqID_7271
  Homolog annotation: Hit_ID=B4FNP5; Match level="QueryCoverage=95%, HitCoverage=36%, E-value=6e-60, Identity=84%"; Hit description=CXC domain containing TSO1-like protein 1
  Pfam annotation: Domain name=CXC; Domain location=50-91; Score=51.1; E_value=4.3e-12; Accession=PF03638.7; Description=TesminTSO1-like CXC domain
APPPAALETRDLPTHAVATTEVEPSSMNQLAVAVTPDPKRQKVEETADGNGCKHCACKKSRCLKLYCPCFAGGGYCSXKCGCQPCFNKDAYAETVQTTRKVLLSRQKRMSMKINRRSEANAEAMEDAHHSSSSTPPRR

SEQ ID NO: 73246 - protein, 228 aa, Setaria italica
  Transcript Sequence Number=SeqID_7272
  Homolog annotation: Hit_ID=B4FNP5; Match level="QueryCoverage=94%, HitCoverage=60%, E-value=1e-115, Identity=90%"; Hit description=CXC domain containing TSO1-like protein 1
  Pfam annotation: Domain name=CXC; Domain location=13-42; Score=1.4; E_ value=0.0097; Accession=PF03638.7; Description=TesminTSO1-like CXC domain
  Pfam annotation: Domain name=CXC; Domain location=86-127; Score=70.9; E_value=4.7e-18; Accession=PF03638.7; Description=TesminTSO1-like CXC domain
  Pfam module annotation: Pfam domain module=CXC::CXC; Domain location =13-42::86-127
ECFESQSDIIIVCICSYCPCFAGGGYCSEKCGCQPCFNKDAYAETVQTTRKVLLSRQKRMSMKINRRSEANAEAMEDAHHSSSSTPPRRGCNCKKSSCLKKYCDCYQDGTGCSLFCRCDDCQNPFGKNEGIMAEDSKRYLYTGADLDHSEGEHEFVVERSPRLQSPISKESSFHQTPPHLRASSRDAHVFPQAVLQWQAPPRSWHCSNKRNSNDRAMDDSANYKNSHN

SEQ ID NO: 73247 - protein, 94 aa, Setaria italica
  Transcript Sequence Number=SeqID_7273
  Gene Ontology: Mol. function=transporter activity; Cellular component= intracellular; Biological process=transport
  Homolog annotation: Hit_ID=Q94FN3; Match level="QueryCoverage=85%, HitCoverage=14%, E-value=4e-34, Identity=73%"; Hit description =Phosphatidylinositol transfer-like protein II
GVLVSTYFLVGKSWLLWSTVKSFLDPKTTAKIHVLGNKYQPKLLEIIDASELPEFLGGTCTCPEYGGCLKGEKGPWKDPNILKLVQSGEVQCAR

SEQ ID NO: 73248 - protein, 623 aa, Setaria italica
  Transcript Sequence Number=SeqID_7274
  Gene Ontology: Mol. function=transporter activity; Cellular component= intracellular; Biological process=transport
  Homolog annotation: Hit_ID=B9RH84; Match level="QueryCoverage=100%, HitCoverage=100%, E-value=0.0, Identity=69%"; Hit description =Phosphatidylinositol transporter, putative
  Pfam annotation: Domain name=CRAL_TRIO; Domain location=159-345; Score=152.7; E_value=1.1e-42; Accession=PF00650.12; Description =CRALTRIO domain
  Pfam annotation: Domain name=CRAL_TRIO_N; Domain location=73-142; Score=40.2; E_value=8.1e-09; Accession=PF03765.7; Description =CRALTRIO, N-terminus
  Pfam module annotation: Pfam domain module=CRAL_TRIO::CRAL_TRIO_N; Domain location=159-345::73-142
MSGHLDRLARPCFEGCSSHDERRDHKSDFEISEDEKKTRMGSLKKKAIDASTKIRHSLKKNRRKSGSRVLSVSIEDVRDLEELRAVEAFRQALLLDELLPARHDDYHMMLRFLKARKMDIEKAKQMWTDMLQWRKEYGTDTIVDDFEYSELDAVLQYYPHGYHGVDKEGRPVYIERLGKVDPSKLMNVTTMDRYVKYHVKEFERSFSIKFPACSLAAKRHIDSSTTILDVQGVGLKNFSKTARELIQRLQKIDNDNYPETLYQMFIVNAGPGFRLLWSTVKSFLDPKTTAKIHVLGNKYQPKLLEIIDASELPEFLGGTCTCPEYGGCLKGEKGPWKDPNILKLVQSGEVQCARQIVTISNGEEKFISYAKPKHHNTRGSDTSTAESGSEADDVASPKALRSYISHPKLTPVREEVKVVRATSFSTRLPEYDVPVVDKAVDATWKREQPRKTPLPPKDSSLKTATRPSDSSLDKIVATLMACLMAIVMLVRSVKDLATKRLPYKTESEESYSTLYPDSTKEEFRPPSPTPGFAEADLFAAVLQRLGELEEKVQMLQEKPSEMPCEKEELLNAAVRRVDALEAELIVTKKALHEALIRQEELLAYIDSKEVAKAQRKKKTMFCY

SEQ ID NO: 73249 - protein, 161 aa, Setaria italica
  Transcript Sequence Number=SeqID_7275
  Gene Ontology: Mol. function=small conjugating protein ligase activity; Biological process=ubiquitin-dependent protein catabolic process
  Homolog annotation: Hit_ID=A9PC20; Match level="QueryCoverage=100%, HitCoverage=100%, E-value=6e-81, Identity=86%"; Hit description =Ubiquitin carrier protein
  Pfam annotation: Domain name=UEV; Domain location=20-134; Score= -23.4; E_value=0.0011; Accession=PF05743.5; Description=UEV domain
  Pfam annotation: Domain name=UQ_con; Domain location=19-158; Score =193.8; E_value=4.8e-55; Accession=PF00179.18; Description=Ubiquitin -conjugating enzyme
  Pfam module annotation: Pfam domain module=UEV::UQ_con; Domain location=20-134::19-158
MTSSSSPSRKALSKIACNRLQKELAEWQLSPPAGFKHKVSDNLQRWVIEVTGAAGTLYAGETYQLQVDFPEHYPMEAPQVIFLNPAPMHPHIYSNGHICLDILYDSWSPAMTVSSVCISILSMLSSSPAKQRPADNDRYVRNCRNGRSPKETRWWFHDDTV

SEQ ID NO: 73250 - protein, 53 aa, Setaria italica
  Transcript Sequence Number=SeqID_7276
  Homolog annotation: Hit_ID=B6TPF2; Match level="QueryCoverage=86%, HitCoverage=20%, E-value=4e-17, Identity=89%"; Hit description=Seed maturation protein PM36
EKLLHPRWGVDLASVSPLKSNIEYHRFLRSFAEPEISYAVAVITFWIIETVYQ

SEQ ID NO: 73251 - protein, 224 aa, Setaria italica
  Transcript Sequence Number=SeqID_7277
  Homolog annotation: Hit_ID=B6TPF2; Match level="QueryCoverage=100%, HitCoverage=100%, E-value=1e-115, Identity=86%"; Hit description =Seed maturation protein PM36
  Pfam annotation: Domain name=TENA_THI-4; Domain location=15-223; Score=116.6; E_value=8.5e-32; Accession=PF03070.8; Description =TENATHI-4 family
MDGGGVEASTTAAWMERHGQMYDRATRHPFTVSIRDGTIDLSAFKRWLSQDYLFVREFVAFIASVLLKCCKQEDSMDMEIILGGVASLSDELSWFKNEAARWGVDLASVSPLKSNIEYHRFLRSFAEPEISYAVAVTTFWIIETVYQDSFGFCIEEGNKTPPELLGTCQRWGSAEFKQYCQSLQRIADRSLENAPADAVKSAEEAFIRVLELEVGFWEMSSSQS

SEQ ID NO: 73252 - protein, 58 aa, Setaria italica
  misc_feature (50)..(50): Xaa can be any naturally occurring amino acid
  Transcript Sequence Number=SeqID_7278
MGKPVDVELGGAGGLGIAGGGGGGGGCVGGCGAIGRAVSFRCVFVLLLAXGVLVPALL

SEQ ID NO: 73253 - protein, 134 aa, Setaria italica
  Transcript Sequence Number=SeqID_7279
  Subcellular localization annotation: CTP_CleavageSite=37; ConfidenceScore=5.23e-01
GDAPYSSEAQKAVSSLILSAVEQTAASALGGSSLIPRRERRRRPRRRWRRGLSIWLALVIGERITSGRTQLMLRELHATARKLRRSAELQNVQQPITLEKGVERDGGGGAYGARSTCIRWWWFLWGAVPSAAGA

SEQ ID NO: 73254 - protein, 271 aa, Setaria italica
  misc_feature (86)..(86): Xaa can be any naturally occurring amino acid
  Transcript Sequence Number=SeqID_7280
  Homolog annotation: Hit_ID=B6TIP1; Match level="QueryCoverage=99%, HitCoverage=94%, E-value=2e-88, Identity=69%"; Hit description =Surfeit locus protein 2 containing protein
  Pfam annotation: Domain name=SURF2; Domain location=17-264; Score =101.6; E_value=2.7e-27; Accession=PF05477.3; Description=Surfeit locus protein 2 (SURF2)
AADEMGVSSPQGSAHGSEGSGEKEGAFLLGQPTWEDAGGGRWRCAETGHELPEREKEAYARSRACRLALIDHAVARKKPPLNAFKXHPEHKSKLVCNITGDTINKSEEHIWKHINGKRFLNKLEKLEEQMVSGEKANEETAKSNEVAKKGKSSKKDKKGKKKTNVASASLPREPKPEMDDSDDPEFWMPPVGSRWDDDDGKDRWESSPGKNEGGSDDGGGGDNDDDNSEDMADKDDAESRVLASSRTKRMSLEAVGPSSFASRKKKPKKEQ

SEQ ID NO: 73255 - protein, 112 aa, Setaria italica
  misc_feature (95)..(95): Xaa can be any naturally occurring amino acid
  Transcript Sequence Number=SeqID_7281
  Gene Ontology: Mol. function=homocysteine S-methyltransferase activity; Biological process=methionine biosynthetic process
  Homolog annotation: Hit_ID=Q9FUN0; Match level="QueryCoverage=100%, HitCoverage=34%, E-value=3e-52, Identity=91%"; Hit description =Homocysteine S-methyltransferase 1
SSSYQATIPGFLARGMTLDEAEDLLQTSVKLALEARDEFWKSTLRKSKPIYNRALVAASIGSYGAYLADGSEYSGSYGADITTEKLKDFHRRRLXQVLAGAGPDLIAFEAIP

SEQ ID NO: 73256 - protein, 81 aa, Setaria italica
  Transcript Sequence Number=SeqID_7282
METSAAVESSAAVAAFEVSKRPDTGKLVLNSPSPPSLREELVGVVGKAFRPRASGGAGGRAPPCAWALTALQCVFPVLQVG

SEQ ID NO: 73257 - protein, 122 aa, Setaria italica
  misc_feature (18)..(18): Xaa can be any naturally occurring amino acid
  misc_feature (24)..(24): Xaa can be any naturally occurring amino acid
  Transcript Sequence Number=SeqID_7283
  Gene Ontology: Mol. function=binding
  Homolog annotation: Hit_ID=UPI0000196CE9; Match level="QueryCoverage =57%, HitCoverage=6%, E-value=2e-11, Identity=50%"; Hit description =DNAJ heat shock N-terminal domain-containing protein
  Subcellular localization annotation: CTP_CleavageSite=20; ConfidenceScore=5.19e-01
SAQRRNTRRKLRQRALQXPKSSTXQSFVQPKSSQDTKGMQVFHETSRNEDSLKEQATGDSSTSAALETCETWRTSGNKAYANGHFATAEDYYTRGINSISHHGTSGRCSRALMLCYSNRPLS

SEQ ID NO: 73258 - protein, 581 aa, Setaria italica
  misc_feature (170)..(170): Xaa can be any naturally occurring amino acid
  Transcript Sequence Number=SeqID_7284
  Gene Ontology: Mol. function=heat shock protein binding; Cellular component=phagocytic vesicle; Biological process=protein folding
  Homolog annotation: Hit_ID=UPI0000196CE9; Match level="QueryCoverage =88%, HitCoverage=43%, E-value=1e-151, Identity=52%"; Hit description= DNAJ heat shock N-terminal domain-containing protein
  Pfam annotation: Domain name=DnaJ; Domain location=445-527; Score =98.3; E_value=2.6e-26; Accession=PF00226.23; Description=DnaJ domain
  Pfam annotation: Domain name=TPR_1; Domain location=101-134; Score =5.6; E_value=1.2; Accession=PF00515.20; Description=Tetratricopeptide repeat
  Pfam annotation: Domain name=TPR_1; Domain location=23-56; Score=1.8; E_value=3.5; Accession=PF00515.20; Description=Tetratricopeptide repeat
  Pfam annotation: Domain name=TPR_1; Domain location=302-335; Score =13.2; E_value=0.15; Accession=PF00515.20; Description=Tetratricopepti de repeat
  Pfam annotation: Domain name=TPR_1; Domain location=340-373; Score =22.6; E_value=0.0016; Accession=PF00515.20; Description =Tetratricopeptide repeat
  Pfam annotation: Domain name=TPR_1; Domain location=374-407; Score =7.6; E_value=0.71; Accession=PF00515.20; Description=Tetratricopeptid e repeat
  Pfam annotation: Domain name=TPR_1; Domain location=67-100; Score =19.9; E_value=0.01; Accession=PF00515.20; Description=Tetratricopepti de repeat
  Pfam annotation: Domain name=TPR_2; Domain location=101-134; Score =7.6; E_value=3.9; Accession=PF07719.9; Description=Tetratricopeptide repeat
  Pfam annotation: Domain name=TPR_2; Domain location=190-223; Score =0.6; E_value=28; Accession=PF07719.9; Description=Tetratricopeptide repeat
  Pfam annotation: Domain name=TPR_2; Domain location=23-56; Score =11.3; E_value=1.3; Accession=PF07719.9; Description=Tetratricopeptide repeat
  Pfam annotation: Domain name=TPR_2; Domain location=302-335; Score =18.0; E_value=0.04; Accession=PF07719.9; Description=Tetratricopeptid e repeat
  Pfam annotation: Domain name=TPR_2; Domain location=340-373; Score =13.9; E_value=0.63; Accession=PF07719.9; Description=Tetratricopeptid e repeat
  Pfam annotation: Domain name=TPR_2; Domain location=374-407; Score =11.1; E_value=1.4; Accession=PF07719.9; Description=Tetratricopeptide repeat
  Pfam annotation: Domain name=TPR_2; Domain location=67-100; Score =14.0; E_value=0.62; Accession=PF07719.9; Description=Tetratricopeptid e repeat
  Pfam module annotation: Pfam domain module=DnaJ::TPR_1::TPR_1::TPR _1::TPR_1::TPR_1::TPR_1::TPR_2::TPR_2::TPR_2::TPR_2::TPR_2::TPR _2::TPR_2; Domain location=445-527::101-134::23-56::302-335::340 -373::374-407::67-100::...
  Pfam module annotation: Domain location=101-134::190-223::23-56::302 -335::340-373::374-407::67-100
IVSTSLDCKATGDSSTSAALETCETWRTSGNKAYANGHFATAEDYYTRGINSISHHGTSGRCSRALMLCYSNRAATRMSLGMMREALQDCLTAMSIDPSFLKAKVRAANCYLALGNLEDASRNYMSCLNSNTSSSDPKMFTEASDGLEKVKRVTEWASQCKGLLEKRHLXEATTALELISNALHISPHWDSLKEMKAEALLMLRRYEEVIQLCQESVNPAERNSVLFNANGEPKSSSVSEKTQFSGRHWRPYLICKAYFHSGKFDEALDLLKKHEQVTPVKESDESLYQERLSSLSATIRQLLSLKAAGNELFQAGKYSDAVEQYSAALACNSESRPFSAVCFCNRAAAYQALGQVTDAIADCSLAMVLDTSYPKAISRRATLYEMIRDYGQAANDVRKLILLLEKKVNVSGVSPKFFNKHSDLKQARARLSSIEDEAKKDTPLNLYLILGVEPSCSAADIKKAYRKAALRHHPDKAAQFLVRNENTDDGFWRDVVKEVYADADHLFKAIGEAYNVLSDPDKRQDYDFEEDVRKASKRVSKSRSMHRSPEQNYSNRGFNPRQWQSSRGSRSRWYGHSDDYW

SEQ ID NO: 73259 - protein, 105 aa, Setaria italica
  Transcript Sequence Number=SeqID_7285
STDPSVVITTYEGQHCHHIGSYQRGGGGGAAAAHIHHSAAAVALAEQMSSFIPAHQLYSLPPLHPQSSPSSETIVSPPASTSLQHLNGGADELRRASYSPRVSSG

SEQ ID NO: 73260 - protein, 81 aa, Setaria italica
  Transcript Sequence Number=SeqID_7286
ILCPFLLIAFAEDEKNNECNHSTNYLFFPSSKKRCRGNYWGCLSGHDHVNINPSPIPKVEVEWHLILKERLAIYSMWNLCR

SEQ ID NO: 73261 - protein, 64 aa, Setaria italica
  Transcript Sequence Number=SeqID_7287
  Gene Ontology: Mol. function=glycine hydroxymethyltransferase activity; Cellular component=mitochondrion; Biological process=one -carbon compound metabolic process
  Homolog annotation: Hit_ID=Q7Y1F0; Match level="QueryCoverage=100%, HitCoverage=11%, E-value=1e-24, Identity=90%"; Hit description =Serine hydroxymethyltransferase
DAAVNLAVKIKAATTGGTKLKDFVATLQSDSIQAEIAKLRHDVEEYAKQFPTIGFEKETMKYKN

SEQ ID NO: 73262 - protein, 153 aa, Setaria italica
  Transcript Sequence Number=SeqID_7288
  Gene Ontology: Mol. function=glycine hydroxymethyltransferase activity; Cellular component=mitochondrion; Biological process=one -carbon compound metabolic process
  Homolog annotation: Hit_ID=Q7Y1F0; Match level="QueryCoverage=96%, HitCoverage=26%, E-value=3e-62, Identity=83%"; Hit description =Serine hydroxymethyltransferase
  Pfam annotation: Domain name=SHMT; Domain location=1-89; Score= -230.6; E_value=0.0032; Accession=PF00464.11; Description=Serine hydroxymethyltransferase
QEDLGKTKRNNELVSGGTDNHLVLVNLKNKGIDGSRVEKVLECVHIAANKNTVPGDVSAMVPGGIRMGTPALTSRGFVEEDFAKVADFFDAAVNLAVKIKAATTGGTKLKDFVATLQSDSIQAEIAKLRHDVEEYAKQFPTIGFEKETMKYKN

SEQ ID NO: 73263 - protein, 539 aa, Setaria italica
  Transcript Sequence Number=SeqID_7289
  Gene Ontology: Mol. function=glycine hydroxymethyltransferase activity; Cellular component=mitochondrion; Biological process=one -carbon compound metabolic process
  Homolog annotation: Hit_ID=Q10D68; Match level="QueryCoverage=94%, HitCoverage=98%, E-value=0.0, Identity=92%"; Hit description=Serine hydroxymethyltransferase
  Pfam annotation: Domain name=Aminotran_1_2; Domain location=104-475; Score=-93.5; E_value=0.015; Accession=PF00155.13; Description =Aminotransferase class I and II
  Pfam annotation: Domain name=SHMT; Domain location=77-475; Score =1026.1; E_value=0; Accession=PF00464.11; Description=Serine hydroxymethyltransferase
  Pfam module annotation: Pfam domain module=Aminotran_1_2::SHMT; Domain location=104-475::77-475
  Subcellular localization annotation: CTP_CleavageSite=37; ConfidenceScore=5.17e-01
NPYLPNSRVEVATPRHRRWTRPPPPTMAMATALRKLSANALRRQPLSRITPLYYMASLPATEERSGVTWTKQLNAPLEEVDPEVADIIELEKARQWKGLELIPSENFTSVSVMQAVGSVMTNKYSEGYPGARYYGGNEYIDMAESLCQKRALEAFRLDPAKWGVNVQPLSGSPANFHVYTALLKPHERIMALDLPHGGHLSHGYQTDTKKISATSIFFETMPYRLDESTGFIDYDQLEKSAVLFRPKLIIAGASAYARLYDYDRMRKICNKQKAILLADMAHISGLVAAGVIPSPFDYADVVTTTTHKSLRGPRGAMIFYRKGVKEINKQGKEVMYDFEDKINAAVFPGLQGGPHNHTITGLAVALKQATTPEYRAYQEQVISNSAKFAQSLVAKGYELVSGGTDNHLVLVNLKNKGIDGSRVEKVLECVHIAANKNTVPGDVSAMVPGGIRMGTPALTSRGFVEEDFAKVADFFDAAVNLAVKIKAATTGGTKLKDFVATLQSDSIQAEIAKLRHDVEEYAKQFPTIGFEKETMKYKN

SEQ ID NO: 73264 - protein, 310 aa, Setaria italica
  misc_feature (9)..(9): Xaa can be any naturally occurring amino acid
  Transcript Sequence Number=SeqID_7290
  Gene Ontology: Mol. function=metal ion binding; Cellular component =integral to membrane
  Homolog annotation: Hit_ID=B6TYG4; Match level="QueryCoverage=100%, HitCoverage=86%, E-value=1e-131, Identity=75%"; Hit description =Protein binding protein
  Pfam annotation: Domain name=zf-C3HC4; Domain location=256-296; Score= 39.7; E_value=1.1e-08; Accession=PF00097.17; Description=Zinc finger, C3HC4 type (RING finger)
ARFIRRTGXRRLMREPSVAVRETAAEHLEERQTDWAYSKPVVVLDVLWNLAFVAVAAAVLAASLGEQPAVPLRVWLAGYVLQCLLHVLCVTVEYRRRSRDADQDGAGDGDFKLSIAKHLESANTMFSFIWWIIGFYWVSAGGQALSHDAPQLYWLSIVFLAFDVFFVVFCVALACVIGIAVCCCLPCIIAILYAVTDQQEGASEEDINNLSKFKFRTMGDHDKLVAGIAAPVGGVMTECGTNPPVEHILSAEDAECCICLCPYEDGAELRELPCNHHFHCSCIDKWLHINATCPLCKFNIVKSNLDREEV

SEQ ID NO: 73265 - protein, 89 aa, Setaria italica
  Transcript Sequence Number=SeqID_7291
MGTGSCSTSTSTSTGEKKGEEWVLSHGDVVLIRSDLAILRGPRFINDRLIAFYFAHLSADLGDDLLLLPPSIPYLLSNLPDPASIAEPL

SEQ ID NO: 73266 - protein, 131 aa, Setaria italica
  Transcript Sequence Number=SeqID_7292
  Gene Ontology: Mol. function=cysteine-type peptidase activity; Cellular component=nucleus; Biological process=regulation of transcription, DNA-dependent
  Homolog annotation: Hit_ID=Q6IEM4; Match level="QueryCoverage=87%, HitCoverage=24%, E-value=2e-22, Identity=56%"; Hit description=WRKY transcription factor 57
MSHTAEKYLPRFINDRLIAFYFAHLSADLGDDLLLLPPSIPYLLSNLPDPASIAEPLRLASRRLVLLPVNDNPDASVPEGGSHWTLLVIDNTTSPSGPRFVHHDSIRGAPNLPVASHLADALRPCSRAIRG

SEQ ID NO: 73267 - protein, 101 aa, Setaria italica
  Transcript Sequence Number=SeqID_7293
  Gene Ontology: Mol. function=protein serine/threonine kinase activity; Biological process=protein amino acid phosphorylation
  Homolog annotation: Hit_ID=Q33AJ9; Match level="QueryCoverage=82%, HitCoverage=14%, E-value=2e-11, Identity=42%"; Hit description =Calcium binding EGF domain containing protein
MLPYPLGVGPTECKYANIGSNSILLDHNFLPKVSVSFCEMTKIIKGLKYGISFSPYVDPVYWKTGRFIRKSNVYSFGTVLLELITRKGAEYRDGATTRWPR

SEQ ID NO: 73268 - protein, 655 aa, Setaria italica
  Transcript Sequence Number=SeqID_7294
  Gene Ontology: Mol. function=protein serine/threonine kinase activity; Biological process=protein amino acid phosphorylation
  Homolog annotation: Hit_ID=Q2R2M7; Match level="QueryCoverage=97%, HitCoverage=99%, E-value=1e-114, Identity=37%"; Hit description =Protein kinase domain containing protein
  Pfam annotation: Domain name=Pkinase; Domain location=30-297; Score =113.7; E_value=6.2e-31; Accession=PF00069.17; Description=Protein kinase domain
  Pfam annotation: Domain name=Pkinase_Tyr; Domain location=28-295; Score=112.7; E_value=1.2e-30; Accession=PF07714.9; Description =Protein tyrosine kinase
  Pfam module annotation: Pfam domain module=Pkinase::Pkinase_Tyr; Domain location=30-297::28-295
INISEKAKCRPVNNHNINCFTEDEIKRITNSYSTLIGEGGFGQVYKGALDDGTTVAVKRYKCQNLTEGFGKEVIVHCQINHKNVVRLLGCCMEENAFMIVTEYVSGGNLHNLLHGSDDPISLDERLRIAIECADALGYMHSSMYQPIIHGDIKPDNILLDSKLVAKLSDFGLSRLLCMDKTQYTMHVAGSRGYTDPEYIETGLLDPKSDVYSFGVVLLELITGSKASQSGFGTSLKRDFTDALRKGKKEARKLFDTKIANDKYTKILDGIGNLAAECFTKGIKERPEMKNVQERLQFLRRALHREQAQEKVSQKSSILGIFNGNNARRKHFERNGGLILQETSGLNIFTEQSIEKITCNYSNVAGKGYFGCVYMGWVDDNTRVVVKRFIVSEEDRTDSIVDAVQSACRISHKNIIRLVGCCLETVVPLFVYEFAANGSLYDVLHGDNGKCRLSLDSRLNIAIGSAEGLAYLHSVGPTPSGYGNIGSNSILLDHNFLPKVSVSFCEMTKIIKGLKYGISFSPYVDPVYWKTGRFIRKSNVYSFGTVLLELITRKGAEYRDGATTRWPRHLGIEYTKVWKEQNSGKPMFDKEVAVEGNIAILEEMGKLAVECLDEDVDERPEMVEVAERLQNLRRDWKHGEGGCGSSHAKEETTGGH

SEQ ID NO: 73269 - protein, 207 aa, Setaria italica
  misc_feature (55)..(55): Xaa can be any naturally occurring amino acid
  misc_feature (90)..(90): Xaa can be any naturally occurring amino acid
  misc_feature (191)..(191): Xaa can be any naturally occurring amino acid
  Transcript Sequence Number=SeqID_7295
  Gene Ontology: Mol. function=RNA-directed DNA polymerase activity; Cellular component=exocyst; Biological process=RNA-dependent DNA replication
  Homolog annotation: Hit_ID=Q53NG0; Match level="QueryCoverage=99%, HitCoverage=23%, E-value=4e-90, Identity=74%"; Hit description =Retrotransposon protein, putative, unclassified
SHPKWISWVESFVSGGSVAVNVNEDVGSYFQTRKGLRQGDPLSPILFNIVVDMLXVLINRAKVDGQISGIVPHLVDNGLSILQHADDTIXFMEHDLEKARNMKLLLCAFEQLSGLKINFHKSEIFCFGEAQESIDQYTELFGCNPGALPMKYLGIPTHYRRLSNVNWKRVEECFEKRLSSWKGKHLCTGGXLTLINSVLSSLPMYMM

SEQ ID NO: 73270 - protein, 78 aa, Setaria italica
  Transcript Sequence Number=SeqID_7296
YSLYKPGAASPGTRASKMLMQIGPAYFEIQAVSFTGSSTSSAITERNKIILGHEQLANVKQQVNYSLTTVLEAFYRNY

SEQ ID NO: 73271 - protein, 67 aa, Setaria italica
  Transcript Sequence Number=SeqID_7297
  Gene Ontology: Cellular component=intracellular
  Homolog annotation: Hit_ID=B9RXG8; Match level="QueryCoverage=91%, HitCoverage=22%, E-value=1e-26, Identity=91%"; Hit description =Proline synthetase associated protein, putative
GVIKHPENFKTLANCRKEVCKELGIPEEQCELSMGMSADFEQAIEMGSTNVRVGSTIFGAREYPKKN

SEQ ID NO: 73272 - protein, 171 aa, Setaria italica
  Transcript Sequence Number=SeqID_7298
  Gene Ontology: Cellular component=intracellular
  Homolog annotation: Hit_ID=Q5QT25; Match level="QueryCoverage=93%, HitCoverage=72%, E-value=1e-85, Identity=94%"; Hit description =Putative proline synthetase associated protein (Fragment)
  Pfam annotation: Domain name=Ala_racemase_N; Domain location=1-170; Score=63.0; E_value=1.1e-15; Accession=PF01168.12; Description =Alanine racemase, N-terminal domain
VYDAGHRCFGENYVQELIDKAPQLPEDIEWHFIGNLQSNKARALLAGVPNLDMVESVDDQKIASRLDRVVADLGRKPLKILVQVNTSGEESKFGVDPSGCVELAKHVKLNCPNLVFSGLMTIGMLDYSSTPENFKTLANCRKEVCKELGIPEEQCELSMGMSADFEQAIEM

SEQ ID NO: 73273 - protein, 136 aa, Setaria italica
  Transcript Sequence Number=SeqID_7299
  Gene Ontology: Cellular component=intracellular
  Homolog annotation: Hit_ID=B9RXG8; Match level="QueryCoverage=96%, HitCoverage=48%, E-value=2e-61, Identity=84%"; Hit description =Proline synthetase associated protein, putative
  Pfam annotation: Domain name=Ala_racemase_N; Domain location=1-131; Score=-39.1; E_value=0.0005; Accession=PF01168.12; Description =Alanine racemase, N-terminal domain
CSFFQIASRLDRVVADLGRKPLKILVQVNTSGEESKFGVDPSGCVELAKHVKLNCPNLVFSGLMTIGMLDYSSTPENFKTLANCRKEVCKELGIPEEQCELSMGMSADFEQAIEMGSTNVRVGSTIFGAREYPKKN

SEQ ID NO: 73274 - protein, 200 aa, Setaria italica
  Transcript Sequence Number=SeqID_7300
  Gene Ontology: Mol. function=enzyme regulator activity; Biological process=regulation of transcription, DNA-dependent
  Homolog annotation: Hit_ID=Q9ARI4; Match level="QueryCoverage=76%, HitCoverage=76%, E-value=1e-57, Identity=72%"; Hit description=PII protein
  Pfam annotation: Domain name=P-II; Domain location=74-176; Score =184.5; E_value=2.9e-52; Accession=PF00543.14; Description=Nitrogen regulatory protein P-II
  Subcellular localization annotation: CTP_CleavageSite=56; ConfidenceScore=5.81e-01
MSPATSATAVSVPGVLIRQSLSTLRSFPAVRLLPSGAARQLQATSASRRLPATAVRAQSAAHPGYSPESEFYKIEAIIRPWRVSHVSSGLLEMGIRGVTVSDVRGFGAQGGSTERHGGSEFSEDTFIAKVKIEIVVCKEQVEAVIDKIIEKARTGEIGDGKIFLIPVSDVVRIRTGERGKEAERMTGGLSDRLSSVVSIL

SEQ ID NO: 73275 - protein, 91 aa, Setaria italica
  Transcript Sequence Number=SeqID_7301
  Gene Ontology: Mol. function=enzyme regulator activity; Biological process=regulation of transcription, DNA-dependent
  Homolog annotation: Hit_ID=Q9ARI4; Match level="QueryCoverage=85%, HitCoverage=40%, E-value=3e-29, Identity=80%"; Hit description=PII protein
  Pfam annotation: Domain name=P-II; Domain location=5-67; Score=47.9; E_value=3.9e-11; Accession=PF00543.14; Description=Nitrogen regulatory protein P-II
GYLSREEGGSEFSEDTFIAKVKIEIVVCKEQVEAVIDKIIEKARTGEIGDGKIFLIPVSDVVRIRTGERGKEAERMTGGLSDRLSSVVSIL

SEQ ID NO: 73276 - protein, 110 aa, Setaria italica
  Transcript Sequence Number=SeqID_7302
  Gene Ontology: Cellular component=chloroplast
  Homolog annotation: Hit_ID=B6TSG4; Match level="QueryCoverage=94%, HitCoverage=49%, E-value=3e-49, Identity=93%"; Hit description=ABC -type Co2+ transport system, permease component
DDDERDVAIPEVVTNRMMRRVGVSVGAPLALGVGFFPLFYYLKAVRKVDVPTWIPFGVSFVFFGAALLGVSYGIVSASWDPAREGSLLGWNEARRNWPVFWDSLRGRSRG

SEQ ID NO: 73277 - protein, 104 aa, Setaria italica
  Transcript Sequence Number=SeqID_7303
  Gene Ontology: Mol. function=hydrolase activity, acting on acid anhydrides, catalyzing transmembrane movement of substances; Cellular component=integral to membrane; Biological process=calcium ion transport
  Homolog annotation: Hit_ID=Q2QMX9; Match level="QueryCoverage=99%, HitCoverage=10%, E-value=3e-50, Identity=94%"; Hit description =Calcium-transporting ATPase 1, plasma membrane-type
CSVVKNPKRRFRFTANLEKRGEAEAIKHANHEKLRVAVLVSKAALQFIQGLSLRSEYVVPEEVKAAGFQICADELGSIVEGHDSKKLIIHGGVNGIAEKLATSK

SEQ ID NO: 73278 - protein, 109 aa, Setaria italica
  Transcript Sequence Number=SeqID_7304
  Gene Ontology: Mol. function=protein serine/threonine kinase activity; Cellular component=integral to membrane; Biological process=protein amino acid phosphorylation
  Homolog annotation: Hit_ID=B9RXU2; Match level="QueryCoverage=93%, HitCoverage=16%, E-value=1e-34, Identity=69%"; Hit description=ATP binding protein, putative
ARHEDIDEGMRSSESLLYDLSMLRAATDNFSEENKLGEGGFGPVYKGTLQNGQDIAVKRLSATSQQGQVEMKNEVFLLAKLQHRNLVRLLGCCIEEHERLLVYEFLTNN

SEQ ID NO: 73279 - protein, 115 aa, Setaria italica
  misc_feature (99)..(99): Xaa can be any naturally occurring amino acid
  Transcript Sequence Number=SeqID_7305
NIFSYISQRFETKRPILQLVLLSSKAWLSSGCCDENDMDGSHGTADLQPSVKLLYSDYSNASEADLRIVEEWSSKYRAEELYTMKRQIDELTDCLSSAXDNFPVSCSSLEGMHLS

SEQ ID NO: 73280 - protein, 185 aa, Setaria italica
  Transcript Sequence Number=SeqID_7306
  Gene Ontology: Mol. function=acid phosphatase activity; Cellular component=plasma membrane
  Homolog annotation: Hit_ID=B4F7Y5; Match level="QueryCoverage=82%, HitCoverage=55%, E-value=2e-77, Identity=90%"; Hit description=Acid phosphatase 1
  Pfam annotation: Domain name=Acid_phosphat_B; Domain location=7-185; Score=223.9; E_value=4.2e-64; Accession=PF03767.6; Description=HAD superfamily, subfamily IIIB (Acid
EGPRYASDSAVAAADSLAFASGALAAAEAGAAKPAWVFDVDETLLTNAPYYAVNGWGSQEFNETSFDEWVDAAKAPALPSSLKLYKELQGLGFHIILLTGRTEFQRNSTEANLLFAGYQSWEKLILRQPSDIGKTAVLYKSERRAAMEAEGFKILGNSGDQWSDLIGPPMATRSFKLPNPMYFIS

SEQ ID NO: 73281 - protein, 115 aa, Setaria italica
  Transcript Sequence Number=SeqID_7307
MSLISVTRKLYCYSALRLLKRGRGRLAVLRVSLSSCQGRERSMEPKEATNADMVAPAAGAKSGPPVPVDNAAAAPADRDAVLAKVEMDRKLSMIKAWEESEKSKAENKAQKKMSS

SEQ ID NO: 73282 - protein, 128 aa, Setaria italica
  Transcript Sequence Number=SeqID_7308
MGGKAPEATRKASDSQGTSALIQEPILDTRGKQAPVGQEEIPGVRDIGDRDTTKKSIINKRAAEPTSGSQQITEPVKGAGPTSPKTPGDKSTRAATADPGAELTAPVGAPALGGQNASAVLREGNLDA

SEQ ID NO: 73283 - protein, 121 aa, Setaria italica
  Transcript Sequence Number=SeqID_7309
  Gene Ontology: Mol. function=transporter activity; Cellular component= integral to membrane; Biological process=auxin mediated signaling pathway
  Homolog annotation: Hit_ID=Q67UL3; Match level="QueryCoverage=98%, HitCoverage=18%, E-value=9e-29, Identity=62%"; Hit description =Probable auxin efflux carrier component 1c
PRVRTGATPTPSNYEEDAQGKANKYGQYPAPNPAMAAPAKGQPKKAANGQAKGEDGKDLHMFVWSSSASPVSDVFGNGNAEYNDAAAVKEVRMAVASPRKVAADGRKERGEDFAERDDFSF

SEQ ID NO: 73284 - protein, 126 aa, Setaria italica
  Transcript Sequence Number=SeqID_7310
  Gene Ontology: Mol. function=acid-amino acid ligase activity; Cellular component=intracellular; Biological process=ubiquitin -dependent protein catabolic process
  Homolog annotation: Hit_ID=B9SMZ3; Match level="QueryCoverage=100%, HitCoverage=3%, E-value=2e-38, Identity=61%"; Hit description=E3 ubiquitin protein ligase upl2, putative
  Subcellular localization annotation: CTP_CleavageSite=20; ConfidenceScore=5.05e-01
GPLSSYGAVMDHLVTSSFILSSSTRQLLEQPIFNGSVRFPQDAERFMKLLQSKVLKTVLPIWAHSQFPECNIELISSVTSIMRHVCTGVEVKNTVGNGSGRLAGHPLMKNAISLIVEMGFSRARAE

SEQ ID NO: 73285 - protein, 186 aa, Setaria italica
  Transcript Sequence Number=SeqID_7311
  Gene Ontology: Mol. function=zinc ion binding; Cellular component =intracellular
  Homolog annotation: Hit_ID=Q8S9K3; Match level="QueryCoverage=96%, HitCoverage=25%, E-value=9e-14, Identity=30%"; Hit description=Zinc finger protein VAR3, chloroplastic
PPPPRAPFPEWSRLVDRLAAAGYASRVPSLGDELALASGCDLSDSAEAAVSTCLAFARDRPDLLRSLPRKDVEVLVANAAPVLFKDGESSAQRLRRYLAGEETDVIVSERAETVDIIRYLLSYTYSSSDSFSEAKELIDSAVRNIMAELVSFTVESTPKPSSLSQPERFSRPPGQNIEMKRGDWIC

SEQ ID NO: 73286 - protein, 85 aa, Setaria italica
  misc_feature (26)..(26): Xaa can be any naturally occurring amino acid
  Transcript Sequence Number=SeqID_7312
  Homolog annotation: Hit_ID=B9SLW1; Match level="QueryCoverage=100%, HitCoverage=26%, E-value=1e-18, Identity=48%"; Hit description=S -adenosylmethionine-dependent methyltransferase, putative
IVVDLVYDGKIIPQLQEVETWLQIAXKKLMPGGRIMVNCGGADVEESLSSSWVQNPTIKALCSAFPRQLNWKRLSEKESVNYVAL

SEQ ID NO: 73287 - protein, 45 aa, Setaria italica
  Transcript Sequence Number=SeqID_7313
  Gene Ontology: Mol. function=phosphoinositide binding; Biological process=cell communication
  Homolog annotation: Hit_ID=B9RRH9; Match level="QueryCoverage=97%, HitCoverage=7%, E-value=4e-10, Identity=65%"; Hit description =Sorting nexin-4, putative
CSSSLTEAEALVKAQQDMGETMGALGLAFVRLTKFETEEAMYDST

SEQ ID NO: 73288 - protein, 510 aa, Setaria italica
  Transcript Sequence Number=SeqID_7314
  Gene Ontology: Mol. function=phosphoinositide binding; Biological process=cell communication
  Homolog annotation: Hit_ID=B9RRH9; Match level="QueryCoverage=94%, HitCoverage=88%, E-value=1e-154, Identity=58%"; Hit description =Sorting nexin-4, putative
  Pfam annotation: Domain name=BAR; Domain location=292-498; Score= -59.0; E_value=0.022; Accession=PF03114.10; Description=BAR domain
  Pfam annotation: Domain name=PX; Domain location=83-194; Score=72.9; E_value=1.2e-18; Accession=PF00787.16; Description=PX domain
  Pfam annotation: Domain name=Vps5; Domain location=243-495; Score= -3.2; E_value=1.6e-07; Accession=PF09325.2; Description=Vps5 C terminal like
  Pfam module annotation: Pfam domain module=BAR::PX::Vps5; Domain location=292-498::83-194::243-495
  Subcellular localization annotation: CTP_CleavageSite=65; ConfidenceScore=5.90e-01
SSASAASPRSPRSPPARAAAFTLSPTSSSSFVDPPSYADATGAGAGSSSPRSASSPSSASPRSARAAASEYSLLAVSDPETEAEPAATSLVPGSAPTYVSYLVTSVRRGDPAQRRHAVRRRFRDFVTLADRLAEAFRGHFVPPRPDKNTVESQVMQKDEFVAQRRAALERYLWRLAEHPAIGPSDELRVFLQTEGKMPLPGSTDVASRMLDGAARLPRQLIAGEEAVAAPQDVVQPAKGGRDLLRIFKELKQSVVTDWGGVKPPLVEEDRDFLEKKGKLQEWEQHLTSASQQAEALVKAQQDMGETMGALGLAFVRLTKFETEEAMYDSQRIRAADSRCVATAAVKASRACRDLNAQTVKYLDTLHEHLSIMLSVHTALSDRASALLTVQTLMSDLASLQSRIEKLEAASSKIFGGDRARIRRVEELRETIRATEDAKFCALREYERIKENNRSELQRLDTERKEDFLAMLKGFVASQAAYAEKIVDGWQTVAEETSGYARGSDNAILGS

SEQ ID NO: 73289 - protein, 71 aa, Setaria italica
  Transcript Sequence Number=SeqID_7315
LRMKAVRNGWENPLTIPAIVFFSREREREWESRTEKRNRYYGILGTEHFDREHVDRNRIVIDNSNREHQCM

SEQ ID NO: 73290 - protein, 177 aa, Setaria italica
  Transcript Sequence Number=SeqID_7316
  Gene Ontology: Mol. function=magnesium ion binding; Cellular component=chloroplast; Biological process=photosynthesis, light harvesting
  Homolog annotation: Hit_ID=Q9C9K1; Match level="QueryCoverage=98%, HitCoverage=53%, E-value=4e-74, Identity=75%"; Hit description =Putative chlorophyll A-B binding protein; 65434-67056
  Pfam annotation: Domain name=Chloroa_b-bind; Domain location=1-150; Score=99.5; E_value=1.2e-26; Accession=PF00504.13; Description =Chlorophyll A-B binding protein
IPCSFEILHCRWAMLAALGVVIPELLDLFGLVHFVEPVWWKVGYAKLQGDTLDYLGIPGFRIAGGQGVIVIAICQALLMVGPEYARYCGIEALEPLGIYLPGDINYPGGALFDPLGLSKDPVAFEELKVKEIKNGRLAMVAWLGFYIQAAVTGKGPVQNLVEHLSDPIHNNILSSFQ

SEQ ID NO: 73291 - protein, 104 aa, Setaria italica
  Transcript Sequence Number=SeqID_7317
LYLYIMIGSTGKSIEIYQLKTSKRNPQRNSPGRQERALLLILRNAESDETLKRPNSCAGQAEKREGGRKGREWHFGTVTCAWRPVAEEGRFVAVAAPREVALET

SEQ ID NO: 73292 - protein, 82 aa, Setaria italica
  Transcript Sequence Number=SeqID_7318
  Subcellular localization annotation: CTP_CleavageSite=20; ConfidenceScore=5.01e-01
FLPFPPVPSTLPRKQEQGTKASEAINESAPSRLQSNPVASSPTLPHGARQPPEPPLLRNRPPGAGFELIDFNGFSCGSNHDV

SEQ ID NO: 73293 - protein, 804 aa, Setaria italica
  Transcript Sequence Number=SeqID_7319
  Homolog annotation: Hit_ID=B9RR38; Match level="QueryCoverage=98%, HitCoverage=97%, E-value=0.0, Identity=50%"; Hit description =Phosphoinositide 5-phosphatase, putative
  Pfam annotation: Domain name=Syja_N; Domain location=91-394; Score =415.7; E_value=7.3e-122; Accession=PF02383.10; Description=SacI homology domain
MAAVSAAMEQEAEATFLQSFELHESESTLYILGTNSDKTLWRLLKIDRSEPSELVIDECSTVYTESEHYDLLKGLDEDHRSTGGVKFVAKFYGIIGFIKFLGPYYMLIITEQKKIGEIFGHPVYQVTRTAMVELANSKTRSTFQSSKDENRYKKILNALDLRKDFFFSYSYHIMRSLQKNLSDPHQEGWTLYETMFVWNEFLTRRIRNCLRNTLWTVALVHGFFKQDKFSISGKDIMLTLIARRSRHYAGTRYLKRGVNEKGRVANDVETEQIVYEAVPGPSEVSSVVQNRGSIPLFWSQETSKLNLKPNIILHEMDSDYEATKLHFENLRARYGNPIIILNLIKTRERRESILRREFDKAIKIINKGLSEENHLRFLHWDLHQNSQGKPTNVLDVLLKVAFRALSLTEFFYCQIAPSSETAGHWPTLLSGLDPYLCDDNSNSDNTECTEIVGDISQEDISGSSDSSGNATAEDKVDNSELPPLKPPKFQKGVLRTNCIDCLDRTNVAQYAYGLAALGHQLHALGSIESPELGLEAPLAHHLMHFYESMGDTLAVQYSGSAAHNKIFSAKRGHLKLFIQSQEFFRTLQRHYSNTCIDANKQAAINLFLGYFQPQQEKPALWELESSSGEHNNELFDDHPSTLKRIKSDGGFLHESNASISGSGHCHNEPLSESQPDVQSGLQVPNLESDSVHENEVSSGYESGVSHLRYTPTASDILHVPRAETEYVNDSGDSNFLDLEWLSTSGNSSDERSIATSTPDANLSTENVISGITPDVVENQVAEIQAQKLPEDFVQWVNHGDTFWF

SEQ ID NO: 73294 - protein, 73 aa, Setaria italica
  misc_feature (14)..(14): Xaa can be any naturally occurring amino acid
  Transcript Sequence Number=SeqID_7320
  Homolog annotation: Hit_ID=B6TGB5; Match level="QueryCoverage=98%, HitCoverage=23%, E-value=2e-17, Identity=67%"; Hit description =Phosphopantothenate--cysteine ligase
SNILLQKAEMALKXYGMNVVVANELANYKDVVVMVTSSGRTTVSRSSKEEDLEKQLTELLVKMHSEHITQPSS

SEQ ID NO: 73295 - protein, 155 aa, Setaria italica
  Transcript Sequence Number=SeqID_7321
  Gene Ontology: Cellular component=plasma membrane
  Homolog annotation: Hit_ID=B6SI20; Match level="QueryCoverage=41%, HitCoverage=15%, E-value=3e-14, Identity=54%"; Hit description=Ovate protein
  Pfam annotation: Domain name=DUF623; Domain location=78-137; Score =119.9; E_value=8.5e-33; Accession=PF04844.5; Description=Protein of unknown function, DUF623
KADRQAGEIASKQPTPPPPLPLPPEQLKAHSTDKGGKKEDASIFPTPQAAPPKHRRAKSCDGTGAGRLDGSVAVVKQSDDPLSDFRRSMVNMVVENRIATGDELRELLRHFLALNAPHHHDAILRAFTEIWDEAFSATASKTPHREPATRRPTPP

SEQ ID NO: 73296 - protein, 293 aa, Setaria italica
  Transcript Sequence Number=SeqID_7322
MTVDAALLAAVVAFLLPLRLISLALRLAYKGCGASGRHLRRSCAALAVAGALLAVIFALPRDRAGECAVPGTTVIDGEELRSEVEQLKLQLARLESLWDNNLKALNEKGDTLEKVLGKKGDPLEEEDGRVMRAMGLDIQSLINEQENIKESSCSSDFGDNIKAMEDEVRLIKDESSKMNSDIHSVWALAKDATEKVEALHSDIKKGQVLTDEWGKMNSSINRLWSFVKGTEKKVEGLCSDIKKVQHITGEWGKMNFNRMWSFAKDTEKKVEDLYSDIKKGFKQTKRKVPFMRT

SEQ ID NO: 73297 - protein, 393 aa, Setaria italica
  misc_feature (380)..(380): Xaa can be any naturally occurring amino acid
  Transcript Sequence Number=SeqID_7323
  Gene Ontology: Cellular component=microtubule organizing center; Biological process=microtubule cytoskeleton organization and biogenesis
  Homolog annotation: Hit_ID=Q7XUI5; Match level="QueryCoverage=99%, HitCoverage=32%, E-value=1e-159, Identity=72%"; Hit description =OSJNBa0005N02.6 protein
  Pfam annotation: Domain name=Spc97_Spc98; Domain location=19-392; Score=-95.1; E_value=0.048; Accession=PF04130.5; Description=Spc97 Spc98 family
SPRHEPIYELASVTDDALVRLALHALHGVKSSLDEIDELFMVFSSNPADRTSSRVANVWSHSSSTTSVGHILKSIRSTGLAVFFLCKFVHFYLIQSREKNCASGGRHECEGSDDKDTEQHQPFSLVNQAFAAAVEKALEGYLCSLNTLPASIKLRRSFAQCMPSKISDGVSCNSTSEVTLLEVYLHTEELRRHVKSLGNIGYPKFAGLTLCQEGLNTDANVEFENFPRGTDLLSYLYVHLRDADPVHYGFLKYLFIRSCEPYFNFIKSWIYRASVDDPYEEFLITQTENKDARGDSSDILDEFTLFPLKGRNHVSAPCFLKEICHPLLRTGQQLQVLLKLLKSCNLSATGRDAYPSHNTIRMEGVLPWFDTPIESSMNSXFTFYKKCVEAVTC

SEQ ID NO: 73298 - protein, 85 aa, Setaria italica
  Transcript Sequence Number=SeqID_7324
MKRPLRRSFAVLVFVVLVGAASFSAALLRAVVPAPAREPPLDPARLNATLLRLAAVDPSEAPLRRDVDELLEGRLPASAARARAS

SEQ ID NO: 73299 - protein, 40 aa, Setaria italica
  Transcript Sequence Number=SeqID_7325
  Homolog annotation: Hit_ID=Q8LSN5; Match level="QueryCoverage=100%, HitCoverage=32%, E-value=9e-15, Identity=100%"; Hit description =Nuclear matrix protein 1 (Fragment)
DNPEWSVDEQLAKDVQLVDSIAEKQAQIFSEECKLFPADV

SEQ ID NO: 73300 - protein, 328 aa, Setaria italica
  Transcript Sequence Number=SeqID_7326
  Homolog annotation: Hit_ID=B6THZ5; Match level="QueryCoverage=100%, HitCoverage=100%, E-value=0.0, Identity=97%"; Hit description =Nuclear matrix protein 1
  Pfam annotation: Domain name=Plant_NMP1; Domain location=1-324; Score= 917.3; E_value=7.5e-273; Accession=PF06694.3; Description=Plant nuclear matrix protein 1 (NMP1)
MASKQMEEIQRKLSLLAYPRANAPAQSLLFAGVERYRLLEWLFFRLLGDRSPFTQQNWQGDSLDRDEENNRIQHLAEIANFLGITPSVDTEAIQGRGSYEERVELLRLIVDLVEASCYADNPEWSVDEQLAKDVQLVDSIAEKQAQIFSEECKLFPADVQIQSIYPLPDIAELELKLSEYTKKMSNLQQMVQELASKYDYNPNEDYAETELKLREHLQSFLETVKSFNTIYTKEIHPWTHMMEVPQLHGFGPAANRLLEAYNTLLKFLGNLRSLRDSYTAMAAGSLSASNEPSSVTKIISDCESALTFLNHSLSILSTSVAREQGETL

SEQ ID NO: 73301 - protein, 566 aa, Setaria italica
  Transcript Sequence Number=SeqID_7327
  Homolog annotation: Hit_ID=Q56W45; Match level="QueryCoverage=88%, HitCoverage=70%, E-value=2e-61, Identity=34%"; Hit description=BZIP -like protein
  Pfam annotation: Domain name=DUF632; Domain location=132-438; Score =411.1; E_value=1.8e-120; Accession=PF04782.4; Description=Protein of unknown function (DUF632)
DELHGDASMDEDEDDDDTDSCSTPLPPPLPPGVAWEDLDPYNSLNFPSPFADRNDREVASQVTMDDDPWVETNLEFDGEEDESVLDNDDGVVNRVQMNPVKSRALGDDNSSMVGWVTKDSDSTSVPWRNQKSLVQIVKEIDEYFLKAAASGSDVVILLDSAGGRPDALEIETKKVTGKNSKSAKVFSTLSWSWSFKSQHANSESSVLKSSDASGYGYHGKTLEKLYDEEQKLYKLVKDEEFARLQYKRHISMLQKLESGDHDKLHAERVRDAIEELQTRIISLEEAVSLACFSISKLRDEELYPQIIELSAGLVHMWRNMYECHQVQNNIAQQGSLLYNGPGGEPTSDSQFQATSQLEIEVSGWHSAFCNLITLQREYISILNQWIKLTDCLPDDDGLMKSSSGIRSLSEELQRALERLPEKVAAEAIKTFMSAIHSIVVQQSEERQLKKKSDNMESKFQTQLEKHSENAMQNSAQPPNKNQYSVSKNEMKLDAFRKQVEEEKARYLTSVKTSRTMTLNNLQTGLPKVFHALMGFSGVCVQAFEGISRCSEVAVSHSGAVSPAICA

SEQ ID NO: 73302 - protein, 454 aa, Setaria italica
  Transcript Sequence Number=SeqID_7328
  Gene Ontology: Mol. function=transferase activity, transferring groups other than amino-acyl groups
  Homolog annotation: Hit_ID=B6TPL4; Match level="QueryCoverage=95%, HitCoverage=95%, E-value=0.0, Identity=88%"; Hit description =Transferase
  Pfam annotation: Domain name=Transferase; Domain location=25-454; Score=358.7; E_value=1.1e-104; Accession=PF02458.7; Description =Transferase family
MVVEMKENGVAAAADAGEKVAQPQLNVKRGEPTLVPPAAPTPTGEQYYLSNLDQNIAVIVQTVYCYKPSPPGDGKDKDDVATALRDALARVLVHYHPLAGRLGISPEMKLTVELTAEGVVFVEGDADCDLAVVGDLTKPDPAALGQLVYSVPGAKHILEMPPMTAQVTRFSCGGFALGLAMNHCMFDGIGAMEFVNSWAETARGAAELTVPPFLDRSLLKARDPPAHTFPHHEFAEIPDVSDTAALYGSQELLYRSFCFDPDRLERVRALALAGGDLARCTTFEALSGLVWRARTRALGLAPEQRTKLLFAVDGRRRFVPPLPRGYFGNGIVLTNAIATAGELLSAPVSRAAALVQDAVRMVTDEYMRSAVDYFEATRARPSLASTLLITTWSRLEFHGADFGWGEPVMSGPVTLPEKEVILFLAHGKERKSINVLLGLPATAMDAFQELMDEI

SEQ ID NO: 73303 - protein, 95 aa, Setaria italica
  Transcript Sequence Number=SeqID_7329
  Gene Ontology: Mol. function=nucleoside-triphosphatase activity
  Homolog annotation: Hit_ID=B6TNP7; Match level="QueryCoverage=56%, HitCoverage=11%, E-value=1e-20, Identity=84%"; Hit description=ATP binding protein
MPLRAASGAGAGALVAIAYAAVALAALRLLLSYKSALYALRRLWRCADEWAQAYQYHEVPRFACDGAENPLFRKAAAYVAALPSLEDADATSVLS

SEQ ID NO: 73304 - protein, 145 aa, Setaria italica
  Transcript Sequence Number=SeqID_7330
  Gene Ontology: Mol. function=DNA binding; Cellular component=nucleus; Biological process=regulation of transcription
  Homolog annotation: Hit_ID=Q6H7C6; Match level="QueryCoverage=96%, HitCoverage=45%, E-value=9e-19, Identity=45%"; Hit description =ATMYB4-like protein
RWSQIARHLPGRTDNEVKNYWNSYLKKRVEGGAQAKCAADPATPAGSDVRAGSPNPRDNGRERANHPASSDSSEPVESSSADDSSCLTVTEPARAGAVRPHAPVLPKVMFADWLDMDYGTSLAALGPDAGVFDVSGRSPGQGLSH

SEQ ID NO: 73305 - protein, 91 aa, Setaria italica
  Transcript Sequence Number=SeqID_7331
  Gene Ontology: Mol. function=microtubule motor activity; Cellular component=nuclear chromosome, telomeric region; Biological process =microtubule-based movement
  Homolog annotation: Hit_ID=Q7XJW0; Match level="QueryCoverage=95%, HitCoverage=5%, E-value=1e-21, Identity=60%"; Hit description =OSJNBa0016O02.10 protein
MFVHVNPETDSFIETMSTLKFAERVATIELGAARANKEVGQVKDLKEEIAKLKLALDEKEREAAQFKDLANRVTSEVRNARTRSPLTPACP

SEQ ID NO: 73306 - protein, 215 aa, Setaria italica
  Transcript Sequence Number=SeqID_7332
  Gene Ontology: Mol. function=oxidoreductase activity; Biological process=oxidation reduction
  Homolog annotation: Hit_ID=Q7XUK0; Match level="QueryCoverage=100%, HitCoverage=73%, E-value=1e-95, Identity=79%"; Hit description =OSJNBa0067K08.7 protein
PDSVAEFAAWLRDAVGGLDILVNNAAVSFNEIDTNSVEHAETVLRTNFYGAKMLTEALLPLFRQSPATSRILNISSQLGLLNKVSDPSLTALLLDEDTLTEAAIESMVSRFLSQVKDGTWGGQGWPKVWTDYSVSKLALNAYSRVLARRLQARGARVSVNCFCPGFTRTDMTKGWGKRTAEEVADVGARLALLPPAELPTGTFFKWCTPQLYSKL

SEQ ID NO: 73307 - protein, 42 aa, Setaria italica
  Transcript Sequence Number=SeqID_7333
ALQVPTVDGQLRISSCQQYKLVREESLVALAAAAVRVLADMN

SEQ ID NO: 73308 - protein, 235 aa, Setaria italica
  misc_feature (58)..(58): Xaa can be any naturally occurring amino acid
  Transcript Sequence Number=SeqID_7334
  Pfam annotation: Domain name=PAP2; Domain location=97-216; Score= -14.4; E_value=0.081; Accession=PF01569.13; Description=PAP2 superfamily
WGRCPEWCSAAGVAGVLRRHPLPALFACGLLLFMAVEYTIPMVRPGAPPLDLGFVATXGMHDAVAARPWLNSLLAALNTVFVAMQAGYILWAILVEQRPRAAVAALMMFTSRGVLGCATQLPLPAEFLGSGMDFPVGNVSFFLFFSGHVAGAVIAAADMRREGRVALARLYDALNVLQGVRLLACRGHYTIDLAVGVGAGILFDTIAGWYFDVMNGDGKNAHCRSCQCHKALLSH

SEQ ID NO: 73309 - protein, 68 aa, Setaria italica
  Transcript Sequence Number=SeqID_7335
CYLVLYLDNDTHVSLADRKENLFMASSNYRGEREEHVGPHDRDVVHTSLYSAWHRLTPGVAPRTSTLA

SEQ ID NO: 73310 - protein, 90 aa, Setaria italica
  Transcript Sequence Number=SeqID_7336
VKKAMAQIRKRIILVWILKAARKYLNIHTALAFLHSILVLSCSLMKIDHSVARYHSPVFRTRQMFIRNVVLLATRYCCHVHSAEPSCREL

SEQ ID NO: 73311 - protein, 415 aa, Setaria italica
  Transcript Sequence Number=SeqID_7337
  Gene Ontology: Mol. function=transferase activity; Cellular component= cytoplasm; Biological process=amino acid biosynthetic process
  Homolog annotation: Hit_ID=Q01L58; Match level="QueryCoverage=87%, HitCoverage=67%, E-value=1e-166, Identity=79%"; Hit description =OSIGBa0142C11.1 protein
  Pfam annotation: Domain name=AA_kinase; Domain location=154-369; Score=66.3; E_value=1.1e-16; Accession=PF00696.20; Description=Amino acid kinase family
  Pfam annotation: Domain name=MADF_DNA_bdg; Domain location=13-95; Score=16.4; E_value=0.0068; Accession=PF10545.1; Description=Alcohol dehydrogenase transcription f
  Pfam module annotation: Pfam domain module=AA_kinase::MADF_DNA_bdg; Domain location=154-369::13-95
NRKEWTDGAISSLLDAYTDRFEQLNRGNLRGRDWEDVAGAVTDGQGKTTGGKSVEQCKNKIDNLKKRYKVECQRLASSSGGAVSHWPWFKKMEQIVGNSASPASSKPLATAEDEKPSQQQQQQHGSKRYPLSSAGPITVVGSSRANPLSNPRWKRVLLKIGGTALAGPAPQNVDPKIIMLIAREVQVACHHGVEVAIVVGGRNIFCGDNWVAATGTDRASTYPIGMMASVMNSVLLQASLEKIGVETRVQTALMIQEVAEPYVRRRAIRHLEKGRVVIFGGIGAGIGNPLFTTDTAAALRASETDMERNADVVLKGIVGDEEYGCPPRSNNNAPFEHISFREFAARGFSRMDMTAVTCCEENNIPELQDMSILWGTSCILCLHGIFWIGEVKHVHQTEACTLTCPGMLVVYYVLW

SEQ ID NO: 73312 - protein, 212 aa, Setaria italica
  misc_feature (18)..(18): Xaa can be any naturally occurring amino acid
  Transcript Sequence Number=SeqID_7338
  Gene Ontology: Mol. function=transferase activity; Cellular component= cytoplasm; Biological process=amino acid biosynthetic process
  Homolog annotation: Hit_ID=Q01L58; Match level="QueryCoverage=96%, HitCoverage=39%, E-value=1e-98, Identity=82%"; Hit description =OSIGBa0142C11.1 protein
  Pfam annotation: Domain name=AA_kinase; Domain location=1-185; Score =18.6; E_value=1.9e-06; Accession=PF00696.20; Description=Amino acid kinase family
CHHYYKVKVQVACHHGVXGGRNIFCGDNWVAATGTDRASTYPIGMMASVMNSVLLQASLEKIGVETRVQTALMIQEVAEPYVRRRAIRHLEKGRVVIFGGIGAGIGNPLFTTDTAAALRASEISADVVLKGIVGDEEYGCPPRSNNNAPFEHISFREFAARGFSRMDMTAVTCCEENNIPVVIFNMLEPGNISRAICGDQIGTLVDQSGRIT

SEQ ID NO: 73313 - protein, 81 aa, Setaria italica
  Transcript Sequence Number=SeqID_7339
  Gene Ontology: Mol. function=RNA binding
  Homolog annotation: Hit_ID=Q1SL18; Match level="QueryCoverage=87%, HitCoverage=14%, E-value=7e-09, Identity=46%"; Hit description=KH
VDARLNQAVAILEDLLKPVVCTLTCFQYLSCFLTGITHLINCCHPQDESMDYYKKQQLRELAILNGTLREESPSSHLSPSV

SEQ ID NO: 73314 - protein, 74 aa, Setaria italica
  Transcript Sequence Number=SeqID_7340
  Gene Ontology: Mol. function=RNA binding
  Homolog annotation: Hit_ID=Q1SL18; Match level="QueryCoverage=98%, HitCoverage=24%, E-value=1e-15, Identity=58%"; Hit description=KH
VPADSVDARLNQAVAILEDLLKPVDESMDYYKKQQLRELAILNGTLREESPSSHLSPSVSPFNSTGMKRAKTGR

SEQ ID NO: 73315 - protein, 139 aa, Setaria italica
  Transcript Sequence Number=SeqID_7341
  Subcellular localization annotation: CTP_CleavageSite=8; ConfidenceScore=5.31e-01
GGRGGRCCARALACPFAFAAPLPLALGAAAFLARMASSVSTYFCTRFSCIRRCTLTSPSAAMESSLTSSFMSASVRVTTSASTTLPPLPTMVSSADTLVASLSTSRLTREMDLAARSALSVRRCSRRRLACAAGFLRSL

SEQ ID NO: 73316 - protein, 88 aa, Setaria italica
  Transcript Sequence Number=SeqID_7342
  Gene Ontology: Mol. function=protein binding; Biological process =protein modification process
  Homolog annotation: Hit_ID=B6TFJ9; Match level="QueryCoverage=100%, HitCoverage=26%, E-value=1e-32, Identity=78%"; Hit description =Protein binding protein
MMRTRPKGTFADAMRESSPPAAPAPGSAAAAVKEDEWEVRPGGMLVQKRSSDADAPAGAPVPTIRVKVKFNGVYHEIYINSQASFGEL

SEQ ID NO: 73317 - protein, 391 aa, Setaria italica
  Transcript Sequence Number=SeqID_7343
  Gene Ontology: Mol. function=protein binding; Biological process =protein modification process
  Homolog annotation: Hit_ID=B6TDC6; Match level="QueryCoverage=85%, HitCoverage=100%, E-value=1e-104, Identity=64%"; Hit description =Protein binding protein
  Pfam annotation: Domain name=BAG; Domain location=219-300; Score =28.0; E_value=3.7e-05; Accession=PF02179.8; Description=BAG domain
  Pfam annotation: Domain name=PB1; Domain location=128-199; Score =12.3; E_value=0.015; Accession=PF00564.16; Description=PB1 domain
  Pfam annotation: Domain name=ubiquitin; Domain location=132-201; Score=21.2; E_value=0.0022; Accession=PF00240.15; Description =Ubiquitin family
  Pfam module annotation: Pfam domain module=BAG::PB1::ubiquitin; Domain location=219-300::128-199::132-201
  Subcellular localization annotation: CTP_CleavageSite=47; ConfidenceScore=5.10e-01
PPSNSLHPRRVLPWRAIARSLVRSCLGQRRGQAAPPRALLTGSGSLRGEREQGGDRMLGATPKARKGEPAKLGSAKEAPPAAAPTAAGNGRVTAEEVWEVRPGGMLVQKRSGGVSDDEPSRNVKPVPTIRVKVKHAGVTHEIYISSEASFGELKKLVAAKTGLHPDDQKVLYKDKERDSKAFLDMAGVKDRSKLVVVEDPEAKARRLIEQRRNGHLEKAAKAVAAVTAEVDKLAPKVAALDASVRKGEKVAENDVVQVTELLMNELLRLDAVVADGDVKAQRRMQVKRVQKYVETLDAVAAKNAAIIRKSGEKAAAKQQPPPPQQQQQQPRQQYNHHQQQQPAAAAGQTRWEMFDLLSSLPSTSSASSTTTVSSTASSGAPPTNRLDWMLF

SEQ ID NO: 73318 - protein, 275 aa, Setaria italica
  Transcript Sequence Number=SeqID_7344
  Gene Ontology: Mol. function=protein binding; Biological process =protein modification process
  Homolog annotation: Hit_ID=B6TTR9; Match level="QueryCoverage=80%, HitCoverage=70%, E-value=2e-98, Identity=83%"; Hit description =Protein binding protein
  Pfam annotation: Domain name=BAG; Domain location=174-255; Score =26.0; E_value=0.00016; Accession=PF02179.8; Description=BAG domain
  Pfam annotation: Domain name=ubiquitin; Domain location=89-156; Score= 13.5; E_value=0.013; Accession=PF00240.15; Description=Ubiquitin family
  Pfam module annotation: Pfam domain module=BAG::ubiquitin; Domain location=174-255::89-156
SARLECTYILYLPARTVDRYRRRRSKKMMRGGREQQRVAFSPTMKEAAAVPKEEVWEVRPGGMLVQKRSPDADPPPGGAPVPTIRVKVKCNGVYHEIYINSQASFGELKKLLSEKTGLHPDDQKVVYKDKERDSKAFLDMAGVKDRSKMLMLEDPAAKAKRLLEERRTNKAERAAKAITRVALDVGKLAAKVSALETIVSKGGKVVDADVVALTEALMNELVKLDSIAADGEVKEQRRAQEKQVQKHVESLDAIRAKNKTAAAAAAAPKANNKAR

SEQ ID NO: 73319 - protein, 127 aa, Setaria italica
  misc_feature (64)..(64): Xaa can be any naturally occurring amino acid
  Transcript Sequence Number=SeqID_7345
  Gene Ontology: Mol. function=pyridoxal phosphate binding; Biological process=amino acid metabolic process
  Homolog annotation: Hit_ID=B6THR6; Match level="QueryCoverage=100%, HitCoverage=34%, E-value=7e-53, Identity=77%"; Hit description=L -allo-threonine aldolase
LGSKAFIDKARILRKTLGGGMRQVGVLCAAAQVAVRDTLGKLEDDHRKAKALAGFIFSFWNLSXTSASVETNMVFFDITNPRISPDNLCQVLEQHNVLAMPASSKSIRFVLHYQISDSDVQYALTSV

SEQ ID NO: 73320 - protein, 116 aa, Setaria italica
  Transcript Sequence Number=SeqID_7346
  Subcellular localization annotation: CTP_CleavageSite=89; ConfidenceScore=5.83e-01
QRQMAPASGGSSRAPRLRPRPVPLFQGARALRLSSSIKDSRSASRRPRPPPRPALSGSLRSDRRPRVPSPTHRPSRPGSRQVEVLRPIAGSPGRDATPLVIPVYCTLKASVAPLQR

SEQ ID NO: 73321 - protein, 150 aa, Setaria italica
  Transcript Sequence Number=SeqID_7347
  Gene Ontology: Mol. function=pyridoxal phosphate binding; Biological process=amino acid metabolic process
  Homolog annotation: Hit_ID=B6THR6; Match level="QueryCoverage=99%, HitCoverage=40%, E-value=5e-64, Identity=77%"; Hit description=L -allo-threonine aldolase
TIPSGKILRKTLGGGMRQIGVVCAAAYVAVRDTVGKLADDHRKAKALAEGLKKIKQFKVDSASVETNMVFFDIMDPRISPDNLCQVLEQHNVLAMPASSKSIRFVLHYQISDSDVQYALTSVEKAIEELLKGGTNLDQLTNGTTRSSYGH

SEQ ID NO: 73322 - protein, 164 aa, Setaria italica
  Transcript Sequence Number=SeqID_7348
  Gene Ontology: Mol. function=pyridoxal phosphate binding; Biological process=amino acid metabolic process
  Homolog annotation: Hit_ID=B6THR6; Match level="QueryCoverage=98%, HitCoverage=43%, E-value=3e-68, Identity=80%"; Hit description=L -allo-threonine aldolase
  Pfam annotation: Domain name=Beta_elim_lyase; Domain location=1-161; Score=61.6; E_value=3e-15; Accession=PF01212.13; Description=Beta -eliminating lyase
ALLYPTTRLICLENTHANCGGKCLSAEYTDKVGEVAKSHGLKLHIDGARIFNASVALGVPVDRLVKAADSVSVCLSKGLGAPVGSVIVGSQAFIDKAKILRKTLGGGMRQVGVLCAAAHVAVRDSVEKLADDHRRAKAFGLGFLCFFWNLTSLHFDIHCSLVFN

SEQ ID NO: 73323 - protein, 196 aa, Setaria italica
  misc_feature (86)..(86): Xaa can be any naturally occurring amino acid
  Transcript Sequence Number=SeqID_7349
  Gene Ontology: Mol. function=pyridoxal phosphate binding; Biological process=amino acid metabolic process
  Homolog annotation: Hit_ID=B6THR6; Match level="QueryCoverage=98%, HitCoverage=51%, E-value=4e-78, Identity=76%"; Hit description=L -allo-threonine aldolase
  Pfam annotation: Domain name=Beta_elim_lyase; Domain location=7-195; Score=176.7; E_value=6.5e-50; Accession=PF01212.13; Description=Beta- eliminating lyase
MVTKVVDLRSDTVTKPTEAMRAAMAAADVDDDVLGADPTAQRFEAEMAKLMGKEAALFVPSGTMANLVSVLVHCDVRGSEVILGDXSHIHIYENGGISTIGGVHPRTVKNNPDGTMDIDKIVAAIRNRAGALLYPTTRLICLENTHANCGGKCLSAEYTDKVGEVAKSHGLKLHIDGARIFNASVVNSMGSPILNF

SEQ ID NO: 73324 - protein, 234 aa, Setaria italica
  Transcript Sequence Number=SeqID_7350
  Gene Ontology: Mol. function=pyridoxal phosphate binding; Biological process=amino acid metabolic process
  Homolog annotation: Hit_ID=B6TA00; Match level="QueryCoverage=99%, HitCoverage=62%, E-value=1e-103, Identity=78%"; Hit description=L -allo-threonine aldolase
  Pfam annotation: Domain name=Beta_elim_lyase; Domain location=1-158; Score=73.4; E_value=8.3e-19; Accession=PF01212.13; Description=Beta -eliminating lyase
FVYFSNCSCSCGGKCLSVEYIDKVGEIAKNHDLKLHIDGARIFNASVALGVPVDRLVKAADSVSVCLSKGLGAPVGSVIVGSKAFIDKARILRKTLGGGMRQVGVLCAAAHVAVRDSVEKLADDHRRAKALAEGLNKMEQFTVDSTSVETNMVFFDIVDSRISSYKLCQILEKHNVHVNPRSPKSVRLVLHYHISDSDVQYALTCFEKVVEELLTGGAKIEHLADGTSKNSYGY

SEQ ID NO: 73325 - protein, 116 aa, Setaria italica
  Transcript Sequence Number=SeqID_7351
  Gene Ontology: Mol. function=prephenate dehydratase activity; Biological process=L-phenylalanine biosynthetic process
  Homolog annotation: Hit_ID=B6UA96; Match level="QueryCoverage=95%, HitCoverage=28%, E-value=8e-46, Identity=83%"; Hit description=P -protein
DREPVEDTAGAVEMLRSNRMLDTAAIASPRAADLYGLDVLAHGLQDESWNVTRFLLLSRPPPPVALPVDADAKTSMVVAHRGGSMMVLLKVLSAFSSRNINLTKLEVINNDGAAAP

SEQ ID NO: 73326 - protein, 76 aa, Setaria italica
  Transcript Sequence Number=SeqID_7352
  Subcellular localization annotation: CTP_CleavageSite=47; ConfidenceScore=5.35e-01
GAAAATLAGTDSCRNGFRFLGLARRPGLASKASYSVTPPSVAALQCRARKEPEPPGRVTPPCLASRCDAVVWGAGG

SEQ ID NO: 73327 - protein, 136 aa, Setaria italica
  misc_feature (27)..(27): Xaa can be any naturally occurring amino acid
  misc_feature (131)..(131): Xaa can be any naturally occurring amino acid
  Transcript Sequence Number=SeqID_7353
  Gene Ontology: Mol. function=6-phosphofructokinase activity; Cellular component=6-phosphofructokinase complex; Biological process=glycolysis
  Homolog annotation: Hit_ID=B6SWS5; Match level="QueryCoverage=100%, HitCoverage=26%, E-value=1e-65, Identity=92%"; Hit description=6 -phosphofructokinase 2
  Pfam annotation: Domain name=PFK; Domain location=1-134; Score= -154.3; E_value=0.0041; Accession=PF00365.12; Description =Phosphofructokinase
MYGVTSVVGIEGGYKGFILNTIPLTPXSVNDIHKRGGTVLGTSRGGHDTAKIVDCLQDRGINQVYIIGGDGTQKGASVIYEEVRRRGLKCSVVGVPKTIDNDIAVIDKSFGFDTAVEEAQRAINAAHVELXSAENG

SEQ ID NO: 73328 - protein, 539 aa, Setaria italica
  Transcript Sequence Number=SeqID_7354
  Gene Ontology: Mol. function=6-phosphofructokinase activity; Cellular component=6-phosphofructokinase complex; Biological process=glycolysis
  Homolog annotation: Hit_ID=B6SWS5; Match level="QueryCoverage=89%, HitCoverage=91%, E-value=0.0, Identity=95%"; Hit description=6 -phosphofructokinase 2
  Pfam annotation: Domain name=PFK; Domain location=136-387; Score =20.8; E_value=2.8e-14; Accession=PF00365.12; Description =Phosphofructokinase
MEAVGVAPAPLAAPVKKKLLDLKDPFHGGSAAAASNGGKPSPAGKWAMKKKLAGGDAGYVLEDVPHLTDYLPELPTFPNPLQDNPAYSVVKQYFVNPDDTVTQKIVVHKTSARGTHFRRAGPRQRVYFQSDEVNAAIVTCGGLCPGLNTVVRELVCGLYDMYGVTSVVGIEGGYKGFYSKNTIPLTPKSVNDIHKRGGTVLGTSRGGHDTAKIVDCLQDRGINQVYIIGGDGTQKGASVIYEEVRRRGLKCSVVGVPKTIDNDIAVIDKSFGFDTAVEEAQRAINAAHVEAESAENGIGVVKLMGRNSGFIAMYATLASRDVDCCLIPESPFYLEGKGGLLEFIERRLKDNGHMVIVVAEGAGQDLIAKSMNFVDTQDASGNKLLLDVGLWLSQKIKDHFKKKPNFPITLKYIDPTYMIRAVKSNASDNVYCTLLAHSALHGAMAGYTGFTVAPVNGRHAYIPFYRITEKQNKVVITDRMWARVLCSTNQPCFLSHEDVENMKHDDDHEHHLHNTQLLEGESSPVKNSPKCNGSAPPAV

SEQ ID NO: 73329 - protein, 116 aa, Setaria italica
  misc_feature (96)..(96): Xaa can be any naturally occurring amino acid
  Transcript Sequence Number=SeqID_7355
  Gene Ontology: Mol. function=kinase activity; Biological process =carbohydrate metabolic process
  Homolog annotation: Hit_ID=Q6ETN0; Match level="QueryCoverage=57%, HitCoverage=11%, E-value=9e-30, Identity=92%"; Hit description =Putative ribulokinase
ALYASQSLRSIHLQTIDQDSCRFSFTHKSFGACISGETPPPQYCSTGELLAYRATGDDTRSLCTTVCKWTYLGHAHMEQWKESDSRDMEACGWDNXFWEEIGLGDLVEGNCAKIGE

SEQ ID NO: 73330 - protein, 135 aa, Setaria italica
  Transcript Sequence Number=SeqID_7356
  Gene Ontology: Mol. function=kinase activity; Biological process =carbohydrate metabolic process
  Homolog annotation: Hit_ID=Q6ETN0; Match level="QueryCoverage=100%, HitCoverage=19%, E-value=5e-41, Identity=65%"; Hit description =Putative ribulokinase
KIDTFLACGGLAKNSVYIQEHADIIGKSLLPAIMPLQLLTSSDASPFASYCAGCPIILPRENEPVLLGSAVLGAVAAKKFPGVRDAMKALNAAGKVVNPSSDPRVKKYHDAKYQIFRSLYEQQLSHRSTMEQALQ

SEQ ID NO: 73331 - protein, 466 aa, Setaria italica
  Transcript Sequence Number=SeqID_7357
  Gene Ontology: Mol. function=kinase activity; Biological process =carbohydrate metabolic process
  Homolog annotation: Hit_ID=Q6ETN0; Match level="QueryCoverage=100%, HitCoverage=84%, E-value=0.0, Identity=88%"; Hit description =Putative ribulokinase
  Pfam annotation: Domain name=FGGY_C; Domain location=192-440; Score =12.9; E_value=8.5e-08; Accession=PF02782.8; Description=FGGY family of carbohydrate kinases, C-terminal domain
NIIVWMDHRAVNQAERINASNSPVLQYCGGGVSPEMQAPKLLWVKENLQESWSMVCRWMDLSDWLAYRATGDDTRSLCTTVCKWTYLGHAHMEQWKESDSRDMEACGWDNVFWEEIGLGDLVEGNCAKIGRSVAFPGHPLGSGLTATAAKELGLLPGTPVGTSLIDAHAGGVGVMESIPDEELKADLSDEEAICHRMVLVCGTSTCHMAVSKNRLFVPGVWGPFWSAMVPEFWLTEGGQSATGALLDYIIENHVASPLLSNRASSQSISIYELLNKMLLSMSHEQISPFLSALTQDIHVLPDFHGNRSPMADPKSKGVIYGLTLDTSEKHLALLYLATIQGIAYGTRHIVEHCNAHGHKIDTLLACGGLAKNSVYIQEHADIIGCPIILPRENEPVLLGSAVLGAVAAKKFPGVRDAMKALNAAGKVVNPSSDPRVKKYHDAKYQIFRSLYEQQLSHRSTMEQALQ

SEQ ID NO: 73332 - protein, 52 aa, Setaria italica
  Transcript Sequence Number=SeqID_7358
YKSFPLFCTSTNVMPQELNYSLQRNQKSKTQLSTATLYVNYKSYVGTQIGID

SEQ ID NO: 73333 - protein, 122 aa, Setaria italica
  Transcript Sequence Number=SeqID_7359
  Subcellular localization annotation: CTP_CleavageSite=58; ConfidenceScore=5.34e-01
PTLHPPDLPPARRCRPLVAAAPSPVACSSSLPAPAACSPPLAARRRRRPPIPNNPYIVSSEKATKSYNLKYYISLHLGVILLKETMKSYNLKHYFTLHPWPYPSQVNFKSYTMKYFPSASWS

SEQ ID NO: 73334 - protein, 137 aa, Setaria italica
  Transcript Sequence Number=SeqID_7360
  Subcellular localization annotation: CTP_CleavageSite=63; ConfidenceScore=5.22e-01
IPVHGDLVQSYQTNCLQDLYCTLGARGSSDKRAATTSGRQIGRVESRTSGGRRCGAGRRRVPSAAPGRRVADPAVSRPETRDEQQRRRVEKRQIWRVRRARKYNVRWKKNPGQIEKKPNPSLTCTMLGIALVFITGH

SEQ ID NO: 73335 - protein, 115 aa, Setaria italica
  misc_feature (15)..(15): Xaa can be any naturally occurring amino acid
  misc_feature (72)..(72): Xaa can be any naturally occurring amino acid
  Transcript Sequence Number=SeqID_7361
EARLLVAAPEAAPFXAPVAAAGPAAPPVRRGEGAARLAGSSAGPGLPCGGIVVLLLILILVLALVVRGLEEXAAGLGKGDRGLVAGLRRQRLGPAVAVAGALVVGGGGWELGGVV

SEQ ID NO: 73336 - protein, 225 aa, Setaria italica
  misc_feature (30)..(30): Xaa can be any naturally occurring amino acid
  Transcript Sequence Number=SeqID_7362
  Gene Ontology: Cellular component=nuclear envelope; Biological process=intracellular protein transmembrane transport
  Homolog annotation: Hit_ID=B6TI12; Match level="QueryCoverage=100%, HitCoverage=68%, E-value=2e-97, Identity=79%"; Hit description=MPPN domain containing protein
  Pfam annotation: Domain name=MPPN; Domain location=66-154; Score =125.4; E_value=1.8e-34; Accession=PF05172.5; Description=MPPN (rrm -like) domain
SPSREEKPREGSPMDGVMTRNQDKQQSPNXPSGQQSQQQQKVALITLPPPREVARPEMPRDSAPAAGRVDEEEWVTVFGFSPGDTNLVLREFEKCGIVLRHVPGPRDANWMHILYQSRHDAQKALVKHGQQLNSVLIIGVKPVDARQQQYLNESMNENYQGSATVPFLSPPVAPSGFATRNALAPLPSNSMPNGSCNESSRGASGAIASPSKSILSKVMDLMFGL

SEQ ID NO: 73337 - protein, 249 aa, Setaria italica
  misc_feature (22)..(22): Xaa can be any naturally occurring amino acid
  misc_feature (96)..(96): Xaa can be any naturally occurring amino acid
  Transcript Sequence Number=SeqID_7363
  Gene Ontology: Mol. function=aspartic-type endopeptidase activity; Cellular component=chromatin; Biological process=DNA integration
  Homolog annotation: Hit_ID=Q688L2; Match level="QueryCoverage=85%, HitCoverage=12%, E-value=1e-63, Identity=57%"; Hit description =Putative polyprotein
  Pfam annotation: Domain name=rve; Domain location=1-123; Score=19.7; E_value=0.00025; Accession=PF00665.18; Description=Integrase core domain
  Subcellular localization annotation: CTP_CleavageSite=34; ConfidenceScore=5.27e-01
PLRLKSYTFATLTNFFSFVLLXRTQFGVVVKVVQCDNGREFDNSSFRTFFLTHGVYFCMSCPYTSPQNRRAERMIRSVNNIVRSLLFRVSLPPSYXVESLNAATHLLNLLPTKTLTSSTPHMALFGVTPSYTHLRLFGCSFYPNLSATTPHKLVPCSTLCIFLGYFANHKGYRCLDLSSNRVTISRHVVFDEATFPFAKQPSPPTNEDFDFLVEQPDVVPPPICSASSLLLAGPSLGATPWLYFFLNPR

SEQ ID NO: 73338 - protein, 147 aa, Setaria italica
  misc_feature (42)..(42): Xaa can be any naturally occurring amino acid
  misc_feature (76)..(76): Xaa can be any naturally occurring amino acid
  Transcript Sequence Number=SeqID_7364
  Subcellular localization annotation: CTP_CleavageSite=53; ConfidenceScore=5.27e-01
GSRRHSPVVTLYTATPYAGVLAGASPSLGPSSADGFPNWSMXTRSSLAPAAARAEAKDGAAAALRQPRQTRRRARXEAWGTRARQSTATSSGMPGIRSTCSMGPPRPPPTPLGFFILAAFLFACKLSLSLLSLLLRHAKGDRQGTRG

SEQ ID NO: 73339 - protein, 167 aa, Setaria italica
  Transcript Sequence Number=SeqID_7365
MFDERSLRPVNGTIHLADCKEYAVTEVGMVILEMHNGTHCTMMGVWYILGLKTNLISVRMLELQGCGLSLQGGVMRVTCKEQVIMKSIWINKGYRVIGNLKGGATIGRFSKYPNQEKKVVSSTTGTQISFAVKCKAAKVVTKPNSRRGEVASCWKEEDVVGPTSLYK

SEQ ID NO: 73340 - protein, 60 aa, Setaria italica
  Transcript Sequence Number=SeqID_7366
QASTQGRKVVGVFRFHVATVRPVHKAAQRKDGAPQLPREVLPVHTATEDGGACSPNLMLI

SEQ ID NO: 73341 - protein, 303 aa, Setaria italica
  Transcript Sequence Number=SeqID_7367
  Gene Ontology: Mol. function=peptidyl-prolyl cis-trans isomerase activity; Biological process=protein folding
  Homolog annotation: Hit_ID=B6SS56; Match level="QueryCoverage=78%, HitCoverage=77%, E-value=1e-127, Identity=91%"; Hit description =Isomerase
  Pfam annotation: Domain name=Rhodanese; Domain location=200-295; Score=39.0; E_value=1.8e-08; Accession=PF00581.12; Description =Rhodanese-like domain
  Pfam annotation: Domain name=Rotamase; Domain location=101-185; Score= 94.9; E_value=2.9e-25; Accession=PF00639.13; Description=PPIC-type PPIASE domain
  Pfam module annotation: Pfam domain module=Rhodanese::Rotamase; Domain location=200-295::101-185
  Subcellular localization annotation: CTP_CleavageSite=85; ConfidenceScore=5.81e-01
MLGLRARAAAQLPCPSPSPSSTPTTSLARFARLSPLAALAPLASAPPPARARAPPPASLSTNWGVTMRPGGTGSNSRPTTRVFCTAASSSQREGKELLVQHLLVGEKDVRLLVDLEKSIIAGGADLSDLAVEHSLCPSKENGGMLGWVRRGQMVPEFEEAAFSAPLNKVVRCKTKFGWHLLQVLAERDQCVLQDIDPQDLHTKMQDPSFLEGAQLIDVREPDEVAKASLPGFKVLPLRQFGTWGPVMTDEFNPQKDTYVLCHHGMRSMQVAKWLQSQGFKKVYNVTGGIHAYAVKADSSVPTY

SEQ ID NO: 73342 - protein, 126 aa, Setaria italica
  Transcript Sequence Number=SeqID_7368
  Gene Ontology: Mol. function=ubiquitin-protein ligase activity; Cellular component=ubiquitin ligase complex; Biological process =ubiquitin-dependent protein catabolic process
  Homolog annotation: Hit_ID=Q9AR60; Match level="QueryCoverage=73%, HitCoverage=22%, E-value=7e-09, Identity=34%"; Hit description =Photoperiod responsive protein
AAAESALRLLAEAARCGDGKAAIAADAAEVAAAVMGRMIRVGPAGREAAVVALWLSCCAGGGERRMREAVASAPEAVGKLLVVMQGDCAPTTSRMAGELLRAVRLEQERKGMAASYDSRTIHVMPY

SEQ ID NO: 73343 - protein, 177 aa, Setaria italica
  Transcript Sequence Number=SeqID_7369
  Gene Ontology: Biological process=response to stress
  Homolog annotation: Hit_ID=B6TGD5; Match level="QueryCoverage=100%, HitCoverage=100%, E-value=4e-99, Identity=97%"; Hit description =Ethylene response protein
  Pfam annotation: Domain name=Usp; Domain location=21-164; Score=40.0; E_value=9.6e-09; Accession=PF00582.18; Description=Universal stress protein family
MADSSAPTRVMMAVNESSLKGYPHPSISCRTAFDWTLSKLVRSNPGGFHFLFLHVQVPDEDGFDDMDSIYASPEDFRQMKQRDKIRGLHLLEYFVNQCHQLGIKCEAWIRHGDPKEVICSEVKRVQPDLLVVGSRGLGPFQRVFVGTVSEFCVKHAECPVITIKRKATEAPQDPVDD

SEQ ID NO: 73344 - protein, 106 aa, Setaria italica
  Transcript Sequence Number=SeqID_7370
  Subcellular localization annotation: CTP_CleavageSite=62; ConfidenceScore=5.40e-01
CHPRRGSFLAILAAAGFARAARRRDSARVAAGRRQGGALVGAPLRTQGVRPRGRGSGWPAARSAAGSGELPPLERRRRGLQRWRVGRGNFPAQVVGLWRARRNNIA

SEQ ID NO: 73345 - protein, 486 aa, Setaria italica
  Transcript Sequence Number=SeqID_7371
  Homolog annotation: Hit_ID=B9RZY6; Match level="QueryCoverage=98%, HitCoverage=25%, E-value=6e-82, Identity=57%"; Hit description =Neurobeachin, putative
  Pfam annotation: Domain name=WD40; Domain location=361-397; Score =21.1; E_value=0.0047; Accession=PF00400.24; Description=WD domain, G- beta repeat
YIRIGGLLGENFVVKQILPLLRNVILSCIDSSKMNKPEPQHSWNSFALIDGLSALEGLVSVLPIKAVLKELLQDQVCLHVKVLMQIHLDLRVIQVAATALVDLCRRIGPENTSIYVLPQLKELFAELAFSHESSGLSLLTKVLKTSEGNKSESITMESRIDLVFLFFPFFSSLVGIEKLRECCSTWFLLEQALQRLYNWKWEPSGDCSKNAENMKGQRFQPGNSISSEFVPTKLLFNGAGWSVPQSETTKTGRNAASSKPGSKLENETNSDNSYTSSSGNQPWFWFPSPDSSWGAPEFLGRGGGVRDELPWKIKASVLYSARAHPGALRSLAVHDDECTVFTGGVGPGFKGSIQRWELPNMNCTSGYYGHEEVVNSIRILSITGRVASCDGTIHIWNGQTGKLIAVHAESSTTFPLQTASIEQANMLNQDALSGGILSNAFRGSLYTTMHYMESDGILVAGMGNGSIRFIDISRDQKLHIYCLSRR

SEQ ID NO: 73346 - protein, 150 aa, Setaria italica
  misc_feature (17)..(17): Xaa can be any naturally occurring amino acid
  misc_feature (65)..(65): Xaa can be any naturally occurring amino acid
  Transcript Sequence Number=SeqID_7372
  Gene Ontology: Mol. function=thiosulfate sulfurtransferase activity; Cellular component=chloroplast; Biological process=sulfate transport
  Homolog annotation: Hit_ID=B6T9T9; Match level="QueryCoverage=98%, HitCoverage=53%, E-value=3e-65, Identity=80%"; Hit description =Thiosulfate transferase
  Pfam annotation: Domain name=Rhodanese; Domain location=21-138; Score= 82.4; E_value=1.6e-21; Accession=PF00581.12; Description=Rhodanese -like domain
NSEPTNIITFQTEFQPXLLWTLEKVAHNVAAKTYQQVDARSKGRFDGVAPEPREGVRSGHIPGSXSVPFPEMFDGAPRLLSTDELRQKFQQAGISLDHPIVVSCGSGVTACILALGLYRIGKHNVPVYDGSWTEWEAQSDSHYPKATTTA

SEQ ID NO: 73347 - protein, 100 aa, Setaria italica
  misc_feature (10)..(10): Xaa can be any naturally occurring amino acid
  Transcript Sequence Number=SeqID_7373
RDDASDYETXASFRIQALEQEIISLKQTLQRHNTLKGSARRDGAGKEPSFRVATDANAPAAIKRRATVSGSCIGSMRWGSQRRCASRILRVFARLAVFGR

SEQ ID NO: 73348 - protein, 158 aa, Setaria italica
  Transcript Sequence Number=SeqID_7374
  Gene Ontology: Mol. function=microtubule motor activity; Cellular component=microtubule associated complex; Biological process =microtubule-based movement
  Homolog annotation: Hit_ID=Q2R2P7; Match level="QueryCoverage=98%, HitCoverage=24%, E-value=3e-69, Identity=82%"; Hit description =Centromeric protein E, putative, expressed
  Pfam annotation: Domain name=Kinesin; Domain location=1-156; Score= -2.5; E_value=2.4e-15; Accession=PF00225.15; Description=Kinesin motor domain
ADPGIIPRAVRDVFDTVRQTDDREFLVRVSYMEIYNEEINDLLTLEGQKLAIKENLERGVYVAGLREEIVNSSEQVFELLQLGEANRHFGETNMNVRSSRSHTIFRMVIESSAKNQIDSGDPIRVSVLNLVDLAGSERNNKTGTEGVRLNEAGYINKS

SEQ ID NO: 73349 - protein, 51 aa, Setaria italica
  Transcript Sequence Number=SeqID_7375
MRDDGAAGSAAELLSPRLLVSPSSRVQELERFSHYVARQIGFDDVNECPHL

SEQ ID NO: 73350 - protein, 61 aa, Setaria italica
  Transcript Sequence Number=SeqID_7376
MAPTAASAAAGGPDDEAASALLELLQRVQTEALRALGPDGFDPKLYVDLPLATDERTAAAA

SEQ ID NO: 73351 - protein, 118 aa, Setaria italica
  Transcript Sequence Number=SeqID_7377
ISSRVCSSSDLTCQSKSESGSGESIYLGNSCVEETTTAISLSKSESCTPGLDLSRGFDSHNHQNTECAVLMESVESTVCADQAPCCGSSKGKTPALADCNSDFGDSLCNESKPASSEE

SEQ ID NO: 73352 - protein, 107 aa, Setaria italica
  Transcript Sequence Number=SeqID_7378
YHSPFVFFLFFFLILMCTALHDLPSRLLPLKFDIEACGFFISGVSTHFSSFSFLLQLQLIFLFSPFIFISGVRILFFSFSFHMLLLTSWFSLLQYYYTSVIKKYLEA

SEQ ID NO: 73353 - protein, 324 aa, Setaria italica
  Transcript Sequence Number=SeqID_7379
  Gene Ontology: Mol. function=transferase activity, transferring glycosyl groups
  Homolog annotation: Hit_ID=Q7XAG4; Match level="QueryCoverage=100%, HitCoverage=96%, E-value=1e-125, Identity=65%"; Hit description=GDP -fucose protein-O-fucosyltransferase 2
  Pfam annotation: Domain name=O-FucT; Domain location=4-311; Score= -116.8; E_value=0.00026; Accession=PF10250.1; Description=GDP-fucose protein O-fucosyltransferase
MAAILGRILVVPSQKVDYQYDRVLDIHHINDCIGRKVVITYEEFVDKRKKVSIDQFICYAASPPCFLDEDHIKKLKGLGISLGKIEAAWPEDAKLKEPKKRYVGDITPKFSTDAEVLAIGDMFYADIEDEWVNQPGGPLAHKCKTLIQPSRLIMLTAQRFVQTFLGGNYIALHFRRHGFLKFCNVKKESCFFPIPQAAECILRIVEKANAPVIYLSTDAADSETNLLQSLVVFNDRQVPLVKRPEHHSSEKWDALLYRNHMGGDNQVEAMLDKTICALSNVFIGSSGSTFTEDIIRLRRGWGSASHCDEYLCRGELPNYIAEQD

SEQ ID NO: 73354 - protein, 208 aa, Setaria italica
  misc_feature (87)..(87): Xaa can be any naturally occurring amino acid
  misc_feature (148)..(148): Xaa can be any naturally occurring amino acid
  misc_feature (153)..(153): Xaa can be any naturally occurring amino acid
  Transcript Sequence Number=SeqID_7380
  Gene Ontology: Mol. function=transcription factor activity; Cellular component=chloroplast; Biological process=regulation of transcription, DNA-dependent
  Homolog annotation: Hit_ID=Q9ZPL2; Match level="QueryCoverage=93%, HitCoverage=30%, E-value=1e-79, Identity=78%"; Hit description=Sigma factor SIG2A
  Pfam annotation: Domain name=Sigma70_r3; Domain location=62-143; Score=34.4; E_value=4.6e-07; Accession=PF04539.8; Description=Sigma -70 region 3
MLYLALAFYFRFLLQEGMQGLIRGAEKFDASKGFRFSTYSHWWIKQAMRKSVSEQSQIFRLPAHMVEASYRVKECTKRLRRKLRRRXPTNEEIAVDTGMPIKRVEAAVNLPKYSVSLDSKIGSTDMTYQVWLFYALISLCASYHTTKXQLNLXFQEVTADPSAETAEEMLNRLSMKKDVHQALDTLTAREKQVVVLRFGLEDGRIRTL

SEQ ID NO: 73355 - protein, 537 aa, Setaria italica
  Transcript Sequence Number=SeqID_7381
  Gene Ontology: Mol. function=transcription factor activity; Cellular component=chloroplast; Biological process=regulation of transcription, DNA-dependent
  Homolog annotation: Hit_ID=Q9ZPL2; Match level="QueryCoverage=100%, HitCoverage=100%, E-value=0.0, Identity=69%"; Hit description=Sigma factor SIG2A
  Pfam annotation: Domain name=HTH_10; Domain location=471-520; Score= -8.7; E_value=0.071; Accession=PF04967.4; Description=HTH DNA binding domain
  Pfam annotation: Domain name=Sigma70_r1_2; Domain location=222-257; Score=12.7; E_value=0.021; Accession=PF00140.12; Description=Sigma -70 factor, region 1.2
  Pfam annotation: Domain name=Sigma70_r2; Domain location=300-370; Score=70.6; E_value=5.7e-18; Accession=PF04542.6; Description=Sigma -70 region 2
  Pfam annotation: Domain name=Sigma70_r3; Domain location=374-455; Score=97.0; E_value=6.6e-26; Accession=PF04539.8; Description=Sigma -70 region 3
  Pfam annotation: Domain name=Sigma70_r4; Domain location=467-520; Score=101.7; E_value=2.5e-27; Accession=PF04545.8; Description=Sigma- 70, region 4
  Pfam module annotation: Pfam domain module=HTH_10::Sigma70_r1 _2::Sigma70_r2::Sigma70_r3::Sigma70_r4; Domain location=471-520::222 -257::300-370::374-455::467-520
  Subcellular localization annotation: CTP_CleavageSite=36; ConfidenceScore=5.72e-01
MACLAPQFKWAPSATAHATSSSSRCSALRVHCAVTSAAAVVDTDRANGGGAAQLRLAFSAPALQRNFESTLASEALLNEEAVVEAAAAEAVALARAAAEAALEVVQMVQNNNHQPVIRQKKVVDSYLANEILRTEIQPSSPDGYANDVLLEDFESYGIMAGGGELDDDAQYTENIAVKSARQSERRARRTRAAIKAATTVRASQKTATSSKKKRPKGSSPSMNPLGSLWKMTGRRLLTAKEEVEFSEGIQDLLKLEAIQAELTEYNGGQPTFSQWATAARTDEKTLRKRLDHGIYCKNRMVTSNVRLVISIAREFEGPGMDLYDLIQEGMQGLIRGAEKFDASKGFRFSTYSHWWIKQAMRKSVSEQSQIFRLPAHMVEASYRVKECTKRLRRKLRRRPTNEEIAVDTGMPIKRVEAAVNLPKYSVSLDSKIGSTDMTYQEVTADPSAETAEEMLNRLSMKKDVHQALDTLTAREKQVVVLRFGLEDGRIRTLQEIGNIMGVSRERIRQIESGAFRKLRSKKRVKALKDYLVPVGNW

SEQ ID NO: 73356 - protein, 364 aa, Setaria italica
  misc_feature (96)..(96): Xaa can be any naturally occurring amino acid
  Transcript Sequence Number=SeqID_7382
  Gene Ontology: Mol. function=serine-type endopeptidase activity; Cellular component=cytoplasm; Biological process=proteolysis
  Homolog annotation: Hit_ID=B9RIX4; Match level="QueryCoverage=82%, HitCoverage=23%, E-value=1e-137, Identity=77%"; Hit description =Tripeptidyl peptidase II, putative
  Subcellular localization annotation: CTP_CleavageSite=54; ConfidenceScore=5.84e-01
LAVSACSGPLHFGTTTSAVAAAVTTRGPSPSSGVAATAMPSSSSSPPPPAEETTAAASPAGGFRLTEPSFLESLMPKKEIGVDRFLAAHPEYDGRXGALIAIFDSGVDPAAAGLQTTSDGKPKILDVIDCTGSGDVDTSKVVKADADGAIVGASGARLVVNSSWKNPSQEWHVGCKLIYELFTYTLTSRLKKERKKKWDEENQEAISDALKQLNEFEKKHTKPDDATLKKAHEDLQSRLDYLRKQAEGYDDKGPVIDIVAWHDGDVWRVAVDTQTLEGKNNGGKLADFVPLTNYRLERKYAIFSKLDACSFVANIYDDGNLVSIVTDCSPHATHVAGIAAAFHPDEPLLNGVAPGAQLISCKIG

SEQ ID NO: 73357 - protein, 188 aa, Setaria italica
  Transcript Sequence Number=SeqID_7383
  Gene Ontology: Mol. function=Rab GTPase activator activity; Cellular component=intracellular; Biological process=regulation of Rab GTPase activity
  Homolog annotation: Hit_ID=B6T5C5; Match level="QueryCoverage=100%, HitCoverage=44%, E-value=2e-52, Identity=50%"; Hit description=TBC domain containing protein
KPRPDLTLSPKRWKLLHNEEGVLDIAGMIKRVQRGGVHPTIKGEVWEFLLGCYDPKSTTEQRNQLRQQRRLEYENLKTKCREMDTTVGSGRVITMPVITEDGQPIEDPNSDRGARPSSVGSEQQTSGATLPKEVIQWKLTLHQIGLDVNRTDRVLVYYESQANLARLWDILAVYSWVDKDIGYCQGMS

SEQ ID NO: 73358 - protein, 111 aa, Setaria italica
  Transcript Sequence Number=SeqID_7384
  Gene Ontology: Mol. function=polygalacturonase activity; Cellular component=extracellular region; Biological process=carbohydrate metabolic process
  Homolog annotation: Hit_ID=B6TZR7; Match level="QueryCoverage=100%, HitCoverage=24%, E-value=9e-40, Identity=72%"; Hit description =Polygalacturonase
IKLLISGNIVAPESPSDWGAGGTGTQWLHFHQVQNLKVTGGGIIDGRGRQWWARSSCQEKKNCTAQPAPKAVHFEDCQGISVLGITLQNSQQHHLTFTRCSHVKANYLRVT

SEQ ID NO: 73359 - protein, 166 aa, Setaria italica
  Transcript Sequence Number=SeqID_7385
  Gene Ontology: Mol. function=potassium ion transmembrane transporter activity; Cellular component=integral to membrane; Biological process=potassium ion transport
  Homolog annotation: Hit_ID=Q69RI8; Match level="QueryCoverage=91%, HitCoverage=17%, E-value=1e-68, Identity=86%"; Hit description =Probable potassium transporter 14
  Pfam annotation: Domain name=K_trans; Domain location=1-165; Score= -506.3; E_value=0.0087; Accession=PF02705.8; Description=K+ potassium transporter
GTSPLYTLDVMFNKYPITSKEDVLGALSLVIYTLILIPFLKYTLIVLWGNDDGEGGTFALYSLICRNAKASLLPNQLPSDTRISSFNLKVPSVELERSLKIKERLETSSMLKKLLLMLVLFGTSMVIADGVVTPAMSVMSAVNGLKVGISSVNEGEENNKKGNSYH

SEQ ID NO: 73360 - protein, 71 aa, Setaria italica
  Transcript Sequence Number=SeqID_7386
  Subcellular localization annotation: CTP_CleavageSite=33; ConfidenceScore=5.23e-01
PSSKFPSTTAPNPKLLLLGAARGPSLPAAPTVYCGSAAAALLARPCGAEIHAGVDWFRVVFCCACGHTLKS

SEQ ID NO: 73361 - protein, 100 aa, Setaria italica
  Transcript Sequence Number=SeqID_7387
  Gene Ontology: Mol. function=phosphoprotein phosphatase activity; Biological process=actin cytoskeleton organization and biogenesis
  Homolog annotation: Hit_ID=B9S1L1; Match level="QueryCoverage=100%, HitCoverage=12%, E-value=2e-38, Identity=73%"; Hit description=DNA binding protein, putative
MSLLSRFFYKRPPDGLLEFIDRIYVFDSCFSTEVLPQGMYPVYLNEILTELHEEHVESSFLAINFRDGDKRSQLADILHEYNIPVIDYPRHFEGCPVLPL

SEQ ID NO: 73362 - protein, 98 aa, Setaria italica
  Transcript Sequence Number=SeqID_7388
  Gene Ontology: Cellular component=integral to membrane
  Homolog annotation: Hit_ID=B3TLS7; Match level="QueryCoverage=68%, HitCoverage=25%, E-value=3e-15, Identity=59%"; Hit description =Senescence-associated protein
KRKTKRKTKKENQNRTKPNYVRSGTRTDNTWSNDALCYDCQSCKAGVVATVKRDWKRTAIVCIVFLVFIIIVYSIGCCAFRNNRRDNAYHGGWKGGYA

SEQ ID NO: 73363 - protein, 145 aa, Setaria italica
  misc_feature (83)..(83): Xaa can be any naturally occurring amino acid
  Transcript Sequence Number=SeqID_7389
  Gene Ontology: Cellular component=integral to membrane
  Homolog annotation: Hit_ID=B3TLS7; Match level="QueryCoverage=97%, HitCoverage=52%, E-value=3e-54, Identity=70%"; Hit description =Senescence-associated protein
  Pfam annotation: Domain name=Tetraspannin; Domain location=1-141; Score=-9.4; E_value=0.0029; Accession=PF00335.12; Description =Tetraspanin family
GIWLGHRADGTECERYLSAPVIALGVFLLVVSIAGLVGACCRVTWLLWVYLLAMFVLIVALFCFTVFAFVVTNRGAGEAVSGXGYKEYRLGDYSNWLQKRVENHKNWNRIRSCLQGSKVCKNLQDKKESVTDFMRSDLSPIEVLA

SEQ ID NO: 73364 - protein, 127 aa, Setaria italica
  Transcript Sequence Number=SeqID_7390
  Gene Ontology: Cellular component=integral to membrane
  Homolog annotation: Hit_ID=B3TLS7; Match level="QueryCoverage=94%, HitCoverage=44%, E-value=7e-34, Identity=57%"; Hit description =Senescence-associated protein
IGERSERMKSVTDFMRSDLSPIESGCCKPPTSCGFTYVSGTDWTKTTATNSSSDPDCNTWSNDALCYDCQSCKAGVVATVKRDWKRTAIVCIVFLVFIIIVYSIGCCAFRNNRRDNAYHGGWKGGYA

SEQ ID NO: 73365 - protein, 273 aa, Setaria italica
  Transcript Sequence Number=SeqID_7391
  Gene Ontology: Cellular component=integral to membrane
  Homolog annotation: Hit_ID=B3TLS7; Match level="QueryCoverage=98%, HitCoverage=98%, E-value=1e-105, Identity=68%"; Hit description =Senescence-associated protein
  Pfam annotation: Domain name=Tetraspannin; Domain location=4-258; Score=147.2; E_value=4.9e-41; Accession=PF00335.12; Description =Tetraspanin family
MAFRLSNNLIGILNAVTFLLSIPILGAGIWLGHRADGTECERYLSAPVIALGVFLLVVSIAGLVGACCRVTWLLWVYLLAMFVLIVALFCFTVFAFVVTNRGAGEAVSGRGYKEYRLGDYSNWLQKRVENHKNWNRIRSCLQGSKVCKNLQDKKESVTDFMRSDLSPIESGCCKPPTSCGFTYVSGTDWTKTTATNSSSDPDCNTWSNDALCYDCQSCKAGVVATVKRDWKRTAIVCIVFLVFIIIVYSIGCCAFRNNRRDNAYHGGWKGGYA

SEQ ID NO: 73366 - protein, 116 aa, Setaria italica
  misc_feature (7)..(7): Xaa can be any naturally occurring amino acid
  misc_feature (13)..(13): Xaa can be any naturally occurring amino acid
  misc_feature (15)..(15): Xaa can be any naturally occurring amino acid
  misc_feature (67)..(67): Xaa can be any naturally occurring amino acid
  misc_feature (85)..(85): Xaa can be any naturally occurring amino acid
  misc_feature (106)..(106): Xaa can be any naturally occurring amino acid
  Transcript Sequence Number=SeqID_7392
  Homolog annotation: Hit_ID=Q2QNQ2; Match level="QueryCoverage=99%, HitCoverage=16%, E-value=6e-32, Identity=60%"; Hit description =Pentatricopeptide, putative, expressed
  Pfam annotation: Domain name=PPR; Domain location=4-38; Score=1.1; E _value=6.7; Accession=PF01535.12; Description=PPR repeat
  Pfam annotation: Domain name=PPR; Domain location=40-74; Score=29.0; E_value=1.9e-05; Accession=PF01535.12; Description=PPR repeat
  Pfam module annotation: Pfam domain module=PPR::PPR; Domain location =4-38::40-74
TTEATYXTLIHGXFXSLGTDKAYRILSKWLESHPALHHQNAYHTLLYCLSKNGMAKEAVELVDKMKXRGYPLGNTTFGIVISCAXKRLEFSYVCELVDDFIKKGGXGFNVYILIIK

SEQ ID NO: 73367 - protein, 203 aa, Setaria italica
  Transcript Sequence Number=SeqID_7393
  Gene Ontology: Mol. function=aspartate kinase activity; Cellular component=chloroplast; Biological process=amino acid biosynthetic process
  Homolog annotation: Hit_ID=A3RL74; Match level="QueryCoverage=96%, HitCoverage=34%, E-value=5e-86, Identity=81%"; Hit description =Aspartokinase
CWRARGLVVRCQTGAAAVLKNEEATAAAAHKARTGFTVVMKFGGSSLASAERMREVADLILSFPEETPVIVLSAMGKTTNNLLLAGEKAVSCGAPKASEIPELAVIKDLHHRTIDELGLDRSVVSGLLDELEQLLKGVAMMKELTLRTRDYLVSFGECMSTRIFAAYLNKLGKKARQYDAFDIGFITTDDFTKGMLLLLYSAW

SEQ ID NO: 73368 - protein, 308 aa, Setaria italica
  misc_feature (23)..(23): Xaa can be any naturally occurring amino acid
  Transcript Sequence Number=SeqID_7394
  Gene Ontology: Mol. function=aspartate kinase activity; Cellular component=chloroplast; Biological process=amino acid biosynthetic process
  Homolog annotation: Hit_ID=B4FA80; Match level="QueryCoverage=100%, HitCoverage=56%, E-value=1e-162, Identity=87%"; Hit description =Aspartokinase
  Pfam annotation: Domain name=AA_kinase; Domain location=1-104; Score=- 55.1; E_value=0.091; Accession=PF00696.20; Description=Amino acid kinase family
  Pfam annotation: Domain name=ACT; Domain location=138-209; Score =18.2; E_value=0.034; Accession=PF01842.17; Description=ACT domain
  Pfam annotation: Domain name=ACT; Domain location=217-279; Score =16.5; E_value=0.11; Accession=PF01842.17; Description=ACT domain
  Pfam module annotation: Pfam domain module=AA_kinase::ACT::ACT; Domain location=1-104::138-209::217-279
KRLHGDWMDDPAIPIVTGFLGKXQGGSDLTATTIGKALGLREIQVWKDVDGVLTCDPNIYANAIPVPYLTFDEAAELAYFGAQVLHPQSMRPARDGDIPVRVKNSYNRHAPGTVITKARDMSKSILTSIVLKSNVTMLDIVSTRMLGQYGFLAKVFSIFEDLGISVDCVATSEVSISLTLDPSKLWSCELVQQKIELDDVIEELEKIAVVHLLQNRSIISLIGNVQRSSLILEKAFNVLRRNGVNVQMISQGASKVNISLVVHDSEAKQCVQALHSAFFENGFSSEVDKMDVLHNDFTSHSKGTVHTH

SEQ ID NO: 73369 - protein, 405 aa, Setaria italica
  misc_feature (58)..(58): Xaa can be any naturally occurring amino acid
  Transcript Sequence Number=SeqID_7395
  Gene Ontology: Mol. function=aspartate kinase activity; Cellular component=chloroplast; Biological process=amino acid biosynthetic process
  Homolog annotation: Hit_ID=A3RL74; Match level="QueryCoverage=98%, HitCoverage=68%, E-value=0.0, Identity=96%"; Hit description =Aspartokinase
  Pfam annotation: Domain name=AA_kinase; Domain location=5-203; Score =119.3; E_value=1.3e-32; Accession=PF00696.20; Description=Amino acid kinase family
  Pfam annotation: Domain name=ACT; Domain location=237-306; Score =16.3; E_value=0.13; Accession=PF01842.17; Description=ACT domain
  Pfam annotation: Domain name=ACT; Domain location=314-376; Score =16.5; E_value=0.11; Accession=PF01842.17; Description=ACT domain
  Pfam module annotation: Pfam domain module=AA_kinase::ACT::ACT; Domain location=5-203::237-306::314-376
MPSSMFISTGLLDELEQLLKGVAMMKELTLRTRDYLVSFGECMSTRIFAAYLNKLGKXARQYDAFDIGFITTDDFTNADILEVTYPAVAKRLHGDWMDDPAIPIVTGFLGKGCKSCAVTTLGRGGSDLTATTIGKALGLREIQVWKDVDGVLTCDPNIYANAIPVPYLTFDEAAELAYFGAQVLHPQSMRPARDGDIPVRVKNSYNRHAPGTVITKARDMSKSILTSIVLKSNVTMLDIVSTRMLGQYGFLAKVFSIFEDLGISVDCVATSEVSISLTLDPSKLWSRELIQQELDHVVEELEKFAVVHLLQRRSIISLVGNVQRSSLILEKAFNVLRRQGVNVQMISQGASKVNISLVVNDSEAKQCVQALHSAFFENGFMSEVEGADVPQNGACLNSNGAIYGN

SEQ ID NO: 73370 - protein, 127 aa, Setaria italica
  misc_feature (33)..(33): Xaa can be any naturally occurring amino acid
  Transcript Sequence Number=SeqID_7396
  Gene Ontology: Mol. function=aminoacyl-tRNA ligase activity; Cellular component=cytoplasm; Biological process=alanyl-tRNA aminoacylation
  Homolog annotation: Hit_ID=Q654W2; Match level="QueryCoverage=96%, HitCoverage=37%, E-value=2e-60, Identity=91%"; Hit description =Alanyl-tRNA synthetase-like
GEDHQMRCVQDLGDDSRFIEFYNLVFMQYTKKXNDGSLEPLKQKNIDTGMGLERMARILQKVPNNYETDLIFPIIEKAASLALVSYAKADDAVKTNLKIIGDHMRAVVYLISDGVLPSNIGRGYVVR

SEQ ID NO: 73371 - protein, 246 aa, Setaria italica
  misc_feature (14)..(14): Xaa can be any naturally occurring amino acid
  misc_feature (33)..(33): Xaa can be any naturally occurring amino acid
  Transcript Sequence Number=SeqID_7397
  Gene Ontology: Mol. function=DNA binding; Biological process =regulation of transcription
  Homolog annotation: Hit_ID=B9SQQ7; Match level="QueryCoverage=22%, HitCoverage=14%, E-value=5e-15, Identity=78%"; Hit description=DNA binding protein, putative
AVERLGGQERATPXKLVLQMMNVRGLSIAHVKXSHLQMYRSKKLDQDGRPRGAISSVYSPVDFHFMRGDRRFQEMSFFQRAAVLSSSKLEHGSFFASRNCSAPELSRLYGLLQHRPTPQTFDFRNSRNHEWASSHREAMISRKDVTPPSTAPHQTHPLAGSALLRSERRWWPFTDAGAAAATGERRAETGREADFANSIGSSSRPHLCATAVSGDPRLPFRWRPAGGGRDVVGYPGNNAKITTRSS

SEQ ID NO: 73372 - protein, 29 aa, Setaria italica
  Transcript Sequence Number=SeqID_7398
  Pfam annotation: Domain name=zf-LSD1; Domain location=7-29; Score =13.5; E_value=0.034; Accession=PF06943.4; Description=LSD1 zinc finger
MQDQLICSGCKRVLEYRRGATGVCCPGCN

SEQ ID NO: 73373 - protein, 143 aa, Setaria italica
  misc_feature (116)..(116): Xaa can be any naturally occurring amino acid
  Transcript Sequence Number=SeqID_7399
  Gene Ontology: Mol. function=sequence-specific DNA binding; Cellular component=nucleus; Biological process=regulation of transcription, DNA-dependent
  Homolog annotation: Hit_ID=B3GAW9; Match level="QueryCoverage=60%, HitCoverage=52%, E-value=8e-41, Identity=94%"; Hit description =WRKY36 transcription factor (Fragment)
  Pfam annotation: Domain name=WRKY; Domain location=45-104; Score =142.3; E_value=1.5e-39; Accession=PF03106.7; Description=WRKY DNA -binding domain
TAEGDEKDQEDGENSTKANKPKKKAEKRQRQPRVAFLTKSEVDHLEDGYRWRKYGQKAVKNSPYPRSYYRCTTPKCGVKKRVERSYQDPSTVITTYEGQHTHHSPASLRAGGAHLXFMSGAHGLPPHLMPSAGGFRPDLMSMM

SEQ ID NO: 73374 - protein, 396 aa, Setaria italica
  Transcript Sequence Number=SeqID_7400
  Gene Ontology: Mol. function=metal ion transmembrane transporter activity; Cellular component=membrane; Biological process=metal ion transport
  Homolog annotation: Hit_ID=B9SXF0; Match level="QueryCoverage=99%, HitCoverage=86%, E-value=1e-144, Identity=68%"; Hit description=RNA splicing protein mrs2, mitochondrial, putative
  Pfam annotation: Domain name=CorA; Domain location=9-394; Score =427.3; E_value=2.5e-125; Accession=PF01544.10; Description=CorA-like Mg2+ transporter protein
SGKVGKKNTGARLWMRLDRWGSSEVVELDKASIIRRVGLPPRDLRILGPVFSHSSSILAREKAMVINLEFIKAIVTAEEVLLLDPLAHEVLPFVDQLRQHLPQKSLVGGNGECAPDGNGEKQDGSPGGQVPCLNEATGAEHELPFEFQVLEVALEIVCSSLDLSVSELERHATPVLDELTKNVSTRNLERVRSLKSLLTRLLARVQKVRDEIEHLLDDNEDMEHLYLTRKQVQNQQVEAIMSSAASNSIVPAGTGVARLNSSFRRSVSIATSMHLDNDVEDLEMLLEAYFMQLDGIRNRILSVREYIDDTEDYVNIQLDNQRNELIQLQLTLTIASFGIAANTYIVGAFAMNIPSALYNITDGSLFWPFVGGTSSGCFVIVILLLGYAWWKKLLGP

SEQ ID NO: 73375 - protein, 83 aa, Setaria italica
  misc_feature (31)..(31): Xaa can be any naturally occurring amino acid
  Transcript Sequence Number=SeqID_7401
  Homolog annotation: Hit_ID=Q84Z40; Match level="QueryCoverage=63%, HitCoverage=17%, E-value=5e-10, Identity=69%"; Hit description =Myosin-like protein
FRDLFSEVEVEKKKLLEQYEHHKKMESTMLXSELAKTFSEKITHAELSVRRMKKDDKSFIIFRKSIGSFLECGSDDDFDIDDE

SEQ ID NO: 73376 - protein, 80 aa, Setaria italica
  misc_feature (29)..(29): Xaa can be any naturally occurring amino acid
  misc_feature (41)..(41): Xaa can be any naturally occurring amino acid
  misc_feature (55)..(55): Xaa can be any naturally occurring amino acid
  Transcript Sequence Number=SeqID_7402
  Homolog annotation: Hit_ID=B6U9Q3; Match level="QueryCoverage=85%, HitCoverage=15%, E-value=1e-13, Identity=54%"; Hit description=F-box domain containing protein
MQDIWYHIHTLMPMRDVARAACLSHAFLXSWRCHPNLSNHXRWTLLKWNIYRILXRNHSGIGLKTLELNLGDEDSTFPYI

SEQ ID NO: 73377 - protein, 54 aa, Setaria italica
  Transcript Sequence Number=SeqID_7403
MLRNILSQSWRNGAHVLQEGNPGPALYTCWRRFHSGQILSSSRSFFGVEDFVDE

SEQ ID NO: 73378 - protein, 94 aa, Setaria italica
  Transcript Sequence Number=SeqID_7404
  Homolog annotation: Hit_ID=B9T8N7; Match level="QueryCoverage=100%, HitCoverage=50%, E-value=2e-40, Identity=84%"; Hit description =Structural constituent of ribosome, putative
  Pfam annotation: Domain name=Ribosomal_L18p; Domain location=1-89; Score=-34.4; E_value=0.01; Accession=PF00861.14; Description =Ribosomal L18pL5e family
ISKRFVSASLTHRSTCRQVAVAGTNSKDIKAALKSRSDIPACLAVGRFLAERAKEADAYTCTYTPREREKFEGKIRAVVQSLIDNGINVKLYLD

SEQ ID NO: 73379 - protein, 187 aa, Setaria italica
  Transcript Sequence Number=SeqID_7405
  Homolog annotation: Hit_ID=B9T8N7; Match level="QueryCoverage=100%, HitCoverage=100%, E-value=3e-73, Identity=72%"; Hit description =Structural constituent of ribosome, putative
  Pfam annotation: Domain name=Ribosomal_L18p; Domain location=65-182; Score=8.6; E_value=1.3e-06; Accession=PF00861.14; Description =Ribosomal L18pL5e family
MLRNILSQSWRNGAHVLQEGNPAPALYTCWRQFHSGQMLSSSRSFFGVEDFVDEDNSRPYTYKKEKRSKNPHKHISFKQRTIAYMEPFTLDVFISKRFVSASLTHRSTCRQVAVAGTNSKDIKAALKSRSDIPACLAVGRFLAERAKEADVYTCTYTPRERDKFEGKIRAVVQSLIDNGINVKLYLD

SEQ ID NO: 73380 - protein, 36 aa, Setaria italica
  Transcript Sequence Number=SeqID_7406
HISISCQQTIFFNKKFHIFNLCKTILLFRLGADLNL

SEQ ID NO: 73381 - protein, 141 aa, Setaria italica
  Transcript Sequence Number=SeqID_7407
  Gene Ontology: Mol. function=hydrolase activity, acting on acid anhydrides, catalyzing transmembrane movement of substances; Cellular component=proton-transporting two-sector ATPase complex; Biological process=ATP ...
  Gene Ontology: Biological process=synthesis coupled proton transport
  Homolog annotation: Hit_ID=P0C2Z0; Match level="QueryCoverage=90%, HitCoverage=69%, E-value=2e-56, Identity=88%"; Hit description=ATP synthase subunit b, chloroplastic
  Pfam annotation: Domain name=ATP-synt_B; Domain location=3-115; Score= 81.1; E_value=4.1e-21; Accession=PF00430.10; Description=ATP synthase BB' CF(0)
QDNLLSLKDLLDNRKQRILSTIRNSEELRRGTLEQLEKARIRLQKVELEADEYRMNGYSEIEREKANLINATSISLEQLEKSKNETLYFEKQRAMNQVRQRVFQQAVQGALGTLNSCLNTELHFRTIRANIGILGAIEWKR

SEQ ID NO: 73382 - protein, 69 aa, Setaria italica
  misc_feature (46)..(46): Xaa can be any naturally occurring amino acid
  Transcript Sequence Number=SeqID_7408
HTNIWKLRLDRYGHIIGTEYLSDLVEKGHGAHHDHDHGHEHHDEQXKHEPTFNEDAEKMVKSVKQALEN

SEQ ID NO: 73383 - protein, 50 aa, Setaria italica
  misc_feature (49)..(49): Xaa can be any naturally occurring amino acid
  Transcript Sequence Number=SeqID_7409
MARIPSLKSLNAFPHAEEHLLKKTYSGAIVTILGLIIMFTLFVHELQFXL

SEQ ID NO: 73384 - protein, 265 aa, Setaria italica
  Transcript Sequence Number=SeqID_7410
KFHLCHEVPLRFHPVEKLDINRCSPDLPSFMERNKKPNFYHNGCTQRIHALKQRTKGTGASLKQNPKQATALNSCSKTRKNNAAKNPCHTRSIMEDILQTKFLGKYKGKRGRRSRPSGKHDNSSEHGEAEDKLSDTSDGNGCLLLIQALEQELSPPQMSAGQGVDALTDMKEDLKISRRDAGLNQGTAFPELLDVLAVNNMQVKKRKRTKTIRVLEDELSDSKSVPGSANTLLRTTSEKSVSDNELISEVAENRSDTSDQKHGPP

SEQ ID NO: 73385 - protein, 79 aa, Setaria italica
  Transcript Sequence Number=SeqID_7411
  Gene Ontology: Mol. function=protein binding; Cellular component =plasma membrane; Biological process=vesicle-mediated transport
  Homolog annotation: Hit_ID=B9S9C2; Match level="QueryCoverage=82%, HitCoverage=34%, E-value=9e-28, Identity=86%"; Hit description =Endoplasmic reticulum-Golgi intermediate compartment protein, putative
  Pfam annotation: Domain name=DUF1692; Domain location=6-59; Score= -66.9; E_value=0.037; Accession=PF07970.4; Description=Protein of unknown function (DUF1692)
FIVVIHCLLTDRAWPAVYFLYDLSPITVTIKEERRNFLHFLTRLCAVLGGTFAMTGMLDRWMYRLIESVTNSKTRSVLR

SEQ ID NO: 73386 - protein, 55 aa, Setaria italica
  Transcript Sequence Number=SeqID_7412
MARIPSLKSLNAFPHAEEHLLKKTYSGAIVTILGLIIMFTLFVHELQFYLTTYTV

SEQ ID NO: 73387 - protein, 77 aa, Setaria italica
  Transcript Sequence Number=SeqID_7413
  Homolog annotation: Hit_ID=B9S9C2; Match level="QueryCoverage=58%, HitCoverage=23%, E-value=8e-16, Identity=84%"; Hit description =Endoplasmic reticulum-Golgi intermediate compartment protein, putative
KHDHDHGHEHHDEQKKHEPTFNEDAEKMVKSVKQALENGEGCRVYGMLDVQRVAGNFHISVHGLNIFVAEKVSNLKL

SEQ ID NO: 73388 - protein, 350 aa, Setaria italica
  Transcript Sequence Number=SeqID_7414
  Gene Ontology: Mol. function=protein binding; Cellular component =plasma membrane; Biological process=vesicle-mediated transport
  Homolog annotation: Hit_ID=B9S9C2; Match level="QueryCoverage=54%, HitCoverage=98%, E-value=4e-93, Identity=83%"; Hit description =Endoplasmic reticulum-Golgi intermediate compartment protein, putative
  Pfam annotation: Domain name=DUF1692; Domain location=151-330; Score =272.1; E_value=1.3e-78; Accession=PF07970.4; Description=Protein of unknown function (DUF1692)
MARIPSLKSLNAFPHAEEHLLKKTYSGAIVTILGLIIMFTLFVHELQFYLTTYTVHQMSVDLKRGETLPIHINMSFPSLPCEVLSVDAIDMSGKHEVDLHTNIWKLRLDRYGHIIGTEYLSDLVEKEHGAHHDHDHGHEHNDEQKKHEHTFNEDAEKMVKSVKQALENGEGCRVYGMLDVQRVAGNFHISVHGLNIFVAEKIFEGSSHVNVSHVIHDLSFGPKYPGIHNPLDETTRILHDTSGTFKYYIKVVPTEYRYLSKKVLPTNQFSVTEYFLPIRPTDRAWPAVYFLYDLSPITVTIKEERRNFLHFLTRLCAVLGGTFAMTGMLDRWMYRLIESVTNSKTRSVLR

SEQ ID NO: 73389 - protein, 124 aa, Setaria italica
  misc_feature (66)..(66): Xaa can be any naturally occurring amino acid
  Transcript Sequence Number=SeqID_7415
  Gene Ontology: Mol. function=histone-arginine N-methyltransferase activity; Cellular component=cytoplasm; Biological process =regulation of transcription, DNA-dependent
  Homolog annotation: Hit_ID=Q6YXZ7; Match level="QueryCoverage=85%, HitCoverage=16%, E-value=2e-49, Identity=84%"; Hit description =Protein arginine N-methyltransferase 5
  Pfam annotation: Domain name=PRMT5; Domain location=2-124; Score= -306.3; E_value=0.049; Accession=PF05185.8; Description=PRMT5 arginine-N-methyltransferase
MFKIYLISFDCLLMMLCRYTSFIQPITASKLHNDIKAHKDIAHFETAYVVKLHRIANLAPPQQVFXFTHPNFSPDANNRRYTKLQFEMLPDTGSCLVHGFAGYFDSVLYKDVHLGIEPNTATPN

SEQ ID NO: 73390 - protein, 568 aa, Setaria italica
  Transcript Sequence Number=SeqID_7416
  Gene Ontology: Mol. function=histone-arginine N-methyltransferase activity; Cellular component=cytoplasm; Biological process =regulation of transcription, DNA-dependent
  Homolog annotation: Hit_ID=Q6YXZ7; Match level="QueryCoverage=100%, HitCoverage=82%, E-value=0.0, Identity=82%"; Hit description=Protein arginine N-methyltransferase 5
  Pfam annotation: Domain name=PRMT5; Domain location=92-550; Score =919.0; E_value=2.3e-273; Accession=PF05185.8; Description=PRMT5 arginine-N-methyltransferase
  Subcellular localization annotation: CTP_CleavageSite=13; ConfidenceScore=5.01e-01
LQACVLPAPRRPSCANYARAVNQILQGLTNMHVMPSSPTPNSGTFTYVKHLLIFDFFFFCFFLKLWLRLPLEKSEPMDDDLDKVKNNSQMSEKVDSWELWNSFRLLCDHSSQLCVALDILSTLPSINSLGRWFGEPVRAAILQTNAFLTNAKGYPCLSKRHQRLLTAFFNHSVQVIISGRSNHNVSPVSEGVLSGDENYIEEAPVRHALSPYLDYVAYLYRRMDPLPEQERFEINYRDFLQSPLQPLMDNLEAQTYETFEKDVVKYSQYQRAVAKALVDRVPDDAVSTTRTVLMVVGAGRGPLVRASLQAAEETGRKLKVYAVEKNPNAVITLHSLIKLEGWESLVTVISSDMRCWNAPEKADILVSELLGSFGDNELSPECLDGAQRFLKPDGISIPSSYTSFIQPITASKLHNDIKAHKDIAHFETAYVVKLHRIANLAPPQQVFTFTHPNFSPDANNRRYTKLQFEMLPDTGSCLVHGFAGYFDSVLYKDVHLGIEPNTATPNMFSWFPIFFPLRKPIYVPDGSPIEVHFWRCCAPTKVWYEWAVTTPSPSPIHNSNGRSYWVGL

SEQ ID NO: 73391 - protein, 136 aa, Setaria italica
  Transcript Sequence Number=SeqID_7417
  Gene Ontology: Mol. function=nucleotide binding; Cellular component =membrane; Biological process=transport
  Homolog annotation: Hit_ID=B6UFL9; Match level="QueryCoverage=81%, HitCoverage=17%, E-value=3e-28, Identity=64%"; Hit description =ATPase, coupled to transmembrane movement of substances
  Pfam annotation: Domain name=ABC_tran; Domain location=2-111; Score= -2.7; E_value=6.4e-06; Accession=PF00005.19; Description=ABC transporter
HPGSAATAEAAVAALLADLGLAHVAHTRVSPSRLSGGERRRVSIGLALLRNPGVLLLDEPTSGLDSSSAHVVVGCLRAVAAARGTTVVLSIHQPSARLLSAVDSLLLLSRGTVLHHGSLASLDATLPSSLRSRPAQ

SEQ ID NO: 73392 - protein, 102 aa, Setaria italica
  Transcript Sequence Number=SeqID_7418
  Gene Ontology: Mol. function=nucleoside-triphosphatase activity; Cellular component=membrane; Biological process=transport
  Homolog annotation: Hit_ID=Q8GU82; Match level="QueryCoverage=70%, HitCoverage=5%, E-value=5e-33, Identity=95%"; Hit description=PDR -like ABC transporter
LIMFGIVFWKIGSTIKDEQDVFNILGVVYGSAWFLGFMNCSILQPVVATERVVLYREKAAGMYSTMAYAIAQVTTHFTDGSVCFGLLGKSTVLNAESLLHEL

SEQ ID NO: 73393 - protein, 147 aa, Setaria italica
  Transcript Sequence Number=SeqID_7419
GWGAGDAPRHLDQHDGAFCKDDEMLDDDDTDFGSSLGPIVSWDRMAAECEDRKMLLGDSPKCDKWMLKDDVGDFDAKSILNCGDDDCVEDSKIIKPLMHDDNMVTDPSLVGIHVEGFYTGSKWYDSPVCLDSSVDAGDSSFRHGGIV

SEQ ID NO: 73394 - protein, 148 aa, Setaria italica
  Transcript Sequence Number=SeqID_7420
  Gene Ontology: Mol. function=transferase activity; Cellular component= vacuole; Biological process=lipid metabolic process
  Homolog annotation: Hit_ID=B4FLH3; Match level="QueryCoverage=100%, HitCoverage=100%, E-value=2e-66, Identity=82%"; Hit description =Microsomal glutathione S-transferase 3
  Pfam annotation: Domain name=MAPEG; Domain location=9-140; Score =191.2; E_value=2.8e-54; Accession=PF01124.10; Description=MAPEG family
MAVAIELTKEYGYVVLVLVAYAFLNFWMSFQVGKARKKYKVFYPTMYAVESENKDAKLFNCVQRGHQNSLEMMPMFFVMLLLGGLQHPTIAAGLGVLYTVARFFYFKGYATGVPDNRLKIGGLNFLAVFGLIICTASFGINLVIRETL

SEQ ID NO: 73395 - protein, 64 aa, Setaria italica
  Transcript Sequence Number=SeqID_7421
LTSKIQGLYNRPSRDDRRRGSKSKKTELDKTDADGSMQSKMVTSENHQDHCCPSDKESAVTVQS

SEQ ID NO: 73396 - protein, 175 aa, Setaria italica
  Transcript Sequence Number=SeqID_7422
  Homolog annotation: Hit_ID=B6SKC7; Match level="QueryCoverage=100%, HitCoverage=54%, E-value=4e-66, Identity=69%"; Hit description =EMB2748
  Pfam annotation: Domain name=PPR; Domain location=21-55; Score=1.4; E_ value=6.1; Accession=PF01535.12; Description=PPR repeat
  Pfam annotation: Domain name=PPR; Domain location=57-91; Score=15.6; E_value=0.13; Accession=PF01535.12; Description=PPR repeat
  Pfam module annotation: Pfam domain module=PPR::PPR; Domain location =21-55::57-91
WHRIVQVIKWMLSKGQGNTMRTYEQLVCALEKKNRAEEAHKIWQKKISHDLHSVPWRFCHLMLAIYYRNNRLERLVKLFKELEACGRKPPSKDIIRKVEDAYEMLGLLEEKEALLEKYKDLYNRPSRDDRRRGSKSNKTELDKIDADGSMKSKMETSENHQDHCCPSDKESAVTA

SEQ ID NO: 73397 - protein, 226 aa, Setaria italica
  misc_feature (60)..(60): Xaa can be any naturally occurring amino acid
  misc_feature (160)..(160): Xaa can be any naturally occurring amino acid
  misc_feature (204)..(204): Xaa can be any naturally occurring amino acid
  Transcript Sequence Number=SeqID_7423
  Homolog annotation: Hit_ID=B6SKC7; Match level="QueryCoverage=92%, HitCoverage=65%, E-value=1e-97, Identity=83%"; Hit description =EMB2748
  Pfam annotation: Domain name=PPR; Domain location=169-203; Score =16.3; E_value=0.1; Accession=PF01535.12; Description=PPR repeat
TRIRSNATRDFSTSKNVAGGRVYQQKELEPTTPAKDTDIIIKRIQKSTRELEQGPVGKNXLSSAEKRKFLVNTLLGLEDSREVVYGTLDAWVAFEQDFPLASLKQALSALEKEQQWHRIVQVIKWMLSKGQGNTMRTYEQLVRALEKDNRAEEAHIMWQXHDLHSVPWRFCHHMLSIYYRNNMLDRLVKLFEELEACGRKPRSXDIIRKVEDAYEIAWTRRNPLTL

SEQ ID NO: 73398 - protein, 37 aa, Setaria italica
  Transcript Sequence Number=SeqID_7424
RNKEFFYKNVWITVLDYYDSIFTTILVTRSYLMVYYN

SEQ ID NO: 73399 - protein, 50 aa, Setaria italica
  Transcript Sequence Number=SeqID_7425
  Subcellular localization annotation: CTP_CleavageSite=20; ConfidenceScore=5.08e-01
SSAPLPSARPLAALMGSPVTVAAVMARLTAHPGASARACCELSQGSGKDG

SEQ ID NO: 73400 - protein, 72 aa, Setaria italica
  Transcript Sequence Number=SeqID_7426
PLVHGCFLLKGASWLCKNICKQGSMTGMFHLIHMFLFFLLMLVSLLDSYMFLFYLDCCRHCFIAGTKGNSAP

SEQ ID NO: 73401 - protein, 73 aa, Setaria italica
  misc_feature (6)..(6): Xaa can be any naturally occurring amino acid
  misc_feature (13)..(13): Xaa can be any naturally occurring amino acid
  Transcript Sequence Number=SeqID_7427
LGYQRXVYVYTVXKDQQDAPPCFVGYTTLLLPSLDQSSAGNISLARSGLHFTPDGQFVVLLSCIRIPFCRMQN

SEQ ID NO: 73402 - protein, 114 aa, Setaria italica
  Transcript Sequence Number=SeqID_7428
  Subcellular localization annotation: CTP_CleavageSite=71; ConfidenceScore=5.58e-01
PQRTGRGAGGTPLNSAAAGKKLTGAHVTLMSYSRVCAKPTLNLATAVTVTAKALLVMLRVKARTINGSPLRAENSVALILVSLSFGWSSGPATAAEMSALNDSPPATVLLLTSM

SEQ ID NO: 73403 - protein, 80 aa, Setaria italica
  Transcript Sequence Number=SeqID_7429
CGIAGVGKSFLVRAYFDHFAACFGSSAVVSASRPFDIMNFCQDLVDDLKPPEGEDIFHRIWKHLEEKQCLVIIDDLRSKE

SEQ ID NO: 73404 - protein, 189 aa, Setaria italica
  misc_feature (18)..(18): Xaa can be any naturally occurring amino acid
  Transcript Sequence Number=SeqID_7430
AVQQRRAEAYSTLRRGFXYMANGGELAYQQLCGNITAEFNDCSKQVLEVISLLSMPDFCRSDLADLLKGVQAHEKEKLHLTAKIQVLKKAGRPSERLVNHADCRSRSVTQHVCVHVKEITEAAGTEDAEADAEYDAALKEAIQGVQEAVTSINEHMEEVRYEIDALEAETAGSRLTEVEEAFPATLSIK

SEQ ID NO: 73405 - protein, 104 aa, Setaria italica
  misc_feature (66)..(66): Xaa can be any naturally occurring amino acid
  Transcript Sequence Number=SeqID_7431
  Pfam annotation: Domain name=F-box; Domain location=30-77; Score =20.1; E_value=0.009; Accession=PF00646.25; Description=F-box domain
QRTTAPTSSRHAAAVGGGGGVCRRPGCYAGTDAALCDDLLQEVFRLLPPAAAPAVSLVSRRWLSLXRGPSTSSLTLRLPASPDAAPAAGTATLAALLSHYPFLS

SEQ ID NO: 73406 - protein, 86 aa, Setaria italica
  Transcript Sequence Number=SeqID_7432
SSRAMIHDIDDGFEIKFAPGKPAAWKGDGKADNNKGRQQQQQQHQVHHHQGHQPQPQLVGMMPKGYAVPKEYAGFRYPADAVVRQG

SEQ ID NO: 73407 - protein, 200 aa, Setaria italica
  misc_feature (37)..(37): Xaa can be any naturally occurring amino acid
  Transcript Sequence Number=SeqID_7433
  Gene Ontology: Mol. function=nucleic acid binding; Cellular component= nucleus; Biological process=nucleolus organization and biogenesis
  Homolog annotation: Hit_ID=B9T163; Match level="QueryCoverage=84%, HitCoverage=44%, E-value=3e-56, Identity=55%"; Hit description =Protein gar2, putative
  Pfam annotation: Domain name=RRM_1; Domain location=59-127; Score =60.5; E_value=6.5e-15; Accession=PF00076.14; Description=RNA recognition motif. (a.k.a. RRM, RBD, o
  Pfam annotation: Domain name=zf-CCHC; Domain location=154-171; Score =29.8; E_value=6e-06; Accession=PF00098.15; Description=Zinc knuckle
  Pfam annotation: Domain name=zf-CCHC; Domain location=178-195; Score =29.3; E_value=7.1e-06; Accession=PF00098.15; Description=Zinc knuckle
  Pfam module annotation: Pfam domain module=RRM_1::zf-CCHC::zf-CCHC; Domain location=59-127::154-171::178-195
CTCMTFPESGKFRGIAILTFKTDAAAQRALAMDGADXPYKHNREKEDFAPKLIEGYNRTYVGNLPWDITEDDLKKFFSDCKISSIRFGTDKETGDFKGYAHIDFADGTSLAVALKLDQKVIKGRPVRIRCAVPKKENQKISDNGNSDPSKSKIRTCYQCGTPGHLSSACPNKKDSDVRKCYECGTPGHLSSACPNKKNSE

SEQ ID NO: 73408 - protein, 183 aa, Setaria italica
  Transcript Sequence Number=SeqID_7434
  Gene Ontology: Mol. function=nucleic acid binding
  Homolog annotation: Hit_ID=B9T163; Match level="QueryCoverage=54%, HitCoverage=25%, E-value=5e-36, Identity=66%"; Hit description =Protein gar2, putative
  Pfam annotation: Domain name=RRM_1; Domain location=105-174; Score =61.2; E_value=3.9e-15; Accession=PF00076.14; Description=RNA recognition motif. (a.k.a. RRM, RBD, o
MEAEAAASAAETQQVGGETGAEAEGEEETSEEADPAVGSHQPVVAEDSSEQNMNKMEVTKLGVGSNSPVVAENRQQDHKVELAETGVGSNNPVVAEHREQSIKKVYVGGIPYYSSEDDIRSFFEGCGSITAIDCMTFPESGKFRGIAILTFKTDAAAQRALAMDGADMGGFYLKIQPYKHNRE

SEQ ID NO: 73409 - protein, 193 aa, Setaria italica
  Transcript Sequence Number=SeqID_7435
  Gene Ontology: Mol. function=transcription regulator activity; Cellular component=nucleus; Biological process=regulation of transcription
AESHLWNQVLMGAGGEVGRSMQAVHDAHDDSENFLELLNSRTLAPELFAEPPACDYLKKMEYGSSHGGGGGGGGWPDHQFTAAALEKHLSYGAALAHHQHHHHAAAGAPERLTANLSDLVSNWSIAPPDPCLGDAHHRAGAAAACDNAAVASLGHGAKPGLFLDSGGLCKHEMSGHGGMLQEAAGGGGQEFLR

SEQ ID NO: 73410 - protein, 528 aa, Setaria italica
  misc_feature (18)..(18): Xaa can be any naturally occurring amino acid
  Transcript Sequence Number=SeqID_7436
  Gene Ontology: Mol. function=hydrolase activity; Cellular component =nucleus; Biological process=tRNA processing
  Homolog annotation: Hit_ID=A7WPK6; Match level="QueryCoverage=92%, HitCoverage=58%, E-value=1e-144, Identity=52%"; Hit description =Putative hydrolase
  Pfam annotation: Domain name=Lactamase_B; Domain location=195-441; Score=28.4; E_value=2.9e-05; Accession=PF00753.19; Description =Metallo-beta-lactamase superfamily
LDEKFGATQHIMAGHEIXNMEIPILKGSARISSRLNFVCPQLFPSSGFWSVEPANDVMENDKRTSSEICGSVFAQNLLKFHLRPYAQLGLDSASIPSLFTYKDIVEELVSEIPEVREVPEQVHKFWQNNVNYKNTLMVEEPWINQKSDKLDDGTIFQKHPRDNQEIPCCVEDATREDMEITFLGTGSSQPSKYRNVSSIYINLFARGGILLDCGEGTLGQLKRRFGVNGADEAVKNLRCIWISHIHADHHTGLARVLALRSKLLKGMPHKPLLVIGPRPLERFLNAYSTLEDLDMQFLDCRHTLKPSVEAFLSENVTGSATPQLENTMFAPGSRMENYNRKPASPRDTTALANFKEVLLESGLEILYSVPVVHCPQAFGVVLRAMEKVNSAGKVIPGWKVVYSGDTRPCPALIDASRDATVLIHEATFEDSMKDEAIARNHSTTKEAIEVGTSAGAYRIILTHFSQRYPKIPVIDEVDMEKTCIAFDLMSVNLVDLPVLPKVLPHLKVLFKDELVVEEADEIQEAAAY

SEQ ID NO: 73411 - protein, 178 aa, Setaria italica
  Transcript Sequence Number=SeqID_7437
  Homolog annotation: Hit_ID=B6TW15; Match level="QueryCoverage=24%, HitCoverage=39%, E-value=2e-09, Identity=77%"; Hit description=Zinc finger, C3HC4 type family protein
  Pfam annotation: Domain name=zf-C3HC4; Domain location=123-168; Score= 27.7; E_value=4.6e-05; Accession=PF00097.17; Description=Zinc finger, C3HC4 type (RING finger)
MTPASIDPCSDHSYELPLRRNLLLLLDLLGLLRFVAAVLLDRLGVVSCEGGGVQLPGRTWGRGGVRADYDDAAVERFIEAMLWAPRSPVTGTTRARTAALYRRRRRVAQPADDKDGGEGAAVCAICLAGLGAGGCETVVELGVCSHAFHAACIDAWAGTGEAATCPLCRAPMSLPTAW

SEQ ID NO: 73412 - protein, 52 aa, Setaria italica
  Transcript Sequence Number=SeqID_7438
YGHYCSVLSERIGLPDDGCVSSCKLNLLVSRPTSDFFYLNWYVDEYWSVNDG

SEQ ID NO: 73413 - protein, 170 aa, Setaria italica
  Transcript Sequence Number=SeqID_7439
  Homolog annotation: Hit_ID=Q6ETC2; Match level="QueryCoverage=100%, HitCoverage=61%, E-value=3e-55, Identity=65%"; Hit description =Pentatricopeptide (PPR) repeat-containing protein-like
  Subcellular localization annotation: CTP_CleavageSite=36; ConfidenceScore=5.02e-01
PFSSSPSAASLTKPSPREEAKVVVSVTVEGSVGPVKAMVRLGDSVGEAIAAVVERYAREGRSPRLDLAASESFQLHHSHFSLQSLNKNDKIGDVGGRNFYLHKNDSSNRLYLQSEEHFGDSTGSETTRTNGQLSGAQYHFEIFTIVLKKLDKIGRRTKRIWRFITCDNCT

SEQ ID NO: 73414 - protein, 150 aa, Setaria italica
  Transcript Sequence Number=SeqID_7440
  Homolog annotation: Hit_ID=Q6ETC2; Match level="QueryCoverage=90%, HitCoverage=48%, E-value=8e-23, Identity=50%"; Hit description =Pentatricopeptide (PPR) repeat-containing protein-like
RTLWEGKGRALARSASEPALWFGVRVHALPDELDHDSPPSPPPPPLERPHTCFDVFAPDSPFSSSPSAASLTKPSPREEAKVVVSVTVEGSVGPVKAMVRLGDSVGEAIAAVVERYAREGRSPRLDLAASESFQLHHSHFSLQSKPLRFC

SEQ ID NO: 73415 - protein, 238 aa, Setaria italica
  Transcript Sequence Number=SeqID_7441
  Gene Ontology: Mol. function=binding
  Homolog annotation: Hit_ID=Q2QNV7; Match level="QueryCoverage=84%, HitCoverage=19%, E-value=1e-15, Identity=32%"; Hit description =Retrotransposon protein, putative, unclassified, expressed
  Pfam annotation: Domain name=BON; Domain location=143-194; Score =13.2; E_value=0.072; Accession=PF04972.9; Description=Transport -associated domain
MCFILLYYLSPFVNLGVAVWRLVQRDYGDAGGDIGNRSKLNAALDIFYGLILFQSLFAFYCIFISVAEEPLESRTKRHCGLEERREDIIRIYYSDTARKFRKDGELPDNWNLIAYGVEKLQSASGDDDHLWGARVLDQLFCKDKSVRQKLLSSRISVQNLIGMIGLRGTADNVENRERAARIVAHLASDLNIAHFPDTLQCICSLLESCNKQSCESQATGPSEEPEDQNGADTVLQIK

SEQ ID NO: 73416 - protein, 71 aa, Setaria italica
  Transcript Sequence Number=SeqID_7442
  Homolog annotation: Hit_ID=B6TB15; Match level="QueryCoverage=50%, HitCoverage=14%, E-value=1e-10, Identity=88%"; Hit description =EMB1417
MAGAFALRLAPRLAAVPPGRGKGGGGASRGAGSRALVTKKPNKEHHLWIRKETAGSGKKALRLIDTVSKLP

SEQ ID NO: 73417 - protein, 235 aa, Setaria italica
  misc_feature (74)..(74): Xaa can be any naturally occurring amino acid
  misc_feature (93)..(93): Xaa can be any naturally occurring amino acid
  Transcript Sequence Number=SeqID_7443
  Gene Ontology: Mol. function=DNA binding; Cellular component=nucleus; Biological process=regulation of transcription
  Homolog annotation: Hit_ID=Q7XVZ6; Match level="QueryCoverage=100%, HitCoverage=23%, E-value=1e-106, Identity=83%"; Hit description =OSJNBa0020I02.14 protein
QCLERYEKLLDAACAKDENYEPNDDPRKLRPGEIDPNPESKPARPDPVDMDEDEKEMLSEARARLANTRGKKAXKRKAREKQLEEARRLASLXKKRRELKAAGIDTRQRKRKRKGIDYNAEIAFEKRPPPGFYDTVGEDKPPEHVQFPTTIEELEGKRRVDIEAQLRKQDIARNKILQRQDAPAAIMQANKLNDPEAVTKRSKLMLPPPQISDHELEEIAKMGSAGDPALAEELG

SEQ ID NO: 73418 - protein, 362 aa, Setaria italica
  misc_feature (237)..(237): Xaa can be any naturally occurring amino acid
  misc_feature (252)..(252): Xaa can be any naturally occurring amino acid
  Transcript Sequence Number=SeqID_7444
  Gene Ontology: Mol. function=nucleic acid binding; Cellular component= intracellular; Biological process=transport
  Homolog annotation: Hit_ID=Q6ZG86; Match level="QueryCoverage=86%, HitCoverage=64%, E-value=1e-40, Identity=35%"; Hit description =Putative Ras-GTPase activating protein SH3 domain-binding protein 2
  Pfam annotation: Domain name=RRM_1; Domain location=241-310; Score =32.8; E_value=1.4e-06; Accession=PF00076.14; Description=RNA recognition motif. (a.k.a. RRM, RBD, o
ETVEVINDMMMSMNVTKVEVKTANFLESWGGAITLLVTGLVQLKDYPVRKRFVQNIVLAPKKDGYYIFSDIFKLICDEYDNQYHVPDYNCADNMPQVDASYTMAETGSDYLDGEPQEVVTPAENHVQQQDPSEYKSVNVVYDETQSEEHMPSFPSSIDVKQDSSPHPPSPPTLKEEPVEGAPKTYASVLRTKAKATVGTAESQQSQQLAQQVQSVPVHEKSNLDNNRTVSAPDDEEXFISCYVGNLSPSTSXFDLEKVFQAFGRIKPDGVAIRSRKEAGVFFGFVEFEDISGIQNALNASPIELNGRLVHVEERRPNCGFPSGRRRGRGRDQAGGRYDGEYTNRSKGTGHQKKGGRQYDSYY

SEQ ID NO: 73419 - protein, 101 aa, Setaria italica
  misc_feature (46)..(46): Xaa can be any naturally occurring amino acid
  Transcript Sequence Number=SeqID_7445
  Homolog annotation: Hit_ID=B6T3J5; Match level="QueryCoverage=60%, HitCoverage=20%, E-value=4e-23, Identity=80%"; Hit description =VGPW2523
  Pfam annotation: Domain name=DDRGK; Domain location=2-101; Score= -7.5; E_value=1.6e-06; Accession=PF09756.1; Description=DDRGK domain
MRKMRRRKDEEREAQERQLEEEARARKAKEEEAAALEFEKWKGAFXVDAEGTTESETQDDGQGLLHNFVEHIKKQKCVPLEDLAAEFRMRTQVLKVYALEA

SEQ ID NO: 73420 - protein, 222 aa, Setaria italica
  Transcript Sequence Number=SeqID_7446
  Gene Ontology: Mol. function=protein binding; Cellular component =extracellular region; Biological process=reproduction
  Homolog annotation: Hit_ID=B6T3J5; Match level="QueryCoverage=60%, HitCoverage=43%, E-value=8e-70, Identity=94%"; Hit description =VGPW2523
  Pfam annotation: Domain name=DDRGK; Domain location=11-199; Score =332.7; E_value=7.2e-97; Accession=PF09756.1; Description=DDRGK domain
EDDAEEEDEEVPDAPRSSKKEKKRQERQAQREAEEAARDSRRNKQDRYEEMRRRKDEEREAQERQLEEEARARKAKEEEAAALEFEKWKGAFSVDAEGTTESETQDDGQGLLHNFVEHIKKQKCVPLEDLAAEFRMRTQDCINRIVTLESMDRLSGVMDDRGKFIYISTEEMKAVAEYIRKQGRVSISHLANNSNQFIDLEPKAQYEEESHQDDSAAAETEP

SEQ ID NO: 73421 - protein, 185 aa, Setaria italica
  misc_feature (38)..(38): Xaa can be any naturally occurring amino acid
  Transcript Sequence Number=SeqID_7447
  Homolog annotation: Hit_ID=B6TEB6; Match level="QueryCoverage=98%, HitCoverage=55%, E-value=2e-80, Identity=81%"; Hit description =Thaumatin-like protein 1
  Pfam annotation: Domain name=Thaumatin; Domain location=1-173; Score =204.0; E_value=4.1e-58; Accession=PF00314.9; Description=Thaumatin family
GRVWARTGCAQDATGKMVCATGDCGSGSLECNGQNAAXPATLAEFTLAGGAGDDFYDVSLVDGYNLPILIEPAGAATGATTCAAAGCTADLNARCPAELRTEGGAGCRSACDAFGKPEYCCSGAYANPNTCRPTAYSQVFKSACPKSYSYAYDDPTSTFTCAGGRDYTITFCPVATPSVKSSGGP

SEQ ID NO: 73422 - protein, 101 aa, Setaria italica
  misc_feature (88)..(88): Xaa can be any naturally occurring amino acid
  Transcript Sequence Number=SeqID_7448
  Gene Ontology: Mol. function=oxidoreductase activity, acting on the CH-CH group of donors; Cellular component=peroxisome; Biological process=fatty acid metabolic process
  Homolog annotation: Hit_ID=B6U7U8; Match level="QueryCoverage=100%, HitCoverage=14%, E-value=7e-41, Identity=76%"; Hit description=Acyl -coenzyme A oxidase 2
FVAPDYNDGKEAQREATMRRVAHLARRGVFRGWLTEPGAEAELRKLALLESLGVYDHSLAIKIGVHFFLWGSAIKFLGTKRHHDKWLXSATENYDIKGCFA

SEQ ID NO: 73423 - protein, 155 aa, Setaria italica
  misc_feature (39)..(39): Xaa can be any naturally occurring amino acid
  Transcript Sequence Number=SeqID_7449
  Gene Ontology: Mol. function=oxidoreductase activity, acting on the CH-CH group of donors; Cellular component=peroxisome; Biological process=fatty acid metabolic process
  Homolog annotation: Hit_ID=B6U7U8; Match level="QueryCoverage=99%, HitCoverage=23%, E-value=3e-65, Identity=79%"; Hit description=Acyl -coenzyme A oxidase 2
  Pfam annotation: Domain name=ACOX; Domain location=16-150; Score= -14.5; E_value=5.7e-07; Accession=PF01756.11; Description=Acyl-CoA oxidase
YKLTGSILRSSKFQMDLFCLRERDLLKQFAEEVSLHLAXSFQLAEDLARAFTERTILQIFLEDEMNVPSGSLKELLGLLRSLYVMVSIDESASFLRYGYLSRGNVAGVRKEVLKLCSELRPHALAVVSSFGIPDAFLSPLAFDWIEANALSTGSH

SEQ ID NO: 73424 - protein, 339 aa, Setaria italica
  Transcript Sequence Number=SeqID_7450
  Gene Ontology: Mol. function=oxidoreductase activity, acting on the CH-CH group of donors; Cellular component=peroxisome; Biological process=fatty acid metabolic process
  Homolog annotation: Hit_ID=B6U7U8; Match level="QueryCoverage=92%, HitCoverage=45%, E-value=1e-176, Identity=92%"; Hit description=Acyl- coenzyme A oxidase 2
  Pfam annotation: Domain name=Acyl-CoA_dh_1; Domain location=173-328; Score=-31.3; E_value=0.1; Accession=PF00441.16; Description=Acyl-CoA dehydrogenase, C-terminal dom
  Pfam annotation: Domain name=Acyl-CoA_dh_M; Domain location=36-96; Score=63.3; E_value=9e-16; Accession=PF02770.11; Description=Acyl -CoA dehydrogenase, middle domain
  Pfam module annotation: Pfam domain module=Acyl-CoA_dh_1::Acyl-CoA_dh_ M; Domain location=173-328::36-96
YSLAKFVRGSAIKFLGTKRHHDKWLFATENYDIKGCFAMTELGHGSNVRGIETIATYDSKAREFIINTPCESAQKYWIGGAANHATHTIVFSQLHINGKNEGVHAFVAQIRDGDGNVLPNIHIADCGHKIGLNGVDNGRIWFQNIRVPRENLLNWVADVLPDGQYVSMIDDQDQRFAAFLSPLTLGRVNIAVNSVYISKVGLAIAVRYGLSRRAFSLTPDGPEMLLLDYPSHQRRLLPLLAKVCLMSSAGNFMKKMYVKRTPEMSKAIHIYSSALKATLTWQNMITLQECREACGGQGLKTENRVGIFKAEFDVQSTFEVIIIVTNRQDKVKNKRTNFK

SEQ ID NO: 73425 - protein, 452 aa, Setaria italica
  Transcript Sequence Number=SeqID_7451
  Gene Ontology: Mol. function=translation initiation factor activity; Cellular component=eukaryotic translation initiation factor 2B complex; Biological process=biosynthetic process
  Homolog annotation: Hit_ID=B6TJ84; Match level="QueryCoverage=100%, HitCoverage=99%, E-value=0.0, Identity=91%"; Hit description =Translation initiation factor eIF-2B gamma subunit
  Pfam annotation: Domain name=Hexapep; Domain location=355-372; Score =12.1; E_value=2.3; Accession=PF00132.16; Description=Bacterial transferase hexapeptide (th
  Pfam annotation: Domain name=Hexapep; Domain location=378-395; Score =14.2; E_value=0.54; Accession=PF00132.16; Description=Bacterial transferase hexapeptide (th
  Pfam annotation: Domain name=Hexapep; Domain location=401-418; Score =4.3; E_value=49; Accession=PF00132.16; Description=Bacterial transferase hexapeptide (th
  Pfam annotation: Domain name=NTP_transferase; Domain location=4-217; Score=-51.4; E_value=0.00028; Accession=PF00483.15; Description =Nucleotidyl transferase
  Pfam module annotation: Pfam domain module=Hexapep::Hexapep::Hexapep:: NTP_transferase; Domain location=355-372::378-395::401-418::4-217
MDFQVVVLAGGTSETLSPLVSKDVPKALLPVANRPLLSYALDLLEASDLKDLIVVVEGQEAARLVGAWVSSAYLDRLRVEVVAVSEDLGSAGALRAISKRLTANDILVISGDLVTDVLPGAVAATHRRNGAAVTALLCSVPVSGPSDTASSSGKDKAKKPNRLNIVGLDKTKQFLLHIISGTDVEKDVRVHKRKIQAVGQMEIRSDLMDAHLYAFKRTILQDVLEQKESYRSIRLEVLPYLVRSQLRSAPSGGNGTTGDETGNSTVLSSGNLQCLSQHRVIAPSAFKQDVLSRSHGGHRCCAYIATKNKYCHRLNSMQSYCDINRDVIGEASHLSGYSFSAQNNIIHPSSVLGSKTTIGPHCILAEGSQLGDKCSVKRSVIGRHCRIGSNVKIVNSVVMNHVVIEDGCHIQGSVVCNNVQLQERAVLKDCQIGAGYIVTAGSEHKAESLARR

SEQ ID NO: 73426 - protein, 90 aa, Setaria italica
  Transcript Sequence Number=SeqID_7452
  Subcellular localization annotation: CTP_CleavageSite=43; ConfidenceScore=5.66e-01
MALVACPRYNISHPRAFASAPGSRGLLRASRSAASRPRGRLRRAMAANGGGHSTATGAGASDAPPSLLVFSGGTAFNGVVEELKKVTTRV

SEQ ID NO: 73427 - protein, 302 aa, Setaria italica
  Transcript Sequence Number=SeqID_7453
  Gene Ontology: Mol. function=metal ion binding; Biological process =intracellular signaling cascade
  Homolog annotation: Hit_ID=B6U5C9; Match level="QueryCoverage=56%, HitCoverage=67%, E-value=4e-33, Identity=46%"; Hit description =Protein binding protein
  Pfam annotation: Domain name=C1_1; Domain location=12-62; Score=-0.0; E_value=0.031; Accession=PF00130.14; Description=Phorbol estersdiacylglycerol binding do
  Pfam annotation: Domain name=C1_2; Domain location=136-161; Score =16.7; E_value=0.048; Accession=PF03107.8; Description=C1 domain
  Pfam annotation: Domain name=C1_2; Domain location=26-54; Score=7.0; E_value=0.57; Accession=PF03107.8; Description=C1 domain
  Pfam annotation: Domain name=C1_2; Domain location=81-110; Score =12.0; E_value=0.16; Accession=PF03107.8; Description=C1 domain
  Pfam annotation: Domain name=C1_3; Domain location=135-161; Score =5.7; E_value=0.13; Accession=PF07649.4; Description=C1-like domain
  Pfam annotation: Domain name=C1_3; Domain location=25-54; Score=18.8; E_value=0.0036; Accession=PF07649.4; Description=C1-like domain
  Pfam annotation: Domain name=C1_3; Domain location=80-110; Score =14.0; E_value=0.013; Accession=PF07649.4; Description=C1-like domain
  Pfam module annotation: Pfam domain module=C1_1::C1_2::C1_2::C1_2::C1_ 3::C1_3::C1_3; Domain location=12-62::136-161::26-54::81-110::135 -161::25-54::80-110
MASIRHFADPHHPLLETQYSHDQTGRCSICLLKLAGHRGYGCYFCNIHLHGACAGYFEETISFFAHQSHALKLSRSSPGRVCDICRGDCPEGSFVYRCFGCRFDAHPLCGMLPERVGNPFHPEHELCMVSSESPGSCSACHHPLPKWRYTCSSFELHVGCAIDPPPTAAGGQGSNGHAAAFKGSYAYGGAQGSHGAAGQHSLGGPAGQGWWYPYHGPVTPGYYHVIQGGYGYGHPVQQGSSYASFMPGAGHGATGSSGQSTPHHPGGLMSAIARFLLRVAINATVNEFASQLVFGADLELND

SEQ ID NO: 73428 - protein, 59 aa, Setaria italica
  Transcript Sequence Number=SeqID_7454
RSLSIYMNWTINTEQSGTGKQNYYDKTQCWEQAAEGLAGLEVNLILLQPFTVQQRACRS

SEQ ID NO: 73429 - protein, 46 aa, Setaria italica
  Transcript Sequence Number=SeqID_7455
  Gene Ontology: Mol. function=hydrolase activity, hydrolyzing O -glycosyl compounds; Biological process=carbohydrate metabolic process
  Homolog annotation: Hit_ID=B9SAQ1; Match level="QueryCoverage=76%, HitCoverage=7%, E-value=6e-12, Identity=88%"; Hit description=Beta -glucosidase, putative
MVVPAVAHSPNRFSISWSRLIPKGRGAINPKGLQYYNNLIDELVRH

SEQ ID NO: 73430 - protein, 355 aa, Setaria italica
  misc_feature (9)..(9): Xaa can be any naturally occurring amino acid
  misc_feature (22)..(22): Xaa can be any naturally occurring amino acid
  misc_feature (242)..(242): Xaa can be any naturally occurring amino acid
  Transcript Sequence Number=SeqID_7456
  Gene Ontology: Cellular component=exocyst; Biological process=vesicle docking during exocytosis
  Homolog annotation: Hit_ID=B9SJM9; Match level="QueryCoverage=100%, HitCoverage=44%, E-value=1e-123, Identity=59%"; Hit description =Sec15, putative
ELIEKDYMXNIPLKLLKKVIQXQIPIVKLYIEKKVCGEFNEWLVYIRRIGKEIGHAAIGQVNLARQKDEGMCARQREAEECSRVGFNEHAYILDVENMDEEAMLEFDLAPVYRAYHIHIGLGLGEKFREYYFNNRLMQLNSDLEISTSQPFVESHQPFLAQIAGFFIIEDRVLRTADGLLSESQVETMWETAISKVTSILEQQLSLMDTANYLLNVKGYISLLGTTMKKYGYQATSLVEILXQNRDKYLELLISDCRKQIKNVLSKDSYEQMVIKKENEYDMNVAALQLEPIDVVPDLPYVAPFSSSVPTACRIVRAFIEDLVRYLSYGSSMNFYDVVKSYLDKFLIEVLNEGFL

SEQ ID NO: 73431 - protein, 109 aa, Setaria italica
  Transcript Sequence Number=SeqID_7457
  Gene Ontology: Mol. function=potassium ion transmembrane transporter activity; Cellular component=integral to membrane
  Homolog annotation: Hit_ID=Q7XPL3; Match level="QueryCoverage=100%, HitCoverage=13%, E-value=2e-16, Identity=45%"; Hit description =Probable potassium transporter 15
APSLEWRWVSTEEDDDEDRGRGAAAVGVVGRGGSFESEDDEDGDDEDEEEKEEGKKRLIRTVPSVDWFDVEGNEVSAGQQLGDTEEFDFGRTMFLALQTLAVVLEIIGI

SEQ ID NO: 73432 - protein, 115 aa, Setaria italica
  Transcript Sequence Number=SeqID_7458
  Gene Ontology: Mol. function=metal ion binding; Cellular component =nucleus
  Homolog annotation: Hit_ID=Q9LGU7; Match level="QueryCoverage=97%, HitCoverage=12%, E-value=1e-14, Identity=42%"; Hit description =Squamosa promoter-binding-like protein 1
  Subcellular localization annotation: CTP_CleavageSite=46; ConfidenceScore=5.06e-01
SGLESGSSSGQINHPNYLVNLLKNLAAVASTQAYQDILNNANSNPTSNAGNNAANGSTMHELTIQSIPVGSEPLAEGPPVKKRVQDFDLNDACIEEVERRTDKIVFKLFGKEPKD

SEQ ID NO: 73433 - protein, 119 aa, Setaria italica
  Transcript Sequence Number=SeqID_7459
  Gene Ontology: Mol. function=metal ion binding; Cellular component =nucleus; Biological process=regulation of transcription, DNA -dependent
  Homolog annotation: Hit_ID=Q9LGU7; Match level="QueryCoverage=98%, HitCoverage=14%, E-value=5e-46, Identity=68%"; Hit description =Squamosa promoter-binding-like protein 1
MLDLNLHYLEYLDMESYIRPGCVILTVYLRLPNWMWDELDDDPAPWIEKLISMSNDGFWRTGWVYARVQECLTLSCNGRLMLASPWQPVIGDRLQRLCVTPIAVACSSTAKFCVQGFNI

SEQ ID NO: 73434 - protein, 299 aa, Setaria italica
  misc_feature (107)..(107): Xaa can be any naturally occurring amino acid
  misc_feature (278)..(278): Xaa can be any naturally occurring amino acid
  Transcript Sequence Number=SeqID_7460
  Gene Ontology: Mol. function=metal ion binding; Cellular component =nucleus; Biological process=regulation of transcription, DNA -dependent
  Homolog annotation: Hit_ID=Q9LGU7; Match level="QueryCoverage=99%, HitCoverage=32%, E-value=7e-84, Identity=55%"; Hit description =Squamosa promoter-binding-like protein 1
WQPVIGFNIVQPCTQNIAVACSSTAKFCVQGFNIVQPTTKLLCVFGEKYLIQEETQTLLEDTTRQQGRQCLTFSCSFPSTSGRGFIEVEDYDQSSLSHFVLYITKYXDSLSQVEDYDQSSLSVPFVVTDKDLCSEIRMLEHELDLSSFDETSERIGDLMASRSRALHFLQEIGWLLQRSHMQATSEQRQYSTEGFSVERFRWLLSFAIDQEWCAVVNKLLNTMFRGDIGLDVPSPVEFALGENLLLTAVNKRSKPLVQFLLRYTITNYAPDIDPVQFXLFTPDMTGPSNITPLHIAATI

SEQ ID NO: 73435 - protein, 250 aa, Setaria italica
  Transcript Sequence Number=SeqID_7461
  Gene Ontology: Mol. function=metal ion binding; Cellular component =nucleus; Biological process=regulation of transcription, DNA -dependent
  Homolog annotation: Hit_ID=Q9LGU7; Match level="QueryCoverage=99%, HitCoverage=29%, E-value=6e-85, Identity=65%"; Hit description =Squamosa promoter-binding-like protein 1
VFLNTMFRGDIGLDVPSPVEFALGENLLLTAVNKRSKPLVQFLLRYTITNYAPDIDPVQFLFTPDMTGPSNITPLHIAATISDTTGVLDALTDDPQQLGIKVWKTARDDTGLTPEDYAQKRGHISYIQMVQDKIDRRLPKAHVSVAIPSRPSATDTITKHASHLKSTDQTAFDVEKSARSIINQPLSCGQCVHQLAYRPRTNRFFSTRPAMLSLVAIAAVCVCVGLIMKSPPQVSSMKPFLWEKITWGPN

SEQ ID NO: 73436 - protein, 263 aa, Setaria italica
  Transcript Sequence Number=SeqID_7462
  Gene Ontology: Mol. function=catalytic activity; Biological process =trehalose biosynthetic process
  Homolog annotation: Hit_ID=Q5D6D9; Match level="QueryCoverage=100%, HitCoverage=30%, E-value=1e-117, Identity=70%"; Hit description =Trehalose-6-phosphate synthase
  Pfam annotation: Domain name=Glyco_transf_20; Domain location=33-263; Score=60.3; E_value=2.1e-16; Accession=PF00982.13; Description =Glycosyltransferase family 20
MQRTMTTPGTLVELDEERAGSVASDVQSSLAGDRLIVVANTLPVRGERRPDGRGWTFSWDEDSLLFHLRDGLPDDMEVLYVGSLRADVPPAEQDDVAQALLERFRCVPAFLPKDICDRFYHGFCKQMLWPLFHYMLPFSPDHGGRFDRSQWEAYVLTNKLFSQRVIEVLNPEDDYVWIHDYHLLALPSFLRRRFNRLRIGFFLHSPFPSSELYRSLPVRDEILKSLLNCDLIGFHTFDYARHFLSCCSRMLGIEYQSKRGYIG

SEQ ID NO: 73437 - protein, 54 aa, Setaria italica
  Transcript Sequence Number=SeqID_7463
MGNACGGSLRSRYLHSFKHAASQRQDSEYSAGAAANDSPKKPSRPATPPATTDA

SEQ ID NO: 73438 - protein, 79 aa, Setaria italica
  Transcript Sequence Number=SeqID_7464
  Gene Ontology: Mol. function=transcription factor activity; Cellular component=nucleus; Biological process=regulation of transcription, DNA-dependent
  Homolog annotation: Hit_ID=B6STH9; Match level="QueryCoverage=64%, HitCoverage=22%, E-value=3e-22, Identity=98%"; Hit description =Dehydration-responsive element-binding protein 1D
MDWAYSGSGYGYYSSSGTPSPPAGGDGGENAYMTVSSAPPKRRAGRTKFKETRHPVYKGVRSRNPGRWVCEVREPHGRQ

SEQ ID NO: 73439 - protein, 149 aa, Setaria italica
  Transcript Sequence Number=SeqID_7465
  Gene Ontology: Mol. function=protein serine/threonine kinase activity; Biological process=protein amino acid phosphorylation
  Homolog annotation: Hit_ID=Q6QLL5; Match level="QueryCoverage=84%, HitCoverage=17%, E-value=3e-17, Identity=38%"; Hit description=WAK -like kinase
  Subcellular localization annotation: CTP_CleavageSite=57; ConfidenceScore=5.13e-01
TNNCSVPPATYLNHSSSHCFHGAKAENFSCVHPPSGNRFLNKTEIRALGSECTGLVSAASYWASPAPTPAILLGVMELEWWMLGPCSCAPNANCIAVSTPDSRQAFRCDCIEGFEGDGFPDGTGCRRVSVPNARCNPSKYLAEDCGKTA

SEQ ID NO: 73440 - protein, 153 aa, Setaria italica
  Transcript Sequence Number=SeqID_7466
  Homolog annotation: Hit_ID=Q94JA6; Match level="QueryCoverage=83%, HitCoverage=33%, E-value=7e-33, Identity=62%"; Hit description =P0047B08.5 protein
LERRRYADPPAFAADVRLTNSNAKSYNNPGDPVYESADELSGIFEDGWASIQAELPPPPPTDAERKLKFRDDLKGLPVAAQRTVAGFLKERGACQLEKRGKLEVDLGKADAATLDELDRVVAKHRAADSDVVAPSPECRNHERGQTEGPSPKS

SEQ ID NO: 73441 - protein, 133 aa, Setaria italica
  misc_feature (95)..(95): Xaa can be any naturally occurring amino acid
  misc_feature (109)..(109): Xaa can be any naturally occurring amino acid
  Transcript Sequence Number=SeqID_7467
  Gene Ontology: Mol. function=protein methyltransferase activity; Cellular component=cytoplasm; Biological process=protein amino acid methylation
  Homolog annotation: Hit_ID=B9RKM0; Match level="QueryCoverage=100%, HitCoverage=85%, E-value=5e-42, Identity=66%"; Hit description=S -adenosylmethionine-dependent methyltransferase, putative
  Pfam annotation: Domain name=MTS; Domain location=34-132; Score= -66.7; E_value=0.00094; Accession=PF05175.6; Description =Methyltransferase small domain
MKLKQLEGLLGGLTQFPAPKVELEQYPTGPHIASRMLYTAENSFNDITGKVVADFGCGCGTLAVASALLDAEHVIGIDVDPQSLELAQENAADLXGFHIDTVVMNPPFXRKKGADMEFLSMGLKVASQAVYSL

SEQ ID NO: 73442 - protein, 149 aa, Setaria italica
  misc_feature (110)..(110): Xaa can be any naturally occurring amino acid
  misc_feature (128)..(128): Xaa can be any naturally occurring amino acid
  misc_feature (140)..(140): Xaa can be any naturally occurring amino acid
  Transcript Sequence Number=SeqID_7468
  Gene Ontology: Mol. function=protein methyltransferase activity; Cellular component=cytoplasm; Biological process=protein amino acid methylation
  Homolog annotation: Hit_ID=B9RKM0; Match level="QueryCoverage=100%, HitCoverage=85%, E-value=6e-49, Identity=70%"; Hit description=S -adenosylmethionine-dependent methyltransferase, putative
  Pfam annotation: Domain name=MTS; Domain location=34-148; Score= -39.4; E_value=7.8e-06; Accession=PF05175.6; Description =Methyltransferase small domain
MKLKQLEGLLGGLTQFPAPKVELEQYPTGPHIASRMLYTAENSFNDITGKVVADFGCGCGTLAVASALLDAEHVIGIDVDPQSLELAQENAADLELDIDLIWSDIKNLIXGFHIDTVVMNPPFGTRRXGADMEFLLMGLXVASQAVYSL

SEQ ID NO: 73443 - protein, 56 aa, Setaria italica
  Transcript Sequence Number=SeqID_7469
KNGQTSFRTFYYNCKALTLHDLRDHALFFNKELGLWELAGAMKLQGLGRGRSVGLT

SEQ ID NO: 73444 - protein, 142 aa, Setaria italica
  misc_feature (87)..(87): Xaa can be any naturally occurring amino acid
  Transcript Sequence Number=SeqID_7470
  Gene Ontology: Mol. function=hydrolase activity; Cellular component =intracellular; Biological process=regulation of transcription, DNA -dependent
  Homolog annotation: Hit_ID=C1IC98; Match level="QueryCoverage=88%, HitCoverage=32%, E-value=7e-26, Identity=46%"; Hit description =Histone deacetylase HD2 isoform 2
MDFASCKHWGVLVRPGETVKCNPGEVYCHVSQIALQDDKGNEDVRVFVKVGGNEILVGTLSVDKYPQCMIGLVFEKEFELRHTSKTXNISALGYKFCETKSYSDTSTDDDDDSDEEVPLAIPLYPNADDDRSKQTKSGVDIV

SEQ ID NO: 73445 - protein, 151 aa, Setaria italica
  Transcript Sequence Number=SeqID_7471
  Gene Ontology: Mol. function=zinc ion binding; Cellular component =intracellular
  Homolog annotation: Hit_ID=C1IC97; Match level="QueryCoverage=55%, HitCoverage=26%, E-value=1e-12, Identity=55%"; Hit description =Histone deacetylase HD2 isoform 1
MLVPCSGQNLALFLLACDVIHLYQYIYHLYSEHIILLCYIVDAQDSSDEDDSDSSDEDDGEDTPKNIMGKNRPAETPLKTPLKKAKIATPSMGNKTGSGSTKRSGYVHVATPYPKQVKKTPSIIDSSKQSAGYSCKSCSKTFYSSVALDTH

SEQ ID NO: 73446 - protein, 244 aa, Setaria italica
  Transcript Sequence Number=SeqID_7472
  Gene Ontology: Mol. function=zinc ion binding; Cellular component =intracellular
  Homolog annotation: Hit_ID=Q0Z9W3; Match level="QueryCoverage=36%, HitCoverage=28%, E-value=7e-13, Identity=55%"; Hit description =Histone deacetylase HDAC2
  Pfam annotation: Domain name=zf-C2H2; Domain location=217-240; Score =23.2; E_value=0.0011; Accession=PF00096.18; Description=Zinc finger, C2H2 type
SSQGAGVLVRPGETVKCNPGEVYCHVSQIALQDDKGNEDVRVFVKVDDDSDEEVPLAIPLYPNADDDRSKQTKSGVDNPASTQLCKPKNTLEETKDPEKQKGDVGGTDDDHSDENSVHSEEGESGDDEDSSDEDDSDSSDEDDGEDTPKNIMGKNRPAETPLKTPLKKAKIATPSMGNKTGSGSTKRSGYVHVATPYPKQVKKTPSIIDSSKQSAGYSCKSCSKTFYSSVALDTHRKVKHNAHK

SEQ ID NO: 73447 - protein, 84 aa, Setaria italica
  Transcript Sequence Number=SeqID_7473
  Gene Ontology: Mol. function=kinase activity; Cellular component =chloroplast; Biological process=carbohydrate metabolic process
  Homolog annotation: Hit_ID=B9RHB4; Match level="QueryCoverage=96%, HitCoverage=18%, E-value=5e-33, Identity=81%"; Hit description =Xylulose kinase, putative
VCSQYGLSKECVVCTGTTDSIAAFLAAGTTEPGRAVTSLGSTMAIKLVSEARVDDARFGVYSHRLDDTWLVGGASNTGGAVLRQ

SEQ ID NO: 73448 - protein, 194 aa, Setaria italica
  misc_feature (67)..(67): Xaa can be any naturally occurring amino acid
  Transcript Sequence Number=SeqID_7474
  Gene Ontology: Mol. function=catalytic activity; Biological process =multicellular organismal development
  Homolog annotation: Hit_ID=A0F0B0; Match level="QueryCoverage=89%, HitCoverage=16%, E-value=4e-52, Identity=59%"; Hit description=Cold -induced thioredoxin domain-containing protein
RLKLLLYCLSLLKKVLHHSYRNGPSKAPGFLDDYAFLINGLLDLYEFGGKIEWLLWAVQLQVTQAIXLYSLNTSVLYLRFLNPYITSCRVITFGICRMSCFWTKQGGGYFNTPGEDPSVLLRVKEDYDGAEPSGNSVAAINLIRLSSIFDAAKSTGYKLNVEHLLAVFETRLRQLSIALPLMCCAADMLFLFLF

SEQ ID NO: 73449 - protein, 169 aa, Setaria italica
  misc_feature (151)..(151): Xaa can be any naturally occurring amino acid
  Transcript Sequence Number=SeqID_7475
  Gene Ontology: Mol. function=catalytic activity; Biological process =multicellular organismal development
  Homolog annotation: Hit_ID=A0F0B0; Match level="QueryCoverage=94%, HitCoverage=19%, E-value=4e-56, Identity=66%"; Hit description=Cold -induced thioredoxin domain-containing protein
LTSSYDPKFGGFGSAPKFPRPVEDYIMLYKFRKHMEAGKESEAHNIKKMVTHTLDCMARGGVHDHVGGGFHRYSVDECWHVPHFEKMLYDQGQIVNVYLDTFLITGDEYYSTVARDILDYLRRDMIGKEGEIFSAEDADSAEYEGAQEKGXFYVWTSNEIHLCEFVIHF

SEQ ID NO: 73450 - protein, 768 aa, Setaria italica
  Transcript Sequence Number=SeqID_7476
  Gene Ontology: Mol. function=catalytic activity; Biological process =multicellular organismal development
  Homolog annotation: Hit_ID=A0F0B0; Match level="QueryCoverage=95%, HitCoverage=87%, E-value=0.0, Identity=71%"; Hit description=Cold -induced thioredoxin domain-containing protein
  Pfam annotation: Domain name=DUF255; Domain location=22-91; Score =199.6; E_value=8.4e-57; Accession=PF03190.7; Description=Protein of unknown function, DUF255
ASSSAMSSSASSSSPHGGRKPNRLAAEHSPYLLQHAHNPVDWYPWGDEAFEKARAKDVPIFLSIGYSTCHWCHVMEGESFENEEVAKLLNDWFVSIKVDREECPDVDKVYMTYVSALHGGGGWPLSVFLSPNLKPLMGGTYFPPDDKYGRPGFKTVLRKVKEAWETKRDALERTGNLVIEQLRDALSAKANSQDLPNDLAVVSVDECVEKLTSSYDPKFGGFGSAPKFPRPVEDYIMLYKFRKHMEAGKESEAHNIKKMVTHTLDCMARGGVHDHVGGGFHRYSVDECWHVPHFEKMLYDQGQIVNVYLDTFLITGDEYYSTVARDILDYLRRDMIGKEGEIFSAEDADSAEYEGAPRKKEGAFYVWTSNEIEDTLGENAELFKNHYYVKSSGNCDLSPMSDPHNEFKGKNVLIERKPTSLMASKSGKSLDEYSQILGVCRQKLFDIRSKRPRPHLDDKVIVSWNGLAISAFARASKILKSGPTGTRFNFPVTGCNPVEYLEVAEKAANFIKVKLYDASSKRLHHSYRNGPSKAPGFLDDYAFLINGLLDLYEFGGKIEWLLWAVQLQVTQDELFLDKQGGGYFNTPGEDPSVLLRVKEDYDGAEPSGNSVAAINLIRLSSIFDAAKSTGYKLNVEHLLAVFETRLRQLSIALPLMCCAADMLSVPSRKQVVLVGEKGSAEFHDMVAAAFSSYDPNRTVIQIDPRNAEEMEFWDCNNANIAQMARSGPPEKPAVAHVCQDFKCSPPVTSPEALRELLNKTLAAASSAA

SEQ ID NO: 73451 - protein, 206 aa, Setaria italica
  misc_feature (162)..(162): Xaa can be any naturally occurring amino acid
  misc_feature (177)..(177): Xaa can be any naturally occurring amino acid
  Transcript Sequence Number=SeqID_7477
  Gene Ontology: Mol. function=serine-type endopeptidase activity; Cellular component=extracellular region; Biological process=negative regulation of catalytic activity
  Homolog annotation: Hit_ID=C0JAD4; Match level="QueryCoverage=99%, HitCoverage=25%, E-value=3e-69, Identity=64%"; Hit description =Subtilisin-like protease
EAVKQAGGVGMVLANDASTGNEIIADAHVLPATQIKYSDGLLLYSYLNSTKNPTGFITKPATVLGTKPAPFMAAFSSQGPNTITPEILKPDITAPGVSVIAAWTRSNSPTDLAFDLRRVAFNSESGTSMSCPHVSGIVGLLRTLHPEWSPAAIKSAIMTTAXEMDNNGELILNVSSXVAVEPFGLTDAGHVSRSRAIEPVASVYDL

SEQ ID NO: 73452 - protein, 55 aa, Setaria italica
  Transcript Sequence Number=SeqID_7478
HVMYNLGLLYNNSMVEMTDLDADSDGYLRLFFIIVQVDNLDKIWGYFKLFFTMVG

SEQ ID NO: 73453 - protein, 128 aa, Setaria italica
  misc_feature (96)..(96): Xaa can be any naturally occurring amino acid
  Transcript Sequence Number=SeqID_7479
  Gene Ontology: Mol. function=protein kinase activity; Biological process=protein amino acid phosphorylation
  Homolog annotation: Hit_ID=B6SWG2; Match level="QueryCoverage=44%, HitCoverage=8%, E-value=1e-20, Identity=84%"; Hit description =Protein kinase
MMAPPRPPGLPAAALPLLLLLLLLAAAAPAPARAQQEYEANKQNACYATNASSVLGYVCNATTSSAPSCDSYLVFRSNPPYNTPVLISYLLNSSPXAVASANAVPTVSTLAASSLVLVPVPAAAPARR

SEQ ID NO: 73454 - protein, 108 aa, Setaria italica
  Transcript Sequence Number=SeqID_7480
  Gene Ontology: Mol. function=oxidoreductase activity, acting on single donors with incorporation of molecular oxygen, incorporation of two atoms of oxygen; Cellular component=chloroplast; Biological process=fatty acid biosynthetic process
  Homolog annotation: Hit_ID=B1PYP0; Match level="QueryCoverage=98%, HitCoverage=11%, E-value=2e-47, Identity=85%"; Hit description =Lipoxygenase
QKDKLAWFRDEEFARETLAGMNPLSIRLVTELPIVSKLDEQTYGPGDSLITKELIEKQINGVMTADEAVQKKKLFILDYYDMLLPYVHAVRELEDTTLYASRTLFFLE

SEQ ID NO: 73455 - protein, 101 aa, Setaria italica
  Transcript Sequence Number=SeqID_7481
FLPLQTLSCSLRHPIEAPVAGVKVGKNPQELTRCTHQAQCNSGVTSAKRREKNVDSLYPCASEMLPIQHVTSMSKASAGAHLLMASPSSSHVDQILPQTER

SEQ ID NO: 73456 - protein, 118 aa, Setaria italica
  Transcript Sequence Number=SeqID_7482
NTNRIGSLGFKPRRLQSSPPVAAHRIRRREANQDVPRPDSAAPEQGGGVQAAAVAPHRHGLLRRRHPCRPLHPPLPHPRRRRPGAQARAVGSPVPIPPPPPKGATGMRRSSLQSYAQH

SEQ ID NO: 73457 - protein, 52 aa, Setaria italica
  Transcript Sequence Number=SeqID_7483
DSLAKAHGNTRLIKSLKPILDYFQPILLIYESGWLMWSFVGKNNPSKILYLK

SEQ ID NO: 73458 - protein, 50 aa, Setaria italica
  Transcript Sequence Number=SeqID_7484
NENFICASRSRFALAHVHLSKCVCSIPLPLQHLFSIVFLTSLSNPNRSLS

SEQ ID NO: 73459 - protein, 170 aa, Setaria italica
  Transcript Sequence Number=SeqID_7485
  Subcellular localization annotation: CTP_CleavageSite=13; ConfidenceScore=5.10e-01
MSTTKASSSRPPRRGSRRPTNVLFNIDAVVGIHNSRTTAEDRTRNGKAIQVSFCLKRPPQPSTLYVYSSDLNRSLPPEILYSVDDLLLLRVNMGSGPCISRGKDYDYFVYRADSTRPSLELLRRPHPYLSCSSAGLLPRPDGHYTVAALNFTGTVHQFELHLFHSDTSTW

SEQ ID NO: 73460 - protein, 335 aa, Setaria italica
  Transcript Sequence Number=SeqID_7486
  Gene Ontology: Mol. function=protein serine/threonine kinase activity; Biological process=protein amino acid phosphorylation
  Pfam annotation: Domain name=DUF1618; Domain location=108-268; Score=- 23.1; E_value=0.0022; Accession=PF07762.6; Description=Protein of unknown function (DUF1618)
KLLIQEDSTRPSLELLRRPHPYLSCSSAGLLPRPDGHYTVAALNFTGTVHQFELHLFHSDTSTWISRMLSVDAPLDFPVKIPRNCGRLFDHHTTTVITIGGEGGTMGWVDLWRDILLCDVLVGQPSLRSMPIPLPLVEMSYNNGQGIELGSPVQRRGIAFIRGKGCLRLVHLEMTEEFDDEEAGLNSIRVDDWALTTWSNKKMSSSLEDWHKESVVKASSIAIDPAISQVLEDTGLLRRPRENEAARNLQNLSMSLPSPCISGEDIVYLVAREKFMHPKAWILSVDMKKVGRLRSAAYFCTRRYRGLDFIYCPSRISKYMNPATTPVTVRKDAEE

SEQ ID NO: 73461 - protein, 158 aa, Setaria italica
  Transcript Sequence Number=SeqID_7487
  Gene Ontology: Mol. function=protein binding; Biological process =ubiquitin-dependent protein catabolic process
  Homolog annotation: Hit_ID=B9S0Z8; Match level="QueryCoverage=45%, HitCoverage=15%, E-value=3e-17, Identity=55%"; Hit description =Protein AFR, putative
AAAVARYDAAAAGGKLYVTEGWAWPFERAPRGAVYDAAADSWREMARGMREGWTGSCAVAGGRMYIVAEYGEWRLKRYDEARDEWRMVAGGGVPPGVRRPHVVAGEVGEVAGGRRRIYVVGAGLDVAVGTVSAAAAAGAPGVEEEVVEWEVVKGPASS

SEQ ID NO: 73462 - protein, 170 aa, Setaria italica
  misc_feature (35)..(35): Xaa can be any naturally occurring amino acid
  Transcript Sequence Number=SeqID_7488
  Subcellular localization annotation: CTP_CleavageSite=63; ConfidenceScore=5.18e-01
IAVAEEEQESNGDLPPGSAPPSPAPVPRHQAPAAXHGGGAARAAPPRSVAATRRTSLRVAGVRCGVDGAEALRSGSDVEVPPRSVPVRVAYELQQAGHRYLDVRYARSLQPHIILSGPVSMAGPARLGDAWQLRLQVRFRQRQSPCRRRTPDGATARQREVEGNSFSDLD

SEQ ID NO: 73463 - protein, 183 aa, Setaria italica
  Transcript Sequence Number=SeqID_7489
  Gene Ontology: Mol. function=thiosulfate sulfurtransferase activity; Cellular component=chloroplast
  Homolog annotation: Hit_ID=B6U016; Match level="QueryCoverage=57%, HitCoverage=54%, E-value=3e-55, Identity=95%"; Hit description =Senescence-associated protein DIN1
  Pfam annotation: Domain name=Rhodanese; Domain location=74-177; Score= 65.3; E_value=2.3e-16; Accession=PF00581.12; Description=Rhodanese -like domain
  Subcellular localization annotation: CTP_CleavageSite=52; ConfidenceScore=5.61e-01
MATSLPAAPLLAQLPSHATRPLRRHGGGAARAAPPRSVAATRRTSLRVAGVRCGVDGAEALRSGSDVEVPPRSVPVRVAYELQQAGHRYLDVRTEGEFSAGHPEGAVNIPYMNKTGSGMTKNTHFLEQVSRIFGKDDEIIVGCQSGKRSLMAATELCSAGFTAVTDIAGGFSSWRENELPITQ

SEQ ID NO: 73464 - protein, 123 aa, Setaria italica
  misc_feature (108)..(108): Xaa can be any naturally occurring amino acid
  Transcript Sequence Number=SeqID_7490
  Gene Ontology: Mol. function=heat shock protein binding; Biological process=protein folding
  Homolog annotation: Hit_ID=B9S0B6; Match level="QueryCoverage=95%, HitCoverage=96%, E-value=3e-45, Identity=70%"; Hit description =Nucleobase:cation symporter, putative
  Pfam annotation: Domain name=DUF1992; Domain location=1-71; Score =123.4; E_value=7.2e-34; Accession=PF09350.2; Description=Domain of unknown function (DUF1992)
IWHSMEEGHFENLPGKGKPLNIDSNPHADPAEDTLYRILSRNGCAPEWVELNKEIRGMIASWRSALKKAWANQSEDDGFSWNDDCRILQEQIRQINDKVFRYNLIVPXGRQMFGLNWDKEVEN

SEQ ID NO: 73465 - protein, 312 aa, Setaria italica
  Transcript Sequence Number=SeqID_7491
  Gene Ontology: Mol. function=binding
  Homolog annotation: Hit_ID=Q9M8J7; Match level="QueryCoverage=96%, HitCoverage=35%, E-value=6e-50, Identity=38%"; Hit description =F28L1.15 protein
VKMLVSTTGSTGLALRKDVAEDVFTVSNLRDILQYGHQHRELQKLATDVLTALAMDEHGKKAVAATGGVVKELLSIFVSAEERELGGEAGEALAMLALESEAGCAAILKRADVLDQLVSALQDDGDARRLNATRVLRSLCAYSGERHGERLRAVTKALPAVLSATMAARDKILEVSVGLTTEICGFIDGEQFAAELRGAGVDERAYVQRLAWILGENKRPEIKVPRMRRFVVQQIIWLMNCSRGDVYVGLLREVGMERLLESIADTTSELECYHVFSGSVGISKHRESFSGIVDSALELIAGSGGGGARAEE

SEQ ID NO: 73466 - protein, 87 aa, Setaria italica
  Transcript Sequence Number=SeqID_7492
PVTQYFQAGPFFFTAPVDKDDEDLFKVPQFPAKPYSYKKCVVRVKGEKANAVPARKKGGRRQYVNEQQKWKPKGAVDEDLYKISPQL

SEQ ID NO: 73467 - protein, 196 aa, Setaria italica
  Transcript Sequence Number=SeqID_7493
MAPPPEWQKRRLTRLCDLVAASLLPHLEAETLPPRQLTREDERRLLLVLSKVNKAILGWSQEEEEEEQRRCESDQEIFSCSGEVHSCSLPPGQHPNDGFGCLANVVSILVGVLGFCSGYVKHSAGNVLVSISSTLIKFDSIWIQFIELVWAAIHAESKCVHNALHSTTDSNNEDITSSSTSITSFMTVLNERCSSI

SEQ ID NO: 73468 - protein, 118 aa, Setaria italica
  Transcript Sequence Number=SeqID_7494
  Gene Ontology: Mol. function=protein binding; Cellular component =nucleus; Biological process=regulation of transcription, DNA -dependent
  Homolog annotation: Hit_ID=B6SU23; Match level="QueryCoverage=94%, HitCoverage=25%, E-value=9e-31, Identity=66%"; Hit description =Nodulation signaling pathway 2 protein
KAKRAPVSPDEKGDGDGCPARGKRQQLLGLGPAAAAEEGPETRGLRLLSLLLRCAEAVAMDQLTEARELLPEIGELASPFGSSPERVAAYFGDALCARVLSSYLGAYSPLALRPLAAA

SEQ ID NO: 73469 - protein, 122 aa, Setaria italica
  Transcript Sequence Number=SeqID_7495
  Gene Ontology: Mol. function=UTP:glucose-1-phosphate uridylyltransfera se activity; Cellular component=cytoplasm; Biological process =metabolic process
  Homolog annotation: Hit_ID=Q43772; Match level="QueryCoverage=98%, HitCoverage=25%, E-value=5e-43, Identity=71%"; Hit description=UTP- -glucose-1-phosphate uridylyltransferase
MADEKLAKLREAVAGLGQISENEKSGFLSLVARYLSGDEELIEWAKIHTPTDEVVVPYDALESSPEDIEATKKLLDKLAVLKLNGGLGTTMGCTGPKSVIEVRNGFTFLDLIVIQIESLNKK

SEQ ID NO: 73470 - protein, 166 aa, Setaria italica
  Transcript Sequence Number=SeqID_7496
  Gene Ontology: Mol. function=UTP:glucose-1-phosphate uridylyltransfera se activity; Cellular component=cytoplasm; Biological process =metabolic process
  Homolog annotation: Hit_ID=P57751; Match level="QueryCoverage=84%, HitCoverage=29%, E-value=5e-69, Identity=91%"; Hit description=UTP- -glucose-1-phosphate uridylyltransferase 1
  Pfam annotation: Domain name=UDPGP; Domain location=1-155; Score= -96.0; E_value=5.3e-10; Accession=PF01704.10; Description=UTP- -glucose-1-phosphate uridylyltransferase
KKITRFSDTIAGFGRWVNLKAIKRLVEADALKMEIIPNPKEVEGVKVLQLETAAGAAIRFFDHAIGINVPRSRFLPVKATSDLQLVQSDLYTLVDGFVTRNSVRTNPSNPSIELGPEFKKVGSFLSRFKSIPSIVELDSLKVSGDVWFGFGIVLKVHLPNKFKFKF

SEQ ID NO: 73471 - protein, 420 aa, Setaria italica
  Transcript Sequence Number=SeqID_7497
  Gene Ontology: Mol. function=UTP:glucose-1-phosphate uridylyltransfera se activity; Cellular component=cytoplasm; Biological process =metabolic process
  Homolog annotation: Hit_ID=B3VDY8; Match level="QueryCoverage=96%, HitCoverage=84%, E-value=0.0, Identity=84%"; Hit description=UTP -glucose 1 phosphate uridylyltransferase
  Pfam annotation: Domain name=UDPGP; Domain location=3-388; Score =813.9; E_value=1e-241; Accession=PF01704.10; Description=UTP- -glucose-1-phosphate uridylyltransferase
YPLCALPFPCCVSQESSPEDIEATKKLLDKLAVLKLNGGLGTTMGCTGPKSVIEVRNGFTFLDLIVIQIESLNKKYGSNVPLLLMNSFNTHEDTLKIVEKYANSSIEIHTFNQSQYPRVVADEFLPWPSKGKTDKDGWYPPGHGDIFPSLMNSGKLDLLLSQGKEYVFIANSDNLGAIVDMKILNHLIHKQNEYCMEVTPKTLADVKGGTLISYEGRVQLLEIAQVPDAHVNEFKSIEKFKIFNTNNLWVNLKAIKRLVEADALKMEIIPNPKEVEGVKVLQLETAAGAAIRFFDHAIGINVPRSRFLPVKATSDLQLVQSDLYTLVDGFVTRNSVRTNPSNPSIELGPEFKKVGSFLSRFKSIPSIVELDSLKVSGDVWFGFGIVLKGQVTITAKPGVKLEIPDGTVIENKDINGPDDL

SEQ ID NO: 73472 - protein, 206 aa, Setaria italica
  Transcript Sequence Number=SeqID_7498
  Gene Ontology: Mol. function=protein binding; Biological process =defense response
  Homolog annotation: Hit_ID=Q2PYY5; Match level="QueryCoverage=94%, HitCoverage=60%, E-value=6e-67, Identity=61%"; Hit description =Vernalization independence 3-like protein
  Pfam annotation: Domain name=WD40; Domain location=118-156; Score =47.7; E_value=4.6e-11; Accession=PF00400.24; Description=WD domain, G-beta repeat
  Pfam annotation: Domain name=WD40; Domain location=160-204; Score =29.9; E_value=1.1e-05; Accession=PF00400.24; Description=WD domain, G-beta repeat
  Pfam annotation: Domain name=WD40; Domain location=33-71; Score=32.5; E_value=1.7e-06; Accession=PF00400.24; Description=WD domain, G-beta repeat
  Pfam annotation: Domain name=WD40; Domain location=75-114; Score =36.1; E_value=1.4e-07; Accession=PF00400.24; Description=WD domain, G-beta repeat
  Pfam annotation: Domain name=eIF2A; Domain location=14-176; Score= -110.3; E_value=0.04; Accession=PF08662.3; Description=Eukaryotic translation initiation factor eIF
  Pfam module annotation: Pfam domain module=WD40::WD40::WD40::WD40::eIF 2A; Domain location=118-156::160-204::33-71::75-114::14-176
IALAAAGGGSGSVKLWDTEKWQPITSLAVPRPEGARPDKTGSGKFVLSVAWSPDGKLLACGSMDGTIAVYDAIRMKFLHHLEGHHMPVRSMVFSPVDPHVLFTACDDCHIHIYDAKEKTLIGAMSGHASWVLSIDVSPDGLAVATGSSDRTVRLWDINMRSSMQTMSNHSDQVWAVAFRPPGGAGVRAGRLASASDDKSISLYDYS

SEQ ID NO: 73473 - protein, 90 aa, Setaria italica
  misc_feature (36)..(36): Xaa can be any naturally occurring amino acid
  Transcript Sequence Number=SeqID_7499
  Gene Ontology: Mol. function=protein dimerization activity; Cellular component=nucleus; Biological process=regulation of transcription, DNA-dependent
  Homolog annotation: Hit_ID=Q2QM84; Match level="QueryCoverage=83%, HitCoverage=8%, E-value=5e-34, Identity=93%"; Hit description=Auxin response factor 25
MNLSPSKMPEPSPESDGEQRCLNSELWHACAGPLVXSLPMVGSPVVYFPQGHSEQVAASTNKEVDAQIPNYPNLPPQLICQLHNVTMHAE

SEQ ID NO: 73474 - protein, 350 aa, Setaria italica
  misc_feature (338)..(338): Xaa can be any naturally occurring amino acid
  Transcript Sequence Number=SeqID_7500
  Gene Ontology: Mol. function=protein dimerization activity; Cellular component=nucleus; Biological process=regulation of transcription, DNA-dependent
  Homolog annotation: Hit_ID=Q2QM84; Match level="QueryCoverage=95%, HitCoverage=37%, E-value=0.0, Identity=94%"; Hit description=Auxin response factor 25
  Pfam annotation: Domain name=Auxin_resp; Domain location=255-338; Score=190.3; E_value=5.3e-54; Accession=PF06507.5; Description=Auxin response factor
  Pfam annotation: Domain name=B3; Domain location=128-233; Score =113.1; E_value=9.5e-31; Accession=PF02362.13; Description=B3 DNA binding domain
  Pfam module annotation: Pfam domain module=Auxin_resp::B3; Domain location=255-338::128-233
MNLSPSKMPEPSPESDGEQRCLNSELWHACAGPLVSLPMVGSRVVYFPQGHSEQVAASTNKEVDAQIPNYPNLPPQLICQLHNVTMHADAETEEVYAQMTLQPLSPEEQKEPFLPIELGAGSKQPTNYFCKTLTASDTSTHGGFSVPRRAAEKVFPPLDFSQQPPVQELIARDLHDNEWKFRHIFRGQPKRHLLTTGWSVFVSAKRLVAGDSIIFIWNDNNQLLLGIRRANRPQTVMPSSVLSSDSMHIGLLAAAAHAAATNSRFTIFYNPRASPSEFVIPLAKYVKAVYHTRVSVGMRFRMLFETEESSVRRYMGTITGISDLDSERWPNSHWRSVXVGWDESTAGDKQ

SEQ ID NO: 73475 - protein, 92 aa, Setaria italica
  misc_feature (50)..(50): Xaa can be any naturally occurring amino acid
  misc_feature (75)..(75): Xaa can be any naturally occurring amino acid
  Transcript Sequence Number=SeqID_7501
  Gene Ontology: Mol. function=structural constituent of ribosome; Cellular component=ribonucleoprotein complex; Biological process =ribosome biogenesis
  Homolog annotation: Hit_ID=P35685; Match level="QueryCoverage=100%, HitCoverage=33%, E-value=2e-33, Identity=83%"; Hit description=60S ribosomal protein L7a
RQRRILKQRLKVPPALNQFTRTLDKNLATNLFKMLLKYRPEDKAAKKERXLFEVGSSRSCRSCKGKTVEAKKPIXVVKYGLNHVTYLIEQNK

SEQ ID NO: 73476 - protein, 50 aa, Setaria italica
  Transcript Sequence Number=SeqID_7502
MAAQGQAAAAAVSAAAAAGSASESGGGVVSVRVCRDINSRKSLGYAYVNY

SEQ ID NO: 73477 - protein, 122 aa, Setaria italica
  misc_feature (22)..(22): Xaa can be any naturally occurring amino acid
  misc_feature (39)..(39): Xaa can be any naturally occurring amino acid
  Transcript Sequence Number=SeqID_7503
  Gene Ontology: Mol. function=nucleic acid binding; Cellular component= cytoplasm; Biological process=response to cadmium ion
  Homolog annotation: Hit_ID=Q9XGW3; Match level="QueryCoverage=77%, HitCoverage=51%, E-value=2e-42, Identity=85%"; Hit description =Poly(A)-binding protein (Fragment)
  Pfam annotation: Domain name=RRM_1; Domain location=36-106; Score =78.6; E_value=2.3e-20; Accession=PF00076.14; Description=RNA recognition motif. (a.k.a. RRM, RBD, o
LYVGRAQKKSEREMELKEKFEXNIQEVAEKFQNTNLYLXNLEDNVDDEKLRELFAEYGTITSCKVMRDANGVSRGSGFVAFKSAEDANRALTEMNGNSTSYGSILSKHFLQLIISYSLGQIL

SEQ ID NO: 73478 - protein, 130 aa, Setaria italica
  misc_feature (103)..(103): Xaa can be any naturally occurring amino acid
  Transcript Sequence Number=SeqID_7504
  Gene Ontology: Mol. function=structural constituent of ribosome; Cellular component=ribonucleoprotein complex; Biological process =ribosome biogenesis
  Homolog annotation: Hit_ID=P35685; Match level="QueryCoverage=92%, HitCoverage=46%, E-value=1e-53, Identity=85%"; Hit description=60S ribosomal protein L7a
  Pfam annotation: Domain name=Ribosomal_L7Ae; Domain location=2-80; Score=55.7; E_value=1.7e-13; Accession=PF01248.18; Description =Ribosomal protein L7AeL30eS12eGadd45 family
VTWLRPYFTTIEQSKAQLVVIAHDVDPIELVVWLPALCRKMEVPYCIVKGKARLGSIVHKKTASVLCLTTVKNEDKLEFSKILEAIKANFNDKFDEVRKKWGXGIMGSKSQAKTKAREKLLAKEAAQRMT

SEQ ID NO: 73479 - protein, 127 aa, Setaria italica
  misc_feature (86)..(86): Xaa can be any naturally occurring amino acid
  misc_feature (96)..(96): Xaa can be any naturally occurring amino acid
  misc_feature (116)..(116): Xaa can be any naturally occurring amino acid
  Transcript Sequence Number=SeqID_7505
  Gene Ontology: Mol. function=nucleic acid binding; Cellular component= cytoplasm; Biological process=response to cadmium ion
  Homolog annotation: Hit_ID=P93616; Match level="QueryCoverage=93%, HitCoverage=40%, E-value=2e-47, Identity=56%"; Hit description =Poly(A)-binding protein
  Pfam annotation: Domain name=RRM_1; Domain location=3-55; Score=40.6; E_value=6.1e-09; Accession=PF00076.14; Description=RNA recognition motif. (a.k.a. RRM, RBD, o
NCFGKVIGTITSAVVMRDSDGKSRCFGFVNFENADDAAQAVQELNGKVFNDKELYVGRAQKKSEREMELKEKFEKNIQEVAEKFQXTLNLYLKNLXDNVDDEKLRELFAEYGTITXCKVMRMRMVSA

SEQ ID NO: 73480 - protein, 197 aa, Setaria italica
  misc_feature (116)..(116): Xaa can be any naturally occurring amino acid
  misc_feature (134)..(134): Xaa can be any naturally occurring amino acid
  Transcript Sequence Number=SeqID_7506
  Gene Ontology: Mol. function=structural constituent of ribosome; Cellular component=ribonucleoprotein complex; Biological process =ribosome biogenesis
  Homolog annotation: Hit_ID=P35685; Match level="QueryCoverage=100%, HitCoverage=75%, E-value=2e-77, Identity=76%"; Hit description=60S ribosomal protein L7a
  Pfam annotation: Domain name=Ribosomal_L7Ae; Domain location=49-145; Score=86.8; E_value=7.6e-23; Accession=PF01248.18; Description =Ribosomal protein L7AeL30eS12eGadd45 family
QRLNGAPALNQFTVPSTRTLQQNLFKMLLKYRPEDKAAKKERLLKRAQAETEGKTVEAKKPIVVKYGLNHVTYLIEQSKAQLVVIAHDVDPIELVVWLPALCRKMEVPYCIVKGKXARLGSIVHKKTASVLCLXTYLFKNEDKLEFSKILEAIKANFNDKFDEVRKKWGGGIMGSKSQAKTKAREKLLAKEAAQRMT

SEQ ID NO: 73481 - protein, 147 aa, Setaria italica
  misc_feature (21)..(21): Xaa can be any naturally occurring amino acid
  misc_feature (30)..(30): Xaa can be any naturally occurring amino acid
  misc_feature (101)..(101): Xaa can be any naturally occurring amino acid
  Transcript Sequence Number=SeqID_7507
  Gene Ontology: Mol. function=nucleic acid binding; Biological process= response to cadmium ion
  Homolog annotation: Hit_ID=P93616; Match level="QueryCoverage=83%, HitCoverage=18%, E-value=3e-49, Identity=83%"; Hit description =Poly(A)-binding protein
  Pfam annotation: Domain name=PABP; Domain location=46-117; Score =119.9; E_value=8.2e-33; Accession=PF00658.10; Description=Poly -adenylate binding protein, unique domain
GYRYPTGRGMPDPGMHGVGGXVMPSPYEMXGGMPIRDAGVSQPVPIGALATALANAPPDQQRLMLGENLYPLVDQLEHEQAAKVTGMLLEMDQTEVLHLLXSPDALKAKVAEAMEGTYRSAQHLQQTNASPEQQLANLSLNDGVVSS

SEQ ID NO: 73482 - protein, 259 aa, Setaria italica
  misc_feature (14)..(14): Xaa can be any naturally occurring amino acid
  Transcript Sequence Number=SeqID_7508
  Gene Ontology: Mol. function=structural constituent of ribosome; Cellular component=ribonucleoprotein complex; Biological process =ribosome biogenesis
  Homolog annotation: Hit_ID=P35685; Match level="QueryCoverage=91%, HitCoverage=92%, E-value=1e-104, Identity=79%"; Hit description=60S ribosomal protein L7a
  Pfam annotation: Domain name=Ribosomal_L7Ae; Domain location=114-209; Score=114.7; E_value=3.1e-31; Accession=PF01248.18; Description =Ribosomal protein L7AeL30eS12eGadd45 family
MAPKRGGKAPVPAXKKKPEKVTNPLFEKRPKQFGIGGALPPKKDLHRFVKWPKVVRIQRQRRILKQRLKVPPALNQFTRTLDKNLATNLFKMLLKYRPEDKAAKKERLLKRAQAEAEGKTVEAKKPIVVKYGLNHVTYLIEQNKAQLVVIAHDVDPIELVVWLPALCRKMEVPYCIVKGKARLGSIVHKKTASVLCLTTVKNEDKLEFSKVLEAIKANFNDKFDEVRKKWGGGVMGSKSQAKTKAREKLLAKEAAQRMT

SEQ ID NO: 73483 - protein, 107 aa, Setaria italica
  Transcript Sequence Number=SeqID_7509
MPRLPKRPGPLLVLLIVAFAAATAAASSDAADTVPFYPSAEAAAAAHCDGTLYPELCLSTLADIPDLHNKPLPDVICAAVNRTEDVVTATASNCSSYLQERTLSARD

SEQ ID NO: 73484 - protein, 97 aa, Setaria italica
  Transcript Sequence Number=SeqID_7510
VNDRAPLQVSTRLESERKKNERKAGEAKLSSSEWNERSGKGKYALSDCGRSCAQERRWERQPRRALLAKPPRLTTYATNDGMMMDGAPRRRRALLST

SEQ ID NO: 73485 - protein, 105 aa, Setaria italica
  Transcript Sequence Number=SeqID_7511
LLIITPLSTQISMIIVLVDLDCHKCYNKIRKILCQLQGKRNTEASSVRLFFVTMVWNSVEIHAKFQGFKVSNISRMHDRTNSLLSSELLLQTARGSGRSPSTTRA

SEQ ID NO: 73486 - protein, 295 aa, Setaria italica
  Transcript Sequence Number=SeqID_7512
  Gene Ontology: Mol. function=metal ion binding; Biological process =metal ion transport
  Pfam annotation: Domain name=HMA; Domain location=9-87; Score=15.4; E_ value=0.044; Accession=PF00403.18; Description=Heavy-metal-associated domain
MAAQISMIIVLVDLDCHKCYNKIRKILCQLQDCERIRTISFDDKSKTITIVGPFDPQRLACKLRCKGGKVIRDIHIVDNGSGRPPQKMAEPPPSSPPPMKNGKQKHKGKPPPPPAADEPPPPQPAPAPEPVPVHEMPPPPSPTHHGPPDREMSAMVPAFVEEKHPKAKPAELEPPPMSPPRKEKPPMDMHMPMPASPLPPPPVKERSPPLLMPARPCDQPPVEYVIPTVEIPSWPAPPVGPCGCPCCAPCYQGYYEGCRCCSCGRAYAPAPAACGGCRGCRTFSDEDPTAACTVM

SEQ ID NO: 73487 - protein, 256 aa, Setaria italica
  misc_feature (150)..(150): Xaa can be any naturally occurring amino acid
  misc_feature (237)..(237): Xaa can be any naturally occurring amino acid
  Transcript Sequence Number=SeqID_7513
  Gene Ontology: Mol. function=oxidoreductase activity; Biological process=oxidation reduction
  Homolog annotation: Hit_ID=Q2R0H4; Match level="QueryCoverage=100%, HitCoverage=71%, E-value=1e-127, Identity=87%"; Hit description =Oxidoreductase, aldo/keto reductase family protein, expressed
  Pfam annotation: Domain name=Aldo_ket_red; Domain location=1-254; Score=11.4; E_value=1.6e-08; Accession=PF00248.13; Description =Aldoketo reductase family
EQSGAPSSLRLLDAAFDAGVNFFDSAEMYPVPQRSETNGRSEEILGRWLRARRAPRDQVVVATKVAGPSGQMTWIRGGPTSLDSQNITVAIDDSLRRLGMDYIDLYQIHWPDRYVPMFGETEYDPSCQYTSVPMEEQLEALERAIDAGKXYIGLSNETPYGLMKFLQLSKDFQLRSKLLTLQNSYNLLCRNFDSGLAECCHHERISLLAYSPMAMGILSGKYHSSGDYGPPDARMNXLFKGRYSEGESRYKLQSPK

SEQ ID NO: 73488 - protein, 199 aa, Setaria italica
  Transcript Sequence Number=SeqID_7514
  Gene Ontology: Biological process=cell redox homeostasis
  Homolog annotation: Hit_ID=B6U3H2; Match level="QueryCoverage=92%, HitCoverage=90%, E-value=2e-56, Identity=60%"; Hit description =Thioredoxin-like 2
  Pfam annotation: Domain name=Thioredoxin; Domain location=73-185; Score=37.9; E_value=3.9e-08; Accession=PF00085.12; Description =Thioredoxin
  Subcellular localization annotation: CTP_CleavageSite=47; ConfidenceScore=5.53e-01
MITSYLPLRSFSVSPTTIAGAAYRSPTAATVPFPRATLSHHHRRRLASSANGSLPGLPLVEEDDDEVCPVDCVTEFKTDEEFVRHLERSKATGALVVVDFYRPSCGSCKYIEKRFMRLCKGSADDGAPVVFLKHNVIDEYDEKSEVAERLRIKVVPLFHFYKDGVLVESFATRDKERIIAAIQKYSSPEPETTEEEVQE

SEQ ID NO: 73489 - protein, 157 aa, Setaria italica
  misc_feature (67)..(67): Xaa can be any naturally occurring amino acid
  misc_feature (81)..(81): Xaa can be any naturally occurring amino acid
  Transcript Sequence Number=SeqID_7515
  Gene Ontology: Mol. function=DNA binding
  Pfam annotation: Domain name=zf-C2HC_plant; Domain location=5-50; Score=24.0; E_value=6.6e-05; Accession=PF07567.4; Description =Protein of unknown function, DUF1544
YWLGSHAVDLDGNKRRWQCKFCSLCRSGGVTTFKAHLIDDSCPNVPKEISKKVSNFIEEKRATRLLXNNYIFSVDEDEFSXTQVQGDRTAEYENDQQPSRNATLFLTLDECANEMAAGSSQCGEESSGQPVEHCDHPEEQWPLDHGSMDQVINNKKQ

SEQ ID NO: 73490 - protein, 118 aa, Setaria italica
  Transcript Sequence Number=SeqID_7516
  Gene Ontology: Mol. function=ATPase activity, coupled to transmembrane movement of substances; Cellular component=integral to membrane; Biological process=transport
  Homolog annotation: Hit_ID=Q9LGX1; Match level="QueryCoverage=97%, HitCoverage=8%, E-value=5e-49, Identity=81%"; Hit description=MDR -like ABC transporter
TATRVPFHRLFAFADSTDVELMLLGALGAVANGAAMPFMTVLFGNLIDAFGGAMSIHDVVNRVSNVSLQFIYLAIASAVASFVQVTCWMITGERQAARIRNLYLKTILRQEIAFFDKY

SEQ ID NO: 73491 - protein, 222 aa, Setaria italica
  Transcript Sequence Number=SeqID_7517
  Gene Ontology: Mol. function=cytidine deaminase activity; Biological process=cytidine metabolic process
  Homolog annotation: Hit_ID=B6TJW3; Match level="QueryCoverage=75%, HitCoverage=53%, E-value=2e-60, Identity=72%"; Hit description=CDA1
  Pfam annotation: Domain name=dCMP_cyt_deam_1; Domain location=31-133; Score=75.4; E_value=2e-19; Accession=PF00383.14; Description=Cytidine and deoxycytidylate deaminas
RPEAAAAAVELTGFVMSAEEAKRAAAAAGVATVQDLLPLLVPSAMKRAIAPISRFPVGAVGLGASGRVYVGVNLEFRGLPLCHSVHAEQFLVANAAAAGESALSAVAVSHMPCGHCRQFLQEIRGASGIQILVTSDAEEGCAPEWRTVASLLLRPFGPHDLLPEDVPLVLEKHGNLEFRGLPLCHSVHAEQFLVANGFAAGDLEARLREAAEAAARAAHAPY

SEQ ID NO: 73492 - protein, 113 aa, Setaria italica
  Transcript Sequence Number=SeqID_7518
CLESEIQTPPSVRLLFRDPCTRVAREVVKVLQELAVSIKRHRRCAPDVLSDHLHEALQDLNSAIRSQPRLFLGSKRACAANKHMLMELNSGNHTASRATLHSFKTDAMALSER

SEQ ID NO: 73493 - protein, 132 aa, Setaria italica
  Transcript Sequence Number=SeqID_7519
MSASPEFYKPAAPAAFTSPCASPLPAPAGFVGFGADDYYSCRTPTGSGITYLKEPTTCPPAPRKPPAPLCKKRLFHLQQTPEVPLISVSLDELERTFRPHHPPPKADKRRRSLRHPKQQQHRTLDSSTSVSN

SEQ ID NO: 73494 - protein, 71 aa, Setaria italica
  Transcript Sequence Number=SeqID_7520
  Gene Ontology: Mol. function=protein binding; Cellular component =clathrin adaptor complex; Biological process=intracellular protein transport
  Homolog annotation: Hit_ID=B6T4T8; Match level="QueryCoverage=78%, HitCoverage=12%, E-value=7e-13, Identity=66%"; Hit description=Pre -mRNA cleavage complex II protein Clp1
MAATAAAGAAAAPPPRQSKLEPREELRVEVPPDASLRVRLVAGTAEIFGTELPPEGWVSIPPRSKIAIFSW

SEQ ID NO: 73495 - protein, 126 aa, Setaria italica
  Transcript Sequence Number=SeqID_7521
  Gene Ontology: Mol. function=kinase activity
  Homolog annotation: Hit_ID=B6TR51; Match level="QueryCoverage=77%, HitCoverage=75%, E-value=1e-48, Identity=97%"; Hit description =Uncharacterized ACR, YggU family COG1872 containing protein
  Pfam annotation: Domain name=DUF167; Domain location=36-110; Score =82.1; E_value=2e-21; Accession=PF02594.8; Description=Uncharacterized ACR, YggU family COG1872
MAPGKRGKARGEAPPPAAANAGGGGFPSCLRLMPPSTVAISIHAKPGSKVATITEIGDEAVGVQIDAPARDGEANAALVDFISSVLGVKKREISIGSGSKSREKVVLVQDATLQGVYDALKKSCNC

SEQ ID NO: 73496 - protein, 139 aa, Setaria italica
  Transcript Sequence Number=SeqID_7522
  Gene Ontology: Mol. function=magnesium ion binding; Biological process=metabolic process
  Homolog annotation: Hit_ID=Q5GAS4; Match level="QueryCoverage=96%, HitCoverage=20%, E-value=3e-47, Identity=65%"; Hit description=Stc
SFVGMGDIATRESFEWVSSMPEIVHSLCIILRLLDDPKSYEREQMALHVASTIDSCMKEHNMSMELALKKIKELTEESWKSLNEEWLKPNKAQPKELLERIFNLTRSMEFFYKQEDAYTNSCNIKDTVKSLFVDSYKVF

SEQ ID NO: 73497 - protein, 55 aa, Setaria italica
  Transcript Sequence Number=SeqID_7523
NTPVYRLQSGITRDTQSSHDSLTGGINIYDWLPLIWLVDDISIPDMVQGMDAIHM

SEQ ID NO: 73498 - protein, 106 aa, Setaria italica
  Transcript Sequence Number=SeqID_7524
  Gene Ontology: Mol. function=nucleic acid binding
  Homolog annotation: Hit_ID=B9T021; Match level="QueryCoverage=92%, HitCoverage=15%, E-value=4e-35, Identity=63%"; Hit description =Calmodulin binding protein, putative
LHFYYHRWLHCESKQPFFYWLDVGEGKDVNLEDHCPRWKMHKQCIKYLGPKERESYEVIVENKRLMYKLSRQIVDTTGSARGTKWIFVLSTCKTLYIGQVYNFLEH

SEQ ID NO: 73499 - protein, 572 aa, Setaria italica
  Transcript Sequence Number=SeqID_7525
  Gene Ontology: Mol. function=nucleic acid binding
  Homolog annotation: Hit_ID=B9T021; Match level="QueryCoverage=85%, HitCoverage=76%, E-value=1e-122, Identity=69%"; Hit description =Calmodulin binding protein, putative
  Subcellular localization annotation: CTP_CleavageSite=14; ConfidenceScore=5.17e-01
SPKPDRDSCNVSPSAGTSSSSRFGPARDRPPDHPVDGSESPRHQAAALRLQKVYKSFRTRRQLADCAVLVEQRWWKLLDFALLKRNSVSFFDIEKPETAVSKWSRARMRAAKVGKGLSKDEKAQKLALQHWLEAIDPRHRYGHNLHFYYHRWLHCESKQPFFYWLDVGEEKDVNLEDHCPRWKMHKQCIKYLGPKERESYEVIVENKRLMYKLSRQIVDTTGSARGTKWIFVLSTCKTLYIGQKQKGVFQHSSFLAGGATSAAGRLVVEDGHLKAVWPHSGHYRPTEQNFQEFMNFLKDRSVDLSDVKLSPSEGEEDGDFSLRGNHSQLDLTKLCQQEQNQEQEAQSVQRHGEAEDEAETCNAEPTQPPTETSTPAATIRKASSDNRLQGKRPPRLLISSNNRIPLPPAPHCSSSSRPSPSPGGKEIDPDSAMLGECLDFCKRNLFAEDWLDDHGLDDLAEVPEELILSRINSKRAMRSYQLGKQLSFQWSTGAGPRIGCVRDYPSELQFRALEEVSLSPRGGRPARFPSPRLGALTPNSIPAGKCGSLTADGDGVSMSLKPRQRSATWTAF

SEQ ID NO: 73500 - protein, 242 aa, Setaria italica
  misc_feature (185)..(185): Xaa can be any naturally occurring amino acid
  misc_feature (213)..(213): Xaa can be any naturally occurring amino acid
  Transcript Sequence Number=SeqID_7526
  Gene Ontology: Mol. function=alpha-L-fucosidase activity; Cellular component=extracellular region; Biological process=carbohydrate metabolic process
  Homolog annotation: Hit_ID=B6U1Y8; Match level="QueryCoverage=96%, HitCoverage=47%, E-value=1e-113, Identity=85%"; Hit description =Alpha-L-fucosidase 1
AYNEYYEAQLHGHLTGYGSVSEIWFDGAKGKNATNMTYHFQEWFQTVKQLQRSINIFSDDGPDVRWVGDEKGFAGTTCWSTVNRSMITIGEAGIEKYLNEGDPRGPDWVPPECDVSIRPGWFWHRNETAKPLSQLLEIYYNSVGRNCVLLLNAPPNSTGLVEDADVARLREFGAAVATIFGTDLXAAGSAARASSERGGPGGGFAARNVLDGXDDTYWAPTAEDGRRNGYWIELRRPPEAAK

SEQ ID NO: 73501 - protein, 105 aa, Setaria italica
  misc_feature (103)..(103): Xaa can be any naturally occurring amino acid
  Transcript Sequence Number=SeqID_7527
NGPCDWRFPGRWETLLGVALRSILYKHDCSAVQRGHRQLMIQVLVVGSFIFLLLLKDFIRLSQKECTWLGPDMPLHLCHLRKDYTLKMLMGSWLSVSETKKKXKK

SEQ ID NO: 73502 - protein, 297 aa, Setaria italica
  Transcript Sequence Number=SeqID_7528
  Gene Ontology: Mol. function=structural constituent of ribosome; Cellular component=ribonucleoprotein complex; Biological process =translation
  Homolog annotation: Hit_ID=B6T4J9; Match level="QueryCoverage=91%, HitCoverage=90%, E-value=1e-69, Identity=58%"; Hit description =Ribosomal protein S18 containing protein
  Pfam annotation: Domain name=Ribosomal_S18; Domain location=194-247; Score=45.8; E_value=1.7e-10; Accession=PF01084.12; Description =Ribosomal protein S18
MASSALRRSLPRRASLRRALPSHRPPAASEFCRSFQSGDGEIGETMDEFEARLFGSNKGVDEGSLYRKLDKVENTSKRYGMGSGSMAGFGGLGNRSSSGSMGGFGVFGDRSSSGPLGGFDSLNDGMGETLAHVARNFQMDDDDDDDEDWDDEDFDFRPDVDFRRGSTYNVRDLDLKRPAAAKNPPRPQFETTTAEVLRKADFRNVRFLSNFLTEAGIIIKRSQTRISAKAQRKIAREIKTARAFGLMPFTTMGRRPFIFGRSAEEHYSEEEYGFDFVKKDGGPDEDNGDAEPNVEAA

SEQ ID NO: 73503 - protein, 96 aa, Setaria italica
  Transcript Sequence Number=SeqID_7529
  Gene Ontology: Mol. function=structural constituent of ribosome; Cellular component=ribonucleoprotein complex; Biological process =translation
  Homolog annotation: Hit_ID=B6T4J9; Match level="QueryCoverage=98%, HitCoverage=32%, E-value=3e-36, Identity=83%"; Hit description =Ribosomal protein S18 containing protein
  Pfam annotation: Domain name=Ribosomal_S18; Domain location=2-46; Score=27.1; E_value=7.2e-05; Accession=PF01084.12; Description =Ribosomal protein S18
LQNVRFLSNFLTEAGIIIKRSQTRISAKAQRKIAREIKTARAFGLMPFTTMGRRPFIFGRSAEEHYSEEEYGFDFVKKDGGPDEDNGDAEPNVEAA

SEQ ID NO: 73504 - protein, 175 aa, Setaria italica
  Transcript Sequence Number=SeqID_7530
  Gene Ontology: Mol. function=phosphoribulokinase activity; Cellular component=chloroplast; Biological process=reductive pentose -phosphate cycle
  Homolog annotation: Hit_ID=B6SZP7; Match level="QueryCoverage=98%, HitCoverage=44%, E-value=1e-65, Identity=75%"; Hit description =Phosphoribulokinase
  Pfam annotation: Domain name=PRK; Domain location=50-174; Score=88.6; E_value=2.1e-23; Accession=PF00485.10; Description=Phosphoribulokinase Uridine kinase family
  Subcellular localization annotation: CTP_CleavageSite=90; ConfidenceScore=5.66e-01
MDAFMAHTSGAATTRYSPAGTSILLRSRRRGHFPSRVSCSAAAAAGKTVVIGLAADSGCGKSTFVRRLTSVLGGGAEPPSGGNPDSNTLVGSTATVICLDDYHSLDRAARKARGLTALDPRANDFDLMYEQVRAIKEGRAVDKPVYNHVTGLLDPPERIAPPKILVIEGLHPIVT

SEQ ID NO: 73505 - protein, 70 aa, Setaria italica
  Transcript Sequence Number=SeqID_7531
TRRRRTTNGALAALGLAAVLLVELGSGQALVKYHQPATLFLQAYTVAAAAALFVKYEKERISTWPGPPAK

SEQ ID NO: 73506 - protein, 109 aa, Setaria italica
  misc_feature (7)..(7): Xaa can be any naturally occurring amino acid
  misc_feature (49)..(49): Xaa can be any naturally occurring amino acid
  Transcript Sequence Number=SeqID_7532
  Homolog annotation: Hit_ID=Q6ETL2; Match level="QueryCoverage=97%, HitCoverage=25%, E-value=2e-34, Identity=75%"; Hit description=Tubby- like protein 4
WATLPNXRALLCRPLPQDVGRCTCVIAREAATGARGVALYSLYTNEGQXGRQDRKLAVARHRRRRGRSEFIVAQNQDGIFCTSDKNFLGTVAANLVGSKYQIRGQGEPG

SEQ ID NO: 73507 - protein, 129 aa, Setaria italica
  Transcript Sequence Number=SeqID_7533
  Gene Ontology: Mol. function=heat shock protein binding; Biological process=protein folding
  Homolog annotation: Hit_ID=B6SZU1; Match level="QueryCoverage=99%, HitCoverage=38%, E-value=1e-54, Identity=82%"; Hit description=DnaJ protein
TLAREEPAAKAKVYSACSNVGGGGRRAFAEFSSYVVRKAPPLERRVECTLEELCTGCRKEVRYTRDVVTKNGLITKKEVTQTIRVRPGMRKGSAVTMEGAGDERPGCLTGDAVFVVSERKHKRFKRLGR

SEQ ID NO: 73508 - protein, 219 aa, Setaria italica
  Transcript Sequence Number=SeqID_7534
  Gene Ontology: Mol. function=heat shock protein binding; Biological process=protein folding
  Homolog annotation: Hit_ID=B6SZU1; Match level="QueryCoverage=85%, HitCoverage=55%, E-value=6e-93, Identity=88%"; Hit description=DnaJ protein
  Pfam annotation: Domain name=DnaJ_C; Domain location=91-215; Score =18.8; E_value=6.5e-08; Accession=PF01556.10; Description=DnaJ C terminal region
RLRLRRRERRHCGGESGAGREARRAFAEFSSYVVRKAPPLERRVECTLEELCTGCRKEVRYTRDVVTKNGLITKKEVTQTIRVRPGMRKGSAVTMEGAGDERPGCLTGDAVFVVSERKHKRFKRLGDDLVLRARVPLVSALTGWQLSFRLLCGDRFRYAFRDEVICPGYVKVVKGGGMPVAGGEKGARGDLMVKFEVVFPEDLTDEQRKGLAEILRGCA

SEQ ID NO: 73509 - protein, 96 aa, Setaria italica
  Transcript Sequence Number=SeqID_7535
APPSRSAWRFSPLLVLCFTWHPVDPICSPFFLLVAAVDGVCVVISSSLQLRFLEVHQGVFIVSNRRRLWVNVGEETLENIANFLLKGFANLLEKKG

SEQ ID NO: 73510 - protein, 69 aa, Setaria italica
  misc_feature (55)..(69): Xaa can be any naturally occurring amino acid
  Transcript Sequence Number=SeqID_7536
RNAQRLEMSLLYICCVHGFCRLLMLLYASLQASVSCHMYSIILAEQLLFHKEKKXXXXXXXXXXXXXXX

SEQ ID NO: 73511 - protein, 108 aa, Setaria italica
  Transcript Sequence Number=SeqID_7537
  Gene Ontology: Cellular component=integral to membrane
  Homolog annotation: Hit_ID=Q9LNJ8; Match level="QueryCoverage=89%, HitCoverage=49%, E-value=2e-40, Identity=82%"; Hit description =F6F3.4 protein
  Pfam annotation: Domain name=ORMDL; Domain location=2-107; Score =195.4; E_value=1.5e-55; Accession=PF04061.6; Description=ORMDL family
AAWTVVNLAHFAITYHFFHWKKGTPFAADDQGIYSRLTWWEQIDNGQQLTRNRKFLTVVPVVLYLIASHLTDYKQPMFFLNTVAVFVLVVAKLPNMHKVRIFGINADI

SEQ ID NO: 73512 - protein, 117 aa, Setaria italica
  misc_feature (55)..(55): Xaa can be any naturally occurring amino acid
  Transcript Sequence Number=SeqID_7538
  Gene Ontology: Cellular component=integral to membrane
  Homolog annotation: Hit_ID=Q9LNJ8; Match level="QueryCoverage=93%, HitCoverage=55%, E-value=4e-40, Identity=72%"; Hit description =F6F3.4 protein
  Pfam annotation: Domain name=ORMDL; Domain location=18-117; Score =155.8; E_value=1.3e-43; Accession=PF04061.6; Description=ORMDL family
MGRRGEPYYVEAAPPVDVNKNTEWFMYPGVWTTYILLLFFAWLLVLSVSGCSPGXAWTVVNLAHFAITYHFFHWKKGTPFAADDQGIYSRLTWWEQIDNGQQLTRNRKFLTVVPVVL

SEQ ID NO: 73513 - protein, 157 aa, Setaria italica
  Transcript Sequence Number=SeqID_7539
  Gene Ontology: Cellular component=integral to membrane
  Homolog annotation: Hit_ID=Q9LNJ8; Match level="QueryCoverage=93%, HitCoverage=76%, E-value=4e-58, Identity=72%"; Hit description =F6F3.4 protein
  Pfam annotation: Domain name=ORMDL; Domain location=14-156; Score =297.6; E_value=2.6e-86; Accession=PF04061.6; Description=ORMDL family
MAKLYVQTFPPADLNKNTEWFMYPGVWTTYILILFFSWLLVLSVFGCTPGTAWTVVNLFHFAITYHFFHWKKGTPFADDQGMYNALTWWEQMDNGKQLTRNRKFLIVVPVVLYLIALHTTDYQQPMLFLNTLAVSVLVVAKLPNMHKVRIFGINAEN

SEQ ID NO: 73514 - protein, 55 aa, Setaria italica
  Transcript Sequence Number=SeqID_7540
  Gene Ontology: Mol. function=oxidoreductase activity; Biological process=oxidation reduction
  Homolog annotation: Hit_ID=Q0PCF2; Match level="QueryCoverage=98%, HitCoverage=17%, E-value=4e-23, Identity=92%"; Hit description =Deoxymugineic acid synthase1
PEDFEPFDMRGVWAAMEECHRLGLAKSIGVCNFSCKKLETLLSFATIPPAVNQVC

SEQ ID NO: 73515 - protein, 88 aa, Setaria italica
  Transcript Sequence Number=SeqID_7541
GGSWVLNYRSPNTINSRWLSCTEYYYIACGAAEVPSAEAERRETDRTSKLIAWKPPRVRARAWTNWLASPSPSPASLSGNGGLDLHAN

SEQ ID NO: 73516 - protein, 47 aa, Setaria italica
  Transcript Sequence Number=SeqID_7542
  Gene Ontology: Mol. function=oxidoreductase activity
  Homolog annotation: Hit_ID=Q0PCF2; Match level="QueryCoverage=100%, HitCoverage=14%, E-value=2e-11, Identity=70%"; Hit description =Deoxymugineic acid synthase1
MSAAGRSPCGLPRIGLGTAVQGPRPDAVRAAALRAMMLGYRHFDTAA

SEQ ID NO: 73517 - protein, 313 aa, Setaria italica
  misc_feature (8)..(8): Xaa can be any naturally occurring amino acid
  Transcript Sequence Number=SeqID_7543
  Gene Ontology: Mol. function=oxidoreductase activity; Biological process=oxidation reduction
  Homolog annotation: Hit_ID=Q0PCF2; Match level="QueryCoverage=89%, HitCoverage=88%, E-value=1e-146, Identity=88%"; Hit description =Deoxymugineic acid synthase1
  Pfam annotation: Domain name=Aldo_ket_red; Domain location=6-286; Score=331.3; E_value=1.9e-96; Accession=PF00248.13; Description =Aldoketo reductase family
PPGAGSPXGLPRIGRRPVGAPAPPCPGRCAAVRAMMLGYRHFDTAAHYATEAPIGEAAAEAVREGVVASRDEIFVTSKVWCADAHPDRVLPALRKTLSNLQMEYVDLYMVHWPVTMKAGRFTAPFTPEDFEPFDMRGVWAAMEECHRLGLAKSIGVCNFSCKKLETLLSFATIPPAVNQVEINPVWQQRKLREFCRDKGIQLCAYSPLGAKGTHWGSDSVMDSGVLHEIAKSKGKTVAQVCLRWVYEQGDCLIVKSFDESRMKENLDIVDWELTEEERQRISKIPQRKINQGRRYVSENGQYKSLEELWDGEI

SEQ ID NO: 73518 - protein, 147 aa, Setaria italica
  Transcript Sequence Number=SeqID_7544
  Gene Ontology: Mol. function=ATPase activity, coupled to transmembrane movement of substances; Cellular component=integral to membrane; Biological process=transport
  Homolog annotation: Hit_ID=Q6YUU5; Match level="QueryCoverage=99%, HitCoverage=11%, E-value=2e-79, Identity=96%"; Hit description =Putative multidrug resistance protein
DGSFSAIVFGGIQPAYAYAMGSMISIYFLTDHNEIKDKTRTYALIFVGLAVLSFLINIGQHYNFGAMGEYLTKRVREQMLAKILTFEIGWFDRDENSSGAICSQLAKDANVVRSLVGDRMALVIQTVSAVLIACTMGLVIAWRLALV

SEQ ID NO: 73519 - protein, 160 aa, Setaria italica
  Transcript Sequence Number=SeqID_7545
  Gene Ontology: Mol. function=binding
  Homolog annotation: Hit_ID=Q10D20; Match level="QueryCoverage=100%, HitCoverage=4%, E-value=9e-87, Identity=96%"; Hit description=WD-40 repeat family protein, putative, expressed
RMVSMHWFRNHNLTILRRINLVQHLLVTLQRGDVEIPVLEKLVVLLGVILEDGFLASELELVVRFIIMTFDPPELTPNHQIVREAMGKHVIVRNMLLEMLIDLQVTINAEELLEQWHKVVSSRLVTYFLDEAVHPTSMRWITTLLGVCLTSSTTFALKFR

SEQ ID NO: 73520 - protein, 192 aa, Setaria italica
  misc_feature (8)..(8): Xaa can be any naturally occurring amino acid
  misc_feature (153)..(153): Xaa can be any naturally occurring amino acid
  misc_feature (180)..(180): Xaa can be any naturally occurring amino acid
  Transcript Sequence Number=SeqID_7546
  Gene Ontology: Mol. function=phosphoprotein phosphatase activity; Biological process=actin cytoskeleton organization and biogenesis
  Homolog annotation: Hit_ID=B9RNW2; Match level="QueryCoverage=96%, HitCoverage=14%, E-value=1e-57, Identity=56%"; Hit description=DNA binding protein, putative
KKDNQISXIYSYYDMSVMGYPRNYEGCPLLTMEMIHHFLRSSESWLSLSQDNFLLIHSEHGGWPVLAFALAALLVYLKRCSDERKALGMDCRHAPDGLAELFSPIDPVPSQLRYLKYVSKMHTSPELWPPVDKMLNLNCIIIRKVPNFDGQGXCRPIFRIYGLDPLAPNDRATKVLFRSXKTSVFLQLYTQL

SEQ ID NO: 73521 - protein, 90 aa, Setaria italica
  Transcript Sequence Number=SeqID_7547
  Gene Ontology: Mol. function=protein tyrosine kinase activity; Biological process=protein amino acid phosphorylation
  Homolog annotation: Hit_ID=B9T342; Match level="QueryCoverage=85%, HitCoverage=11%, E-value=2e-25, Identity=69%"; Hit description =Serine-threonine protein kinase, putative
LMAKDLGSYVKEVSCPRRRVPFPLVVAVDIMLQIARGMEHLHAKKIYHGELNPSNVLVKPRQPDGYVHVKVAGFEWSGTVTTGCVGIWRC

SEQ ID NO: 73522 - protein, 151 aa, Setaria italica
  Transcript Sequence Number=SeqID_7548
  Gene Ontology: Mol. function=transporter activity; Cellular component= integral to membrane; Biological process=transport
  Homolog annotation: Hit_ID=Q9M7C4; Match level="QueryCoverage=98%, HitCoverage=52%, E-value=9e-66, Identity=83%"; Hit description =Plasma membrane intrinsic protein 1
  Pfam annotation: Domain name=MIP; Domain location=34-151; Score=36.0; E_value=3.9e-12; Accession=PF00230.12; Description=Major intrinsic protein
MGKDDVIESGAGGGEFAAKDYTDPPPAPLIDAAELGSWSLYRAVIAEFIATLLFLYITVLTVIGYKHQTDPNVAGTDACGGVGILGIAWAFGGMIFVLVYCTAGISGGHINPAVTFGLFLARKVSLVRALLYIVAQCLGAIKALGSFRSNA

SEQ ID NO: 73523 - protein, 166 aa, Setaria italica
  misc_feature (44)..(44): Xaa can be any naturally occurring amino acid
  misc_feature (79)..(79): Xaa can be any naturally occurring amino acid
  Transcript Sequence Number=SeqID_7549
  Gene Ontology: Mol. function=transporter activity; Cellular component= integral to membrane; Biological process=transport
  Homolog annotation: Hit_ID=B0I532; Match level="QueryCoverage=94%, HitCoverage=44%, E-value=6e-44, Identity=89%"; Hit description =Plasma membrane intrinsic protein
  Pfam annotation: Domain name=MIP; Domain location=1-166; Score=54.7; E_value=2.3e-13; Accession=PF00230.12; Description=Major intrinsic protein
RPKLQYATLLFLYITVLTVIGYKHQTDPNVAGTDACGGVGILGXIAWAFGGMIFVLVYCTAGISGGHINPAVTFGLFLXARKVSLVRALLYIVAQCLGAICGVGLVKAFQSALTRPAPLIDAAELGSWSLYRAVIAEFIATLLFLYITVLTVIGYKHQTDPNVAGT

SEQ ID NO: 73524 - protein, 166 aa, Setaria italica
  Transcript Sequence Number=SeqID_7550
  Gene Ontology: Mol. function=nucleotide binding; Cellular component =nucleus; Biological process=DNA replication initiation
  Homolog annotation: Hit_ID=O80786; Match level="QueryCoverage=100%, HitCoverage=22%, E-value=8e-69, Identity=72%"; Hit description =Putative DNA replication licensing factor, mcm5
IRKSPADYIPLFETAASEVLASLRSKVAGETGEMEEPVTGDVQIFLSSKENCLSMRSIGADYMSKLVKIAGIAIAASRVKAKATHVTLLCKNCRSVRTVACRPGLGGAIVPRSCDHVPQPGEEPCPLDPWIAVPDKSKYVDLQTLKMQENPEDVPTGELPRNVLLS

SEQ ID NO: 73525 - protein, 100 aa, Setaria italica
  Transcript Sequence Number=SeqID_7551
  Gene Ontology: Mol. function=metal ion binding; Cellular component =integral to membrane
  Homolog annotation: Hit_ID=B6SR83; Match level="QueryCoverage=83%, HitCoverage=85%, E-value=1e-39, Identity=97%"; Hit description=RING -H2 finger protein ATL3I
  Pfam annotation: Domain name=HIG_1_N; Domain location=17-85; Score =103.0; E_value=1e-27; Accession=PF04588.5; Description=Hypoxia induced protein conserved region
MEKSSGAAAGGTAPPSPFQMEDFQLEGKKPVKNPFVPIGALVTAGVLTAGLISFRYGNSQLGQKLMRARVVAQGATVALMIGSAYYYGDQIKLFKKGSSP

SEQ ID NO: 73526 - protein, 86 aa, Setaria italica
  Transcript Sequence Number=SeqID_7552
GRRRAGRACCGGSATVTLHACRCWAGQQPPHTAPPPAPSLLLLTLATNSQLQLDNLSQVWSVTMLCHFELERIMKHARFRTSGEGY

SEQ ID NO: 73527 - protein, 176 aa, Setaria italica
  misc_feature (169)..(169): Xaa can be any naturally occurring amino acid
  Transcript Sequence Number=SeqID_7553
  Gene Ontology: Mol. function=hydrolase activity, acting on acid anhydrides, in phosphorus-containing anhydrides; Cellular component =spliceosome; Biological process=mRNA processing
  Homolog annotation: Hit_ID=Q53PH9; Match level="QueryCoverage=100%, HitCoverage=17%, E-value=1e-97, Identity=94%"; Hit description =DEAD/DEAH box helicase family protein, expressed
  Pfam annotation: Domain name=DEAD; Domain location=1-85; Score=-34.4; E_value=0.013; Accession=PF00270.21; Description=DEADDEAH box helicase
DVGLMTGDVTLQPNATCLVMTTEILRAMLYRGSEVIKEVAWVIFDEIHYMKDRERGVVWEESIIFLPPAIKMVFLSATMSNATEFAEWICSLHKQPCHVVYTDFRPTPLQHYVFPIGGSGLYLVVDESGQFREDNFGKLQDSFSKQNNQLDGRRGGGPKASGRIAKGGXSASGNSD

SEQ ID NO: 73528 - protein, 384 aa, Setaria italica
  misc_feature (13)..(13): Xaa can be any naturally occurring amino acid
  Transcript Sequence Number=SeqID_7554
  Homolog annotation: Hit_ID=Q9M7X0; Match level="QueryCoverage=97%, HitCoverage=75%, E-value=9e-36, Identity=32%"; Hit description =MJK13.5 protein
  Pfam annotation: Domain name=DUF1771; Domain location=228-293; Score =81.9; E_value=2.3e-21; Accession=PF08590.2; Description=Domain of unknown function (DUF1771)
  Pfam annotation: Domain name=Smr; Domain location=301-377; Score= -1.3; E_value=0.037; Accession=PF01713.13; Description=Smr domain
  Pfam module annotation: Pfam domain module=DUF1771::Smr; Domain location=228-293::301-377
AAFGTVSKHFRKXSARATATANVSSKRDKPLKVELPEYMRDDFKVKSDESDSVPRRETLNNRDVEEFLFCMLGEGFKLSMDVIREVLGSCGYDIKKSMEELLSFSEKGLDKMAESKHNAVQDVAAECSVSKGKCLGSQSTPSTHSSQEGMQRPKQQISPGELIEAIFTVPGRLEEEPKLRRYELGANRSRVPDQKPVLKPLEDLSTYSTDFPVKVIVASKEPAINEEDYQNYRRAAKQHWDMMKQYYEKAADAFREGNKKEVDYLIQEGKRCYQMARLADEKSAGEIIKSKKVESRNELCLDLRKQDAANIPNLLRFHLKQLANIPSIDYLLVIVGIDDGSFKMGQKRRKVMKYLEKNSIKWTEEEPHSGNILISINQVGNQHG

SEQ ID NO: 73529 - protein, 112 aa, Setaria italica
  Transcript Sequence Number=SeqID_7555
  Gene Ontology: Mol. function=carboxypeptidase activity; Biological process=proteolysis
  Homolog annotation: Hit_ID=B6SP44; Match level="QueryCoverage=100%, HitCoverage=15%, E-value=9e-50, Identity=88%"; Hit description =Glutamate carboxypeptidase 2
  Subcellular localization annotation: CTP_CleavageSite=52; ConfidenceScore=5.37e-01
NAAAARYVLHAFSSLSFPAHITPYSVLLSYPVHRSLTLTPSRGLAAKPFSLVQETYKGDPYAEAAAEVISTYFAYSASGSVAAEVVYANYGHSEDYAYLASRGVDVAGKVAL

SEQ ID NO: 73530 - protein, 75 aa, Setaria italica
  Transcript Sequence Number=SeqID_7556
  Gene Ontology: Mol. function=transporter activity; Cellular component= integral to membrane; Biological process=transport
  Homolog annotation: Hit_ID=Q8H6D6; Match level="QueryCoverage=96%, HitCoverage=14%, E-value=1e-19, Identity=66%"; Hit description=Major facilitator superfamily antiporter
CIWLPETLHFHDDEKVEAIDALEAQVADSNLEGGKAKEASDTSTKNLLKNWQLMSAIIIYCIFCLHDTAYLETIF

SEQ ID NO: 73531 - protein, 209 aa, Setaria italica
  misc_feature (174)..(174): Xaa can be any naturally occurring amino acid
  misc_feature (200)..(200): Xaa can be any naturally occurring amino acid
  Transcript Sequence Number=SeqID_7557
  Gene Ontology: Mol. function=transporter activity; Cellular component= integral to membrane; Biological process=transport
  Homolog annotation: Hit_ID=Q8H6D6; Match level="QueryCoverage=99%, HitCoverage=41%, E-value=7e-82, Identity=72%"; Hit description=Major facilitator superfamily antiporter
FTSVPWGIFADKYGRKPCIVISILSVIVFNTLFGLSTSYWMAIVTRGLLGLLCGILGPIKAYATEVCRKEHQALGISLVTSSRAIALVMGPAIGGFLAQPAEKYPNLFSKESIFGRFPYFLPSFFISMLAAGSCIACIWLPETLHFHDDVKVEANSYLYRRLADSNLEGGKAKXASDTSTKNLLKNWQLMSAIIIYCIFXLHDTAYLET

SEQ ID NO: 73532 - protein, 89 aa, Setaria italica
  Transcript Sequence Number=SeqID_7558
  Gene Ontology: Mol. function=binding
  Homolog annotation: Hit_ID=B6TY66; Match level="QueryCoverage=100%, HitCoverage=27%, E-value=9e-25, Identity=67%"; Hit description =Tetratricopeptide repeat protein 15
AHREFDVALALLADIAARDPGDPVLLSRLAYAHLQIGNLAAASAAFRHVESVVAAAEDPARHANLLARNRALECIVAKDFAAAVREYER

SEQ ID NO: 73533 - protein, 109 aa, Setaria italica
  misc_feature (94)..(94): Xaa can be any naturally occurring amino acid
  Transcript Sequence Number=SeqID_7559
  Homolog annotation: Hit_ID=B6U174; Match level="QueryCoverage=100%, HitCoverage=13%, E-value=5e-17, Identity=55%"; Hit description =ATPase, coupled to transmembrane movement of substances
  Subcellular localization annotation: CTP_CleavageSite=78; ConfidenceScore=5.03e-01
EAEDIPRNGLLHMHHQPHQHHHSGLLMQPQPSPPVKQQQSFTLAQLLKRVNEARSDASSPTSSPTHSHYTIELGGSVPGSTGSDLSEHMHGGGXGGGDGPLLPFVLKFT

SEQ ID NO: 73534 - protein, 901 aa, Setaria italica
  Transcript Sequence Number=SeqID_7560
  Gene Ontology: Mol. function=DNA (cytosine-5-)-methyltransferase activity; Cellular component=nucleus; Biological process=DNA methylation
  Homolog annotation: Hit_ID=O65343; Match level="QueryCoverage=100%, HitCoverage=58%, E-value=0.0, Identity=88%"; Hit description =Cytosine-specific methyltransferase
  Pfam annotation: Domain name=BAH; Domain location=104-236; Score =175.6; E_value=1.4e-49; Accession=PF01426.10; Description=BAH domain
  Pfam annotation: Domain name=BAH; Domain location=273-412; Score =164.7; E_value=2.7e-46; Accession=PF01426.10; Description=BAH domain
  Pfam annotation: Domain name=DNA_methylase; Domain location=456-885; Score=152.1; E_value=1.7e-42; Accession=PF00145.9; Description=C-5 cytosine-specific DNA methylase
  Pfam module annotation: Pfam domain module=BAH::BAH::DNA_methylase; Domain location=104-236::273-412::456-885
MRATTTRLINRIWSDYYAHHFPEDSKEGDGNETKEIDDEQEENEDEDAEDEGQVEEENISKTPPSTRSRKLLSQTCKEIRWEGETSGKTSSGETLYKCAYVRELKIAVGGTVALEDDSGETVMCFVEYMFQKIGGAKMVHGRMLQKGSQTILGNAANEREVFLTNDCLEFKLDDIKELVNVDIQSRPWGHKYRKENSEAEKVEQAKAEERKRKGLPMQYFCKSLYWPEKGAFFALPCDKMGLGSGVCSSCDHIEADSDELKVLSKTSFIYRKITYNVNDFLYVRPDFFSQDEDRATFKAGRNVGLKPYAVCHLLAIPEGAGSKKFNPASTKISARRFYRPDDISSAKAYASDIREVYYSEDIFDVPLDMIEGKCEVRKKNDLPSSDLPVLFEHVFFCELIYDRATGALKQLPPNVRFMSMVQKTTGALKKNKGKQICETDHVDSGKWVDVPKENRLATLDIFAGCGGLSEGLQQAGVSFTKWSIEYEEPAGEAFSKNHPEAVVFVDNCNVILKAIMDKCGDTDDCISTSEAAEQAAKLPEENISNLPVPGEVEFINGGPPCQGFSGMNRFNQSPWSKVQCEMILAFLSFAEYFRPRFFLLENVRNFVSFNKGQTFRLAVASLLEMGYQVRFGILEAGAFGVAQSRKRAFIWAAAPGETLPDWPEPMHVFASPELKITLPDGQYYAAARSTAGGAPFRAITVRDTIGDLPKVENGASKLTLEYGGEPVSWFQKKIRGNMMALNDHIAKEMNELNLIRCQHIPKRPGCDWHDLPDEKVKLSNGQMADLIPWCLPNTAKRHNQWKGLYGRLDWEGNFPTSVTDPQPMGKVGMCFHPEQDRIITVRECARSQGFPDSYEFAGNIQSKHRQIGNAVPPPLAYALGRKLKEAVDAKRQEAGVAAPAP

SEQ ID NO: 73535 - protein, 157 aa, Setaria italica
  Transcript Sequence Number=SeqID_7561
  Gene Ontology: Mol. function=electron carrier activity; Biological process=electron transport chain
  Homolog annotation: Hit_ID=B6TCC4; Match level="QueryCoverage=64%, HitCoverage=64%, E-value=7e-41, Identity=80%"; Hit description=Blue copper protein
  Pfam annotation: Domain name=Cu_bind_like; Domain location=32-113; Score=141.4; E_value=2.8e-39; Accession=PF02298.9; Description =Plastocyanin-like domain
  Pfam annotation: Domain name=DUF1283; Domain location=1-92; Score= -55.4; E_value=0.049; Accession=PF06932.3; Description=Protein of unknown function (DUF1283)
  Pfam module annotation: Pfam domain module=Cu_bind_like::DUF1283; Domain location=32-113::1-92
MAKALPLVALLIAGCAALASAATITVGDSQGWTTGVDYTSWASGKSFSVGDKLVFNYVSKAHTVTEVSKSGYDACSGNNNLLDDDSGSTTVPLNTPGTHYFICNVPGHCSDGMKFAVTVSATPSGNTPSAGAPQVSAAAMASVVAAAAGAAIKLALF

SEQ ID NO: 73536 - protein, 114 aa, Setaria italica
  Transcript Sequence Number=SeqID_7562
QITLSIFLQINQASARMVVESFSFYQTGQSKLQKGPQQHVHVYASTHGSNYSLTYLSKSRAHFGFSWSIMNHCAWPMPAEDAPKGHYHFDIPGLRYFFQQMVKEPHDCAVGCRK

SEQ ID NO: 73537 - protein, 62 aa, Setaria italica
  Transcript Sequence Number=SeqID_7563
MAMAQRAMGLLRRSLGFAPPTAQRALSTSAAPAAEGAAAAAAEAVAKEAKKRKKKNLFDVVQ

SEQ ID NO: 73538 - protein, 132 aa, Setaria italica
  Transcript Sequence Number=SeqID_7564
  Gene Ontology: Mol. function=molecular_function; Cellular component =cellular_component; Biological process=biological_process
  Homolog annotation: Hit_ID=Q55FJ2; Match level="QueryCoverage=93%, HitCoverage=14%, E-value=9e-16, Identity=39%"; Hit description=WD repeat-containing protein 91 homolog
SNIASSSIDGTVRIWTHDSSTPSSKNATIYCGAEVCALSWECRSDRLLLIGTANGGIKAWNADAKRVVCDLNTSRDFPSILDLKCSPVEPVFVSAAASRRHGSTVFERTGFANLTVWHMKTWKPLTVLPLGE

SEQ ID NO: 73539 - protein, 283 aa, Setaria italica
  Transcript Sequence Number=SeqID_7565
  Gene Ontology: Mol. function=adenyl-nucleotide exchange factor activity; Cellular component=chloroplast; Biological process =response to stress
  Homolog annotation: Hit_ID=Q0JD51; Match level="QueryCoverage=75%, HitCoverage=76%, E-value=7e-95, Identity=78%"; Hit description=GrpE protein homolog
  Pfam annotation: Domain name=GrpE; Domain location=106-265; Score =118.9; E_value=1.7e-32; Accession=PF01025.11; Description=GrpE
  Subcellular localization annotation: CTP_CleavageSite=61; ConfidenceScore=5.73e-01
MAATFCSGPAASAAANPSSAGRRLQNPAPASVLQARWRPRLPAPAFLTRRPNAELRPLRIAAGAGVDPKVVNGEDFPPMKDLIQLYKTAFLDGNDEVLGEVEKAITSVEKEKSRVASQFESVTAEITSGKEKFIRLNADLENFRKQTEKERAKFTSNIQVEVVQSLLPLVDSFEKTNLENTPETEKEQKISTSYQGIYKQLVETLRYLGVGVVETVGKPFDPSVHEAIAREESSQFKAGIVSHEIRRGFLLKERLLRPATVKVSTGSGKQSASSVEAAKDAAV

SEQ ID NO: 73540 - protein, 58 aa, Setaria italica
  Transcript Sequence Number=SeqID_7566
MDINKAAGASPAAVDARTVVAHVLAVAATVLVLVWCVHFRGGLALRSQDKQLIFNVHP

SEQ ID NO: 73541 - protein, 127 aa, Setaria italica
  misc_feature (115)..(115): Xaa can be any naturally occurring amino acid
  Transcript Sequence Number=SeqID_7567
PPAPARGGNWGGLSEPKHPVAVQESGRGRHRRHGHDTTAGDQKSGARFGKLAVIVPCDLQTRGFVPYPTLDRLACVGMCGLCPSRRVEPVGQWVSESERMATAAHACVTTDRWRXGWQPGNGGTCVN

SEQ ID NO: 73542 - protein, 137 aa, Setaria italica
  Transcript Sequence Number=SeqID_7568
  Pfam annotation: Domain name=DUF1218; Domain location=1-94; Score =70.4; E_value=6.9e-18; Accession=PF06749.4; Description=Protein of unknown function (DUF1218)
  Pfam annotation: Domain name=FxsA; Domain location=39-120; Score= -60.8; E_value=0.08; Accession=PF04186.5; Description=FxsA cytoplasmic membrane protein
  Pfam module annotation: Pfam domain module=DUF1218::FxsA; Domain location=1-94::39-120
LVAVAVPDSASAGLAVAQDHPRVASSAATLTWQTCCLFFLTWICFGLAEVLLMIGIGIESGHISDWRKPRPVCHRVRPGMFAAAGILGLITVVVGFVVYVTAVQAQRLRGQQHYGGGHFVGHVAPYPGVQHQHLRPP

SEQ ID NO: 73543 - protein, 102 aa, Setaria italica
  misc_feature (38)..(38): Xaa can be any naturally occurring amino acid
  Transcript Sequence Number=SeqID_7569
  Gene Ontology: Mol. function=binding; Cellular component=integral to membrane
  Homolog annotation: Hit_ID=A0AID8; Match level="QueryCoverage=62%, HitCoverage=12%, E-value=3e-12, Identity=48%"; Hit description =Complete genome
KSYRNTSIEDYKEYLIFDEKSFLDMHTDDQTSGFCLTXNNLILSGEWWRLLTPMCLHSGFLHVALGCWVLLTFGPRVCRAYGQMAFFLIYILGGICGNVTSF

SEQ ID NO: 73544 - protein, 64 aa, Setaria italica
  Transcript Sequence Number=SeqID_7570
  Gene Ontology: Cellular component=integral to membrane
CRNLLAGINIAVLLFEIASPVKNSENEYLSLPLLYGAKINNLILSGEWWRLLTPMCLVFLLPLC

SEQ ID NO: 73545 - protein, 91 aa, Setaria italica
  Transcript Sequence Number=SeqID_7571
  Gene Ontology: Cellular component=integral to membrane
  Homolog annotation: Hit_ID=B1BAT3; Match level="QueryCoverage=96%, HitCoverage=43%, E-value=3e-11, Identity=34%"; Hit description =Conserved membrane protein
  Pfam annotation: Domain name=Rhomboid; Domain location=1-91; Score= -28.6; E_value=0.06; Accession=PF01694.14; Description=Rhomboid family
FLQHSGFLHVALGCWVLLTFGPRVCRAYGQMAFFLIYILGGICGNVTSFVHTTEITVCGTGPVFSLIGAWLVYQSQNKQVIDKDVSESMFS

SEQ ID NO: 73546 - protein, 78 aa, Setaria italica
  Transcript Sequence Number=SeqID_7572
  Gene Ontology: Cellular component=integral to membrane
PRVCRAYGQMAFFLIYILGGICGNVTSFVHTTEITVCGTGPVFSLIGAWLVYQSQNKQVIDRDVSESMFSQAVIAAAL

SEQ ID NO: 73547 - protein, 144 aa, Setaria italica
  Transcript Sequence Number=SeqID_7573
  Gene Ontology: Cellular component=integral to membrane
LKGIYLGDTNVPFLNSNQGPVFSLIGAWLVYQSQNKQVIDKDVSESMFSQAVIAAALSFLLSIFGGIDNWAHLVATISGLLFGYLTCPSIELHNAAKNGQKEAVALVRRQAHPCKSAAVFGISILAFAALAFAYGTQFNNMDLE

SEQ ID NO: 73548 - protein, 362 aa, Setaria italica
  misc_feature (60)..(60): Xaa can be any naturally occurring amino acid
  misc_feature (235)..(235): Xaa can be any naturally occurring amino acid
  misc_feature (290)..(290): Xaa can be any naturally occurring amino acid
  misc_feature (320)..(320): Xaa can be any naturally occurring amino acid
  Transcript Sequence Number=SeqID_7574
  Gene Ontology: Mol. function=binding; Cellular component=integral to membrane
  Homolog annotation: Hit_ID=B8FX77; Match level="QueryCoverage=79%, HitCoverage=92%, E-value=8e-20, Identity=28%"; Hit description =Rhomboid family protein
  Pfam annotation: Domain name=Rhomboid; Domain location=192-340; Score= 110.3; E_value=6.5e-30; Accession=PF01694.14; Description=Rhomboid family
YTSHAPIRENTGPRHIGVIVKVRNKDIDESCGSEFAQEDSEIISSPSQRKEGNQLRALEXYFSKLNSTQQLCSFPQKNKQKNGPSSSNEVDAIIANVKNMIDSLQVQFDRGNTGTKSYRNTSIEDYKEYLIFDEKSFLDMHTDDQTSGFCLTNLLAGINIAVLLFEIASPVKNSENEYLSLPLLYGAKINNLILSGEWWRLLTPMCLHSGFLHVALGCWVLLTFGPRVCRAYGQXSFFLIYILGGICGNVTSFVHTTEITVCGTGPVFSLIGAWLVYQSQNKQVIDKDVXSESMFSQAVIAAALSFLLSIFGGIDNCIWXHLVATISGLLFGYLTCPSIELHNAAKNGQKEAVALVRRQAIM

SEQ ID NO: 73549 - protein, 428 aa, Setaria italica
  misc_feature (201)..(201): Xaa can be any naturally occurring amino acid
  Transcript Sequence Number=SeqID_7575
  Gene Ontology: Mol. function=binding; Cellular component=integral to membrane; Biological process=proteolysis
  Homolog annotation: Hit_ID=C4L3I7; Match level="QueryCoverage=31%, HitCoverage=37%, E-value=3e-21, Identity=38%"; Hit description =Rhomboid family protein
  Pfam annotation: Domain name=Rhomboid; Domain location=230-375; Score= 123.2; E_value=8.3e-34; Accession=PF01694.14; Description=Rhomboid family
MAGVVKWKPLSCEQMEHTRVTPERLSLRSNSPKNHNSRHIGHFAKGGNFICHSLKPVSQPKAGQYVIVKVRNKDIDESCGSEFAQEDSEIISSPSQRKEGNQLRALESYFSKLNSTQQLCSFPQKNKQKNGPSSSNEVDAIIANVKNMIDSLQVQFDRGNTGTKSYRNTSIEDYKEYLIFDEKSFLDMHTDDQTSGFCLTXLFEIASPVKNSENEYLSLPLLYGAKINNLILSGEWWRLLTPMCLHSGFLHVALGCWVLLTFGPRVCRAYGQMAFFLIYILGGICGNVTSFVHTTEITVCGTGPVFSLIGAWLVYQSQNKQVIDKDVSESMFSQAVIAAALSFLLSIFGGIDNWAHLVATISGLLFGYLTCPSIELHNAAKNGQKEAVALVRRQAHPCKSAAVFGISILAFAALAFAYGTQFNNMDLE

SEQ ID NO: 73550 - protein, 135 aa, Setaria italica
  Transcript Sequence Number=SeqID_7576
  Pfam annotation: Domain name=DUF1218; Domain location=60-121; Score =19.6; E_value=0.00064; Accession=PF06749.4; Description=Protein of unknown function (DUF1218)
MAIKMDKTTIIVCAVVGSLGVLSAILGFSAEGTKLTPYTIFVYGDDCIYPQNPAIGLGICAVIFLLAAQVTISAVGGCCGCCKSRSIPSGTKRIVGIVCAVVSWRVTDCAWSHRVRTTCALFLRANHRASTLSSA

SEQ ID NO: 73551 - protein, 251 aa, Setaria italica
  Transcript Sequence Number=SeqID_7577
GRLVGCVGFAGGVDRSVEDKVTAEHASPGTGTQTELSENNCLINYSNNESAAAEDTGTQTITSGLSQNGLLNRSSKSIENVNEGNGTESQIACTNGSQTKVERPAEREDSFDDYQDASPFLHQPDSEDGAAPGSVFSTEINNLNTVSSESSVAANEISVETNGLCKAQFPGEPNMRDLSSDSNVAYNLEDGALRLAEPHVKLGSPYEHSVNVDNTYTDMVNSKPDKTGHSEMIGHLNASSLQEAHPLILEP

SEQ ID NO: 73552 - protein, 512 aa, Setaria italica
  Transcript Sequence Number=SeqID_7578
RKVEDFMEDGLHVSHTMSEASPIPDTVQLETITNPSTNTMPIGSDLKVVCTDNAPIDCSTELPTQNSTVEDISDDHEPVENSCKKSLECPTASFQYDLPVTNVDDIPTTNVNDLEFTFEERPLPNIIEENPSIEKTNGFTKEDVHNKQIDPEICAEDQLSLTQKHATLLKDQASSVKNPFNLDDDRNDDLFELPTDSCYLEVPNSVELRPQVDSTSLMVDQPTVSNLTRMAEAQQCHNSNECILSTSSAVENGEVIGPEDMPISTSSELVSKTCSTDHSLQEDGHKNGVIFVPSQTTSMEFSTVSMQVISAVSAEVEENMQAKDASAKEMIAVRSIDGMEQATSTTAKNGYAANVEEKKPTEGSAAEMNEVQHSDHADEEKQAGGTELSSVQSMGNLEENKQTDDTDAKEMNARFNGDDVEDKMQKTDGTSAEKMNAGGTDDSEVKMLAQGTTAKEVTAEQSTDTVEEKQQLQQQPNGIVGQEGNSTKQNEEIAAPGARLNSGRVHVPLKVL

SEQ ID NO: 73553 - protein, 87 aa, Setaria italica
  Transcript Sequence Number=SeqID_7579
YDRMPVTMAMTDAVNDTSTQITKRLTISFEETETAQWDATLELTLGYTATMKVRIPQARPRRPSTTLCRVLRILQLGRDRGDDGEEG

SEQ ID NO: 73554 - protein, 229 aa, Setaria italica
  misc_feature (43)..(43): Xaa can be any naturally occurring amino acid
  Transcript Sequence Number=SeqID_7580
  Gene Ontology: Mol. function=calcium ion binding; Cellular component =nucleus; Biological process=regulation of transcription, DNA -dependent
  Homolog annotation: Hit_ID=Q7XKR4; Match level="QueryCoverage=100%, HitCoverage=24%, E-value=4e-91, Identity=72%"; Hit description =OSJNBa0053B21.7 protein
  Pfam annotation: Domain name=CG-1; Domain location=10-128; Score =285.9; E_value=8.8e-83; Accession=PF03859.8; Description=CG-1 domain
MSQSFDINVLREEARSRWLKPSEVYYILQNHERFPITHEAPKXPLSGSLFLYNRRVNRYFRRDGHTWRRKKDGRTVGEAHERLKVGNVDALSCYYAHGEQNPCFQRRCFWMLEPAYEHIVLVQYREVAEGRYYSSQLSNGPPESFSSLGYPSAIYGNQYLSSTSGTSEGSESHQSYSNLSSVTEVSSYSGNKECNKDGGSLLSIPELGQTCLEQTTEVYSDDNDNSKNK

SEQ ID NO: 73555 - protein, 119 aa, Setaria italica
  misc_feature (18)..(18): Xaa can be any naturally occurring amino acid
  Transcript Sequence Number=SeqID_7581
  Gene Ontology: Mol. function=sequence-specific DNA binding; Cellular component=nucleus; Biological process=regulation of transcription, DNA-dependent
  Homolog annotation: Hit_ID=Q9LEE8; Match level="QueryCoverage=100%, HitCoverage=13%, E-value=6e-27, Identity=57%"; Hit description=OCL3 protein
HNPGRLIAAPPIPKPGGXFGAPGLSLGLQPNMDGGQLGDMGRMGMMGGGGSGSAGEGDSMGRGREDENDSRSGSDNVDGASGDELDPDNSNPRKKKKRYHRHTPQQIQELEAVFKECPH

SEQ ID NO: 73556 - protein, 106 aa, Setaria italica
  misc_feature (8)..(8): Xaa can be any naturally occurring amino acid
  Transcript Sequence Number=SeqID_7582
  Gene Ontology: Mol. function=protein serine/threonine kinase activity; Biological process=protein amino acid phosphorylation
  Homolog annotation: Hit_ID=B6U1Z4; Match level="QueryCoverage=84%, HitCoverage=17%, E-value=2e-31, Identity=78%"; Hit description=ATP binding protein
AEGGLGGXVEEGVGESSSPPRDAAPVPAGSGGSGGGGGARDICGQVLDRLVADGHAEASDPEFRDKLVAHFGRLPHSYQLDINVDKAADVLVHQNVLAEAKDPDRP

SEQ ID NO: 73557 - protein, 62 aa, Setaria italica
  Transcript Sequence Number=SeqID_7583
  Gene Ontology: Mol. function=protein serine/threonine kinase activity; Biological process=protein amino acid phosphorylation
  Homolog annotation: Hit_ID=B6U1Z4; Match level="QueryCoverage=50%, HitCoverage=5%, E-value=2e-11, Identity=96%"; Hit description=ATP binding protein
HLTKHVLQLSALLSDIGLNIREAHVFSTHDGYSLDVFVVDGWPIEVICYVLIMALVELLRVD

SEQ ID NO: 73558 - protein, 499 aa, Setaria italica
  Transcript Sequence Number=SeqID_7584
  Gene Ontology: Mol. function=protein serine/threonine kinase activity; Biological process=protein amino acid phosphorylation
  Homolog annotation: Hit_ID=B6U1Z4; Match level="QueryCoverage=96%, HitCoverage=91%, E-value=0.0, Identity=88%"; Hit description=ATP binding protein
  Pfam annotation: Domain name=ACT; Domain location=123-186; Score =34.7; E_value=3.7e-07; Accession=PF01842.17; Description=ACT domain
  Pfam annotation: Domain name=Pkinase; Domain location=225-473; Score =240.4; E_value=4.4e-69; Accession=PF00069.17; Description=Protein kinase domain
  Pfam annotation: Domain name=Pkinase_Tyr; Domain location=225-473; Score=269.6; E_value=7.2e-78; Accession=PF07714.9; Description =Protein tyrosine kinase
  Pfam module annotation: Pfam domain module=ACT::Pkinase::Pkinase_Tyr; Domain location=123-186::225-473::225-473
KVKGGKGNVTRTNNTSGQVLDRLVADGHAEASDPEFRDKLVAHFGRLPHSYQLDINVDKAADVLVHQNVLAEAKDPDRRPAFYVRFLRIEDADQAYDSDASEEGDDDGDDLSVRQDTEYTHIHEIVFSTIDKPKLLSQLSALLSDIGLNIREAHVFSTHDGYSLDVFVVDGWPIEDTDGLHKALEASILRNEGSWSGGSSHSSAAERTLPFQVKGGEWEIDKRLLKMGGMIASGSCGDLYHGTYLGEDVAIKVLRAEHLNKNVWNEFTQEVYILREVQHTNVVRFIGACTKPPQFCIITEYMSGGSLYDFVHKHHNVLNLTTLLKFAVDVCRGMCYLHERGIIHRDLKTANLLMDKDHVVKVADFGVARFQDQGGIMTAETGTYRWMAPEVINHQPYDNKADVFSFAIVLWELITSKIPYDTMTPLQAAVGVRQGLRPGLPKKAHPKLLDLMKRCWEADPSNRPVFPDILAELEDLLAHVQGASGKTVQDPANNLSTKD

SEQ ID NO: 73559 - protein, 109 aa, Setaria italica
  Transcript Sequence Number=SeqID_7585
  Gene Ontology: Mol. function=catalytic activity; Cellular component =integral to membrane; Biological process=metabolic process
  Homolog annotation: Hit_ID=Q6K821; Match level="QueryCoverage=100%, HitCoverage=14%, E-value=4e-49, Identity=82%"; Hit description =Phosphatidylinositolglycan-like
HRIGRKLVMLGDETWIKLFPTLFARQDGVSSFYVRDTVEVDFNVSRHLEFELAAKDWTVLVLHYLGLDHVGHIGGRRSVLMTQKMKEMDDVIRRVHAASLQDNLERTLL

SEQ ID NO: 73560 - protein, 289 aa, Setaria italica
  Transcript Sequence Number=SeqID_7586
  Gene Ontology: Mol. function=binding; Cellular component=mitochondrion
  Homolog annotation: Hit_ID=B9S434; Match level="QueryCoverage=99%, HitCoverage=53%, E-value=4e-73, Identity=48%"; Hit description =Pentatricopeptide repeat-containing protein, putative
  Pfam annotation: Domain name=PPR; Domain location=129-163; Score =19.6; E_value=0.013; Accession=PF01535.12; Description=PPR repeat
  Pfam annotation: Domain name=PPR; Domain location=24-58; Score=4.3; E_ value=2.8; Accession=PF01535.12; Description=PPR repeat
  Pfam annotation: Domain name=PPR; Domain location=94-128; Score=1.2; E_value=6.4; Accession=PF01535.12; Description=PPR repeat
  Pfam module annotation: Pfam domain module=PPR::PPR::PPR; Domain location=129-163::24-58::94-128
KNSVKSAEKVFDLMKDDRVVPDWMTFSLLASVYINAGLHVKGRDALVEMEKRASRKERAAYSSLLTQYANLSDRGNLDRVWNKMKQTFRKFSDTEYKCMLTSLTRFDDITEAMNIYREWELASGTRDSRIPNTILSHYIKNGMIEKAESFLSHIVEKRVKPSYSTWELFVWGYLGNNRTDKVLECLKKALSSLEKWEPNHKLATAIFSQVEKMGDIETAEKLLVMFRDAGYVTTEMYNSVLRTYAKAELMPLIVEERMEQDKVAMDEETRRLLRLTSKYPIGEVSTLMS

SEQ ID NO: 73561 - protein, 156 aa, Setaria italica
  misc_feature (12)..(12): Xaa can be any naturally occurring amino acid
  Transcript Sequence Number=SeqID_7587
  Gene Ontology: Mol. function=metal ion binding; Cellular component =integral to membrane; Biological process=ubiquitin-dependent protein catabolic process
  Homolog annotation: Hit_ID=B9SNU8; Match level="QueryCoverage=79%, HitCoverage=29%, E-value=6e-26, Identity=49%"; Hit description=Ring finger protein, putative
  Pfam annotation: Domain name=zf-C3HC4; Domain location=115-156; Score= 27.7; E_value=4.7e-05; Accession=PF00097.17; Description=Zinc finger, C3HC4 type (RING finger)
GPSPDDSSGPVXSPRLVIAIIGVLAIAFLLVSYYTFISRYCSTFGSFRGRVLGSSSGGAARGSGGGGGGGSSHGQYRSQESWNVSPSTGLDEALISKITLCKYKRGDASVHTTDCSVCLGEFRDGESLRLLPKCSHAFHQQCIDKWLKSHSNCPLL

SEQ ID NO: 73562 - protein, 90 aa, Setaria italica
  Transcript Sequence Number=SeqID_7588
SDVTCGLLLLFIAAAQSGGTSGSLNRPLHWPLLCRHYLESNNAAAISNELVPRDTDTHGSPQPGYWPDLTSEPTRSGRAGQGCEDTWSTR

SEQ ID NO: 73563 - protein, 546 aa, Setaria italica
  misc_feature (75)..(75): Xaa can be any naturally occurring amino acid
  misc_feature (527)..(527): Xaa can be any naturally occurring amino acid
  Transcript Sequence Number=SeqID_7589
  Gene Ontology: Mol. function=N-acetyltransferase activity; Biological process=metabolic process
  Homolog annotation: Hit_ID=UPI000034EE28; Match level="QueryCoverage =82%, HitCoverage=51%, E-value=1e-27, Identity=33%"; Hit description =PHD finger family protein
  Pfam annotation: Domain name=PHD; Domain location=484-530; Score=1.1; E_value=0.02; Accession=PF00628.21; Description=PHD-finger
MLTEEEKASLCLLGLSRESCSTTQSDLMHGIEPAAEQIEDAAGGDHVMPDAKEIRNGAVTETKYQLDSYLKDVRXIVVHGLLEGFKVTYKKDEVEKIGRISGQGYSCGCSECNYSSNVMNACEFEQHSGQSSNNQNDHIFLETGISLFKVVKALKHYRLNMLGEFFEDTIGFPPNMDEYNKWKASFQKRKDYSDAVASDGSSTQSSRELTVGEMISSLKESAGNSISNLNWSASKRRSDRQFKRGGTETSTPVLSGSEDKGVSGLSTGTSKKNGTEETLSENTAGPLSTNGVKPDSPEPTTIIPDYSKHDPISLGLSLPSSATISQEPLPNCNIDSKSKETKSRDTTLHPLIFKEGGLPDNNLLTYKLKNGEALKQGYKRGTGIVCNCCNQEFTPSHFEEHAGMGRRRQPYRNIYTSEGVTLHKLALQLQDRLNSNEFGNANVSSFSDYPNLTSSGCGKEPSTTSGPIIPLKRTLQEIVVETEMCYFCGDGRTTLGNIDPDTIVFCNQCERPCHIRCYNDRIGKKEXVPLEILKEYTRLLLTLSRR

SEQ ID NO: 73564 - protein, 121 aa, Setaria italica
  Transcript Sequence Number=SeqID_7590
NSFFLPFFPFVFKANGKDQDLYSILYKGQSGSAQPGMTDGKPQWTPSKSRSTYTKDSKHSLPHDSVDTSCFGSSVHYGGRDYFYGSSTTKQGTESSTNYKADKKDPAADSHGDWWQGSFYY

SEQ ID NO: 73565 - protein, 157 aa, Setaria italica
  Transcript Sequence Number=SeqID_7591
MEPKKSSAQHQPHAMEPKKSSPRGAGAAAAAANDAESPLSSLFYPPAPGANGKDQDLYSILYKGQSGSAQPGMTDGKPQWTPSKSRSTYTKDSKHSLPHDSVDTSCFGSSVHYGGRDYFYGSSTTKQGTESSTNYKADKKDPAADSHGDWWQGSFYY

SEQ ID NO: 73566 - protein, 130 aa, Setaria italica
  Transcript Sequence Number=SeqID_7592
  Gene Ontology: Mol. function=structural constituent of ribosome; Cellular component=ribonucleoprotein complex; Biological process =translation
  Homolog annotation: Hit_ID=Q6K4T1; Match level="QueryCoverage=99%, HitCoverage=94%, E-value=3e-59, Identity=88%"; Hit description=60S ribosomal protein L27
  Pfam annotation: Domain name=KOW; Domain location=2-33; Score=17.0; E_ value=0.081; Accession=PF00467.21; Description=KOW motif
  Pfam annotation: Domain name=Ribosomal_L27e; Domain location=45-130; Score=181.7; E_value=2.1e-51; Accession=PF01777.10; Description =Ribosomal L27e protein family
  Pfam module annotation: Pfam domain module=KOW::Ribosomal_L27e; Domain location=2-33::45-130
VKAVILLQGRFAGRKAVIVRVFEEGTRDRPYGHCLVAGLAKYPKKVIRKDSAKKTAKKSRVKCFIKLVNFTHIMPTRYILDVDFKDVASGGPDALSTRDKKVAACKAAKARLEERFKTGKNRWFFTKLRF

SEQ ID NO: 73567 - protein, 625 aa, Setaria italica
  Transcript Sequence Number=SeqID_7593
  Gene Ontology: Mol. function=protein serine/threonine kinase activity; Biological process=protein amino acid phosphorylation
  Homolog annotation: Hit_ID=O49974; Match level="QueryCoverage=100%, HitCoverage=73%, E-value=0.0, Identity=84%"; Hit description=KI domain interacting kinase 1
  Pfam annotation: Domain name=PAN_2; Domain location=131-195; Score =97.7; E_value=4.1e-26; Accession=PF08276.3; Description=PAN-like domain
  Pfam annotation: Domain name=Pkinase; Domain location=308-560; Score =135.5; E_value=1.6e-37; Accession=PF00069.17; Description=Protein kinase domain
  Pfam annotation: Domain name=Pkinase_Tyr; Domain location=308-579; Score=108.6; E_value=2.1e-29; Accession=PF07714.9; Description =Protein tyrosine kinase
  Pfam annotation: Domain name=S_locus_glycop; Domain location=1-114; Score=99.7; E_value=9.7e-27; Accession=PF00954.12; Description=S -locus glycoprotein family
  Pfam module annotation: Pfam domain module=PAN_2::Pkinase::Pkinase _Tyr::S_locus_glycop; Domain location=131-195::308-560::308-579::1-114
RSGQWTGVNFIGIPWRPLYLSGWTLSNDRDLGLHYTYTATNTSLQRFVVLPNGTDICYMVKKSSQEWETVWLQPSNACEYYAACGPNAKCTVGQDGKAQCTCLKGFQPKLWDQWNAGNWTEGCTRNPLLGCQVNQSGDGFLPMGNIKWPDFSYWMSTVADEKGCKSSCLNNCSCGAYVYTTTTGCLVWGDKLIDIHELQTGSYTLNLKLPASELRVHHAVWHIAMIISAVVLVVLVACLVLWWWRGRNIKDAVHRSWRSRHSSTWSQQNSSMLDISQSIRFDDDVEDGKSHELKVYSLDRMKAATCNFSDSNKLGEGGFGPVYMGTLPGGEEVAVKRLCRNSGQGLEEFKNEVILIAKLQHRNLVRLLGCCIQREEKILVYEYMPNKSLDAFLFNPEKQELLDWSKRFDIIEGIARGLLYLHRDSRLRVVHRDLKASNILLDADMNPKISDFGMARIFGGDQNQFNTNRVVGTFGYMSPEYAMEGIFSVKSDVYSFGVLILEIITGKRAVSFHYHQDSLNIAGYAWRQWNEDKAAELIDPLIRASCSLRQVLRCVHIALLCVQDHADERPDIPTVIIMLSSDSSLPNPRPPTLMLRGREIESTKSSENEQSHSIGTVSMTQLHGR

SEQ ID NO: 73568 - protein, 137 aa, Setaria italica
  Transcript Sequence Number=SeqID_7594
  Gene Ontology: Mol. function=structural constituent of ribosome; Cellular component=ribonucleoprotein complex; Biological process =translation
  Homolog annotation: Hit_ID=Q6K4T1; Match level="QueryCoverage=100%, HitCoverage=100%, E-value=5e-64, Identity=89%"; Hit description=60S ribosomal protein L27
  Pfam annotation: Domain name=KOW; Domain location=7-40; Score=30.9; E_ value=5.3e-06; Accession=PF00467.21; Description=KOW motif
  Pfam annotation: Domain name=Ribosomal_L27e; Domain location=52-137; Score=181.7; E_value=2.1e-51; Accession=PF01777.10; Description =Ribosomal L27e protein family
  Pfam module annotation: Pfam domain module=KOW::Ribosomal_L27e; Domain location=7-40::52-137
MVKFLKPGKAVILLQGRFAGRKAVIVRVFEEGTRDRPYGHCLVAGLAKYPKKVIRKDSAKKTAKKSRVKCFIKLVNFTHIMPTRYILDVDFKDVASGGPDALSTRDKKVAACKAAKARLEERFKTGKNRWFFTKLRF

SEQ ID NO: 73569 - protein, 103 aa, Setaria italica
  Transcript Sequence Number=SeqID_7595
  Gene Ontology: Mol. function=ubiquitin-protein ligase activity; Cellular component=ubiquitin ligase complex; Biological process =ubiquitin-dependent protein catabolic process
  Homolog annotation: Hit_ID=B9R8Q6; Match level="QueryCoverage=92%, HitCoverage=11%, E-value=2e-30, Identity=61%"; Hit description =Ubiquitin-protein ligase, putative
  Pfam annotation: Domain name=U-box; Domain location=29-103; Score =36.0; E_value=7.2e-08; Accession=PF04564.7; Description=U-box domain
MMADAPAVHDSGGDSELEDQSYQQEPAFEAFMCPLTKQVMQDPVTIETGQTFEREAIHKWFRECRDSGRTPTCPLTQAELRTTDMTPSIALRNVIDEWRARNQ

SEQ ID NO: 73570 - protein, 98 aa, Setaria italica
  misc_feature (19)..(19): Xaa can be any naturally occurring amino acid
  Transcript Sequence Number=SeqID_7596
  Gene Ontology: Cellular component=chloroplast
VRDDWIENDLSGWIGANRXYPGTADALKLSSSETYIVTTKQNADLLLITYCRFAEALLKELAGIDFPSERIYGLGTGPKVKVLQQLQQMPQHQGLTLH

SEQ ID NO: 73571 - protein, 295 aa, Setaria italica
  Transcript Sequence Number=SeqID_7597
  Gene Ontology: Mol. function=catalytic activity; Cellular component =chloroplast; Biological process=metabolic process
  Homolog annotation: Hit_ID=Q8YQG8; Match level="QueryCoverage=76%, HitCoverage=80%, E-value=3e-24, Identity=34%"; Hit description =Alr3863 protein
  Subcellular localization annotation: CTP_CleavageSite=64; ConfidenceScore=5.23e-01
MAAVRFLGTAPGCLERVVGPTPAASSLGGRSTLPIGRVRPYFIRSGPSPGGAERRGARAARPPRAAMGGDLFALDFDGVLCDSCGESSLSAVKAAKVRWPWVFAKVDSAMEEWIVEQMYTLRPVVETGYENLLLVRLLVEIQIPSVRKSSVADGLSIQEILENWFKLKPILMDEWQEDRESLVDLFGRVRDDWIENDLSGWIGANRFYPGTADALKLSSSETYIVTTKQSRFAEALLKELAGIDFPSERIYGLGTGPKVKVLQQLQQMPQHQGLTLHFIEDRLATLKNVIKEPAL

SEQ ID NO: 73572 - protein, 84 aa, Setaria italica
  Transcript Sequence Number=SeqID_7598
  Gene Ontology: Mol. function=magnesium ion binding; Cellular component=chloroplast; Biological process=photosynthesis, light harvesting
  Homolog annotation: Hit_ID=Q9XF73; Match level="QueryCoverage=91%, HitCoverage=27%, E-value=5e-35, Identity=93%"; Hit description =Putative chlorophyll a/b-binding protein
  Pfam annotation: Domain name=Chloroa_b-bind; Domain location=3-51; Score=-39.0; E_value=0.018; Accession=PF00504.13; Description =Chlorophyll A-B binding protein
VRSYPSSYPGRQLRPLGLADDPEAFAELKVKELKNGRLAMFSMFGFFVQAIVTGKGPLENLADHLADPVNNNAWAYATNFVPGN

SEQ ID NO: 73573 - protein, 712 aa, Setaria italica
  Transcript Sequence Number=SeqID_7599
  Gene Ontology: Mol. function=nucleotide binding; Cellular component =nucleus; Biological process=DNA replication initiation
  Homolog annotation: Hit_ID=Q5KLP9; Match level="QueryCoverage=78%, HitCoverage=58%, E-value=0.0, Identity=57%"; Hit description=DNA unwinding-related protein, putative
  Pfam annotation: Domain name=AAA_3; Domain location=275-416; Score= -9.4; E_value=0.004; Accession=PF07726.3; Description=ATPase family associated with various
  Pfam annotation: Domain name=AAA_5; Domain location=275-422; Score= -4.1; E_value=0.0021; Accession=PF07728.6; Description=ATPase family associated with various
  Pfam annotation: Domain name=MCM; Domain location=217-541; Score =677.7; E_value=1e-200; Accession=PF00493.15; Description=MCM235 family
  Pfam annotation: Domain name=Mg_chelatase; Domain location=242-428; Score=-140.6; E_value=0.0065; Accession=PF01078.13; Description =Magnesium chelatase, subunit ChlI
  Pfam module annotation: Pfam domain module=AAA_3::AAA_5::MCM::Mg _chelatase; Domain location=275-416::275-422::217-541::242-428
PMLKKLRELGTSEIGKLTSVMGVVTRTSEVRPELLQGTFKCLDCGNVVKNVEQQFKYTEPIICVNATCQNRSKWALLRQESKFTDWQRVRMQETSKEIPAGSLPRSLDVILRHEIVEKARAGDTVVFTGTVVAVPDVMALTSPGERAECRREAPQRKSGGVQEGVKGLKSLGVRDLSYRLAFVANSVQVADGRREVDIRDRDTDGDDSERQKFTEEEEDEVVRMRNTPDFFNKIVDSICPTVFGHQEIKRAVLLMLLGGVHKVTHEGINLRGDINVCIVGDPSCAKSQFLKYTAGIVPRSVYTSGKSSSAAGLTATVAKEPETGEFCIEAGALMLADNGICCIDEFDKMDIKDQVAIHEAMEQQTISITKAGIQATLNARTSILAAANPTGGRYDKSKPLKYNVALPPAILSRFDLVYIMIDEPDENTDYHIAHHIVRVHQKREEALAPAFSTAELKRYIAFAKSLKPQLSSEAKKVLVESYVTLRRGDSTPGTRVAYRMTVRQLEALIRLSEAIARSHLERTVLPAHVRLAVKLLKTSIISVESSEVDLSDFQDAEDGTNVPSDNDAGQPAEADAAPQQQGAENDQAADNGKKKLVITEEHFQRVTQALVMRLRQHEESIMKDGDGLAGMKQGDLIIWYVEQQNAKGAYSSTAEVKEEVKCIKAIIERLIQREGHLIVIDDGAAAAAEDGAGARRTSESRILAVNPNYVID

SEQ ID NO: 73574 - protein, 201 aa, Setaria italica
  misc_feature (150)..(150): Xaa can be any naturally occurring amino acid
  misc_feature (190)..(190): Xaa can be any naturally occurring amino acid
  Transcript Sequence Number=SeqID_7600
  Gene Ontology: Mol. function=positive transcription elongation factor activity; Cellular component=chromosome; Biological process =regulation of transcription, DNA-dependent
  Homolog annotation: Hit_ID=B9T506; Match level="QueryCoverage=95%, HitCoverage=17%, E-value=4e-40, Identity=49%"; Hit description=FACT complex subunit SPT16, putative
MQCDAAIAALTPGSKASKSYQAAVDVVREEAPDLLPFLTKSGGTGIGIEFRETWLSLNEKNDLIVKEGMVFNVSLGFQNLLAKSSDEKIEEISLWLADTVLICKEKPEVLTACISKAEDDAFYSFDEEKIGSPSKPVVKNRANGPAESEXQMLKSDMMLSLKDNLRSSSRTPKEDLRRQLQSEILRKKTXETAMRSDGTNL

SEQ ID NO: 73575 - protein, 83 aa, Setaria italica
  Transcript Sequence Number=SeqID_7601
  Subcellular localization annotation: CTP_CleavageSite=72; ConfidenceScore=5.09e-01
SAAPPADQGPEEEDRCTPPAGVRRGYRAGCHPPTTSSAAARQALASTARRSRGSRRTRATRRLLLVGSPSRRADERRVRSRRT

SEQ ID NO: 73576 - protein, 42 aa, Setaria italica
  Transcript Sequence Number=SeqID_7602
MEEKAADATAAAAAAAAVAAAADQDGAVYCSEHPYPPGATDG

SEQ ID NO: 73577 - protein, 76 aa, Setaria italica
  Transcript Sequence Number=SeqID_7603
  Gene Ontology: Mol. function=RNA binding
FFIWKQSSFAILVRILAVHTLFQNILYKYPSKESIPLETSVPEPTPSIMVPSELPVYPASNFYSAPDLAIPSGHPS

SEQ ID NO: 73578 - protein, 443 aa, Setaria italica
  Transcript Sequence Number=SeqID_7604
  Gene Ontology: Mol. function=RNA binding
  Homolog annotation: Hit_ID=B9S0X9; Match level="QueryCoverage=72%, HitCoverage=69%, E-value=2e-70, Identity=50%"; Hit description =Poly(RC)-binding protein, putative
  Pfam annotation: Domain name=KH_1; Domain location=123-184; Score =54.3; E_value=4.7e-13; Accession=PF00013.21; Description=KH domain
  Pfam annotation: Domain name=KH_1; Domain location=204-270; Score =65.0; E_value=2.8e-16; Accession=PF00013.21; Description=KH domain
  Pfam annotation: Domain name=KH_1; Domain location=374-436; Score =40.7; E_value=5.8e-09; Accession=PF00013.21; Description=KH domain
  Pfam annotation: Domain name=KH_2; Domain location=123-170; Score =6.5; E_value=0.066; Accession=PF07650.9; Description=KH domain
  Pfam annotation: Domain name=KH_2; Domain location=374-422; Score =10.9; E_value=0.023; Accession=PF07650.9; Description=KH domain
  Pfam module annotation: Pfam domain module=KH_1::KH_1::KH_1::KH_2::KH_ 2; Domain location=123-184::204-270::374-436::123-170::374-422
MGFDNFVQITGGAEAVKKALFGVSTILYKYPSKESIPLETSVPEPTPSIMVPSELPVYPASNFYSAPDLAIPSGHPSLSILGSTPHVPELTLSADGHGRLPVYQSVLPIIPTYSTPKCSGELEFRVLCPGNKIGLVIGRAGSTIKSIRQESGARIDVDDAKNDKEESIINITSTEATDDVKSAAVEAVLLLQAKINDYEEDRMSLRLLVPNKVIGCLIGRGGSIINDMRKKTKADIRISKGDKPRRASSSDELVEVSGEADKLRDALVQIVLRLREDVLKESVDSQNSDKDGKLTVSTTDSLYGSSLPLPALFPHTHSQQISPLGYDRRGETERGLEIFPRTSSYGYNSLQVADDDRYGLSSYTSKAYEGRLPRVEMTIPASGLSKVMGKRGTNLDNIRKISGADIEIIESKSSRHDHVAYISGTSEQRQSAENLIKAFIMST

SEQ ID NO: 73579 - protein, 75 aa, Setaria italica
  Transcript Sequence Number=SeqID_7605
  Subcellular localization annotation: CTP_CleavageSite=61; ConfidenceScore=5.52e-01
VAHGRAQAAGAQLGNSTNTKPRRFVSRRHLPRPLTFGGHHRHRERGEAEKRARVREFFFPPQSSRAGGRGQRARG

SEQ ID NO: 73580 - protein, 286 aa, Setaria italica
  misc_feature (122)..(122): Xaa can be any naturally occurring amino acid
  Transcript Sequence Number=SeqID_7606
  Gene Ontology: Mol. function=protein binding
  Homolog annotation: Hit_ID=Q2QXZ2; Match level="QueryCoverage=99%, HitCoverage=57%, E-value=1e-141, Identity=90%"; Hit description =Ankyrin repeat family protein, putative, expressed
  Pfam annotation: Domain name=Ank; Domain location=127-160; Score =16.4; E_value=0.12; Accession=PF00023.22; Description=Ankyrin repeat
  Pfam annotation: Domain name=Ank; Domain location=162-194; Score =39.4; E_value=1.4e-08; Accession=PF00023.22; Description=Ankyrin repeat
  Pfam module annotation: Pfam domain module=Ank::Ank; Domain location =127-160::162-194
KQLESMVKEASVDDVMKVLMASRKFEMQELWATCSHLVARSGLSADLLAKHLPIDVVAKIEEIRAKSPVAAANTPRSPFLTHHYLPINAPSSAADRDHKIRRMRRALDAADIELVKLMVMGXGLDLDDALAVHYAVQHCNRDVVKALLELGAADVNSRAGPTGKTALHLAAEMVSPDMVSVLLDHHADPNARTLDGVTPLDVLRGLTSEFLFKGAVPGLTHIEPNKLRLCLELVQSAVMVTTRDEGGAPGAGGEAGGSDGGNFPRSDADDSLVSLTMNSTLMYQGT

SEQ ID NO: 73581 - protein, 150 aa, Setaria italica
  misc_feature (14)..(14): Xaa can be any naturally occurring amino acid
  misc_feature (142)..(142): Xaa can be any naturally occurring amino acid
  Transcript Sequence Number=SeqID_7607
  Gene Ontology: Mol. function=protein serine/threonine kinase activity; Biological process=protein amino acid phosphorylation
  Homolog annotation: Hit_ID=B6SVR7; Match level="QueryCoverage=99%, HitCoverage=22%, E-value=5e-67, Identity=84%"; Hit description =Protein kinase PVPK-1
  Pfam annotation: Domain name=Pkinase; Domain location=1-146; Score= -48.0; E_value=1.2e-05; Accession=PF00069.17; Description=Protein kinase domain
  Pfam annotation: Domain name=Pkinase_Tyr; Domain location=2-141; Score=-176.3; E_value=0.052; Accession=PF07714.9; Description =Protein tyrosine kinase
  Pfam module annotation: Pfam domain module=Pkinase::Pkinase_Tyr; Domain location=1-146::2-141
SRAQTEREILQLLXDHPFLPTLYAHFETDRFACLVMEFCPGGDLHALRQRQPGKHFPEHAARFYAAEVLLALEYLHMLGVVYRDLKPENVLVREDGHIMLSDFDLSLRCAVSPTLVRSSLHPDPRNAQTCAQPACIQPTCFXPKLFSRKG

SEQ ID NO: 73582 - protein, 97 aa, Setaria italica
  Transcript Sequence Number=SeqID_7608
MAPAASTPVKSVLVLVSLATLLLVLVSAVEGYNGRHAAAHSAVARRSRLGITRHVHHRRTATPHRYVLAEKSNRTDGGAKNRSAPATSNATSQTPAP

SEQ ID NO: 73583 - protein, 52 aa, Setaria italica
  Transcript Sequence Number=SeqID_7609
TAHDTYHGGQCLCPYYKQREELNMLVTTHTRAQMHDTHIVETNRWTSTRGRP

SEQ ID NO: 73584 - protein, 87 aa, Setaria italica
  Transcript Sequence Number=SeqID_7610
  Gene Ontology: Mol. function=intramolecular transferase activity, phosphotransferases; Biological process=metabolic process
  Homolog annotation: Hit_ID=Q6Z8J0; Match level="QueryCoverage=96%, HitCoverage=25%, E-value=5e-37, Identity=89%"; Hit description =Phosphoglycerate mutase
  Pfam annotation: Domain name=PGAM; Domain location=4-81; Score=-16.2; E_value=0.079; Accession=PF00300.14; Description=Phosphoglycerate mutase family
LTLRVVEEAIEAVKGICNIPVDVIYTSSLIRAQMTAMLAMMQHRRKKVPIIVHNESEQAHRWSQIYSEETKKQSIPVITAWQLNCSR

SEQ ID NO: 73585 - protein, 63 aa, Setaria italica
  Transcript Sequence Number=SeqID_7611
HVSIKLLRLETIHKHIRLFMTRITVDCLCPYYKQREELTMLVTTHTCAQMHDIHIVETNRWIN

SEQ ID NO: 73586 - protein, 65 aa, Setaria italica
  Transcript Sequence Number=SeqID_7612
PYNEYFISQISDTQIIKLLIRPETIHKHIKLFMTHITVDSVCVLITSNERCLSPHTRTDARHTYS

SEQ ID NO: 73587 - protein, 54 aa, Setaria italica
  Transcript Sequence Number=SeqID_7613
TAHDTYHGGQCLCPYYKQREELNMLVTTHARAQMHDTHMVETNRWTSTRGRPIW

SEQ ID NO: 73588 - protein, 90 aa, Setaria italica
  Transcript Sequence Number=SeqID_7614
LETNVLNAFAFVLVQIPNGCGSFLGLTQLVLYAMYRKNKGPAARPGKGEAAAAAAEVEDAKKVAAAVELADATTNKVADTVADGKVASQV

SEQ ID NO: 73589 - protein, 227 aa, Setaria italica
  Transcript Sequence Number=SeqID_7615
  Gene Ontology: Cellular component=integral to membrane
  Homolog annotation: Hit_ID=B6SU55; Match level="QueryCoverage=90%, HitCoverage=76%, E-value=2e-62, Identity=65%"; Hit description=Seven- transmembrane-domain protein 1
  Pfam annotation: Domain name=MtN3_slv; Domain location=90-176; Score =127.8; E_value=3.5e-35; Accession=PF03083.8; Description=MtN3saliva family
  Subcellular localization annotation: CTP_CleavageSite=68; ConfidenceScore=5.14e-01
VTKFLTANDVLVLSVCRYGLPFVSPNNILVSTINGAGAAIETVYVVIFLVFASSRQTRLRMLGLASAVAMVFAAVALVSMLALHGERRKLLCGIAATVCSICMYGSPLSIMRLVVKTKSVEYMPFLLSLAVFLCGTSWFVYGLLGRDPFVAIPNGCGSFLGAVQLILYAIYRNSGGGKAGAGGRGGKQHGGVDDDVEMAAASDAKGSNKVAHDVGGAGNADRPGVAS

SEQ ID NO: 73590 - protein, 70 aa, Setaria italica
  Transcript Sequence Number=SeqID_7616
TAHDTYHGGQCLRPYYKQREELNMLVTTHTRAHRCTTHIWLRPTNGPRLEVAPYGEQFIGDKHEHNLAIA

SEQ ID NO: 73591 - protein, 54 aa, Setaria italica
  Transcript Sequence Number=SeqID_7617
TVHDTYHGGQCLCPYYKQREELNMLVTTHTRPQMHDTHIVETNRWTSTRGRPIW

SEQ ID NO: 73592 - protein, 65 aa, Setaria italica
  Transcript Sequence Number=SeqID_7618
IVHHMGQPFVGLNYMYVVHLCTRVCGDKHLSLLVIRIQTLSTVICVMNSLICLCIVSGLSNFIET

SEQ ID NO: 73593 - protein, 54 aa, Setaria italica
  Transcript Sequence Number=SeqID_7619
TAHDTYHGGQCLCPYYKQREELNMLVTTHTSAQMHDTHIVETNRWTSTRGRPIW

SEQ ID NO: 73594 - protein, 57 aa, Setaria italica
  Transcript Sequence Number=SeqID_7620
SRSICWSQLYVCRASVRSCVWCQAYLIPLAACNKDIDTVHRDMCHEQSNMFMYCLWP

SEQ ID NO: 73595 - protein, 78 aa, Setaria italica
  Transcript Sequence Number=SeqID_7621
FFFFFIQNPLRINYVKHAHTDNNNNNHVSIKFLRLETIHKHIRLFMTHITVDSVSILITSSERCLSPHTRVHRCTTYI

SEQ ID NO: 73596 - protein, 108 aa, Setaria italica
  misc_feature (80)..(80): Xaa can be any naturally occurring amino acid
  Transcript Sequence Number=SeqID_7622
  Gene Ontology: Cellular component=integral to membrane
  Homolog annotation: Hit_ID=Q9LPL1; Match level="QueryCoverage=97%, HitCoverage=57%, E-value=4e-28, Identity=57%"; Hit description =F24J8.9 protein
MCRYGLPFVSPNNILVTTINGTGSLIEAIYVVIFLIFAERRIRLRMLGLLGVVTSIFAAVVLISLLALHGNGRKIFCGLXPLSIMRLVIKTKSVEFMPFLLSLSVFLC

SEQ ID NO: 73597 - protein, 187 aa, Setaria italica
  misc_feature (26)..(26): Xaa can be any naturally occurring amino acid
  Transcript Sequence Number=SeqID_7623
  Gene Ontology: Mol. function=magnesium ion binding; Cellular component=chloroplast; Biological process=photosynthesis, light harvesting
  Homolog annotation: Hit_ID=Q41746; Match level="QueryCoverage=97%, HitCoverage=63%, E-value=7e-91, Identity=91%"; Hit description =Chlorophyll a/b-binding apoprotein CP26
  Pfam annotation: Domain name=Chloroa_b-bind; Domain location=84-186; Score=52.0; E_value=2.3e-12; Accession=PF00504.13; Description =Chlorophyll A-B binding protein
  Subcellular localization annotation: CTP_CleavageSite=37; ConfidenceScore=5.21e-01
MAALAPSKILGTQINFAGSSRYATAXAPTAGAQKIVSLFSKKPAQKPKPAAVTSSSPDISDELAKWYGPDRRIYLPDGLLDRSEVPEYLTGEVPGDYGYDPFGLGKKPEDFAKYQAYELIHARWAMLGAAGAVIPEACNKFGANCGPEAVWFKTGALLLDGNTLSYFGNSIPINLVVAVIAERTPSL

SEQ ID NO: 73598 - protein, 88 aa, Setaria italica
  Transcript Sequence Number=SeqID_7624
  Homolog annotation: Hit_ID=Q5BQ30; Match level="QueryCoverage=94%, HitCoverage=96%, E-value=4e-21, Identity=65%"; Hit description =Thionin-like peptide
MEGKRTTTLMVIMCLVILCLNVNSATAAQCGCCVSHEAQACCQLCIRVGGSDTVCKHTCCFPCFLDDSVAAKMVEMEVLAKMKEAGQA

SEQ ID NO: 73599 - protein, 265 aa, Setaria italica
  misc_feature (214)..(214): Xaa can be any naturally occurring amino acid
  Transcript Sequence Number=SeqID_7625
  Gene Ontology: Cellular component=chloroplast
  Homolog annotation: Hit_ID=B6SU55; Match level="QueryCoverage=80%, HitCoverage=85%, E-value=2e-83, Identity=73%"; Hit description=Seven- transmembrane-domain protein 1
  Pfam annotation: Domain name=MtN3_slv; Domain location=129-215; Score= 129.5; E_value=1.1e-35; Accession=PF03083.8; Description=MtN3saliva family
  Pfam annotation: Domain name=MtN3_slv; Domain location=7-96; Score =82.8; E_value=1.2e-21; Accession=PF03083.8; Description=MtN3saliva family
  Pfam module annotation: Pfam domain module=MtN3_slv::MtN3_slv; Domain location=129-215::7-96
MEHIARFFFGVSGNVIALFLFLSPVVTFWRIIRKRSTEDFSGVPYNMTLLNCLLSAWYGLPFVSPNNILVTTINGTGSLIEAIYVVIFLIFAERRIRLRMLGLLGVVTSIFAAVVLISLLALHGNGRKIFCGLAATIFSICMYASPLSIMRLVIKTKSVEFMPFLLSLSVFLCGTSWFIYGLLGRDPFIIIPNGCGSFLGLTQLVLYAMYRKNXGPAARPGKGEAAAAAAEVEDAKKVAAAVELADATTNKVADTVADGKVASQV

SEQ ID NO: 73600 - protein, 208 aa, Setaria italica
  misc_feature (121)..(121): Xaa can be any naturally occurring amino acid
  Transcript Sequence Number=SeqID_7626
  Gene Ontology: Mol. function=receptor activity
  Homolog annotation: Hit_ID=Q9SR02; Match level="QueryCoverage=50%, HitCoverage=6%, E-value=2e-44, Identity=79%"; Hit description =F7O18.23 protein
  Subcellular localization annotation: CTP_CleavageSite=83; ConfidenceScore=5.23e-01
LLDCIRLTAGPLLALGGAIRPARMPVTVSSGYSSMPKQANNIPTQGPLANGSSSSSIHHAPVPSNAAAAHLSSHNLHAAAMLSAAGRGGPGLVPSSLLPFDVSVVLRGPYWIRIIYRKKFXVDMRCFAGDQVWLQPATPPKGGPSVGGSLPCPQFRPFIMEHVAQGLNALEPNFMNAAQASGHLNNNAGAPQTVFLSCLSSSLSCLTS

SEQ ID NO: 73601 - protein, 149 aa, Setaria italica
  misc_feature (124)..(124): Xaa can be any naturally occurring amino acid
  Transcript Sequence Number=SeqID_7627
  Gene Ontology: Mol. function=receptor activity
FIIVVVLGLSSGPSVGGSLPCPQFRPFIMEHVAQGLNAFESNYMSARHSGAQLKANVNTASGSQQSAPALNRFHGAHGVAISRPTANVGNQVAPTFTRTGSAMVASSKFASGIAGAPHLPPGSXPSCFIMKGELSSAFTGLGDDGGYGG

SEQ ID NO: 73602 - protein, 726 aa, Setaria italica
  misc_feature (37)..(37): Xaa can be any naturally occurring amino acid
  Transcript Sequence Number=SeqID_7628
  Gene Ontology: Mol. function=receptor activity
  Homolog annotation: Hit_ID=Q9SR02; Match level="QueryCoverage=98%, HitCoverage=40%, E-value=0.0, Identity=57%"; Hit description =F7O18.23 protein
CIKHAQLTAQMDSLAIPYVEEVGLRTPSSNLWLTLPXAQDDSWKHICLRLGKAGSMSWDVRINDPHFRELWELNGGNTTTQWGVGIRIANTSEMDSHISFDSDGVVLTYNTVEADSVQKLVSDLRRLSNARSFACGMRRLIGVKIDDKLDDNQLSTEMKSQSVNKGNSDASDKLSDQMRKTFRIEAVGLMSLWFSYGTMPMVHIVVEWEIAKGGCTMHVSPDQLWPHTKFLEDFVNGGEVASFLDCIRLTAGPLLALGGAIRPARMPVTTTSYSSVPKQNIFRAQGAPANDSSSTTMQNVSASLGPSAAHITQNVSAPLSPSAAHSNNHNLQSSVLSATGRGGPGLVPSSLLPFDVSVVLRGPYWIRIIYRKIFSVDIRCFTGDQVWLQPATPPKGGPSVGGSLPCPQFRPFIMEHVAQGLNALEPNFMNAAQASGHLNNNAGAPQTAPSASRLSATPGVSLSRPTSGVANHVAASLSRAGNAMLASSALASGIGGASVRLAPGAGLPVHMKGEINTAFIGLGDDGGYGGGWVPLAALKKVLRGILKYLGVLWLFAQLPELLKEILGSILKDNEGALLNLDQEQPALRFYVGGYVFAVSVQRAQLLLQVLNVKRFHHQQQKQQQQAQSPAQEELATSEINEICDYFSRRVACEPYDASRVASFITLLTLPISVLREFISLIAWKKIQSQAHGEIASAQRVRVELCLEKHHGSESNDHTESSSSSKK

SEQ ID NO: 73603 - protein, 339 aa, Setaria italica
  Transcript Sequence Number=SeqID_7629
  Gene Ontology: Mol. function=receptor activity
  Homolog annotation: Hit_ID=Q6YTQ9; Match level="QueryCoverage=95%, HitCoverage=87%, E-value=1e-133, Identity=75%"; Hit description=SWP1 protein-like
ATTISTIIPKTYESCVPLAALKKVLRGILKYLGVLWLFAQLPELLKEILGSILKDNEGALLNLDQEQPALRFYVGGYVFAVSVHRVQLLLQVLSVKRFHHQQQQQQAQSNAQEELAAAEINEICDYFSRRVASEPYDASRVASFITLLTLPISVLREFLKLIAWKKGFSQAHGDIATAQRARIELCLENHSGSASADNTESTLAKSNIHHDRAHSSVEFALTFVLDHALIPHMNVAGGAAWLPYCVSVRLRYSFGDNNHIAFLAMDGSHGGRACWLQLEEWERCKQKVSRAVETVNVSAVAGEVGQGRLRMVAEMIQKQLQHCLQQLRDGPLSAGSTAS

SEQ ID NO: 73604 - protein, 188 aa, Setaria italica
  Transcript Sequence Number=SeqID_7630
  Gene Ontology: Mol. function=receptor activity
  Homolog annotation: Hit_ID=Q6YTQ9; Match level="QueryCoverage=94%, HitCoverage=48%, E-value=7e-46, Identity=55%"; Hit description=SWP1 protein-like
SLTFLFTFVTLGSFFKLFYYVTISHGEIASAQRVRVELCLEKHHGSESNDHTESSSSSKSNIKHDRANRSVDFGLTFVLDQALKHHTNIGGAAWLPYCVSVRLRYNFGDNGHVTFLAMEGSHGGRACWLQYEDWERCKQAVDLAVESANGSPATGEIGQGRLRLVAEMIHKQLQLSLQQLRNGQLSAS

SEQ ID NO: 73605 - protein, 464 aa, Setaria italica
  misc_feature (20)..(20): Xaa can be any naturally occurring amino acid
  Transcript Sequence Number=SeqID_7631
  Gene Ontology: Mol. function=receptor activity
  Homolog annotation: Hit_ID=Q9SR02; Match level="QueryCoverage=100%, HitCoverage=27%, E-value=2e-42, Identity=41%"; Hit description =F7O18.23 protein
YGQAYISLGINIRSGRFLLXQSPENILPPAALMDCEEALNKGSTSATEVFSSLRTRSILHLFAAAGRFFGLKVYQQSQGTLKIPKAILDGSDFMIMGFPHCANAYYLLMQLDKDFRPVFHLLETQCDASDKTNANADAKEAIRFNKINVGQMQILKSESTTNPFDVKLQALQSIMSSADIMDSDLPVQNGIEPLPLLPACSPSFSSIVDEVFEYERGSTAAQNHSILPSSLPATPHLSSLSVGIQGVNARAVSPMHDGGLSHTQANNILKVHPSVSLNSYFPSNFRHLHYVNKSLQLVPSSNSNSNQIPVQSSHSGSLGNSPSDHLVRPSTTTGGLEKLITAGSDGASRKRSLSDFLPIIPSLQGLQPSDPIKRRKISESARSPLPLQAYTSNLQSRASLTYGDVLAERNNCVPATIYASVLLHVIRHCSLCIKHAQLTAQMDSLAIPYVEEVGLRTPSSNLWL

SEQ ID NO: 73606 - protein, 284 aa, Setaria italica
  Transcript Sequence Number=SeqID_7632
  Homolog annotation: Hit_ID=Q10EW2; Match level="QueryCoverage=99%, HitCoverage=53%, E-value=1e-120, Identity=77%"; Hit description =Auxin-regulated protein, putative, expressed
  Pfam annotation: Domain name=DUF966; Domain location=1-193; Score =53.3; E_value=7e-15; Accession=PF06136.5; Description=Domain of unknown function (DUF966)
RKKSLSTDHDAVVREITEYRQSHPRRSADLQGISRELLSQCATPLSIPSTRVKSESLESLIRADNMTNSFRILEEEDIVVPTCPKLKPTNVLMQLITCGSLSVKDHENVGIVQAYKPRFPSLKFPSPLISRTMMMGELDYLSENPRLMGMRLEDKEYFSGSLIETKMQRDVPAERYSALKRSSSYNAERGGGTLDCTRSDEDTTDTSSRSRCLPRTPILSSFLHPKSDSLKSPVSDCRRSSSARQDCDLASGNGSKRFADGSITSAAKADSFRKEEKLVKIEES

SEQ ID NO: 73607 - protein, 205 aa, Setaria italica
  misc_feature (94)..(94): Xaa can be any naturally occurring amino acid
  Transcript Sequence Number=SeqID_7633
  Gene Ontology: Mol. function=ATPase activity, coupled to transmembrane movement of ions, phosphorylative mechanism; Cellular component=integral to membrane; Biological process=phospholipid transport
  Homolog annotation: Hit_ID=Q2R575; Match level="QueryCoverage=100%, HitCoverage=18%, E-value=4e-94, Identity=84%"; Hit description =Phospholipid-translocating P-type ATPase, flippase family protein, expressed
NFWMLTGDKQKTLAIQIALLLQLDFFRYLCFHKPEPKGQLLHINGRTRDEVARSLERVLLTMRITSSEPKELAFVVDGWALEIILTQYTEAFTXLAVLSKTALCCRVTPSQKAQLVKLLKSCDYRTLAIGDGGNDVRMIQQADIGVGISGREGLQAARAADYSIGKFRFLKRLILVHGRYSYNRTAFLSQYSFYKSLLICFIQIL

SEQ ID NO: 73608 - protein, 900 aa, Setaria italica
  misc_feature (435)..(435): Xaa can be any naturally occurring amino acid
  misc_feature (455)..(455): Xaa can be any naturally occurring amino acid
  Transcript Sequence Number=SeqID_7634
  Gene Ontology: Mol. function=ATPase activity, coupled to transmembrane movement of ions, phosphorylative mechanism; Cellular component=integral to membrane; Biological process=phospholipid transport
  Homolog annotation: Hit_ID=B9MYF4; Match level="QueryCoverage=100%, HitCoverage=81%, E-value=0.0, Identity=75%"; Hit description =Aminophospholipid ATPase
  Pfam annotation: Domain name=Hydrolase; Domain location=171-569; Score=19.4; E_value=0.00096; Accession=PF00702.18; Description =haloacid dehalogenase-like hydrolase
FPPFIDNDICPLTINNTLLQSCYLRNTEWACGVAVYTGNETKLGMSRGVPEPKLTAMDAMIDKLTGAIFLFQLTVVVVLGAAGNVWKDAEARKLWYVKYDDNEPWYQILVIPLRFELLCSIMIPISIKVSLDFVKSLYAKFIDWDEDMYDLENDTPAHAANTAISEDLGQVEYILTDKTGTLTENKMIFRRCCIGGTFYGNECGDALKDVELLNAIANNSPHAIKFLTVMTLCNTVIPIKSPSGSNLHKAQSQDEDALVNAAANLHMVLVSKNGNNAEIHFNRRVMRYEILDILEFTSDRKRMSVVVLDCQSGKIFLLSKGADEAMLPCAYSGQQTKTFVDAVDKYAQLGLRTLCLGWRELESEEYTEWSRSFKEANSALIDREWKVAEVCQRLEHSLEILGVSAIEDRLQDGVPETIEILRQSGINFWMLTGDXQSTAIQIALLCNLISSGYTXQLLHINGRTRDEVARSLERVLLTMRITSSEPKELAFVVDGWALEIILTQYTEAFTELAVLSKTALCCRVTPSQKAQLVKLLKSCDYRTLAIGDGGNDVRMIQQADIGVGISGREGLQAARAADYSIGKFRFLKRLILVHGRYSYNRTAFLSQYSFYKSLLICFIQILFSFLSGIAGTSLFNSVSLMAYNVFYTSIPVLTTVLDKDLSEKTVMQNPEILLYCQAGRLLNPSTFAGWFGRSLYHAIIIFVITIHAYANEKSEMEELSMVALSGSIWLQAFVVTLEMNSFTFVQLLAIWGNLIGFYVINFFISSIPASGMYTIMFRLCGQPSYWITLVLISGVGMGPVLALKYFRYTYRPSAINILQKAERSRGPMYTLVSLESQLRSDKDNMMVSSSTTPVKNKSSVYEPLLSDSPMASRRSLAPSSFDIFQPAHSRTSHPRNIKAN

SEQ ID NO: 73609 - protein, 52 aa, Setaria italica
  Transcript Sequence Number=SeqID_7635
FNILSLEKKENNHVFQSEKKKKKKGKKIVLGHAILSCVTMSATEKYALPAAT

SEQ ID NO: 73610 - protein, 120 aa, Setaria italica
  Transcript Sequence Number=SeqID_7636
MAASGKKLPPFLFTLLLLLSTAVTPILSLPAAAADHEVDCDCDKPKAPKPSHPPKTKPKNPKPPKGPSYPSPVTRPPKKGPSYPPVTRPPVVGPPKGPVTRPPVVAPPVTRPPVVGPPVT

SEQ ID NO: 73611 - protein, 80 aa, Setaria italica
  Transcript Sequence Number=SeqID_7637
  Gene Ontology: Mol. function=transferase activity, transferring glycosyl groups; Biological process=metabolic process
  Homolog annotation: Hit_ID=C4MF42; Match level="QueryCoverage=98%, HitCoverage=16%, E-value=4e-14, Identity=51%"; Hit description=UDP -glycosyltransferase UGT99C4
ELGKPVWALGPLCLSNRDAQATASRGTMAAAAAQKAITAWLDEQAPGSVVYVSFGSIARKLPKQLFEVGHGLEDSGEPFL

SEQ ID NO: 73612 - protein, 89 aa, Setaria italica
  misc_feature (81)..(81): Xaa can be any naturally occurring amino acid
  Transcript Sequence Number=SeqID_7638
  Gene Ontology: Mol. function=beta-N-acetylhexosaminidase activity; Cellular component=cell wall; Biological process=carbohydrate metabolic process
  Homolog annotation: Hit_ID=B6ST04; Match level="QueryCoverage=93%, HitCoverage=15%, E-value=5e-40, Identity=92%"; Hit description=Beta -hexosaminidase beta chain
KPPNSRLNERNMTTKDAYKYFVLKAQELAIKLNWIPVNWEETFNSFKENLNPLTVVHNWLGPGVCPKVVAKGFRCIMSNQXGVWYLDHL

SEQ ID NO: 73613 - protein, 466 aa, Setaria italica
  Transcript Sequence Number=SeqID_7639
  Gene Ontology: Mol. function=beta-N-acetylhexosaminidase activity; Cellular component=cell wall; Biological process=carbohydrate metabolic process
  Homolog annotation: Hit_ID=B6ST04; Match level="QueryCoverage=100%, HitCoverage=85%, E-value=0.0, Identity=93%"; Hit description=Beta -hexosaminidase beta chain
  Pfam annotation: Domain name=Glyco_hydro_20; Domain location=110-415; Score=362.5; E_value=7.7e-106; Accession=PF00728.14; Description =Glycosyl hydrolase family 20, catalytic domain
  Pfam annotation: Domain name=Glyco_hydro_20b; Domain location=1-108; Score=26.6; E_value=8.7e-06; Accession=PF02838.7; Description =Glycosyl hydrolase family 20, domain 2
  Pfam module annotation: Pfam domain module=Glyco_hydro_20::Glyco _hydro_20b; Domain location=110-415::1-108
AFQRYRGLVFAPWAHAARSGDGGYDVAKLTVVVASANETLALGVDESYTIYVAAAGSVNSIVGGATIEANTIYGAIRGLETFSQLCVFNYDTKNVEVRHAPWHIQDEPRFAFRGLLLDTSRHYLPVDVIKQVIDSMSFAKLNVLHWHIIDEQSFPLEVPSYPNLWKGSYTKWERYTVEDAHDIVNYAKKRGINVMAEIDVPGHAESWGNGYPKLWPSANCTEPLDVSSNFTFEVISGILSDMRKIFPFGLFHLGGDEVYTGCWNATPHVRQWLNERNMTTKDAYKYFVLKAQELAIKLNWIPVNWEETFNSFKENLNPLTVVHNWLGPGVCPKVVAKGFRCIMSNQGVWYLDHLDVPWENVYSGEPLAGISDKDQQKLVLGGEVCMWGETADTSDVLQTIWPRAAAAAERLWSQLEAISAQDVETTVLSRLHYFRCLLNHRGIAAAPVTNYYARRPPIGPGSCFVQ

SEQ ID NO: 73614 - protein, 98 aa, Setaria italica
  Transcript Sequence Number=SeqID_7640
  Pfam annotation: Domain name=DUF1230; Domain location=4-97; Score =46.9; E_value=6.4e-12; Accession=PF06799.3; Description=Protein of unknown function (DUF1230)
TEWCPVPPEQRPVNEYEALASSLPFSWAAGDLRVYCSRLALTGAAFALFVGLPVAAFGGRGGAGGDAVHLALGATGSGILAVTLAVVRMYLGWAYVGN

SEQ ID NO: 73615 - protein, 82 aa, Setaria italica
  Transcript Sequence Number=SeqID_7641
  Gene Ontology: Mol. function=electron carrier activity; Biological process=electron transport chain
  Homolog annotation: Hit_ID=B4FTG0; Match level="QueryCoverage=81%, HitCoverage=55%, E-value=3e-26, Identity=81%"; Hit description=Basic blue protein
  Pfam annotation: Domain name=Cu_bind_like; Domain location=39-82; Score=1.3; E_value=5.5e-05; Accession=PF02298.9; Description =Plastocyanin-like domain
MARGRGSASASRAMAFAVACCILAADAGTTYYVGDNNGWSFSSPNWPNGKHFHAGDTLVFRYVPWIHNVVAVDEGGYDGCTT

SEQ ID NO: 73616 - protein, 43 aa, Setaria italica
  Transcript Sequence Number=SeqID_7642
LLHKGPCEPRIPGKLKREGSSGPFSSSLGRPFNNKGWHPNSSL

SEQ ID NO: 73617 - protein, 1094 aa, Setaria italica
  misc_feature (447)..(447): Xaa can be any naturally occurring amino acid
  Transcript Sequence Number=SeqID_7643
NNSLLESFTQIVMYGKSLHQEGPCEPRIQEVEAEEVQDPSVHPWGGLSTTKDGILTLLDCFINAKSLHVIQNVFDNARAREREREMLYPDACGGGGRGWISPVIPNYGRGHGTRDTCALHTARLSCDTLVDFWSALGEETRSSLLRMKEEDFIERLMHRFDSKRFCRDCRRNVIREFKELKELKRMRKEPRCTSWFCVADTAFKCEVFEDAVLVDWHQSLLEQDGNYHHFEWAIGTDEGKSDILNFENVGMNGQVHRKGLDLDQFEDYFVTLRACRLDGRCTEFCVKAHALKGQSCVHRRLIVGDGFVTITKGESIRSFFEHAEEAEEEDEDDAMDRDSNDPDGDVAHPQKHAKSPELAREFLLDAAAVIFKEQVEKAFREGTARQNAHSVFVSLALKLLEARVHVACKEIITLEKQTKLLEEEEKEKREEEERRERRRTKEREKRXRRKERLKGKDRDKEKIPIQSKDSDETSPSSLCNQAAPTNESEDILDSRYSDSEEEDNVVVREHSSPDSSVEQSSTRDSDERSNEHECHTTADCDGSFSCEESISSRRNLRYRRDFPQEQDASYWYEDCQDDSGDILQHSRERMRNNTRGYNTAFSANNRTRDRYNPCSCGHQEEYRYFPNTARPSRDMKMARKTVEKPRLQYRRCYPLDSFVVPKGGRVGGTPTKIAGPKQVWEPMDARKKASLGNGNNAAGVADDADRSDQVECSKDISECEKLEKVCEPLAVCSERSEEACKSDTDQPCSEKRQSACNDEPHAVDKPDSCLTKDTGRTANLTSSDSSSCLSEGDRDSSMSSMTSLSAQNAESLSTSDSEESSDRNNSSPGDPPAKSASRSLLEMCAGNGFREYQPKGLHPPDSNQFGFRVGPFQDQMLHHQKVHAPYSAPFMGFHNQPLPVPTNGYLSYPQPGHFYPGPVAPVGYGVAGNQRVDFPMQYSNNVHPYPGPEFGFLPTAPVHKTPVSLHAVPVPPPPPLCRSGVPMMMNPERQQSHPLLPKLNQAVPVAENGCAEDNATKQKQKDDDSTPFSLFQFNLPIAPPAPAASKEEHGGGALAPSRPQLPIAQAQPCSREETNIKEYNLFSGCNKGAMFQLN

SEQ ID NO: 73618 - protein, 84 aa, Setaria italica
  Transcript Sequence Number=SeqID_7644
SGKVGAEEGESSNGKDHGDGNGEIEKDDDDDDDNDDEKMGDEEDSDLDLSPSSAPTFPEDTASSALLPEAFEHSLSALAVVLFT

SEQ ID NO: 73619 - protein, 413 aa, Setaria italica
  Transcript Sequence Number=SeqID_7645
  Gene Ontology: Mol. function=binding
  Homolog annotation: Hit_ID=B6TDD9; Match level="QueryCoverage=100%, HitCoverage=88%, E-value=1e-133, Identity=62%"; Hit description=TPR domain containing protein
  Pfam annotation: Domain name=SHNi-TPR; Domain location=163-200; Score= 20.8; E_value=0.0019; Accession=PF10516.1; Description=SHNi-TPR
  Pfam annotation: Domain name=TPR_1; Domain location=163-196; Score =16.3; E_value=0.064; Accession=PF00515.20; Description =Tetratricopeptide repeat
  Pfam annotation: Domain name=TPR_1; Domain location=205-238; Score =8.8; E_value=0.52; Accession=PF00515.20; Description=Tetratricopeptid e repeat
  Pfam annotation: Domain name=TPR_2; Domain location=163-196; Score =13.6; E_value=0.68; Accession=PF07719.9; Description=Tetratricopeptid e repeat
  Pfam annotation: Domain name=TPR_2; Domain location=205-238; Score =7.7; E_value=3.8; Accession=PF07719.9; Description=Tetratricopeptide repeat
  Pfam module annotation: Pfam domain module=SHNi-TPR::TPR_1::TPR _1::TPR_2::TPR_2; Domain location=163-200::163-196::205-238::163 -196::205-238
AIEDEDFVDAVDCLSRALEIRTAHFGELAPECASTYFKYGCALLYKAQEETDPLGNVPKSEPNEESVKSTTAKADSECSKASGSNAEDAVSSGKVGAEEGESSNGKDHGDGNGEIEKDDDDDDDNDDEKMGDEEDSDLDLSWKMLDIARAIVEKSPDNTIEKVKIYSALGEVALEREDIDNSLSDYMKALAMLEQLVEPDHRRTVELNFRICLVYELASKIGDAIPYCAKAISLCKSRIQSLKNSKDASLAGKDGESAAEGGSEKSAPEAEIEQLTGILTELEKKLEDLEQAMSNPNPMEEVMKVIASRAAAAQKAADGMPRAASFTSSQMATSNNGFDSSVMSTAATTGSTGSTVTDLGVVGRGVKRANIMPISAEPAPKKPAVDSASSKGDSSNSSEPLPTAQNGDESVSK

SEQ ID NO: 73620 - protein, 367 aa, Setaria italica
  Transcript Sequence Number=SeqID_7646
  Gene Ontology: Mol. function=transferase activity, transferring glycosyl groups; Cellular component=chloroplast; Biological process =starch biosynthetic process
  Homolog annotation: Hit_ID=A9YWU0; Match level="QueryCoverage=98%, HitCoverage=47%, E-value=0.0, Identity=93%"; Hit description=Starch synthase IIc
  Pfam annotation: Domain name=Glyco_transf_5; Domain location=4-195; Score=198.8; E_value=1.5e-56; Accession=PF08323.3; Description =Starch synthase catalytic domain
SNGRIGHTHLGIREGMKVKYYHAYIDGVDFVFIDNPIFQHVESEIYGGNRTDILKRMVLLCKTAVEVQWYVPCGGFCYGDGNLVFIANDWHTALLPVYLKAYYRDNGFMTYARSVLVIHNIAHQGRGPIDDFSYLDLPGHYMDQFKLYDPFGGDHLNIFAAGIKAADRFLTVSHGYAWELKTPDGGWGLHSIISENDWKFQGIVNGIDTTDWNPRHDVHLQSDGYTNYSLETVQTGKAQCKEALQKELGLPVRGDVPVIAFIGRLDHQKGVDLIAEAMPWIAGQDVQLIMLGTGRQDLEDTLRRLESQHYDRVRGWVGFSVQLAHRMTAGADVLLMPSRFEPCGLNQLYAMMYGTVPVVHAVGGLRD

SEQ ID NO: 73621 - protein, 227 aa, Setaria italica
  Transcript Sequence Number=SeqID_7647
  Gene Ontology: Mol. function=nucleic acid binding; Cellular component= lysosome; Biological process=sphingolipid metabolic process
  Homolog annotation: Hit_ID=B6T780; Match level="QueryCoverage=100%, HitCoverage=100%, E-value=1e-110, Identity=85%"; Hit description =Saposin-like type B, region 1 family protein
  Pfam annotation: Domain name=SapB_1; Domain location=135-173; Score =33.3; E_value=9.6e-07; Accession=PF05184.7; Description=Saposin-like type B, region 1
  Pfam annotation: Domain name=SapB_1; Domain location=49-88; Score =45.2; E_value=2.5e-10; Accession=PF05184.7; Description=Saposin-like type B, region 1
  Pfam annotation: Domain name=SapB_2; Domain location=176-210; Score =35.8; E_value=1.8e-07; Accession=PF03489.9; Description=Saposin-like type B, region 2
  Pfam annotation: Domain name=SapB_2; Domain location=90-123; Score =38.3; E_value=3.1e-08; Accession=PF03489.9; Description=Saposin-like type B, region 2
  Pfam module annotation: Pfam domain module=SapB_1::SapB_1::SapB _2::SapB_2; Domain location=135-173::49-88::176-210::90-123
MCPTTRLAFVLALAIALTNEVAESRDFNILAQNGLPDAAKGPGLTAASGKLCQLCEQYSTEALLYLKQNETQTEILSILHHECASLAPLKQQCITLVDYYVPLFFLEVSMVNPEKFCESVHLCKQGMKISLPTREGTCGLCHHVIVEVLVMLKDPNTQLEVIDLLLKTCSKAQNYEQQCKRLVLKYTPLILVKGQKFLETNDVCSAIHACRTGTQASMESIPLSATL

SEQ ID NO: 73622 - protein, 54 aa, Setaria italica
  Transcript Sequence Number=SeqID_7648
VQGKGLDGARENICFECQLLIRAMNWIRLSHWILCKSFHLYVTHLWFGEQQKNI

SEQ ID NO: 73623 - protein, 61 aa, Setaria italica
  Transcript Sequence Number=SeqID_7649
IQRKQEVTLNFNVLSLLLTHQCFLEYTTTKLGLLIAPECCQNDGITLLDYAFGMYKFQNCT

SEQ ID NO: 73624 - protein, 176 aa, Setaria italica
  misc_feature (168)..(168): Xaa can be any naturally occurring amino acid
  Transcript Sequence Number=SeqID_7650
  Gene Ontology: Mol. function=kinase activity; Cellular component =plasma membrane
  Homolog annotation: Hit_ID=B9T6U1; Match level="QueryCoverage=99%, HitCoverage=16%, E-value=2e-32, Identity=45%"; Hit description =Myosin-1, putative
SRLQKAILVMQTEKEFIKSSYESGIAKYWDLEKEINDMQEQVCHFQDKFDESVVIEDDEARALMTATALKSCEDTIMKLQEQRKASAGQAMGESERVKVFREKLKAIMNKHGKSLPDPLDFSDKNARKNHGAEMEDAYHAKQGGIEMQAVIDKIKEHFERDCNISMAXEVTERIDE

SEQ ID NO: 73625 - protein, 128 aa, Setaria italica
  Transcript Sequence Number=SeqID_7651
MVRPLRRLRNLNLEEEGDAEHIENGQDNLAKNENRHDNLAENENDDDLQGRPDVDGVLARLPRHHPQTPIKIIRPNGEVRQVIGNFRILNLEDLDGGKVIVRTDENGVPNERSASILGQDFGQTARKN

SEQ ID NO: 73626 - protein, 243 aa, Setaria italica
  Transcript Sequence Number=SeqID_7652
  Gene Ontology: Mol. function=electron carrier activity; Cellular component=integral to membrane; Biological process=oxidation reduction
  Homolog annotation: Hit_ID=C0KHM0; Match level="QueryCoverage=99%, HitCoverage=44%, E-value=2e-75, Identity=54%"; Hit description =Putative ferulate 5-hydroxylase
  Pfam annotation: Domain name=p450; Domain location=1-243; Score= -118.6; E_value=6.2e-06; Accession=PF00067.14; Description=Cytochrome P450
NRVKQTHEKWNKLLEEIIRDHERRRKSSDHGRGAGGGGFEQEESDDFTDVMLSVQHEYGITRDHIKAILMDMFEAGTATSSLVLEFAMVELLRNPHLMAKLQAEVRKKTPEGQEMVKEENLAGMVYLRAVVKETLRLHPPVPLLIPHLSMADCDIDGYTIRSGTKVVINSWAICRDPKSWEKAEEFIPERFMDGGSAAGIDFKGNNFQFTPFGAGRRMCPGINFGLATINIMLANLMYCFDWT

SEQ ID NO: 73627 - protein, 110 aa, Setaria italica
  Transcript Sequence Number=SeqID_7653
  Homolog annotation: Hit_ID=Q9FSB5; Match level="QueryCoverage=73%, HitCoverage=11%, E-value=9e-15, Identity=50%"; Hit description =RSP67.2
  Pfam annotation: Domain name=PPR; Domain location=66-100; Score=31.3; E_value=3.9e-06; Accession=PF01535.12; Description=PPR repeat
SAAAALGACEPAEAAVAAALEAAFPEPPSEQDAVIVLNTAAAARPETAVLALRWFLRNAEIRKKVILYNVVLKLLRKKRRWSETEELWGEMLRDGVQPDNATFSTVISCA

SEQ ID NO: 73628 - protein, 75 aa, Setaria italica
  Transcript Sequence Number=SeqID_7654
  Subcellular localization annotation: CTP_CleavageSite=68; ConfidenceScore=5.27e-01
MIPQAASLDLGLSLGLGLTSQGSLSSSITTAGSSPWAAALSSVVAAQQHQPHHAAAAAAVDPDSGAMRASTSPDT

SEQ ID NO: 73629 - protein, 47 aa, Setaria italica
  Transcript Sequence Number=SeqID_7655
PLVFPEAAAAAAGGGGAGARPGKACRRSRRGSSRGRDFVPDLGAIAE

SEQ ID NO: 73630 - protein, 70 aa, Setaria italica
  Transcript Sequence Number=SeqID_7656
RCPETAMYVAKLACKSLPDKIMMYSLPVVCHVYTFPFVFRRPYSNIRSQSLLYHTISVLQGSFCQHLMLG

SEQ ID NO: 73631 - protein, 102 aa, Setaria italica
  misc_feature (99)..(99): Xaa can be any naturally occurring amino acid
  Transcript Sequence Number=SeqID_7657
  Homolog annotation: Hit_ID=B6SWF9; Match level="QueryCoverage=53%, HitCoverage=9%, E-value=1e-09, Identity=58%"; Hit description=Chitin- inducible gibberellin-responsive protein 2
RASPSQLFMLQELEKQLFDDDDDESVAAMSGTGSAVTNSEWEETIQQLNSITAAPSPGLPASATPNNNNNANAGMTRSPSNSSSSTASSSASCSPRPGXRRG

SEQ ID NO: 73632 - protein, 144 aa, Setaria italica
  Transcript Sequence Number=SeqID_7658
  Subcellular localization annotation: CTP_CleavageSite=95; ConfidenceScore=5.63e-01
LCLSTFSLSRILMATFSPVSTFLANLTLAKVPSPSVRPSSYLPTRVLPTDPLIFLSLSRLRPAGPRHRAPFTYAGVAEWIRVRIRPGPTTSSCRRASTARTAPGAPPLAAAAASGLASGRSLPSQCSQAAAAGMGRRGGRRSVD

SEQ ID NO: 73633 - protein, 61 aa, Setaria italica
  Transcript Sequence Number=SeqID_7659
AHLSSDVNDRDQDVAKLLVQKNITDSKGTSKSLRINRKTKRLQQHPHLAPTHQIPRQATAR

SEQ ID NO: 73634 - protein, 42 aa, Setaria italica
  Transcript Sequence Number=SeqID_7660
  Gene Ontology: Mol. function=translation initiation factor activity; Biological process=translational initiation
  Homolog annotation: Hit_ID=Q10CJ2; Match level="QueryCoverage=95%, HitCoverage=33%, E-value=6e-15, Identity=95%"; Hit description =Eukaryotic translation initiation factor 5A-2, putative, expressed
KRKKLEDIVPSSHNCDVPHVNRTDYQLIDISEDGFVCFFQLF

SEQ ID NO: 73635 - protein, 160 aa, Setaria italica
  Transcript Sequence Number=SeqID_7661
  Gene Ontology: Mol. function=translation initiation factor activity; Cellular component=nucleolus; Biological process=translational initiation
  Homolog annotation: Hit_ID=B9RCY4; Match level="QueryCoverage=99%, HitCoverage=31%, E-value=3e-80, Identity=89%"; Hit description =Initiation factor 5a, putative
  Pfam annotation: Domain name=KOW; Domain location=29-63; Score=29.3; E_value=1.6e-05; Accession=PF00467.21; Description=KOW motif
  Pfam annotation: Domain name=eIF-5a; Domain location=85-154; Score =132.1; E_value=1.8e-36; Accession=PF01287.12; Description=Eukaryotic initiation factor 5A hypusine, DNA-binding OB fold
  Pfam module annotation: Pfam domain module=KOW::eIF-5a; Domain location=29-63::85-154
MSDEEHHFESKADAGASKTYPQQAGTIRKNGYIVIKGRPCKVVEVSTSKTGKHGHAKCHFVAIDIFNGKKLEDIVPSSHNCDVPHVNRTDYQLIDISEDGFVSLLTDNGGTKDDLRLPTDEALLSQIRAGFDEGKDLIVSVQSAMGEEQICGLKDIGGKN

SEQ ID NO: 73636 - protein, 187 aa, Setaria italica
  misc_feature (40)..(40): Xaa can be any naturally occurring amino acid
  Transcript Sequence Number=SeqID_7662
  Gene Ontology: Cellular component=small-subunit processome; Biological process=rRNA processing
  Homolog annotation: Hit_ID=Q84VB4; Match level="QueryCoverage=92%, HitCoverage=75%, E-value=5e-64, Identity=69%"; Hit description=WD repeat protein (Fragment)
  Pfam annotation: Domain name=Utp12; Domain location=8-187; Score =132.9; E_value=1.1e-36; Accession=PF04003.4; Description=Dip2Utp12 Family
VKSNLGKKTFEADLDNDNEYRYGQKDDAPDEGSVGVPGRXTKETVTSADAIMDALDTAEEEVKRLNQHKLEEQNNGRAARFQPNVIMQGHSPSDYVLNVVSSIRPNDLEQALLALPFSDALKLMSYLKEWSLVPSKVELVCRVCLVLLQTHHNQLTTTPAARSLLTELKDILYCRVKECKDTIGFNL

SEQ ID NO: 73637 - protein, 667 aa, Setaria italica
  misc_feature (194)..(194): Xaa can be any naturally occurring amino acid
  Transcript Sequence Number=SeqID_7663
  Gene Ontology: Mol. function=nucleic acid binding; Cellular component= small-subunit processome; Biological process=rRNA processing
  Homolog annotation: Hit_ID=B9S0D0; Match level="QueryCoverage=98%, HitCoverage=70%, E-value=0.0, Identity=62%"; Hit description=WD -repeat protein, putative
  Pfam annotation: Domain name=WD40; Domain location=14-52; Score=38.4; E_value=2.9e-08; Accession=PF00400.24; Description=WD domain, G-beta repeat
  Pfam annotation: Domain name=WD40; Domain location=256-293; Score =21.7; E_value=0.003; Accession=PF00400.24; Description=WD domain, G -beta repeat
  Pfam annotation: Domain name=WD40; Domain location=336-380; Score =29.0; E_value=1.9e-05; Accession=PF00400.24; Description=WD domain, G-beta repeat
  Pfam annotation: Domain name=WD40; Domain location=396-433; Score =15.3; E_value=0.25; Accession=PF00400.24; Description=WD domain, G -beta repeat
  Pfam annotation: Domain name=WD40; Domain location=437-475; Score =36.3; E_value=1.2e-07; Accession=PF00400.24; Description=WD domain, G-beta repeat
  Pfam annotation: Domain name=WD40; Domain location=479-517; Score =34.4; E_value=4.6e-07; Accession=PF00400.24; Description=WD domain, G-beta repeat
  Pfam annotation: Domain name=WD40; Domain location=521-559; Score =41.0; E_value=4.8e-09; Accession=PF00400.24; Description=WD domain, G-beta repeat
  Pfam annotation: Domain name=WD40; Domain location=56-94; Score=33.0; E_value=1.2e-06; Accession=PF00400.24; Description=WD domain, G-beta repeat
  Pfam module annotation: Pfam domain module=WD40::WD40::WD40::WD40::WD4 0::WD40::WD40::WD40; Domain location=14-52::256-293::336-380::396 -433::437-475::479-517::521-559::56-94
SKDCDVILWDVVAQAGLFRLRGHRDQVTDLVFLDSGKKLVSCSKDKFIRVWDLETQHCLQIVGGHRSEIWSMDVDPSERFLVSGSADPELRVFRIRQSVEEGEDWSKWDVLKLFGEILRQSKERVATVRFNRNGSLVACQVAGKTADIYRVLDETEATRKAKRRMHRKKEKASAKSMIAEGNGTVIDPLPAQDXKNPAVIVTDVFKLLQVLRASKKICSISFSPSNPPKGCLATLSLSLNNNTLETYSVDSEKVSKMYSIEMHGHRSDIRSVSLNSEDNLLMSTSHNAVKIWNPSTGDCLRTIDSGYGLCSAFVGNRFALVGTKSGTLEIINIASGSLTEVIEAHAGSIRSIVPIPDEDGTVGARGFVTGSADHDVKFWEYQLLQKSDNDSKQLTVTNVRTLKMTEDVLAVSISPQGKHIAVALLDCNVKVFHMDTLKHFLNLYGHKLPVLCMDISSDGALIVTGSADKNLKIWGMDFGDCHRSIFAHSDSVMDVKFVYRTHYMFSVGKDRTVKYWDADKFELLLTLEGHHAEVWCLTISSRGDFIVTGSHDRSIRRWDRTEEQLFIEEEKEKRLEETFEADLDNDNEYRYGQKDDAPDEGSVGVPGRKTKETVTSADAIMDALDTAEEEVKRLNQHKLEEQNNGRAARFQPNVIMPGGPVPNHLGG

SEQ ID NO: 73638 - protein, 44 aa, Setaria italica
  Transcript Sequence Number=SeqID_7664
  Gene Ontology: Mol. function=sequence-specific DNA binding; Cellular component=nucleus; Biological process=regulation of transcription, DNA-dependent
  Homolog annotation: Hit_ID=Q6EP49; Match level="QueryCoverage=100%, HitCoverage=18%, E-value=1e-11, Identity=75%"; Hit description=MADS -box transcription factor 27
SPTPYNFAVVENTDVPVQLGLNTLPQQNSIEPSNVPKLGLQLNP

SEQ ID NO: 73639 - protein, 107 aa, Setaria italica
  Transcript Sequence Number=SeqID_7665
DFSHIKQVANFLVHLPGKNPACKFLLKSCHAEGNQKRRLDCCVGHFLEKKRAMVDRELILVAFVFLYRMICYRQVSLVSTHSSFILVNSVIMHLVGYEYNITMMLGN

SEQ ID NO: 73640 - protein, 46 aa, Setaria italica
  Transcript Sequence Number=SeqID_7666
MEPPAAKEAPPPPQPAAEEDAMLSATAAMAKEAAVSFQGRRYSECV

SEQ ID NO: 73641 - protein, 60 aa, Setaria italica
  Transcript Sequence Number=SeqID_7667
LRPKQNRARIAVSEKPRMEQAAFAACPLKEVSYPNLWIFPNASKERLAVVILDATNSLVC

SEQ ID NO: 73642 - protein, 374 aa, Setaria italica
  Transcript Sequence Number=SeqID_7668
  Gene Ontology: Mol. function=protein phosphatase type 2A regulator activity; Cellular component=protein phosphatase type 2A complex; Biological process=signal transduction
  Homolog annotation: Hit_ID=Q5VRD6; Match level="QueryCoverage=99%, HitCoverage=75%, E-value=0.0, Identity=83%"; Hit description =Putative serine/threonine protein phosphatase 2A (PP2A) regulatory subunit B' (B'gamma)
  Pfam annotation: Domain name=B56; Domain location=1-367; Score=652.7; E_value=3.5e-193; Accession=PF01603.12; Description=Protein phosphatase 2A regulatory B subunit (B56 family)
KRLVLLSLVDCVSAAEEPLTEAMISACVRMFAINLFRVFPPKLRSCGATDEDEPFFDPSWYHLQVVYELLLRFVMSPVVDVKVARKYMDNSFISRLLDLFDSDDPRERECLKTVLHRIYGKFMGNRPFIRKAVSNIFYRFVFETDHHNGIAELLEVFGSVISGFAKPLKEEHKLFLWKALIPLHKPKTVGVYLPQLTYCITQFIEKEPKLTGTVIRGLLKYWPVTNSQKEMMFLGELEEVLELTEMADFQKCVVPLFRRIAQCLNSSHFQVAERALFLWNNEHLFDLISQNRQVILPIIYPALERNARWHWNQSVLNVTMNVRKMFFEMDERLLLACQTNFQEEEKKRAVSEERRRLVWEHLERNAAFHPVTGD

SEQ ID NO: 73643 - protein, 268 aa, Setaria italica
  Transcript Sequence Number=SeqID_7669
  Gene Ontology: Mol. function=DNA-3-methyladenine glycosylase I activity; Biological process=base-excision repair
  Homolog annotation: Hit_ID=Q01I90; Match level="QueryCoverage=92%, HitCoverage=64%, E-value=1e-127, Identity=87%"; Hit description =H0311C03.4 protein
  Pfam annotation: Domain name=Adenine_glyco; Domain location=72-252; Score=336.4; E_value=5.6e-98; Accession=PF03352.5; Description =Methyladenine glycosylase
  Subcellular localization annotation: CTP_CleavageSite=48; ConfidenceScore=5.28e-01
SGLSLDASCSSDASTDSFCSRASTGRIGRPAFGAKKKKALSQTDYKAVSMLERDGGLASQTDAAGVKRRCAWVTANTDPCYAAFHDEEWGVPVHDDKKLFELLVLSGALAELTWPAILNKRAIFREVFMDFDPVLVSKLSEKKIIAPGSPSSSLLSEQKLRGVIENARQILKIVEEFGSFDKYCWSFVNHKPILSRFRYPRQVPVKTSKADAISKDLVRRGFRSVGPTVVYTFMQVSGMTNDHLISCYRFAECAASPASPAKLTDGSE

SEQ ID NO: 73644 - protein, 265 aa, Setaria italica
  Transcript Sequence Number=SeqID_7670
  Gene Ontology: Mol. function=phosphoprotein phosphatase activity; Cellular component=nucleus
  Homolog annotation: Hit_ID=B9FA13; Match level="QueryCoverage=93%, HitCoverage=26%, E-value=1e-149, Identity=99%"; Hit description =Serine/threonine protein phosphatase
  Pfam annotation: Domain name=Metallophos; Domain location=30-239; Score=121.2; E_value=3.4e-33; Accession=PF00149.20; Description =Calcineurin-like phosphoesterase
SSTNVTLVGTNVGRRRGIFSSEPSVLQLKAPVKIFGDLHGQFGDLMRLFDEYGAPSTAGDIAYIDYLFLGDYVDRGQHSLETITLLLALKVEYPQNVHLIRGNHEAADINALFGFRIECIERMGERDGIWTWHRMNRLFNWLPLAALIEKKIICMHGGIGRSINHVEQIENLQRPITMEAGSVVLMDLLWSDPTENDSVEGLRPNARGPGLVTFGPDRVMEFCNNNDLQLIVRAHECVMDGFERFAQGHLITLFSATNYCGTANN

SEQ ID NO: 73645 - protein, 147 aa, Setaria italica
  Transcript Sequence Number=SeqID_7671
  Gene Ontology: Mol. function=phosphoprotein phosphatase activity; Cellular component=nucleus
  Homolog annotation: Hit_ID=B9FA13; Match level="QueryCoverage=97%, HitCoverage=15%, E-value=1e-77, Identity=96%"; Hit description =Serine/threonine protein phosphatase
LHRSDPTENDSVEGLRPNARGPGLVTFGPDRVMEFCNNNDLQLIVRAHECVMDGFERFAQGHLITLFSATNYCGTANNAGAILVLGRDLVVVPKLIHPLPPAITSPEASPDHIEDTWMQELNANRPPTPTRGRPQAVANDRGSLAWI

SEQ ID NO: 73646 - protein, 733 aa, Setaria italica
  Transcript Sequence Number=SeqID_7672
  Gene Ontology: Mol. function=phosphoprotein phosphatase activity; Cellular component=nucleus
  Homolog annotation: Hit_ID=Q2QM47; Match level="QueryCoverage=98%, HitCoverage=71%, E-value=0.0, Identity=83%"; Hit description =Serine/threonine-protein phosphatase BSL2 homolog
  Pfam annotation: Domain name=Kelch_1; Domain location=168-216; Score =11.4; E_value=0.15; Accession=PF01344.17; Description=Kelch motif
  Pfam annotation: Domain name=Kelch_1; Domain location=222-271; Score =0.9; E_value=2.7; Accession=PF01344.17; Description=Kelch motif
  Pfam annotation: Domain name=Kelch_1; Domain location=274-323; Score =10.0; E_value=0.22; Accession=PF01344.17; Description=Kelch motif
  Pfam annotation: Domain name=Kelch_1; Domain location=346-392; Score =8.3; E_value=0.34; Accession=PF01344.17; Description=Kelch motif
  Pfam annotation: Domain name=Kelch_1; Domain location=46-110; Score =11.4; E_value=0.15; Accession=PF01344.17; Description=Kelch motif
  Pfam annotation: Domain name=Kelch_2; Domain location=115-163; Score =1.9; E_value=24; Accession=PF07646.7; Description=Kelch motif
  Pfam annotation: Domain name=Kelch_2; Domain location=168-216; Score =8.0; E_value=3.7; Accession=PF07646.7; Description=Kelch motif
  Pfam annotation: Domain name=Kelch_2; Domain location=222-269; Score =15.2; E_value=0.27; Accession=PF07646.7; Description=Kelch motif
  Pfam annotation: Domain name=Kelch_2; Domain location=274-323; Score =40.7; E_value=5.8e-09; Accession=PF07646.7; Description=Kelch motif
  Pfam annotation: Domain name=Kelch_2; Domain location=34-110; Score =18.9; E_value=0.021; Accession=PF07646.7; Description=Kelch motif
  Pfam annotation: Domain name=Kelch_2; Domain location=346-389; Score =5.5; E_value=8; Accession=PF07646.7; Description=Kelch motif
  Pfam annotation: Domain name=Metallophos; Domain location=644-729; Score=14.9; E_value=0.041; Accession=PF00149.20; Description =Calcineurin-like phosphoesterase
  Pfam module annotation: Pfam domain module=Kelch_1::Kelch_1::Kelch _1::Kelch_1::Kelch_1::Kelch_2::Kelch_2::Kelch_2::Kelch_2::Kelch _2::Kelch_2::Metallophos; Domain location=168-216::222-271::274 -323::346-392::46-110::...
  Pfam module annotation: Domain location=115-163::168-216::222 -269::274-323::34-110::346-389::644-729
APNPAAVTAAGPRPAPGYTVVNAVIEKKEDGPGCRCGHTLTAVPAVGEEGTPGYIGPRLILFGGATALEGNSATPPSSAGSAGIRLAGATADVHCYDVSSNKWSRLTPLGEPPSPRAAHVATAVGTMVVIQGGIGPAGLSAEDLHVLDLTQQRPRWHRVVVQGPGPGPRYGHVMALVGQRFLLTIGGNDGKRPLADVWALDTAAKPYEWRKLEPEGEGPPPCMYATASARSDGLLLLCGGRDANSVPLSSAYGLAKHRDGRWEWAIAPGVSPSPRYQHAAVFVNARLHVSGGALGGGRMVEDSSSVAVLDTAAGVWCDTKSVVTTPRTGRYSADAAGGDAAVELTRRCRHAAAAVNDLIFIYGGLRGGVLLDDLLVAEDLAAAETTNAANHAAASAAATNLQAGRAPGRYAYNDERTRQTATESGPDGAVVLGTPVAPPVNGDMYTDISPENAVLQGQRRLNKGVDYLVEASAAEAEAISATLAAVKARQVNGEVEQLPDKEQSPDSTSSSKHSSLIKPDIVLSNNMAAPPGVRLHHRAVVVAAETGGALGGMVRQLSIDQFENEGRRVSYGTPENATAARKLLDRQMSINSVPKKVIASLLKPRGWKPPVRRQFFLDCNEIADLCDSAERIFSSEPSVLQLKAPVKIFGDLHGQFGDLMRLFDEYGAPSTAGDIAYIDYLFLGDYVDRGQHSLETITLLLALKVEYPQNVHLIRGNHEAADINALFGFRIKK

SEQ ID NO: 73647 - protein, 940 aa, Setaria italica
  Transcript Sequence Number=SeqID_7673
  Gene Ontology: Mol. function=phosphoprotein phosphatase activity; Cellular component=nucleus
  Homolog annotation: Hit_ID=Q2QM47; Match level="QueryCoverage=99%, HitCoverage=92%, E-value=0.0, Identity=88%"; Hit description =Serine/threonine-protein phosphatase BSL2 homolog
  Pfam annotation: Domain name=Kelch_1; Domain location=160-208; Score =11.4; E_value=0.15; Accession=PF01344.17; Description=Kelch motif
  Pfam annotation: Domain name=Kelch_1; Domain location=214-263; Score =0.9; E_value=2.7; Accession=PF01344.17; Description=Kelch motif
  Pfam annotation: Domain name=Kelch_1; Domain location=266-315; Score =10.0; E_value=0.22; Accession=PF01344.17; Description=Kelch motif
  Pfam annotation: Domain name=Kelch_1; Domain location=338-384; Score =8.8; E_value=0.3; Accession=PF01344.17; Description=Kelch motif
  Pfam annotation: Domain name=Kelch_1; Domain location=38-102; Score =12.1; E_value=0.12; Accession=PF01344.17; Description=Kelch motif
  Pfam annotation: Domain name=Kelch_2; Domain location=107-155; Score =1.9; E_value=24; Accession=PF07646.7; Description=Kelch motif
  Pfam annotation: Domain name=Kelch_2; Domain location=160-208; Score =8.0; E_value=3.7; Accession=PF07646.7; Description=Kelch motif
  Pfam annotation: Domain name=Kelch_2; Domain location=214-261; Score =15.2; E_value=0.27; Accession=PF07646.7; Description=Kelch motif
  Pfam annotation: Domain name=Kelch_2; Domain location=26-102; Score =18.7; E_value=0.025; Accession=PF07646.7; Description=Kelch motif
  Pfam annotation: Domain name=Kelch_2; Domain location=266-315; Score =40.7; E_value=5.8e-09; Accession=PF07646.7; Description=Kelch motif
  Pfam annotation: Domain name=Kelch_2; Domain location=338-381; Score =7.8; E_value=4; Accession=PF07646.7; Description=Kelch motif
  Pfam annotation: Domain name=Metallophos; Domain location=635-844; Score=122.2; E_value=1.7e-33; Accession=PF00149.20; Description =Calcineurin-like phosphoesterase
  Pfam module annotation: Pfam domain module=Kelch_1::Kelch_1::Kelch _1::Kelch_1::Kelch_1::Kelch_2::Kelch_2::Kelch_2::Kelch_2::Kelch _2::Kelch_2::Metallophos; Domain location=160-208::214-263::266 -315::338-384::38-102::...
  Pfam module annotation: Domain location=107-155::160-208::214-261::26- 102::266-315::338-381::635-844
VAGPRPAPGYTVVDAAMDKKEDGPGCRCGHTLTAVPAVGEEGSPGYVGPRLILFGGATALEGNSATPPSSAGSAGIRLAGATADVHCYDVLSNKWTRLTPLGEPPSPRAAHVATAVGTMVVIQGGIGPAGLSAEDLHVLDLTQQRPRWHRVVVQGPGPGPRYGHVMALVGQRFLLTIGGNDGKRPLADVWALDTAAKPYEWRKLEPEGEGPPPCMYATASARSDGLLLLCGGRDANSVPLSSAYGLAKHRDGRWEWAIAPGVSPSPRYQHAAVFVNARLHVSGGALGGGRMVEDSSSVAVLDTAAGVWCDTKSVVTTPRTGRYSADAAGGDASVELTRRCRHAAAAVGDLIFVYGGLRGGVLLDDLLVAEDLAAAETTSAANHAAAVAASANVQREPGRYAYNDEQSGQTVTVSSPDGAVVLGTPVAPPVNGDMYTDISPENAIIQGQRRLSKGVDYLVEASAAEAEAISATLAAVKARQGNGEMEHSPDREQSPDAASSGKQTSSLIKPDPALLNNSTPPPGVRLHHRAVVVAAETGGALGGMVRQLSIDQFENEGRRVIYGTPENATAARKLLDRQMSINSVPKKVIASLLKPRGWKPPVRRQFFLDCNEIADLCDSAERIFSSEPSVLQLKAPIKIFGDLHGQFGDLMRLFDEYGAPSTAGDIAYIDYLFLGDYVDRGQHSLETITLLLALKVEYPHNVHLIRGNHEAADINALFGFRIECIERMGERDGIWTWHRVNRLFNWLPLAALIEKKIICMHGGIGRSINHVEQIENLQRPITMEAGSVVLMDLLWSDPTENDSVEGLRPNARGPGLVTFGPDRVMEFCNNNDLQLIVRAHECVMDGFERFAQGHLITLFSATNYCGTANNAGAILVLGRDLVVVPKLIHPLPPAITSPETSPEHHIEDTWMQELNANRPPTPTRGRPQAPNNDRGSLAWI

SEQ ID NO: 73648 - protein, 106 aa, Setaria italica
  misc_feature (20)..(20): Xaa can be any naturally occurring amino acid
  Transcript Sequence Number=SeqID_7674
  Gene Ontology: Cellular component=intracellular; Biological process =signal transduction
  Homolog annotation: Hit_ID=Q6UQ72; Match level="QueryCoverage=89%, HitCoverage=23%, E-value=6e-38, Identity=75%"; Hit description=Rho GTPase activating protein 2
  Pfam annotation: Domain name=RhoGAP; Domain location=1-94; Score= -35.3; E_value=0.0022; Accession=PF00620.19; Description=RhoGAP domain
IKTSGVVPDEVDLHCLAGLXKGVLDALTPEQVMHCNTEKECALLASMLPPVEAALLDWAINLMADVVEHESHNKMNARNIAMVFAPNMTQVTNNASYFICSLVRSA

SEQ ID NO: 73649 - protein, 98 aa, Setaria italica
  Transcript Sequence Number=SeqID_7675
  Gene Ontology: Mol. function=small conjugating protein ligase activity; Cellular component=cytosol; Biological process=ubiquitin -dependent protein catabolic process
  Homolog annotation: Hit_ID=Q5YJR0; Match level="QueryCoverage=84%, HitCoverage=59%, E-value=1e-40, Identity=92%"; Hit description =Ubiquitin carrier protein (Fragment)
  Pfam annotation: Domain name=UQ_con; Domain location=1-92; Score =79.4; E_value=1.3e-20; Accession=PF00179.18; Description=Ubiquitin -conjugating enzyme
MDGIYRAILKVCLMLQVAFKTKVFHPNINSNGSICLDILKEQWSPALTVSKVLLSICSLLTDPNPDDPLVPEIAHMYKVDRSKYETTARSWTQKYAMG

SEQ ID NO: 73650 - protein, 70 aa, Setaria italica
  Transcript Sequence Number=SeqID_7676
  Gene Ontology: Mol. function=small conjugating protein ligase activity; Cellular component=proteasome complex; Biological process =ubiquitin-dependent protein catabolic process
  Homolog annotation: Hit_ID=A3AYE9; Match level="QueryCoverage=100%, HitCoverage=34%, E-value=4e-32, Identity=92%"; Hit description =Ubiquitin carrier protein
  Pfam annotation: Domain name=UQ_con; Domain location=5-70; Score=2.0; E_value=2.7e-05; Accession=PF00179.18; Description=Ubiquitin -conjugating enzyme
MASKRILKELKDLQKDPPTSCSAGPVGEDMFHWQATIMGPSDSPYAGGVFLVSIHFPPDYPFKPPKASLN

SEQ ID NO: 73651 - protein, 78 aa, Setaria italica
  Transcript Sequence Number=SeqID_7677
RLIRLIHIVLVHCISLYLFWLICFHLLLDLVTFCYILLHLWMGTAPFVHLYKLQGVFFVRISFGRLLPYQYVIHVIHK

SEQ ID NO: 73652 - protein, 416 aa, Setaria italica
  Transcript Sequence Number=SeqID_7678
  Gene Ontology: Cellular component=intracellular; Biological process =signal transduction
  Homolog annotation: Hit_ID=B6TTW3; Match level="QueryCoverage=95%, HitCoverage=82%, E-value=1e-148, Identity=66%"; Hit description=Rac GTPase activating protein 2
  Pfam annotation: Domain name=PBD; Domain location=31-77; Score=48.7; E_value=2.2e-11; Accession=PF00786.20; Description=P21-Rho-binding domain
  Pfam annotation: Domain name=RhoGAP; Domain location=94-234; Score =95.4; E_value=2e-25; Accession=PF00620.19; Description=RhoGAP domain
  Pfam module annotation: Pfam domain module=PBD::RhoGAP; Domain location=31-77::94-234
LRRSLVMCSAGAVGDEDDDEEEDGSEGEGIEIGRPTDVRHVSHVTFDRFGGFLGLPADLEPEVPRRTPSASVSVFGVSPTSLQCSYDQRGNSVPTILLMMQRKLYVREGLKIEGIFRINAENSEEVNVRAQLNSGVVPDEVDLHCLAGLIKAWFRELPAGVLDALTPEQVMHCNTEKECALLASMLPPVEAALLDWAINLMADVVEHESHNKMNARNIAMVFAPNMTQMADPLTALIHAVQVMNFLKTLILKTLKERKEAAGAVWALQSCSGSPHDQDEPQMPEHLEKPSVLSSQKDFDFPMIDRATPVQVLGAEKAIHHDSQSRSDEPKKFGIDMDRKKSHSDVSSLGRDLRNRVSGSGREFGNRNTEGLFDRFSFRKGVERLCRHPVFQLSRSMKKSADVVVFDAPREARQAWV

SEQ ID NO: 73653 - protein, 121 aa, Setaria italica
  Transcript Sequence Number=SeqID_7679
ASVNQNLLHTLKPSTVENLSSSNAVSAPVYATNSDSQKHAIPSFPEQKCTDQVGHLENRSPAINVPSSKLGTSNEISDAPVVGSGHQAPDGRSTSFAELFGSESGSPSTISGTESSDSEST

SEQ ID NO: 73654 - protein, 337 aa, Setaria italica
  Transcript Sequence Number=SeqID_7680
  Pfam annotation: Domain name=NUC202; Domain location=35-107; Score =9.4; E_value=0.0058; Accession=PF08166.4; Description=NUC202 domain
DHWRSEVDLLLINVARSACDTGRSYKQKSSTFGEPSISDLQLASLKALLASFLSSPYARPPYLAKGIELFAKGKVEIGTKLAEFCSRALLALDVLTHPRALSLEKAVPVGSGLNYSAQGKTVFGGGTYQMSVHRDQPQAMEVEDMYDDWLASTKDDEPAEAAVTDSGAGASTAGTMLEDGRQLNPMAEDPKIEPPRIGAAAQDVPPSSKSDVNMVDAAADEIAKPSTVENLSSSNAVSAPVYATNSDSQKHAIPSFPEQKCTDQVGHLENRSPAINVPSSKLGTSNEISDAPVVGSGHQAPDGRSTSFAELFGSESGVDSESDDSVPDIVDGDPDSD

SEQ ID NO: 73655 - protein, 107 aa, Setaria italica
  Transcript Sequence Number=SeqID_7681
PPVGVGRSFLLLVVIGLLSSVNQNCTDQVGHLENRSPAINVPSSKLGTSNEISDAPVVGSGHQSPDGRSTSFAELLARSLVLIQSQMTRCQISLTETLTPTRVLYCL

SEQ ID NO: 73656 - protein, 153 aa, Setaria italica
  Transcript Sequence Number=SeqID_7682
STVRYVGRAAVDSWVERVVALVVSDSAYSCWLGTCFLGVTFQECSNERFAESYSNWYEKILPNLQEPSTLQLVTVISCTSMSDLFVRLAKFSNLKKEASSFAGRIIESVLRLLNENGLVADEAIDLLCTVIKLYPSSVNRHYNKVESTIAAKV

SEQ ID NO: 73657 - protein, 510 aa, Setaria italica
  Transcript Sequence Number=SeqID_7683
QWHYNLSPGARLLNENGLVADEAIDLLCTVIKLYPSSVNRHYNKVESTIAAKVMSTEVNVKPSKKFARTLALLPSVRVSEDGCSLMIRRILIVVNNLLNDAFIGLEGEKNGHDIMLLLVPPGADSPPTLGDQVRSGGDVHVTKKFRVYTVPTISALMHCCSVMLTSYYPVQVNVPMRALVALMRRVLLVDGSLHKKLFPSTTSLHQELICFELPSLHSTFLDLLNATIKGMRSQLLPHGASIIRLITEYFKIAKLPTLRTKAYIILQLLLTSMGVGTSLHLLEAAVSNAIADLSDDGGSDMTIISTNPSKVANESSSKIYSKKRKQEPQVQNSVISASEKAAISPRKRKGSSIQIASKGMAPETTGDVRISTPLSVKIAALETLEILLNVGGSLQTDHWRSEVDLLLINVARSACDTGRSYKQKSSTFGEPSISDLQLASLKALLASFLSSPYARPPYLAKGIELVTKGNTYSNHKYESIRIQSPMCHFDCKYPYRYIIYQCQPYIVNLR

SEQ ID NO: 73658 - protein, 260 aa, Setaria italica
  misc_feature (244)..(244): Xaa can be any naturally occurring amino acid
  Transcript Sequence Number=SeqID_7684
  Homolog annotation: Hit_ID=B9RS75; Match level="QueryCoverage=81%, HitCoverage=8%, E-value=5e-57, Identity=52%"; Hit description=Zinc finger protein, putative
LPYLQVFFTEMSISSSTESSRVGQKQRPLGLLHQMIDDAFKGKRQFLSGKLHNVARAIVDEDFDSVYAKEGVNLEKKDVLSSEKGVVLGHGLRILKQASRSDLASSNVPESSSEHKGSTNRYMGPLSTKPSTYLSNFIIYIATIGDIVDGTDTTHDFNYFSLVYEWPKDLLTRLVFERGSTDAAAKVADTMGADFVHEIISACVPPVLPPRTGHGWACIPIIPILCNISSENRPCAIPKVPSSXAQGWSAHDSSLSSSSK

SEQ ID NO: 73659 - protein, 157 aa, Setaria italica
  misc_feature (34)..(34): Xaa can be any naturally occurring amino acid
  Transcript Sequence Number=SeqID_7685
  Gene Ontology: Mol. function=ubiquitin thiolesterase activity; Biological process=ubiquitin-dependent protein catabolic process
  Homolog annotation: Hit_ID=B9F1W9; Match level="QueryCoverage=100%, HitCoverage=16%, E-value=3e-11, Identity=36%"; Hit description =Ubiquitin carboxyl-terminal hydrolase
MAEQDGAAGQSPLDSPPGVSAENGDENTEQHQPXFFSMCQPIRSVSYANSWESCFAPAANENDHNSGLNSMVDDHILITSASLGSKQPQPEDISGTVDDEGKPCSPHSIDKEASLVQDVMEMEQSMDEIDVPHGEASEQPEPLSTEQPDSTGGMDLW

SEQ ID NO: 73660 - protein, 82 aa, Setaria italica
  Transcript Sequence Number=SeqID_7686
LNTDAKRAHMNGTMLRAYDYEVDRRGLVRGDGGPCLLLDVGKLTQGCGQQCTADGMHYDGEVYDAVLHIMLNALVIESQQRI

SEQ ID NO: 73661 - protein, 61 aa, Setaria italica
  Transcript Sequence Number=SeqID_7687
MASNSSAAAAAAFFGIRDGDQQDQIKPLISPQQQQLAAALPGVAGAAPAPATGQGAPAADG

SEQ ID NO: 73662 - protein, 113 aa, Setaria italica
  Transcript Sequence Number=SeqID_7688
  Subcellular localization annotation: CTP_CleavageSite=82; ConfidenceScore=5.62e-01
GMPLAPCRYSHVTACSARAPRPPRAVLPPAAPPRRRRQSTQASAPLAASLPALCHCLVTHSHRSARPLHAVSTCATHVRPLMASAATGDAVELWQQATASPPPTFAPPHARPP

SEQ ID NO: 73663 - protein, 358 aa, Setaria italica
  misc_feature (92)..(92): Xaa can be any naturally occurring amino acid
  Transcript Sequence Number=SeqID_7689
  Gene Ontology: Mol. function=electron carrier activity; Cellular component=plastid outer membrane; Biological process=oxidation reduction
  Homolog annotation: Hit_ID=B4FYL7; Match level="QueryCoverage=100%, HitCoverage=70%, E-value=0.0, Identity=87%"; Hit description=Ent -kaurene oxidase
  Pfam annotation: Domain name=p450; Domain location=1-349; Score=26.6; E_value=6.2e-13; Accession=PF00067.14; Description=Cytochrome P450
GQKQFRDTRNMMVDNMLSTFHTLLNDDPNAPLNFREVFKNELFRLSLIQALGEDVSSVYVEEFGKVISKEEIYQATVVDMMMCAIEVDWRDXFFPYLSWVPNRSFETRVLTTEGRRTAVMRALIDQQRKRIARGEARISYLDFLLAENTLTDEQLLMLVWEAVIEAADTTLVTTEWAMFEIAKHPEKQDRLYQEIQEVCSNEIVTEDHLPRLPYLNAVFHETLRRHSPVPLVPPRFVHENTNLASYDIPAGTEMIINLFGCNMNKRDWDEPEEWKPERFLDGRFESADMYKTMAFGAGRRACAGSMQAMNISCTAIARFVQEFTWRLKEGDEEKADTIQLTTNRLYPLYVYLTPRGRK

SEQ ID NO: 73664 - protein, 68 aa, Setaria italica
  Transcript Sequence Number=SeqID_7690
FFPPPVCIKFYTIVICKTNCFLETNREQTNLHANLCYMNLLKSNRAAVLRAHCPNQLLSPNNKPTRHS

SEQ ID NO: 73665 - protein, 62 aa, Setaria italica
  misc_feature (52)..(52): Xaa can be any naturally occurring amino acid
  Transcript Sequence Number=SeqID_7691
MASMISGDFAEAYVRKNACKKETGMAEANAAAVDGSSAAQGEKKAGDGASGXKTTTGEAGVK

SEQ ID NO: 73666 - protein, 140 aa, Setaria italica
  Transcript Sequence Number=SeqID_7692
  Gene Ontology: Mol. function=transcription factor activity; Cellular component=nucleus; Biological process=regulation of transcription, DNA-dependent
  Homolog annotation: Hit_ID=Q2TN80; Match level="QueryCoverage=97%, HitCoverage=46%, E-value=6e-26, Identity=43%"; Hit description =Ethylene-responsive element binding protein 1
MGTEENLVINNMTNANANHTIPEPIMQTQNMSFAPMVNTAASIQEPLANLSSDQALAPVPTLTEVDESAFLQGTSKAVVPPVTGDASVDLPEFEPYMNFLMDSPDEPVNPILDCDGSQDVGGNMDLWSFDDMPMPGGGFF

SEQ ID NO: 73667 - protein, 238 aa, Setaria italica
  Transcript Sequence Number=SeqID_7693
  Gene Ontology: Mol. function=transcription factor activity; Cellular component=nucleus; Biological process=regulation of transcription, DNA-dependent
  Homolog annotation: Hit_ID=Q69Y47; Match level="QueryCoverage=99%, HitCoverage=69%, E-value=4e-53, Identity=44%"; Hit description=EREBP transcription factor
  Pfam annotation: Domain name=AP2; Domain location=5-56; Score=67.2; E_ value=6.3e-17; Accession=PF00847.12; Description=AP2 domain
MKRKNQFRGIRRRPWGKWAAEFRDPYKGARVWLGTYNSPEEAARAYDAEARRVHGKKAKLNFPYEVPVASEKRLAEPTSVKVAKAGTQKKLIVNNMTNSTVYHLPVVDHSIPEPFMQTQNISLENSAASVQEPLVNSAAFVQEPLVNSFSSSNFSLENDTRNEVDESAFLQGTADAMVPPLTGDASVDLFEWEPYMNFVMGSSDESNNTLLGCDESQDIGSNMNLWNFDDMPMPSDIF

SEQ ID NO: 73668 - protein, 314 aa, Setaria italica
  Transcript Sequence Number=SeqID_7694
  Gene Ontology: Mol. function=transcription factor activity; Cellular component=nucleus; Biological process=regulation of transcription, DNA-dependent
  Homolog annotation: Hit_ID=Q2TN80; Match level="QueryCoverage=94%, HitCoverage=84%, E-value=6e-72, Identity=51%"; Hit description =Ethylene-responsive element binding protein 1
  Pfam annotation: Domain name=AP2; Domain location=72-123; Score=67.0; E_value=7.1e-17; Accession=PF00847.12; Description=AP2 domain
RDSKKSRGTGVGNRKRAREEEDITAFMESEKSVVVSKDEAKHFTAPSGMVARDGLNTTAARTDVPDVMKRKNQFRGIRRRPWGKWAAEFRDPYKGARVWLGTYNSPEEAARAYDVEARRIRGKKAKVNFPDEAPVASQKRLAEPTSVKVANMGTEENLVINNMTNANANHTIPEPIMQTQNMSFAPMVNTAASIQEPLANLSSDQGSNSFSFSDFSLENDTRTTDITSALAPVPTLTEVDESAFLQGTSKAVVPPVTGDASVDLPEFEPYMNFLMDSPDEPVNPILDCDGSQDVGGNMDLWSFDDMPMPGGGFF

SEQ ID NO: 73669 - protein, 88 aa, Setaria italica
  Transcript Sequence Number=SeqID_7695
  Gene Ontology: Mol. function=protein serine/threonine kinase activity; Cellular component=integral to membrane; Biological process=protein amino acid phosphorylation
  Homolog annotation: Hit_ID=Q2QMQ1; Match level="QueryCoverage=98%, HitCoverage=14%, E-value=3e-38, Identity=90%"; Hit description =Protein kinase domain containing protein, expressed
DFGLSRAAGRLGEATRSHVSTAPQGTPGYVDPEYHQCFHLSDKSDVYSFGVVLLELITAMKVVDFDRPAAEVNLASLALDRIGKGRVG

SEQ ID NO: 73670 - protein, 185 aa, Setaria italica
  Transcript Sequence Number=SeqID_7696
  Gene Ontology: Mol. function=protein serine/threonine kinase activity; Cellular component=integral to membrane; Biological process=protein amino acid phosphorylation
  Homolog annotation: Hit_ID=Q6QLL5; Match level="QueryCoverage=69%, HitCoverage=18%, E-value=5e-58, Identity=78%"; Hit description=WAK -like kinase
KGNKRNVTLRGELPTTTSPTAPQGTPGYVDPQYHQNFHLSDRSDVYSFGVVLVEIITAMKAVDLNRPPSEVNLAQLAVDRIGRGRVDDIVDPYLDPHRDAWTLSSIHKVAELAFRCLAFHSEMRPSMAEVADELDQVQRSGWAPSADDAAFMSTSSSICSSSAASTRGTDRSWGAGRSRTESGTV

SEQ ID NO: 73671 - protein, 334 aa, Setaria italica
  Transcript Sequence Number=SeqID_7697
  Gene Ontology: Mol. function=protein serine/threonine kinase activity; Cellular component=integral to membrane; Biological process=protein amino acid phosphorylation
  Homolog annotation: Hit_ID=Q6QLL5; Match level="QueryCoverage=98%, HitCoverage=46%, E-value=1e-119, Identity=64%"; Hit description=WAK -like kinase
  Pfam annotation: Domain name=Pkinase; Domain location=87-306; Score =108.3; E_value=2.6e-29; Accession=PF00069.17; Description=Protein kinase domain
  Pfam annotation: Domain name=Pkinase_Tyr; Domain location=87-325; Score=12.7; E_value=1.4e-14; Accession=PF07714.9; Description =Protein tyrosine kinase
  Pfam module annotation: Pfam domain module=Pkinase::Pkinase_Tyr; Domain location=87-306::87-325
LRVSDARCNPSKYLAEDCGKTAQIALLVAGIVFGAMVTCVTCVVYQLLKRRSASIRTKRSTKRLLSEASCAVPFYSYREIDRATDGFSDAKRLGTGAYGTVYSGRLGDGPLVAVKRIRQRDNDAGLGCVMHEVKLVSCVCHPNLVRLLGCCIEQGHQILVYEFMPNGTLAQHLQRERGPAAMPWTVRLRIAAETAKAIAYLHSEVDPPIYHRDVKSSNILLDHEYNSKVADFGLSRLGKASLGDSSHISTAPQGTPGYVDPQYHQNFHLSDKSDVYSFGVVLLELITAMKVVDFDRPAAEVNLASLALDRIGKGRVGEIVDPAILGGGEEWVME

SEQ ID NO: 73672 - protein, 99 aa, Setaria italica
  Transcript Sequence Number=SeqID_7698
  Gene Ontology: Mol. function=metalloexopeptidase activity; Cellular component=chloroplast; Biological process=cellular process
  Homolog annotation: Hit_ID=B4FSK5; Match level="QueryCoverage=100%, HitCoverage=28%, E-value=5e-52, Identity=96%"; Hit description =Methionine aminopeptidase
KISKLAYFYGYYVVERFVGHGIGTMYHSEPLILHHANENSGRMVEGQIFTIEPILTMEKTECVTWEDGWTTVTADGSWAAQFEHTILVTRNGAEILTKL

SEQ ID NO: 73673 - protein, 90 aa, Setaria italica
  Transcript Sequence Number=SeqID_7699
  Gene Ontology: Mol. function=ribonuclease H activity
  Homolog annotation: Hit_ID=B6SNS7; Match level="QueryCoverage=94%, HitCoverage=32%, E-value=4e-41, Identity=94%"; Hit description=FIP1
SSPRPGGAATAPKNTMDSVKDVLGKMGKRFGEAARKTENITGNFWQHLKTGPSITDAAMGRISQVTKVIAEGGYEKIFHQTFEVAPGAKL

SEQ ID NO: 73674 - protein, 707 aa, Setaria italica
  Transcript Sequence Number=SeqID_7700
  Gene Ontology: Mol. function=histone-lysine N-methyltransferase activity; Cellular component=nucleus; Biological process=chromatin modification
  Homolog annotation: Hit_ID=B9N2W3; Match level="QueryCoverage=71%, HitCoverage=100%, E-value=1e-158, Identity=56%"; Hit description=SET domain protein (Fragment)
  Pfam annotation: Domain name=Pre-SET; Domain location=431-528; Score =125.7; E_value=1.5e-34; Accession=PF05033.8; Description=Pre-SET motif
  Pfam annotation: Domain name=SET; Domain location=530-684; Score =158.9; E_value=1.6e-44; Accession=PF00856.20; Description=SET domain
  Pfam annotation: Domain name=YDG_SRA; Domain location=249-407; Score =271.6; E_value=1.8e-78; Accession=PF02182.9; Description=YDGSRA domain
  Pfam module annotation: Pfam domain module=Pre-SET::SET::YDG_SRA; Domain location=431-528::530-684::249-407
KIKLEGSLHRSTHKTPLSDPIDAKTKGKRLESGKMNATLLGNAGGKMQSKTLSTKKELACSNMNVKQNKSAHKPSKFGKHVATNQMRESDDMKLVPDQLIVLALMAPDKCPWTRGRKSRASASKPLAPRNKLNGMDVTPRRLLINDETMEDNDDSNPEDDGNSKVLVMCGEKQEICVTVPPSVPSGSHQRQLGDHDVDAQRKVRKLLQLFQVACRKITRLVEQGNRNIGRVDTEAFKALKRDPIYNKPGAMVGSIPGVKVGDEFHFRVELSIVGLHRPHQGGIDTSTVNGVPVAISIVASGGYPDELSSSDELIYTGSGGKAGGNKQGDDQKLERGNLALKNCIDTKTPVRVIHGFKGQNRSEIGHSKGKKTSTFIYDGLYEVMECWQEGLKGEMVFKYKLHRIAGQPELALHAVKATRKSKVREGLCLPDISQGSERMPISVINTIDDTRPAPFKYTTKVIYPSWYEKEPPKGCDCTNGCTDSIKCACAVKNGGEIPFNSDGAIIEARPLIYECGPSCRCPPTCHNRVSQHGVKIPLEIFKTGSTGWGVRSLSSISSGSFICEYVGELLEDKEADKTQNDEYLFDIGSNYHDEELWVGLKSVVGVQSSTSSSKTMEGFTIDAAEYANVGRFINHSCSPNLYAQHVLWDHDDMRMPHVVLFAVENIPPLQELTYHYNYTVGQVLDENGKEKVKHCYCGASDCCGRLY

SEQ ID NO: 73675 - protein, 39 aa, Setaria italica
  Transcript Sequence Number=SeqID_7701
SSDINILCRKRFSRLKTADDGSGPLAMSSMIFMGAQAVN

SEQ ID NO: 73676 - protein, 63 aa, Setaria italica
  Transcript Sequence Number=SeqID_7702
TFTISYPSGVATGAVEHGAVSDDVATGHTPILHQSMLDFCLHYGRHNNKLSDDEVVCQSLARL

SEQ ID NO: 73677 - protein, 113 aa, Setaria italica
  misc_feature (5)..(5): Xaa can be any naturally occurring amino acid
  misc_feature (89)..(89): Xaa can be any naturally occurring amino acid
  Transcript Sequence Number=SeqID_7703
  Gene Ontology: Mol. function=hydrolase activity, hydrolyzing O -glycosyl compounds; Cellular component=cytosolic ribosome; Biological process=carbohydrate metabolic process
  Homolog annotation: Hit_ID=B6U498; Match level="QueryCoverage=98%, HitCoverage=22%, E-value=2e-42, Identity=74%"; Hit description=Non -cyanogenic beta-glucosidase
GKIGXVLDFNWYEALTNSTDDQAAAQRARDFHIGWFVDPLINGHYPQIMQDLVKERLPRFTPEQAKLVKGSADYIGINQYTASYIKGQXLLQQTPTSYSADCSTKWQANWTTG

SEQ ID NO: 73678 - protein, 80 aa, Setaria italica
  Transcript Sequence Number=SeqID_7704
LMLVTHHLVQDQEQQHRIRTGQSTRGVATGAVEHGAVSDDVATGHTPILHQSMLDFCLHYGRHNNKLSDDEVVCQSLARL

SEQ ID NO: 73679 - protein, 44 aa, Setaria italica
  Transcript Sequence Number=SeqID_7705
QPKWRKFLAHVGPGALVAIGFLDPSNCKLSSFPQSCMLFIVVNL

SEQ ID NO: 73680 - protein, 41 aa, Setaria italica
  Transcript Sequence Number=SeqID_7706
  Gene Ontology: Mol. function=hydrolase activity, hydrolyzing O -glycosyl compounds; Biological process=carbohydrate metabolic process
  Homolog annotation: Hit_ID=B6TW65; Match level="QueryCoverage=100%, HitCoverage=7%, E-value=6e-09, Identity=68%"; Hit description=Beta -glucosidase
YQATQKGKVGIVLDFNWYEPLTNSTADQAAAQRARDFHVGW

SEQ ID NO: 73681 - protein, 61 aa, Setaria italica
  Transcript Sequence Number=SeqID_7707
VPFPLSLDVTARSFIVLHTRVWFSGQFDSSESQNHIYIVDLSCSLRFCIMGRCRSLYCEFV

SEQ ID NO: 73682 - protein, 78 aa, Setaria italica
  Transcript Sequence Number=SeqID_7708
RVSPTCEAPSIIVALLPPVRLIARAQPADPAPALHLASEEHRHARAIGFGADLAFAACSIDELCCPDFCSCRAGLSPG

SEQ ID NO: 73683 - protein, 100 aa, Setaria italica
  Transcript Sequence Number=SeqID_7709
  Gene Ontology: Mol. function=hydrolase activity, hydrolyzing O -glycosyl compounds; Cellular component=cytosolic ribosome; Biological process=carbohydrate metabolic process
  Homolog annotation: Hit_ID=Q10EB1; Match level="QueryCoverage=100%, HitCoverage=25%, E-value=3e-49, Identity=91%"; Hit description =Glycosyl hydrolase family 1 protein, expressed
  Pfam annotation: Domain name=Glyco_hydro_1; Domain location=1-100; Score=-322.2; E_value=0.018; Accession=PF00232.10; Description =Glycosyl hydrolase family 1
PGKVAGNQNGDVAVDQYHRYKEDVDLMKSLNFDAYRFSISWSRIFPDGEGRVNPEGVAYYNNLINYLLQKGMTPYINLYHYDLPLALEQKYGGWLSSKMA

SEQ ID NO: 73684 - protein, 67 aa, Setaria italica
  Transcript Sequence Number=SeqID_7710
  Gene Ontology: Mol. function=protein dimerization activity
SESAFSLGGRILGESRSSLTPEMLEALVCGKDWYSRKKMQTMKVNKLVKIRLVKWSPLPLHQTSEMD

SEQ ID NO: 73685 - protein, 115 aa, Setaria italica
  Transcript Sequence Number=SeqID_7711
AYPRPIRRRGWRRKLEASSAAAHSISRAQVPPADWSLPSPIRASPRRFVVLHRPSAPRLSGWRSRRSTAELAHAGPKSGSRTDPARTGPAAPCYDVLIGWLSIGGSGEIEALGAR

SEQ ID NO: 73686 - protein, 98 aa, Setaria italica
  Transcript Sequence Number=SeqID_7712
ASRVYKGAARMTNAEERPGPERYCRLRARRPRPYFFIPVLIPFCANIDASSSRFACFCCAATATWRSRWLARWASCLTALLAGILNDAGNTDLATASA

SEQ ID NO: 73687 - protein, 64 aa, Setaria italica
  misc_feature (48)..(48): Xaa can be any naturally occurring amino acid
  Transcript Sequence Number=SeqID_7713
  Gene Ontology: Mol. function=hydrolase activity, hydrolyzing O -glycosyl compounds; Cellular component=cytosolic ribosome; Biological process=carbohydrate metabolic process
  Homolog annotation: Hit_ID=Q75I92; Match level="QueryCoverage=93%, HitCoverage=41%, E-value=3e-24, Identity=86%"; Hit description=Beta -glucosidase (With alternative splicing)
GGPSIWDAFAHIPGKVAGNQNGDVAVDQYHRYKEDVDLMKSLNFDAYXFSISWSRIFPAIFCWW

SEQ ID NO: 73688 - protein, 152 aa, Setaria italica
  Transcript Sequence Number=SeqID_7714
SSPPPLDRGCRCVSYTPAQAHLCPELDAGVAAAHSPSVPRSSGWRSRRSTAELAHAGPWLDLARIRRGLVRQLPATAFLSGGFSLEAVVRSLNSSVPFPFPLCHSSIFHCSAYTCVVQWRIRLVRSQNHTLYSRFELLPEILHHGSVPELVL

SEQ ID NO: 73689 - protein, 92 aa, Setaria italica
  Transcript Sequence Number=SeqID_7715
IATSSQTSCKDLCYTYIYIYIYRLFTLVLGCSLAGETRRRPNCRPDPGCCHRPTLMLISSQELGELRYLLLATSFWFFWPLLVHVILTLLSC

SEQ ID NO: 73690 - protein, 90 aa, Setaria italica
  Transcript Sequence Number=SeqID_7716
LLVVKQVAKTYVTYIYIYRLFTLVLGCSLAGETRRRPNCRPDPGCCHRPTLMLISSQELGELRYLLLATSFWFFWPLLVHVILTLLLHSC

SEQ ID NO: 73691 - protein, 93 aa, Setaria italica
  Transcript Sequence Number=SeqID_7717
NNFYITRRLNRSVAIGLTNMYTGLRKHKCTSRLYHLQHHRTSSFGQLLETQKNRVPIQILGPAQLTLARSTKPHNLDHNTSVSNNPWCRFSRE

SEQ ID NO: 73692 - protein, 86 aa, Setaria italica
  Transcript Sequence Number=SeqID_7718
  Homolog annotation: Hit_ID=B9S079; Match level="QueryCoverage=94%, HitCoverage=13%, E-value=7e-13, Identity=37%"; Hit description =Pentatricopeptide repeat-containing protein, putative
MPMQADVSVWGAFLHGCGLHSRLQFGEEAFKRMMVLHPERPDLYGLISNLYTSYGMWEKSLAIQRWMQEKGLVKLPGCSSVGPENG

SEQ ID NO: 73693 - protein, 100 aa, Setaria italica
  Transcript Sequence Number=SeqID_7719
  Subcellular localization annotation: CTP_CleavageSite=53; ConfidenceScore=5.06e-01
SINVSTKWNQHWDEEVGSGTAGSKSAVSLRSRSLFRICHPGRAFVHPWSSLLSASYLAPKASISPTALPNEKPLKPLKPLKPLKPLKPLKPLKPLKPLKP

SEQ ID NO: 73694 - protein, 167 aa, Setaria italica
  misc_feature (115)..(115): Xaa can be any naturally occurring amino acid
  Transcript Sequence Number=SeqID_7720
APMKIMELIARGPEPSSAVFNLLNLFLQSMFISELYSSACSSQITPLQTGKNRQACPSSALWQRAVNIHIITLYDTLGVCKIRFLHSQTSLFVTRKLDATLNKLVSSYVHWRQWXDQFPFPCSSMSLLNLRNAYIYIYMCARTMLKIVYLCYSLENLHHGLLLTLVL

SEQ ID NO: 73695 - protein, 88 aa, Setaria italica
  Transcript Sequence Number=SeqID_7721
KDDSCVEEPGRNSHYQKLSNIRTIVKFNKPKELKLWNMKNKNRDMKNKNLSCFVQYGFDVAVLGLAQDDASLASIMCWLSLDLCCPHH

SEQ ID NO: 73696 - protein, 74 aa, Setaria italica
  Transcript Sequence Number=SeqID_7722
CTCGISLIFLIQTHEYNLNLIIIVLHFQKLTITVNLYSFNHILKLNIAVYLKKVLWLTCTERNLDSANICFLAA

SEQ ID NO: 73697 - protein, 131 aa, Setaria italica
  Transcript Sequence Number=SeqID_7723
EQTSLPFICIMAKALNIHIITLYDTLGVCKIRFLHSQTSLFVTRKLDATLNKLVSSHVHQRQWRDRFPFPCSCMSLLNLRNAYIYIYMRAREPCSKLSICVTLLRICTMGWCPRLYCDQDYGVFVDLASVN

SEQ ID NO: 73698 - protein, 161 aa, Setaria italica
  Transcript Sequence Number=SeqID_7724
SLAGETRRRPNCRPDPGCCHRPTLMLISSQELGELRYLLLATSFWFFWPLLVHVILTLLLHLPNANAHVSYLLQVIHKSLDMKTWVQIVFQKKNMGANNLSKKNMGAKKATGRPSCLSVQLLMWLACTIMSFADVRLHENIINMPLGPELIEQIYIDAVQV

SEQ ID NO: 73699 - protein, 390 aa, Setaria italica
  misc_feature (335)..(335): Xaa can be any naturally occurring amino acid
  misc_feature (376)..(376): Xaa can be any naturally occurring amino acid
  Transcript Sequence Number=SeqID_7725
  Homolog annotation: Hit_ID=Q9LMG4; Match level="QueryCoverage=49%, HitCoverage=20%, E-value=7e-22, Identity=38%"; Hit description =F16A14.15
  Pfam annotation: Domain name=DUF863; Domain location=132-390; Score= -256.9; E_value=0.0013; Accession=PF05904.3; Description=Plant protein of unknown function (DUF863)
LEFVTRMGAKVEGESYMPGYYATGDLNMEPNGRWSPYYEDRASNGQLCNGFTTKPTNGYSEFDKEMLKHQMLEHEAVFRQQVYELHRVYKIQRDMMKQHQSKEIYSYPMLAVASHTNSPSQVPPNGAKMMWQMPVPPVSTTYRKTPVAEHNDTNQSSMKFLREGSVQSSPNGFLSSDAAPRSRQGTFDLQLPADHYIDDDNTSDNKPIDFLGLASDTKPRNDADLTLVSAEALGRFSDNSSTSGLRTKNNHGSQQVTDLNESNAGIYMGRANGSVSKGLSHTLENSWHQPILRPNTTNFSFNKEYSKDKHADEGTSSNFFDASAKIRHENKPSIXKGKQVSSMTFLAPRYSDADPSKYFKAADGRPANYNQFVYQXGQNSSVGWFARSPL

SEQ ID NO: 73700 - protein, 185 aa, Setaria italica
  Transcript Sequence Number=SeqID_7726
YLLILASPPVAIPRRRRRSASPASAARSIDDLRRPDLCSCRACLSPGRFAAWLEKGARGLERCRPFISRAQVPPADLSLSFADSSQSAPIRRPPQAVLSSPARARLPLCELHPRSSPSLPPSLTPVSLLPTGPPSQGRQAGGPAGPLRSSLTQAHGWISHGSGKDWSGSSLLRRSYRVAFHWRQW

SEQ ID NO: 73701 - protein, 125 aa, Setaria italica
  Transcript Sequence Number=SeqID_7727
  Subcellular localization annotation: CTP_CleavageSite=23; ConfidenceScore=5.20e-01
KGQRKALGWRTEGRAAGRPQAPRRSAVMRGLLASVPTSHSPPAPSTICATPTSARVEQAYPPTDSQRGWRRKLEASSAAAHPSPEPKCRRPIGACPSPIRASPSPIRRPPQVVLSSPASSAAAAV

SEQ ID NO: 73702 - protein, 253 aa, Setaria italica
  Transcript Sequence Number=SeqID_7728
SHPSNQPAPVHAACQLQFCAPLFIFWAACSKKLPRNTAEIVGSNEIGSSPVDPPLHIDGAAAKSRDLFAGALVALTRREAPPSVIVALLPPTCLIARARPADPAPALHLASEEHRHARAIGFGADLAFAARSIDDLRRPNLYSCRACLSPGRFAAWLEKGARGLERCRPFISRAQVPTADLSLSFADSSQSAPIRRPPQALRPKVVRLEVPQVHCGARSRRPTAGSRTDPARTGPAAPCYDVLIGWLFIGGSD

SEQ ID NO: 73703 - protein, 246 aa, Setaria italica
  misc_feature (143)..(143): Xaa can be any naturally occurring amino acid
  Transcript Sequence Number=SeqID_7729
  Gene Ontology: Mol. function=hydrolase activity, hydrolyzing O -glycosyl compounds; Cellular component=cytosolic ribosome; Biological process=carbohydrate metabolic process
  Homolog annotation: Hit_ID=Q42975; Match level="QueryCoverage=98%, HitCoverage=41%, E-value=1e-97, Identity=73%"; Hit description=Beta -glucosidase
  Pfam annotation: Domain name=Glyco_hydro_1; Domain location=1-246; Score=-187.1; E_value=3e-09; Accession=PF00232.10; Description =Glycosyl hydrolase family 1
IFGWFVDPLINGHYPQIMQYLVKERLPRFTPEQAKLVKGSADYIGINQYTASYIKGQKLLQQTPTSYSADWQVQYVSRNGKLIGPQANSNWLYIVPSGMYGCVNYLKEKYGNPTVYITEKWYSIKSYASLLHISHEYVAYQGXRDPYIELFFLFTGMDQPGNLTRDQYLRDVTRVRFYKSYLDQLKKAIDQGANVAGYFAWSLLDNFEWLSGYSSKFGIVYVDFNNKLERHPKASAYWFRDMLKKN

SEQ ID NO: 73704 - protein, 566 aa, Setaria italica
  Transcript Sequence Number=SeqID_7730
  Gene Ontology: Mol. function=hydrolase activity, hydrolyzing O -glycosyl compounds; Cellular component=cytosolic ribosome; Biological process=carbohydrate metabolic process
  Homolog annotation: Hit_ID=B6TW65; Match level="QueryCoverage=92%, HitCoverage=92%, E-value=0.0, Identity=81%"; Hit description=Beta -glucosidase
  Pfam annotation: Domain name=Glyco_hydro_1; Domain location=48-516; Score=661.9; E_value=5.9e-196; Accession=PF00232.10; Description =Glycosyl hydrolase family 1
  Subcellular localization annotation: CTP_CleavageSite=63; ConfidenceScore=5.11e-01
MGAAGCAVPLAASHCRRLQLLMLALALVPLGGRGFRVRAVGADTGGLSRDAFPKGFVFGTATSAFQVEGAASTNGRGPSIWDPFVHTPGKIAGDANADVTTDEYHRYKEDVDLMKSLNFDAYRFSISWSRDLPRWRREVNEEGVQYYNNLIDYMLKQGLTPYANLNHYDLPLALEKKYKGWLGPKIVDIFADYADFCFKTFGDRVKNWFTLNEPRIVSFLGYDKGLNPPNRCTQCAAGGNSATEPYIVVHNILLSHATAVARYRNKYQATQKGKVGIVLDFNWYEPLTNSTADQAAAQRARDFHVGWFMDPLINGQYPKTMQDIVKDRLPSFTPEQAKLVKGSSDCFGINQYTTYYISDQQTPQQATPSYSSDWGVQYNFERNGLPIGQLANSVWLYIVPTGMYGVVNYLKEKYQNPTIIISENGMDQSGNLTRDEYLHDTVRVEFYKNYLTELKKGIDEGANVVAYFAWSLLDNFEWLSGYTSKFGIVYVDFTTLKRYPKDSAYWFRDMLSGAGSKAATPQTGSQSSAGSPAGSAPAASSGPALLVSLLVSLCLLVPSVFMVSSA

SEQ ID NO: 73705 - protein, 722 aa, Setaria italica
  misc_feature (636)..(636): Xaa can be any naturally occurring amino acid
  Transcript Sequence Number=SeqID_7731
  Gene Ontology: Mol. function=protein dimerization activity; Biological process=regulation of RNA metabolic process
  Homolog annotation: Hit_ID=B6UD06; Match level="QueryCoverage=62%, HitCoverage=94%, E-value=1e-106, Identity=42%"; Hit description =Transposon protein
  Pfam annotation: Domain name=hATC; Domain location=611-693; Score =119.4; E_value=1.2e-32; Accession=PF05699.6; Description=hAT family dimerisation domain
  Pfam annotation: Domain name=zf-BED; Domain location=78-124; Score =45.0; E_value=3e-10; Accession=PF02892.7; Description=BED zinc finger
  Pfam module annotation: Pfam domain module=hATC::zf-BED; Domain location=611-693::78-124
  Subcellular localization annotation: CTP_CleavageSite=2; ConfidenceScore=5.15e-01
VTDSVPRSRRHPRLPPEIPPPPPPPPPRLPPSPSRDPAPSGNKEADGDSLAKGFFNMSLSTSESSDDSNSTQTRAKRSKVWEHFEQNLVEVDNCFRAVCKYCRMQLSTKSGTSSLRTHISQYCHAIGEAERNRFIATLKKPIENFVFDPQFSRERMIEFVIHAEIPFNKFEDPYFEPWVQSMQPTLSVVGRQTVHNDCLKKYQRMKQDIQNELESLDSHVCLTSDLWTSIQNLGYMVVTAHYITPDFKIKKKIISFKEVKYPHSGFAIEEALVSCLTEWGIRNKLFTLTVDNASNNNTACDLLVDTHKYELMLEGAHLHVRCCAHILNILVQDGMKIIHEGIKKIRELLKHIVSSPSRMQAFNEIAVVNGLPTKRGIALDIPNRWNSTFKMVAEAIKYKTVLNSYANQHAEIPPNEQEWSTADSICKFLKTFEEATKAISAHRKPTSYMFLPLIVSIRDALDNPSWQTSVTLQDLAAAMRIKFEKYWGRDFDESNEPIPRRNKKDYDVNLGIVIATMLDPRGKAEYAEFFYQKICSNIDQIDSSVDAALVWMKKYFLEYEQRLRRVNAYSVTYSSEGSICVGSPVLAKRQLGSEFANFKSSRRKTRPPKSEFDIYFEEDCVEDIENFDILAWWKAXAEKFPILSVMARDFLAIPLSTVSSESAFSLGGRILGESRSSLTPEMLEALVCGKDWLFKEKDADNEGQQISEDQTSEMVTFATPSD

SEQ ID NO: 73706 - protein, 446 aa, Setaria italica
  misc_feature (228)..(228): Xaa can be any naturally occurring amino acid
  misc_feature (437)..(437): Xaa can be any naturally occurring amino acid
  Transcript Sequence Number=SeqID_7732
  Gene Ontology: Mol. function=hydrolase activity, hydrolyzing O -glycosyl compounds; Cellular component=cytosolic ribosome; Biological process=carbohydrate metabolic process
  Homolog annotation: Hit_ID=Q42975; Match level="QueryCoverage=93%, HitCoverage=82%, E-value=0.0, Identity=80%"; Hit description=Beta -glucosidase
  Pfam annotation: Domain name=Glyco_hydro_1; Domain location=36-446; Score=494.9; E_value=1.1e-145; Accession=PF00232.10; Description =Glycosyl hydrolase family 1
  Subcellular localization annotation: CTP_CleavageSite=37; ConfidenceScore=5.10e-01
MDARWAVLLALLVASAGAGGARAAGVKGANWLGGLSRASFPKGFVFGTATSAYQVEGAASTNGRGPSIWDAFAHIPGKVAGNQNGDVAVDQYHRYKEDVDLMKSLNFDAYRFSISWSRIFPDGEGRVNPEGVAYYNNLINYLLQKGMTPYINLYHYDLPLALEQKYGGWLSSKMADLFTEYVDFCFKTYGDRVKHWFTFNEPRIVALLGYDAGSNPPQRCTKCAAGGXNSATEPYIVAHNFLLAHAAAAARYRTKYQAAQKGKIGIVLDFNWYEALTNSTDDQAAAQRARDFHIGWFVDPLINGHYPQIMQDLVKERLPRFTPEQAKLVKGSADYIGINQYTASYIKGQKLLQQTPTSYSADWQVQYVLARNGKLIGPQANSNWLYIVPSGMYGCVNYLKEKYGNPTVYITENGMDQPGNLTRDQYLRDVTRVRFYXSYLDQLKKP

SEQ ID NO: 73707 - protein, 112 aa, Setaria italica
  misc_feature (12)..(12): Xaa can be any naturally occurring amino acid
  misc_feature (80)..(80): Xaa can be any naturally occurring amino acid
  Transcript Sequence Number=SeqID_7733
  Gene Ontology: Mol. function=sequence-specific DNA binding; Cellular component=nucleus; Biological process=regulation of transcription, DNA-dependent
  Homolog annotation: Hit_ID=P69781; Match level="QueryCoverage=65%, HitCoverage=21%, E-value=2e-33, Identity=90%"; Hit description=GATA transcription factor 13
  Pfam annotation: Domain name=GATA; Domain location=36-71; Score=65.2; E_value=2.5e-16; Accession=PF00320.19; Description=GATA zinc finger
PSKPAKKKELLXTPAPSGASAVQSAGSAASAEGRRCLHCETDKTPQWRTGPMGPKTLCNACGVRYKSGRLVPEYRPAASXPTFVMSKHSNSHRKVLELRRQKEVQHQPPHQA

SEQ ID NO: 73708 - protein, 719 aa, Setaria italica
  Transcript Sequence Number=SeqID_7734
  Gene Ontology: Mol. function=potassium ion transmembrane transporter activity; Cellular component=integral to membrane; Biological process=potassium ion transport
  Homolog annotation: Hit_ID=Q8VXB5; Match level="QueryCoverage=100%, HitCoverage=89%, E-value=0.0, Identity=83%"; Hit description =Putative potassium transporter 8
  Pfam annotation: Domain name=BCCT; Domain location=167-541; Score= -447.9; E_value=0.096; Accession=PF02028.9; Description=BCCT family transporter
  Pfam annotation: Domain name=DUF2306; Domain location=258-346; Score=- 41.6; E_value=0.08; Accession=PF10067.1; Description=Predicted membrane protein (DUF2306)
  Pfam annotation: Domain name=K_trans; Domain location=22-715; Score =1345.2; E_value=0; Accession=PF02705.8; Description=K+ potassium transporter
  Pfam module annotation: Pfam domain module=BCCT::DUF2306::K_trans; Domain location=167-541::258-346::22-715
MDLEFGRGLRSPKRDSWKTTLLLAYQSLGVVYGDLSISPLYVYKSTFAEDIQHSETNEEIFGVLSFVFWTLTLIPLIKYVSIVLRADDNGEGGTFALYSLICRHANVSLLPNRQIADEELSTYKLECPPEITDKSHIKVWLEKHRKLRIALLIMVMIGTCMVIGDGVLTPAISVFSAVSGLEFSLSKDHREYAVIPITCVILAFLFALQHYGTHRVGFLFAPIVLAWLFCMSAVGLYNIIHWNPQVYQALNPYYMFKFLKKTRKYGWMSLGGILLCMTGSEAMFADLGHFSYSAIQLAFTCLVYPALILAYMGQAAYLSKHHDFYSSSQVGFYIAVPDKIRWPVLVLAILASVVGSQAIISGTFSIINQSQSLSCFPRVKVVHTSEKIHGQIYIPEINWLLMILCIAVTVGFRDTKHMGNASGLAVITVMLVTTFLTSLVIVLCWHRPPLLAFAFLLFFGSIEALYFSASLIKFLEGAWLPILLALILMAVMLIWHYTTIKKYEFDLHNKVTLEWLLALGDKLGMVRVPGIGLVYTDLTSGVPANFSRFVTNLPAFHRVLVFVCVKSVPVPHVFPAERYLIGRVGPPGHRSYRCIVRYGYRDVHQDVDSFEDELVETLATFIKLDASYRCSEASEWEPEAEMEPGERERRLTVIASNQLRHRASYDLQDSAQHSSASTVEMRATAAGAGGGPTATADDEDGDTGEISPARKQVRFFIDS

SEQ ID NO: 73709 - protein, 62 aa, Setaria italica
  Transcript Sequence Number=SeqID_7735
GYNADWGSDGGDLQEAVSAFVAASSGAAHLPALDNDEFMSLECFNFDQSFDMGGAMPSLFYP

SEQ ID NO: 73710 - protein, 46 aa, Setaria italica
  misc_feature (35)..(35): Xaa can be any naturally occurring amino acid
  Transcript Sequence Number=SeqID_7736
LIKAVHANRMGSATTRTVIPDRPKEEDYFYANPQXCLRDPNLLRTS

SEQ ID NO: 73711 - protein, 559 aa, Setaria italica
  Transcript Sequence Number=SeqID_7737
  Gene Ontology: Mol. function=phosphatidate phosphatase activity; Cellular component=apoplast
  Homolog annotation: Hit_ID=Q2R178; Match level="QueryCoverage=100%, HitCoverage=39%, E-value=0.0, Identity=80%"; Hit description=Lipin, N-terminal conserved region family protein, expressed
  Pfam annotation: Domain name=LNS2; Domain location=357-513; Score =341.2; E_value=2e-99; Accession=PF08235.5; Description=LNS2 (LipinNed1Smp2)
KAMDDIVAGKTAGEGEHEESDCDTEKQEEGDLDLANVLENCSDSLRPVTSPVSIPTCNLQSEDNTMEAKSLPNLRSHIHDLERSDSFQLSRSLQPNAENNGVDPVKSTDSSFLEQKSEVTGDSEENSSPPEVTSNVVPDDKHADNLKIDPFVPFAELSLCRHLLSEGMGEDAARSAFDSEKVTLEKFHTMKQSLMRNNRLVVRIAGRYFPWDAAAPIVLGLISFSEEQVFEPKGMIKVEQIETSAAPGGSWRIWPFSFRRTRTISAVQPVCESTVETSISTPVKESTPFSESDRERNKSRAKRIERKVRSLTPTSEELASLDLREGRNVVTFTFSTAIVGKQQVDCHIYLWKWNTRIVISDVDGTITKSDVLGQFMPLVGVDWSQNGVAHLFSAIKENGYQLLFLSARAISQAHITRQFLFNLKQDGKALPDGPVVISPDGLFPSLYREVIRRAPHEFKISCLEAIKDLFPPDSNPFYAGFGNRDTDELSYLKVGIPMGKIFIINPKGEVAVNRRVDTKSYTSLHALVHGMFPPISSSSEQEDYNTWNYWKMPLPDVDL

SEQ ID NO: 73712 - protein, 381 aa, Setaria italica
  Transcript Sequence Number=SeqID_7738
  Gene Ontology: Mol. function=hydrolase activity; Biological process =metabolic process
  Homolog annotation: Hit_ID=B6T7L7; Match level="QueryCoverage=82%, HitCoverage=92%, E-value=1e-105, Identity=62%"; Hit description =Gibberellin receptor GID1L2
  Pfam annotation: Domain name=Abhydrolase_3; Domain location=140-355; Score=180.0; E_value=6.8e-51; Accession=PF07859.5; Description =alphabeta hydrolase fold
  Pfam annotation: Domain name=Peptidase_S9; Domain location=156-381; Score=-76.9; E_value=0.059; Accession=PF00326.13; Description=Prolyl oligopeptidase family
  Pfam module annotation: Pfam domain module=Abhydrolase_3::Peptidase _S9; Domain location=140-355::156-381
  Subcellular localization annotation: CTP_CleavageSite=40; ConfidenceScore=5.09e-01
MIRSRPTLFSRARTHQAGAQIPVSIHGHKTSLLSNKAHLLAAAAGRRSIPSRRLVAGPALAMDPASSEEIIIDSRYFRIYGDRRIDRLVGTTTVPPGFDAATGVTSRDVTIDADTGLYVRLYLPADTSSKQQNDKKLPLLVYFHGGAFVTQSAAAPAYQPFLSTLAARAGLLVVSVNYRLAPEHPFPAGYEDSLRALEWAVASGGGDPWLSRHGDLGRVFLAGESAGGNIAHNVAMMAAAGEAAAAVEGAAVLHALFSGREPVDGELPMWVESLGKLWAVVCPEAAEGTDDPRMNPAAAPANLRRMPCRRVLVCAAEKDFGAPRCRAYYEALKASGWGGEVEWFESKGEDHVFFLAKPADDDVVAELMDRLVAFFTATGGN

SEQ ID NO: 73713 - protein, 194 aa, Setaria italica
  misc_feature (26)..(26): Xaa can be any naturally occurring amino acid
  Transcript Sequence Number=SeqID_7739
  Homolog annotation: Hit_ID=Q6AU09; Match level="QueryCoverage=48%, HitCoverage=6%, E-value=5e-16, Identity=60%"; Hit description=Fip1 motif family protein, expressed
RRKTRLAPAKPPPAADDLDPLMGAVXGDSGPAIPGLSSSAAAGAAGSEDWDSDSEDDIQIVLNETDGRRGLGEDEGDDEDGEDLVIVADGPHIPGMEEQDWGEDPASAGVEGDRKDGGEPGKAVAAPGGRIGYSGGGPGFHPQHHSMFKYVRPGAPGASIGGAPGGPGQFRPPGPSGPFSGRGRGDWRPAGGRG

SEQ ID NO: 73714 - protein, 185 aa, Setaria italica
  misc_feature (137)..(137): Xaa can be any naturally occurring amino acid
  Transcript Sequence Number=SeqID_7740
  Homolog annotation: Hit_ID=B9RDE1; Match level="QueryCoverage=77%, HitCoverage=57%, E-value=4e-58, Identity=78%"; Hit description=LOB domain-containing protein, putative
  Pfam annotation: Domain name=DUF260; Domain location=23-124; Score =223.4; E_value=5.7e-64; Accession=PF03195.6; Description=Protein of unknown function DUF260
YLGYLGRSVGGAGAGAGIGGGGPCGACKFLRRKCVSGCIFAPYFDSEQGAAHFAAVHKVFGASNVSKLLLQIPAYKRLDAVVTICYEAQARLRDPVYGCVAHIFALQQQVVNLQAELTYLQAHLATLELPSPPPLPXPPQMPMPGPFSISDLPSSTNVPTTVDLSALFDPPPQPPQWAVQQQHHH

SEQ ID NO: 73715 - protein, 121 aa, Setaria italica
  Transcript Sequence Number=SeqID_7741
  Homolog annotation: Hit_ID=Q7XQN7; Match level="QueryCoverage=62%, HitCoverage=10%, E-value=3e-16, Identity=53%"; Hit description =OSJNBa0084A10.18 protein
LAHALVPRGLDLQRRRPQVARNTTTAMALNHGIRASLRFLVSTAEAASAPASRGFHSTGVRQMGAHAHEEPYYVHAKHMYNLHRMKHQQLKVSLAVLAAVGTGVGVPVYAVVFQQKKTASA

SEQ ID NO: 73716 - protein, 98 aa, Setaria italica
  misc_feature (52)..(52): Xaa can be any naturally occurring amino acid
  misc_feature (79)..(79): Xaa can be any naturally occurring amino acid
  Transcript Sequence Number=SeqID_7742
  Gene Ontology: Mol. function=phospholipase D activity; Cellular component=membrane; Biological process=phosphatidylcholine metabolic process
  Homolog annotation: Hit_ID=P93400; Match level="QueryCoverage=96%, HitCoverage=11%, E-value=4e-32, Identity=68%"; Hit description =Phospholipase D alpha 1
SRMSLWYEHLDAVDEAFTHPESLECVCKVNAMADMYWDLYVGDGPERDLPGXLLTYPVGVTADGAITQLPGMEFFPDTXQAWVLGTKFDYLPPILTAQ

SEQ ID NO: 73717 - protein, 85 aa, Setaria italica
  Transcript Sequence Number=SeqID_7743
LDRTGRTARQRDEVPTDGGGRDGAEEAAGVRARGDHPLHRRLVFGQDLFMRGERCDAILFPFLSHLCWIDELKSLQKLQAAVDRL

SEQ ID NO: 73718 - protein, 251 aa, Setaria italica
  Transcript Sequence Number=SeqID_7744
  Gene Ontology: Mol. function=serine-type endopeptidase activity; Cellular component=cytoplasm; Biological process=proteolysis
  Homolog annotation: Hit_ID=B4FP39; Match level="QueryCoverage=99%, HitCoverage=86%, E-value=1e-127, Identity=91%"; Hit description=ATP -dependent Clp protease proteolytic subunit
  Pfam annotation: Domain name=CLP_protease; Domain location=31-212; Score=337.5; E_value=2.6e-98; Accession=PF00574.15; Description=Clp protease
PTQQGSLLRLKPCASLAPHAPVWRAESDGAGGGAGAGDVMGLLLRERIVFLGNEIEDFLADAVVSQLLLLDAIDPDSDIRLFVNSSGGSLSATMAIYDVMQLVRADVSTIGLGIAGSTASIILGGGTKGKRFAMPNTRIMIHQPVGGASGQALDVEVQAKEILANKRNVIRLVSGFTGRTLEQVEKDIDRDRYMGPLEAVDYGLIDGVIDGDSIIPLEPVPERVKPKYNYEEMYKVPQKFLTPDVPDDEIY

SEQ ID NO: 73719 - protein, 76 aa, Setaria italica
  Transcript Sequence Number=SeqID_7745
  Homolog annotation: Hit_ID=B6STU5; Match level="QueryCoverage=100%, HitCoverage=15%, E-value=6e-18, Identity=72%"; Hit description =Proline oxidase
  Subcellular localization annotation: CTP_CleavageSite=37; ConfidenceScore=5.31e-01
MAIASRVSKRALSTFAAAKLPEAVAATAEPSLPSVTPASSTSERTGGRVLQFEDTGRLFAGEPTSALVRTLAALQA

SEQ ID NO: 73720 - protein, 40 aa, Setaria italica
  Transcript Sequence Number=SeqID_7746
PNNLSFNLCQGATCTANKGSDEFFKYTKSDAKSLNFARMV

SEQ ID NO: 73721 - protein, 96 aa, Setaria italica
  Transcript Sequence Number=SeqID_7747
YHLLVGPPEARHAGARATVDAAPAAAAAAAEAAATTGNEFLDVMDAGFNKPAAPAAGPGGKALTENLSPTFVSSGDPCLDFFFRVVPGTPGPPCPR

SEQ ID NO: 73722 - protein, 85 aa, Setaria italica
  Transcript Sequence Number=SeqID_7748
  Subcellular localization annotation: CTP_CleavageSite=20; ConfidenceScore=5.05e-01
LQASSGCQQQSNLITMHMVQKMHSSSKNPRGKTNIIVTFFFVEEHYYNLKAKLAPITYSISRPYNMHNPNNSTNFQKIIIHRLYK

SEQ ID NO: 73723 - protein, 43 aa, Setaria italica
  Transcript Sequence Number=SeqID_7749
  Homolog annotation: Hit_ID=B6T871; Match level="QueryCoverage=100%, HitCoverage=30%, E-value=7e-16, Identity=93%"; Hit description =Lactoylglutathione lyase
GLKARGTELFEKTQPDGRTRQVFFFDPDGNGLEVTSSGAGSDK

SEQ ID NO: 73724 - protein, 151 aa, Setaria italica
  misc_feature (46)..(46): Xaa can be any naturally occurring amino acid
  misc_feature (91)..(91): Xaa can be any naturally occurring amino acid
  Transcript Sequence Number=SeqID_7750
  Gene Ontology: Mol. function=aspartic-type endopeptidase activity; Cellular component=chromatin; Biological process=DNA integration
  Homolog annotation: Hit_ID=Q7XM06; Match level="QueryCoverage=96%, HitCoverage=9%, E-value=2e-37, Identity=53%"; Hit description =OSJNBa0086O06.3 protein
MNVVKTIIRESVGSMQCSMLTKTNYMEWSSVMKVNLQVREMWDAVXYNNVDNHEDRRVLEALLAAVPLEMAANLSGKRTAKAAWDPITAAXVGSDCARKSILQKLQQEWDRLAFEPGEDVDDFILRLSCLMQRTERYDDDEINEEKAVCLK

SEQ ID NO: 73725 - protein, 472 aa, Setaria italica
  misc_feature (170)..(170): Xaa can be any naturally occurring amino acid
  misc_feature (188)..(188): Xaa can be any naturally occurring amino acid
  Transcript Sequence Number=SeqID_7751
  Gene Ontology: Mol. function=hydrolase activity, hydrolyzing O -glycosyl compounds; Biological process=carbohydrate metabolic process
  Homolog annotation: Hit_ID=B6U6P8; Match level="QueryCoverage=100%, HitCoverage=100%, E-value=0.0, Identity=83%"; Hit description =Glycosyl hydrolase, family 43 protein
  Pfam annotation: Domain name=Glyco_hydro_43; Domain location=161-424; Score=-84.4; E_value=2.2e-05; Accession=PF04616.6; Description =Glycosyl hydrolases family 43
MGMRSRHPKALGLRCYPASHRSLTLVLWSLAALVVVVNFHLIIIHKEEDESMSTHEIRRSIMRELEAVEEEKFRLSPPRSRRNPRAVRRKGERKPPTVVDEFLDESSAVHDMFFPESNMAVDPINGRNDSMYFYYPGRVWLDTDGKPIQAHGGGVLYDKKTKTYFWYGRXKDGKTYKAHSKGADRTFXDSVDIVGVSCYSSKDLWTWKNEGVVLRGEEKNVTHDLHKSNVLERPKVIYNDWTGKYVMWMHIDDANYTKASVGVAVSDSPTGPFTYLYSKRPHDCESRDMTIFKDDDGKAYLIYSSEDNSELHIGPLTDDYLDVTDVMRRFLIAQHREAPALFKHEGTYYMVTSGCTGWAPNTALAHAATSVMGPWETLGNPCVGGNEVFRSTTFFSQSTFVLPVPGLPGSFIFMADRWNPSDLRDSRYVWLPLTIGGVPDEAADYSFMFPLWSRVSIYWHKQWRLPEGWRDS

SEQ ID NO: 73726 - protein, 731 aa, Setaria italica
  Transcript Sequence Number=SeqID_7752
  Gene Ontology: Mol. function=sequence-specific DNA binding; Cellular component=nucleus; Biological process=regulation of transcription, DNA-dependent
  Homolog annotation: Hit_ID=Q4R0U0; Match level="QueryCoverage=99%, HitCoverage=90%, E-value=0.0, Identity=89%"; Hit description =Homeobox protein OCL1
  Pfam annotation: Domain name=Homeobox; Domain location=25-81; Score =92.9; E_value=1.1e-24; Accession=PF00046.21; Description=Homeobox domain
  Pfam annotation: Domain name=START; Domain location=241-473; Score =260.0; E_value=5.6e-75; Accession=PF01852.11; Description=START domain
  Pfam annotation: Domain name=Transposase_8; Domain location=22-105; Score=-1.0; E_value=0.044; Accession=PF01527.12; Description =Transposase
  Pfam module annotation: Pfam domain module=Homeobox::START::Transposas e_8; Domain location=25-81::241-473::22-105
DHLDAMSGGGEDEDDAEPGNPRKRKKRYHRHTPQQIQELEALFKECPHPDEKQRGELSRRLGLDPRQVKFWFQNRRTQMKTQLERHENALLKQENDKLRAENMTIREAMRTPMCGSCGSPAMLGEVSLEEQHLCIENARLKDELNRVYALATKFLGKPMAMLSGPMLQPHLSSLPMPSSSLELAVGGFRGLGSIPSATMPGSMSEFAGGVSSPLGTVITPARATGSAPPSMVGIDRSMLLELAISAMDELVKLAQIDEPLWLPSLNGSPNKEMLNFEEYAQSFLPCIGVKPVGYVSEASRESGLVIIDDSVALVETLMDERRWSDMFSCMIAKATILEEVTSGIAGSRNGALLLMKAELQVLSPLVPIREVTFLRFCKQLAEGAWAVVDVSIDGLVRDQNSATISNAGNVRCRRLPSGCVMQDTPNGYCKVTWVEHTEYDEASVHQLYRPLLRSGLAFGARRWLAMLQRQCECLAILMSPDTVSANDSSVITQEGKRSMLKLARRMTENFCAGVSASSAREWSKLDGATGSIGEDVRVMARKSVDEPGEPPGVVLSAATSVWVPVAPEKLFNFLRDEQLRAEWDILSNGGPMQEMANIAKGQEHGNSVSLLRASAMSANQSSMLILQETCTDASGSMVVYAPVDIPAMQLVMNGGDSTYVALLPSGFAILPDGPSTGADHKTGGSLLTVAFQILVNSQPTAKLTVESVETVNNLISCTIKKIKTALQWDSA

SEQ ID NO: 73727 - protein, 90 aa, Setaria italica
  Transcript Sequence Number=SeqID_7753
  Gene Ontology: Mol. function=oxidoreductase activity; Biological process=metabolic process
  Homolog annotation: Hit_ID=B9RAK5; Match level="QueryCoverage=97%, HitCoverage=23%, E-value=7e-17, Identity=55%"; Hit description=Short- chain dehydrogenase, putative
RELPECVSWFAFLVLRFLKLLQEPDTGVGAVLDAALAPPEESGKYFFGGKGRTIGSSRLSYDTEVAKKLWAESSAVFKELLLREGDFRDS

SEQ ID NO: 73728 - protein, 43 aa, Setaria italica
  Transcript Sequence Number=SeqID_7754
  Homolog annotation: Hit_ID=B6STJ6; Match level="QueryCoverage=79%, HitCoverage=9%, E-value=3e-10, Identity=88%"; Hit description =Flavonol 4-sulfotransferase
GSAGDWANHMTPEMAARLDGIIREKLQGTGLDFAQGSSRDVDV

SEQ ID NO: 73729 - protein, 422 aa, Setaria italica
  misc_feature (8)..(8): Xaa can be any naturally occurring amino acid
  misc_feature (173)..(173): Xaa can be any naturally occurring amino acid
  Transcript Sequence Number=SeqID_7755
  Gene Ontology: Mol. function=glycerol-3-phosphate O-acyltransferase activity; Cellular component=integral to membrane; Biological process=phospholipid biosynthetic process
  Homolog annotation: Hit_ID=B9T753; Match level="QueryCoverage=99%, HitCoverage=76%, E-value=1e-113, Identity=51%"; Hit description=ER glycerol-phosphate acyltransferase
  Pfam annotation: Domain name=Acyltransferase; Domain location=214 -332; Score=30.6; E_value=1.5e-06; Accession=PF01553.13; Description =Acyltransferase
VMALVTFXGLRPRDMDLVARAVLPKHYMEQLNALVYERLWLPSRRKVVVTSAPRAMSEWFLREYMAADAVVGPQLQVVTVGRRRYFTGLLTGPTQGTELRQNVLKEAFGAEGAMADVGVVSNPNPVDHHFAPYCKEVYVVSRESAKSAKLPRDKHPKALIFHDGRLAFLPTPXAMLAFFLFLPLGVILSVIRINIGIVLPFKIQLLAAAIFGLRYRTSGLRTPPADGKQRRGVLYVCTHRTLVDPIMLSSALQKPVPALTYSLSRLSELIAPIKTVRLTRDRARDAETMSRLLRQGDLAVCPEGTTCREPYLLRFSPLFAELADDMEPVALDAQVTALYGTTASGHKWLDPVAFFANPAPSYRVEFLGAVPREWTRAGGRTGVEVANWVQRRLGEALEFECTGLTRRDKYMMLAGNDGVVAK

SEQ ID NO: 73730 - protein, 110 aa, Setaria italica
  Transcript Sequence Number=SeqID_7756
  Gene Ontology: Mol. function=voltage-gated anion channel activity; Cellular component=mitochondrial outer membrane; Biological process =anion transport
  Homolog annotation: Hit_ID=B6TAU9; Match level="QueryCoverage=99%, HitCoverage=40%, E-value=4e-39, Identity=72%"; Hit description=Outer mitochondrial membrane protein porin
  Pfam annotation: Domain name=Porin_3; Domain location=1-103; Score= -86.1; E_value=0.073; Accession=PF01459.14; Description=Eukaryotic porin
TDLICFCDLEHKGDSLTASYYHLVNAEKNTAVGAEVTRSFSSKKNIVTFGTQHALDPSTTVKARYNSNGMASALIQHEWRPKSFVTLTTEVDTKAFEKSSKVGLSLVLKP

SEQ ID NO: 73731 - protein, 133 aa, Setaria italica
  Transcript Sequence Number=SeqID_7757
  Gene Ontology: Mol. function=voltage-gated anion channel activity; Cellular component=mitochondrial outer membrane; Biological process =anion transport
  Homolog annotation: Hit_ID=Q9SPD7; Match level="QueryCoverage=96%, HitCoverage=45%, E-value=7e-55, Identity=81%"; Hit description=Outer mitochondrial membrane protein porin
  Pfam annotation: Domain name=Porin_3; Domain location=1-126; Score =1.9; E_value=4.4e-07; Accession=PF01459.14; Description=Eukaryotic porin
TLDNNDTATGDFTKYNAGLNFTNTDLIASVTLNNKGDSLTASYYHLVNAEKNTAVGGELTHSFSSNENTLTFGTQHALDPLTTVKARFNNYGMASALIQHEWRPKSLVTISTEVDTKAIEKSSKVGLSLVLKP

SEQ ID NO: 73732 - protein, 51 aa, Setaria italica
  Transcript Sequence Number=SeqID_7758
MEVEAMLEDDVFFAELSKRISLLITDDDDGADFAAAAQFIPAAAPLPGFTS

SEQ ID NO: 73733 - protein, 354 aa, Setaria italica
  Transcript Sequence Number=SeqID_7759
  Gene Ontology: Mol. function=catalytic activity; Biological process =trehalose biosynthetic process
  Homolog annotation: Hit_ID=Q3ZTF5; Match level="QueryCoverage=97%, HitCoverage=89%, E-value=1e-128, Identity=65%"; Hit description =Trehalose-phosphate phosphatase
  Pfam annotation: Domain name=Trehalose_PPase; Domain location=93-337; Score=297.7; E_value=2.4e-86; Accession=PF02358.8; Description =Trehalose-phosphatase
TTPTSFPSPGLCLNTTKKIPLPGKVEEVRATGWLDLMMASSPTRKRQIKDVVNDTQADDLDLQYHNWMVDYPSALTSFETITDLAGSKRLALFLDYDGTLSPIVDNPANALMSDEMRAAVRHVASLFPTAIISGRSRDKVFDFVKLNELYYAGSHGMDIMGPVRKAADSNGVECIRSTDSQGKEVNLFQPASEFLPMITEVYEKLDESVKDIVGARMEDNKFCVSVHYRNVAEEDYKKVFQRVTAVLEDYPCLRLTHGRKVFEVRPVIDWNKGKAVEFLLESLGLNESEDVLPIYVGDDRTDEDAFKVLKASNRGFGILVSSIPKESDAFYSLRDPAEVMDFLRKLAAWKEQST

SEQ ID NO: 73734 - protein, 166 aa, Setaria italica
  Transcript Sequence Number=SeqID_7760
  Gene Ontology: Mol. function=hydrogen ion transporting ATP synthase activity, rotational mechanism; Cellular component=proton -transporting two-sector ATPase complex; Biological process=ATP metabolic process
  Homolog annotation: Hit_ID=P59227; Match level="QueryCoverage=98%, HitCoverage=100%, E-value=6e-57, Identity=72%"; Hit description=V -type proton ATPase 16 kDa proteolipid subunit c1/c3/c5
  Pfam annotation: Domain name=ATP-synt_C; Domain location=15-80; Score= 56.4; E_value=1.1e-13; Accession=PF00137.13; Description=ATP synthase subunit C
  Pfam annotation: Domain name=ATP-synt_C; Domain location=94-159; Score=85.2; E_value=2.4e-22; Accession=PF00137.13; Description=ATP synthase subunit C
  Pfam module annotation: Pfam domain module=ATP-synt_C::ATP-synt_C; Domain location=15-80::94-159
  Subcellular localization annotation: CTP_CleavageSite=27; ConfidenceScore=5.18e-01
MAVATFSGDETAPFFGFLGAAAALVFSCMGAAYGTAKSGVGVASMGVMRPELVMKSIVPVVMAGVLGIYGLIIAVIISTGINPKAKPYFLFDGYAHLSSGLACGLAGLAAGMAIGIVGDAGVRANAQQPKLFVGMILILIFAEALALYGLIVGIILSSRAGQSRAD

SEQ ID NO: 73735 - protein, 139 aa, Setaria italica
  misc_feature (6)..(6): Xaa can be any naturally occurring amino acid
  Transcript Sequence Number=SeqID_7761
  Gene Ontology: Mol. function=catalytic activity; Cellular component =chloroplast; Biological process=metabolic process
  Homolog annotation: Hit_ID=A7YF23; Match level="QueryCoverage=86%, HitCoverage=29%, E-value=8e-32, Identity=55%"; Hit description =Astaxanthin synthase KC17 (Fragment)
GMQAFXNFLPAELLEGQSKVQKLVESVDPLVRAVDGIAGERVSMRVDLECSNGRNTIGLFTHKKLSVSVGFGTAAFALAVLEGNTQPGVWFPEEPEGIPIEARKLLLERASQGTSNFVMNKPSWMVETDPKEVILGIYV

SEQ ID NO: 73736 - protein, 368 aa, Setaria italica
  Transcript Sequence Number=SeqID_7762
  Gene Ontology: Mol. function=catalytic activity; Cellular component =chloroplast; Biological process=metabolic process
  Homolog annotation: Hit_ID=Q2RAR7; Match level="QueryCoverage=76%, HitCoverage=80%, E-value=1e-125, Identity=79%"; Hit description =Saccharopine dehydrogenase family protein, expressed
  Pfam annotation: Domain name=3Beta_HSD; Domain location=18-236; Score= -125.0; E_value=0.018; Accession=PF01073.11; Description=3-beta hydroxysteroid dehydrogenaseisomerase family
  Pfam annotation: Domain name=Epimerase; Domain location=17-206; Score= -65.3; E_value=0.029; Accession=PF01370.13; Description=NAD dependent epimerasedehydratase family
  Pfam annotation: Domain name=F420_oxidored; Domain location=16-169; Score=-57.5; E_value=0.061; Accession=PF03807.9; Description=NADP oxidoreductase coenzyme F420-dependent
  Pfam annotation: Domain name=Ldh_1_N; Domain location=15-137; Score= -54.3; E_value=0.086; Accession=PF00056.15; Description=lactatemalate dehydrogenase, NAD bin
  Pfam annotation: Domain name=Saccharop_dh; Domain location=17-366; Score=235.7; E_value=1.1e-67; Accession=PF03435.10; Description =Saccharopine dehydrogenase
  Pfam annotation: Domain name=Shikimate_DH; Domain location=2-123; Score=-22.4; E_value=0.022; Accession=PF01488.12; Description =Shikimate  quinate 5-dehydrogenase
  Pfam annotation: Domain name=ThiF; Domain location=13-154; Score= -39.8; E_value=0.007; Accession=PF00899.13; Description=ThiF family
  Pfam annotation: Domain name=TrkA_N; Domain location=17-144; Score= -4.3; E_value=0.043; Accession=PF02254.10; Description=TrkA-N domain
  Pfam annotation: Domain name=adh_short; Domain location=15-167; Score= -55.9; E_value=0.065; Accession=PF00106.17; Description=short chain dehydrogenase
  Pfam module annotation: Pfam domain module=3Beta_HSD::Epimerase::F420_ oxidored::Ldh_1_N::Saccharop_dh::Shikimate_DH::ThiF::TrkA_N::adh _short; Domain location=18-236::17-206::16-169::15-137::17-366::2 -123::13-154::17-144::15-167
  Subcellular localization annotation: CTP_CleavageSite=3; ConfidenceScore=5.05e-01
APSADAAKRKPSRSARVLVLGGAGRVGGSTATALSKLRPDLNILVGDRNREKGESFAAKLGEKSEFVQVDIRNASLLEDVLQGVDLVVHTAGPFQRAEECTVLQAAISTKTAYIDVCDDTDFSWRAKGFHEQAKAAGVPAITTAGIYPGVSNVMAAELVHAAKSENGEPERLRFFYYTAGTGGAGPTILTTSFLLLGEDVIAYNKGEEIKLKPYSGALNIDFGKGVRKKNVYLLNLPEVKSAFKILGVPTVSARFGTAPFFWNWGMQAFTNFLPAEFLRDKSKVQKLVESVDPLVRAVDGIAGERVSMRVDLECSNGRNTIGLFTHKKLSVSVGFGTAAFALAVLEGNTQPGVWRPVVPKVGVAIEAR

SEQ ID NO: 73737 - protein, 222 aa, Setaria italica
  Transcript Sequence Number=SeqID_7763
  Gene Ontology: Mol. function=protein transporter activity; Cellular component=membrane coat; Biological process=intracellular protein transport
  Homolog annotation: Hit_ID=B6U245; Match level="QueryCoverage=90%, HitCoverage=23%, E-value=1e-114, Identity=99%"; Hit description =Adaptin N terminal region family protein
  Subcellular localization annotation: CTP_CleavageSite=6; ConfidenceScore=5.08e-01
MAPTVPSAAKSASPSQPSGKSEVADLKQQLRQLAGSRAPDADDQRRDVFKRVISCMTAGIDVSAAFGEMVLCSATSDVVTKKMCYLYVGAHARAHPDLALLTINFLQRDCRDQDPTIRGLALRSLCSLRVPNLVEYLVTPLTTGLKDPSAYVRMIAAVGAAKLYHISATACIDADLPASLKALMLSDPDAQVVANCLHALQEIWTLEAANSEAAAREIETLY

SEQ ID NO: 73738 - protein, 114 aa, Setaria italica
  Transcript Sequence Number=SeqID_7764
  Gene Ontology: Mol. function=ARF guanyl-nucleotide exchange factor activity; Cellular component=intracellular; Biological process =regulation of ARF protein signal transduction
  Homolog annotation: Hit_ID=B9S916; Match level="QueryCoverage=79%, HitCoverage=6%, E-value=5e-24, Identity=53%"; Hit description =Pattern formation protein, putative
IDAVTACRFEVTDPASEEAVLARVLQVLLACVRSRAAPALANRHVCAVVSTCFRVVQQAGTKGELLQRVSRQTMQEVIRSVFSRLQEIDVTVVSDEQLTGCKNQGLGAEEMENG

SEQ ID NO: 73739 - protein, 288 aa, Setaria italica
  Transcript Sequence Number=SeqID_7765
  Gene Ontology: Mol. function=DNA topoisomerase type I activity; Cellular component=chromosome; Biological process=DNA unwinding during replication
  Homolog annotation: Hit_ID=A3BAP2; Match level="QueryCoverage=100%, HitCoverage=25%, E-value=1e-143, Identity=80%"; Hit description=DNA topoisomerase
  Pfam annotation: Domain name=zf-C4_Topoisom; Domain location=211-252; Score=41.0; E_value=4.8e-09; Accession=PF01396.11; Description =Topoisomerase DNA binding C4 zinc finger
IQVDIGTPEGDMSFHSSASRLDFKGYQAVYGDSEASPSSDNSEGDAVHEANFEALSKLKVKDLVSPVNVHLGQHFTKPPPRYSEGALIKKLEELGIGRPSTYASILKVLQDRKYVTIKSRALHPEFRGRMVSAFVLHHFSEVADYSFTANMETELDNVSAGSTEWKGLLKDYWERFSKYCADASKLDGRKVERMFEEKFGPILFPDDDKDSRICPSCSEGTLRFKVSRYGEGYFIGCDRHPKCKYIARSLSQQEDDTEPTEESPKSFEPRLLGVMPDSDEKVFLKQGP

SEQ ID NO: 73740 - protein, 208 aa, Setaria italica
  misc_feature (21)..(21): Xaa can be any naturally occurring amino acid
  Transcript Sequence Number=SeqID_7766
  Gene Ontology: Mol. function=DNA topoisomerase type I activity; Cellular component=chromosome; Biological process=DNA unwinding during replication
  Homolog annotation: Hit_ID=A3BAP2; Match level="QueryCoverage=91%, HitCoverage=15%, E-value=3e-77, Identity=73%"; Hit description=DNA topoisomerase
  Pfam annotation: Domain name=zf-C4_Topoisom; Domain location=13-52; Score=17.3; E_value=0.0021; Accession=PF01396.11; Description =Topoisomerase DNA binding C4 zinc finger
INILFFCVCVSNSCSCSEGTXLRFKVSRYGEGYFIGCDRHPKCKYIARSLSQQEDDTEPIDESPKSFEPRLLGVMPDSDKKVFLKQGPYGHYVQVGEDKKGLFPKRASLSEELKTTVIDLLFQVKDIDTVTLEDAIELLQYPKILGKHPDDEHPVLITHSKLGYNIKHRRSLAAVPKNMDPKEITLERALKLLSGKSVRQIGRPKGKD

SEQ ID NO: 73741 - protein, 169 aa, Setaria italica
  Transcript Sequence Number=SeqID_7767
  Gene Ontology: Mol. function=DNA topoisomerase type I activity; Cellular component=chromosome; Biological process=DNA unwinding during replication
  Homolog annotation: Hit_ID=A3BAP2; Match level="QueryCoverage=98%, HitCoverage=14%, E-value=4e-72, Identity=75%"; Hit description=DNA topoisomerase
NYEHPKCKYIARSLSQQEDDTEPIDESPKSFEPRLLGVMPDSDEKVFLKQGPYGHYVQIGEDKKGLYPKRASLSEVKDIDTVTLEDAIELLQYPKILGKHPDDDHPVLITHSKVGYNIKHRRSLAAVPKNMDPKEITLEHALKLLSGKSVRQIGRPKGKAKKKEPLEWH

SEQ ID NO: 73742 - protein, 241 aa, Setaria italica
  Transcript Sequence Number=SeqID_7768
  Gene Ontology: Cellular component=membrane
  Homolog annotation: Hit_ID=Q8H827; Match level="QueryCoverage=75%, HitCoverage=82%, E-value=7e-79, Identity=73%"; Hit description =Nodulin-like protein
  Pfam annotation: Domain name=DUF6; Domain location=103-232; Score =29.0; E_value=2e-05; Accession=PF00892.12; Description=Integral membrane protein DUF6
  Pfam annotation: Domain name=DUF606; Domain location=108-229; Score= -61.8; E_value=0.072; Accession=PF04657.5; Description=Protein of unknown function, DUF606
  Pfam module annotation: Pfam domain module=DUF6::DUF606; Domain location=103-232::108-229
SLYYYGLQDTTASYAIIFLNIIPLTTFILSFVLRMEALHIRSMLGLLKIAGVLLSVGGTMIISLYKGKILHLWNPILHRHNEEDVDVASHHLRGTILLAASSFMFACWYLIQSKVLKVYPYKYWSSMATCLVGGFQTALAGVILRRDKNAWKIGWDINLVTIVYSGALATAGKYSLNSWAVAKKGPSYPPMFSPLSVVFTVVLGSIFIGDDITIGSLIGTILVIVGTYVFLWAKANELPEK

SEQ ID NO: 73743 - protein, 208 aa, Setaria italica
  Transcript Sequence Number=SeqID_7769
  Gene Ontology: Mol. function=protein serine/threonine kinase activity; Biological process=protein amino acid phosphorylation
  Homolog annotation: Hit_ID=Q5N7S6; Match level="QueryCoverage=100%, HitCoverage=22%, E-value=1e-100, Identity=83%"; Hit description =Receptor serine/threonine kinase PR5K-like
  Pfam annotation: Domain name=Pkinase; Domain location=1-205; Score =71.3; E_value=3.6e-18; Accession=PF00069.17; Description=Protein kinase domain
  Pfam annotation: Domain name=Pkinase_Tyr; Domain location=4-207; Score=9.3; E_value=2.4e-14; Accession=PF07714.9; Description=Protein tyrosine kinase
  Pfam module annotation: Pfam domain module=Pkinase::Pkinase_Tyr; Domain location=1-205::4-207
FAVKLGQGGFGAVYKGNLSDGGQVAVKMLKDVKGDGEEFMNEVASISRTSHVNVVTLLGFCLQGSKRALIYEYMPNGSLERYTFGTNINSENILSWEKLFEIAIGIARGLEYLHRGCNTRIVHFDIKPHNILLDQDFCPKISDFGLAKLCLNKESAISIVGARGTIGYIAPEVYSKRFGTVSSKSDVYSYGMMVLELVGARDKNINAD

SEQ ID NO: 73744 - protein, 84 aa, Setaria italica
  misc_feature (68)..(68): Xaa can be any naturally occurring amino acid
  Transcript Sequence Number=SeqID_7770
  Gene Ontology: Cellular component=integral to membrane
  Homolog annotation: Hit_ID=Q5VMW2; Match level="QueryCoverage=82%, HitCoverage=34%, E-value=4e-18, Identity=60%"; Hit description =Embryogenesis transmembrane protein-like
NHKRYKAFPKSETDELDEKRGWLMVLATLTASITYSAALNPPGGVWQADDATNGYVAGSPVLLSKPPXRYKAFYYFNVMSFLVS

SEQ ID NO: 73745 - protein, 115 aa, Setaria italica
  Transcript Sequence Number=SeqID_7771
  Subcellular localization annotation: CTP_CleavageSite=24; ConfidenceScore=5.10e-01
MASSKSIASPALVFLAMALMLAACAQALAPAPTPAPAPSQGSCPPGFKSYLDLTDFIRGAGRMAITFVDPALVPVVQSILTLIPHTGLKLCVCFESCHLPSPSNVCHTKHGTTSM

SEQ ID NO: 73746 - protein, 362 aa, Setaria italica
  Transcript Sequence Number=SeqID_7772
  Gene Ontology: Mol. function=hydrolase activity, hydrolyzing O -glycosyl compounds; Cellular component=cytosolic ribosome; Biological process=carbohydrate metabolic process
  Homolog annotation: Hit_ID=Q8LF56; Match level="QueryCoverage=100%, HitCoverage=72%, E-value=1e-160, Identity=71%"; Hit description=Beta- glucosidase, putative
  Pfam annotation: Domain name=Glyco_hydro_1; Domain location=1-361; Score=291.3; E_value=2.1e-84; Accession=PF00232.10; Description =Glycosyl hydrolase family 1
LYHWDLPQALEDRYNGWLDRQIVNDFAAYAETCFKAFGDRVVSTWITINEPHTVAVQGYDAGLHAPGRCSVLLHLYCKSGNSGTEPYIVAHNFILAHATVSDIYRRKYKATQNGQLGIAFDVIWYEPMTNSTIDIEATKRAQEFQLGWFADPFFFGDYPATMRTRVAERLPKFTAEEAALVKGALDFVGINHYTTFYTRHNDTNIIGVLLNDTLADTGTISLPFDKNGKPIGDRANSIWLYIVPSGMRKLMNYVKERYNSPPVYITENGMDDSNNPFTSIKDALKDSKRIKYHNDYLTNLAASIKEDGCDVRGYFAWSLLDNWEWAAGYTSRFGLYFVDYRDNLKRYPKNSVQWFKSLLSSS

SEQ ID NO: 73747 - protein, 192 aa, Setaria italica
  Transcript Sequence Number=SeqID_7773
  Gene Ontology: Mol. function=serine-type endopeptidase activity; Biological process=negative regulation of catalytic activity
  Homolog annotation: Hit_ID=Q6H732; Match level="QueryCoverage=97%, HitCoverage=68%, E-value=4e-57, Identity=59%"; Hit description =Subtilisin-like serine protease AIR3-like protein
PAIKSAIMTTAMEMDNKGELILNASSLPSSPFGYGAGHVSPARAMNPGLVYDLGDADYLDFLCALKYNATVMAMFNGAPYTCPGEAPRRVADLNYPSITVVNVTAAGATARRRVKNVGRPGTYWAFVVEPAGVAVSVTPNVLEFRAKGEEKGFEVSFQVKNAALAKDYSFGALVWTNGKQFVRSPLVVKALA

SEQ ID NO: 73748 - protein, 59 aa, Setaria italica
  Transcript Sequence Number=SeqID_7774
KVDSFLKICQILGLAGIDLLYTPSDVVEKRNVRKVCICIRSVSKKSHMMRLNVPDFDIV

SEQ ID NO: 73749 - protein, 202 aa, Setaria italica
  misc_feature (137)..(137): Xaa can be any naturally occurring amino acid
  Transcript Sequence Number=SeqID_7775
MRRAQQQGGPAGAVRVDEASSASTFRELDDAFLQKQTKIWLGEVLHLRFDEDVLVADLLAYGELLFQVSKVLWKRLLKKNREQLKQSKVYIYERLSFGRSNGKYMPYSKVDSFLKICQILGLAGIDLFTPSDVVEKXNVRKVCICIRSVSKKSHMMRLNVPDFDIVTYTISMPNYIVGGICRSLEQPQYSSSGSSGYSPVTV

SEQ ID NO: 73750 - protein, 140 aa, Setaria italica
  Transcript Sequence Number=SeqID_7776
  Gene Ontology: Cellular component=nucleus; Biological process =regulation of transcription, DNA-dependent
  Homolog annotation: Hit_ID=B6T7Q6; Match level="QueryCoverage=100%, HitCoverage=56%, E-value=3e-57, Identity=82%"; Hit description=PnFL-2
  Pfam annotation: Domain name=CCT_2; Domain location=84-110; Score =60.1; E_value=8.2e-15; Accession=PF09425.2; Description=Divergent CCT motif
  Pfam annotation: Domain name=tify; Domain location=1-28; Score=49.5; E_value=1.3e-11; Accession=PF06200.6; Description=tify domain
  Pfam module annotation: Pfam domain module=CCT_2::tify; Domain location=84-110::1-28
  Subcellular localization annotation: CTP_CleavageSite=66; ConfidenceScore=5.07e-01
TIFYGGKVLVFNDFPADKAKDLMQLASKGSPVVQNVGLPQPSAPATVTDNAKVHKVMPAPVSSLPVAQAADAQKPARTNASDMPIARKASLHRFLEKRKDRLNAKTPYQTSPADAAPVKKEPESQPWLGLGPNAAKSNLS

SEQ ID NO: 73751 - protein, 41 aa, Setaria italica
  Transcript Sequence Number=SeqID_7777
  Homolog annotation: Hit_ID=B6T7Q6; Match level="QueryCoverage=100%, HitCoverage=17%, E-value=5e-12, Identity=85%"; Hit description=PnFL-2
MAASARPGEKATSFAMACSLLSRFVRQNGPAAAELGLGMKG

SEQ ID NO: 73752 - protein, 96 aa, Setaria italica
  Transcript Sequence Number=SeqID_7778
  Homolog annotation: Hit_ID=B6T7Q6; Match level="QueryCoverage=96%, HitCoverage=38%, E-value=3e-33, Identity=78%"; Hit description=PnFL-2
  Pfam annotation: Domain name=CCT_2; Domain location=40-66; Score =60.1; E_value=8.2e-15; Accession=PF09425.2; Description=Divergent CCT motif
  Subcellular localization annotation: CTP_CleavageSite=22; ConfidenceScore=5.03e-01
LVLPTNAKVHKVMPAPVSSLPVAQAADAQKPARTNASDMPIARKASLHRFLEKRKDRLNAKTPYQTSPADAAPVKKEPESQPWLGLGPNAAKSNLS

SEQ ID NO: 73753 - protein, 163 aa, Setaria italica
  Transcript Sequence Number=SeqID_7779
  Gene Ontology: Cellular component=nucleus; Biological process =regulation of transcription, DNA-dependent
  Homolog annotation: Hit_ID=B6T7Q6; Match level="QueryCoverage=93%, HitCoverage=62%, E-value=8e-61, Identity=81%"; Hit description=PnFL-2
  Pfam annotation: Domain name=CCT_2; Domain location=107-133; Score =60.1; E_value=8.2e-15; Accession=PF09425.2; Description=Divergent CCT motif
  Pfam annotation: Domain name=tify; Domain location=16-51; Score=72.6; E_value=1.4e-18; Accession=PF06200.6; Description=tify domain
  Pfam module annotation: Pfam domain module=CCT_2::tify; Domain location=107-133::16-51
MFLVFLCVIILREPEKKDKSQQLTIFYGGKVLVFNDFPADKAKDLMQLASKGSPVVQNVGLPQPSAPATVTDNAKVHKVMPAPVSSLPVAQAADAQKPARTNASDMPIARKASLHRFLEKRKDRLNAKTPYQTSPADAAPVKKEPESQPWLGLGPNAAKSNLS

SEQ ID NO: 73754 - protein, 237 aa, Setaria italica
  Transcript Sequence Number=SeqID_7780
  Gene Ontology: Cellular component=nucleus; Biological process =regulation of transcription, DNA-dependent
  Homolog annotation: Hit_ID=B6T7Q6; Match level="QueryCoverage=100%, HitCoverage=99%, E-value=1e-96, Identity=77%"; Hit description=PnFL-2
  Pfam annotation: Domain name=CCT_2; Domain location=181-207; Score =60.1; E_value=8.2e-15; Accession=PF09425.2; Description=Divergent CCT motif
  Pfam annotation: Domain name=tify; Domain location=90-125; Score =72.6; E_value=1.4e-18; Accession=PF06200.6; Description=tify domain
  Pfam module annotation: Pfam domain module=CCT_2::tify; Domain location=181-207::90-125
MAASARPGEKATSFAMACSLLSRFVRQNGPAAAELGLGMKGEAEPQRAPATMSLLPTAEAEEAERKKETMELFPQSAGFGVQDAAREPEKKDKSQQLTIFYGGKVLVFNDFPADKAKDLMQLASKGSPVVQNVGLPQPSAPATVTDNAKVHKVMPAPVSSLPVAQAADAQKPARTNASDMPIARKASLHRFLEKRKDRLNAKTPYQTSPADAAPVKKEPESQPWLGLGPNAAKSNLS

SEQ ID NO: 73755 - protein, 93 aa, Setaria italica
  Transcript Sequence Number=SeqID_7781
  Gene Ontology: Mol. function=binding; Cellular component =mitochondrial inner membrane; Biological process=transport
  Homolog annotation: Hit_ID=B6TIB3; Match level="QueryCoverage=87%, HitCoverage=23%, E-value=1e-22, Identity=70%"; Hit description =Mitochondrial carrier-like protein
  Pfam annotation: Domain name=Mito_carr; Domain location=1-88; Score =78.0; E_value=3.4e-20; Accession=PF00153.19; Description =Mitochondrial carrier protein
GGVSAAVAAQVVWTPVDVVSQRLMVQTAPAPAAAHYRGGADAFRKILVADGVRGLYRGFGVSVLTYAPSSAAWWASYATAQRLLWRAVGPAHH

SEQ ID NO: 73756 - protein, 142 aa, Setaria italica
  Transcript Sequence Number=SeqID_7782
  Subcellular localization annotation: CTP_CleavageSite=81; ConfidenceScore=5.79e-01
LPSAAPWSKSSSQKSSPFGKLASRTTISSLHRRPLHFPDVRRPATLHPRNYSTSLSAGPPQARNSSSIQRARRHLDEAACRFEAGVHRSVWRGIDSGWPPSIWGCDSSIRAARHRLEAGGSSIRAAWLRFRATAPRFEGRRV

SEQ ID NO: 73757 - protein, 95 aa, Setaria italica
  Transcript Sequence Number=SeqID_7783
  Gene Ontology: Mol. function=calcium ion binding; Cellular component =oxygen evolving complex; Biological process=photosynthesis
  Homolog annotation: Hit_ID=Q41048; Match level="QueryCoverage=100%, HitCoverage=46%, E-value=5e-20, Identity=56%"; Hit description =Oxygen-evolving enhancer protein 3-1, chloroplastic
  Pfam annotation: Domain name=PsbQ; Domain location=3-95; Score=-43.2; E_value=0.016; Accession=PF05757.3; Description=Oxygen evolving enhancer protein 3 (PsbQ)
GLSQGVLPSRRAASRARTAVVRASADGEAGRRAVLGLVATGIVGSVFSQAAHAEAVKTIKIGPPPPPSGGLPGTLNSDQARDFDLALKERFYLQP

SEQ ID NO: 73758 - protein, 172 aa, Setaria italica
  Transcript Sequence Number=SeqID_7784
MKRENCTTIPRRSVERSRGREKGRRVLESSLSAAEPAHQPGMDAKNVGNEQEAQQKLDAVTGSVPRPNQETLKQFADSDAGNISPANGQEADVNMEAAISTEDVMRAGGFGAKDDIGSLLPTAIDSTDFEASLRDARDFEGEKEAPSHPGLGWKGEKADDGSKPSDVPQQLP

SEQ ID NO: 73759 - protein, 278 aa, Setaria italica
  Transcript Sequence Number=SeqID_7785
  Homolog annotation: Hit_ID=Q9XIC8; Match level="QueryCoverage=36%, HitCoverage=16%, E-value=4e-21, Identity=46%"; Hit description =F23M19.10
  Pfam annotation: Domain name=DUF292; Domain location=1-73; Score =41.7; E_value=3e-09; Accession=PF03398.6; Description=Eukaryotic protein of unknown function, DUF292
QNALDVLAELEAYCGLIVERAALVDAHRECPEELREAAAGLVYAAARCGDLPELQEVRGILAAKFGRGFVSAASELRSGCGINPKIVQKLSTKQPSLESRQMVLQEIAAEKGFAVSVYEPPPCEGSGRSNHNRRKTKHDEEMIRMPPADDLDEDVSGDSAQRYKDVEAAAQAAFESAASAAAAAKAAMELSRGESRGPGDRGKTGTTRMDDESKKEGEMLDGKTSEKIGHARNYSSEIEILPEDEADHGDVAVKEQKHHEQREPARGKPASVRTKWGF

SEQ ID NO: 73760 - protein, 127 aa, Setaria italica
  Transcript Sequence Number=SeqID_7786
  Gene Ontology: Mol. function=hydrolase activity; Biological process =metabolic process
MGDITDAATPAADAPAPPPALTKENNLFMRIAVNPDGTVTRPEVPLVPASESAAAAVSRDVPLDASLGTYLRLYLPNPVPPPTSPATSNNNKLPVVLFFHGGGFVLFSPATVFYHAHCEAMAAAVPC

SEQ ID NO: 73761 - protein, 330 aa, Setaria italica
  Transcript Sequence Number=SeqID_7787
  Gene Ontology: Mol. function=nucleic acid binding; Cellular component= ribonucleoprotein complex; Biological process=RNA splicing
  Homolog annotation: Hit_ID=B9SVT1; Match level="QueryCoverage=100%, HitCoverage=60%, E-value=1e-131, Identity=68%"; Hit description =U4/U6 small nuclear ribonucleoprotein Prp4, putative
  Pfam annotation: Domain name=WD40; Domain location=110-148; Score =39.1; E_value=1.8e-08; Accession=PF00400.24; Description=WD domain, G-beta repeat
  Pfam annotation: Domain name=WD40; Domain location=152-190; Score =41.8; E_value=2.8e-09; Accession=PF00400.24; Description=WD domain, G-beta repeat
  Pfam annotation: Domain name=WD40; Domain location=194-232; Score =47.3; E_value=5.9e-11; Accession=PF00400.24; Description=WD domain, G-beta repeat
  Pfam annotation: Domain name=WD40; Domain location=236-275; Score =28.2; E_value=3.3e-05; Accession=PF00400.24; Description=WD domain, G-beta repeat
  Pfam annotation: Domain name=WD40; Domain location=27-65; Score=22.5; E_value=0.0018; Accession=PF00400.24; Description=WD domain, G-beta repeat
  Pfam annotation: Domain name=WD40; Domain location=279-317; Score =45.6; E_value=1.9e-10; Accession=PF00400.24; Description=WD domain, G-beta repeat
  Pfam annotation: Domain name=WD40; Domain location=69-107; Score =41.6; E_value=3.2e-09; Accession=PF00400.24; Description=WD domain, G-beta repeat
  Pfam module annotation: Pfam domain module=WD40::WD40::WD40::WD40::WD4 0::WD40::WD40; Domain location=110-148::152-190::194-232::236-275::27- 65::279-317::69-107
RAKRRHEDPDEDPEAEADLVVKQAGEFVLECSEIGDDRPLTGCSFSRDASLLATSSWSGLIKIWSMPQITKVATLKGHTERATDVAFSPADDCLATASADKTAKLWKPDGSLLMSFDGHLDRLARVAFHPSGKYLGTASFDKTWRLWDINTGKELLLQEGHSRSVYGVSFHPDGSLVASCSLDAYARVWDLRSGRLFFTLKGHVKPVLGISFSPNGYLVATGSEDNFCRIWDLRKKEMLYSIPAHKSLVSQVKFEPQEGYYLATSSYDTKAALWSARDYKPIKSLVGHESKVTSLDISGDGQQIVTVAHDRTIKIWSCRSSIQDNAMELD

SEQ ID NO: 73762 - protein, 80 aa, Setaria italica
  Transcript Sequence Number=SeqID_7788
  Gene Ontology: Cellular component=plasma membrane
  Homolog annotation: Hit_ID=O22632; Match level="QueryCoverage=100%, HitCoverage=100%, E-value=4e-37, Identity=92%"; Hit description =Nitrate-induced NOI protein
  Pfam annotation: Domain name=NOI; Domain location=1-73; Score=160.0; E_value=7.2e-45; Accession=PF05627.3; Description=Nitrate-induced NOI protein
MAEESGRPLPKFGEWDVNDPASADGFTVIFNKARDEKKGGNGQETESPSKDTRTERVESYAAKPNSKKWFCCVTSSPTQS

SEQ ID NO: 73763 - protein, 337 aa, Setaria italica
  Transcript Sequence Number=SeqID_7789
  Gene Ontology: Mol. function=binding; Cellular component=oxygen evolving complex; Biological process=photosynthesis
  Homolog annotation: Hit_ID=Q337M8; Match level="QueryCoverage=72%, HitCoverage=62%, E-value=1e-104, Identity=78%"; Hit description =Tetratricopeptide repeat, putative, expressed
  Pfam annotation: Domain name=TPR_1; Domain location=205-238; Score =8.6; E_value=0.54; Accession=PF00515.20; Description=Tetratricopeptid e repeat
  Pfam annotation: Domain name=TPR_1; Domain location=243-276; Score =34.2; E_value=5.1e-07; Accession=PF00515.20; Description =Tetratricopeptide repeat
  Pfam annotation: Domain name=TPR_1; Domain location=277-310; Score =38.8; E_value=2.1e-08; Accession=PF00515.20; Description =Tetratricopeptide repeat
  Pfam annotation: Domain name=TPR_2; Domain location=205-238; Score =13.2; E_value=0.77; Accession=PF07719.9; Description=Tetratricopeptid e repeat
  Pfam annotation: Domain name=TPR_2; Domain location=243-276; Score =32.0; E_value=2.4e-06; Accession=PF07719.9; Description =Tetratricopeptide repeat
  Pfam annotation: Domain name=TPR_2; Domain location=277-310; Score =35.1; E_value=2.8e-07; Accession=PF07719.9; Description =Tetratricopeptide repeat
  Pfam module annotation: Pfam domain module=TPR_1::TPR_1::TPR_1::TPR _2::TPR_2::TPR_2; Domain location=205-238::243-276::277-310::205 -238::243-276::277-310
  Subcellular localization annotation: CTP_CleavageSite=45; ConfidenceScore=5.26e-01
MARLLLFPSQAWVDPGRLLLRPAAPSSVAKPSAHCHHGGRVFIARAAERASVTTPAGARRLGVLPAVRRRPLPSLCWKEGASLGISPTRGVILASEIEEAFCLSSDKDNRSSRNLLLQFGALPCCTMVWLSTAQSAQSSVGTKLNMVYEVGELFELGIQLSYLLILLGLLGAGTFFVIRQVLVRRELDLSAKELQEQVRSGDASATEYFELGAVMLRRKFYPAAIKYLQQAIDKWDRDEQDLAQVYNALGVSYKRDNKLDMAIKQFEKAVELQPGYVTAWNNLGDAYELKKDLKSALKAFEEVLLFDPNNKVARPRVDDLRQRANMYKGVPIKSEKR

SEQ ID NO: 73764 - protein, 63 aa, Setaria italica
  misc_feature (63)..(63): Xaa can be any naturally occurring amino acid
  Transcript Sequence Number=SeqID_7790
VLCVVPCRSTRADPVRAARSYMDQDCPISCPYPLQITTPCSKLLSSSYFPLRPRIPAAHTCKX

SEQ ID NO: 73765 - protein, 94 aa, Setaria italica
  Transcript Sequence Number=SeqID_7791
ENEQFRDLTNEKTPDEEIVAGSYRTCPHWIRTSGPAWNNARELGSSGCLSISTGLDLVYQSLSWPTDRLPVKPLPKAPSPHTDGITEVPENILR

SEQ ID NO: 73766 - protein, 62 aa, Setaria italica
  Transcript Sequence Number=SeqID_7792
IYHYFVGQDQPLIKFCNNRDHLCCLNATKQKVLLLDAEFDSACYCLCLKFFSKTPLALDCYQ

SEQ ID NO: 73767 - protein, 64 aa, Setaria italica
  Transcript Sequence Number=SeqID_7793
SNYGSVAKLHPEITNVEQLEHAMNIVTCKKNRQALHLQTLHRARHPEENKLLILSYKIDNGSQR

SEQ ID NO: 73768 - protein, 98 aa, Setaria italica
  Transcript Sequence Number=SeqID_7794
LTCLSCPLDYNIHSRHRTNSLCITMDVHYEFQMQCAIGLNEKTPDEEIVAGSYRTCPHRIRTSGPAWNNARNLGSSGCHQTHGAATRRRPRRPHRAAT

SEQ ID NO: 73769 - protein, 139 aa, Setaria italica
  Transcript Sequence Number=SeqID_7795
FFSKNSLALDCYLEGRILQSLLSKYHSFASCAFCQTHHRHGGCAPLDKLVLILVQQSHQIPSLEEFSADELGFMAVLPRPPPSKLKITVLHYCSPLSCPYLSSRNLNPPMSTSTMLLMNQWKSGTACRSVSDLHVEDGN

SEQ ID NO: 73770 - protein, 68 aa, Setaria italica
  Transcript Sequence Number=SeqID_7796
TIGSLPAPARSTSRWRHDVDGGASWWRRHGSGGIRSSLGPVRCSMQVHSCGSGEGIRTPHRAFSLVTI

SEQ ID NO: 73771 - protein, 86 aa, Setaria italica
  Transcript Sequence Number=SeqID_7797
SKYINSYKAINPTRSAPRTKFGLANLIVSVTGSKKHRLLCIKGKEDHAWKEGYCKVFCQNITALPPVHFVKHITGMADVLPWTSWC

SEQ ID NO: 73772 - protein, 97 aa, Setaria italica
  Transcript Sequence Number=SeqID_7798
YIIYGYTTLHIIEFLFSESDMTPLVARLFQLQGFTHFNWNVARFLHLYFIIYNYTIIEAFLSTCDIVIRNLLLSCSIASSGGSEYNEVTSKLQERIH

SEQ ID NO: 73773 - protein, 142 aa, Setaria italica
  Transcript Sequence Number=SeqID_7799
  Subcellular localization annotation: CTP_CleavageSite=61; ConfidenceScore=5.44e-01
PLATRRPACPVLASHSPPAAATRFSLIRRFCDSVSCPPSIYLRRRRQDSPGAAWRQPAGASSTMLDPPQELIGSLPAPARSTSRWRHDVDGGASWWRRHGSGGIRSSLGPVRCSMQVHSCGSGEGRYSSSLLRSPHRAFFHW

SEQ ID NO: 73774 - protein, 114 aa, Setaria italica
  Transcript Sequence Number=SeqID_7800
FFLKRKNIYTPNCFLSSSLYDTLDVCRISFLHIIEFLFLESDMTPLVARLFQLQRFTHFNWNVARFLHLYFIIYNYTIIETFLSTCDIVICNLGVMHIHAPVIFRDDRSFCSNF

SEQ ID NO: 73775 - protein, 102 aa, Setaria italica
  Transcript Sequence Number=SeqID_7801
  Gene Ontology: Mol. function=metal ion binding; Cellular component =nucleus; Biological process=regulation of transcription, DNA -dependent
  Homolog annotation: Hit_ID=Q0J0K1; Match level="QueryCoverage=86%, HitCoverage=19%, E-value=1e-19, Identity=56%"; Hit description =Squamosa promoter-binding-like protein 18
  Subcellular localization annotation: CTP_CleavageSite=33; ConfidenceScore=5.45e-01
PQPDTMNSGSFMTSQQGLFSSAGTRFSSFPAPRPEASWSGVIKSEDSSYYTHHQVLSARPHFAGSAAAAYSKEGRRFPFLQDGDQVSFGAGAAAAALEASTA

SEQ ID NO: 73776 - protein, 47 aa, Setaria italica
  Transcript Sequence Number=SeqID_7802
YAFKSRVHAASMKKGTHISRTTVVQPCVEAIHSFHIDEDTMPLMGCA

SEQ ID NO: 73777 - protein, 112 aa, Setaria italica
  misc_feature (71)..(71): Xaa can be any naturally occurring amino acid
  Transcript Sequence Number=SeqID_7803
  Gene Ontology: Mol. function=hydrolase activity; Cellular component =cytoplasm
  Homolog annotation: Hit_ID=Q5JJU5; Match level="QueryCoverage=98%, HitCoverage=40%, E-value=7e-40, Identity=76%"; Hit description=5 -oxoprolinase-like
DPEIFEQRYPVLLHRFSIRENSGGSGFRRGGDGLVREIEFRRPIVVSILSERRVHAPRGLKGGAHGARGAXNYLVRKDGRKIYLGGKNTVTVSAGDVLQIFTPGGGGFGSLC

SEQ ID NO: 73778 - protein, 410 aa, Setaria italica
  Transcript Sequence Number=SeqID_7804
  Gene Ontology: Mol. function=hydrolase activity; Cellular component =cytosol
  Homolog annotation: Hit_ID=Q9FIZ7; Match level="QueryCoverage=98%, HitCoverage=32%, E-value=0.0, Identity=76%"; Hit description=5 -oxoprolinase
  Pfam annotation: Domain name=Hydantoinase_B; Domain location=1-407; Score=377.7; E_value=2.1e-110; Accession=PF02538.6; Description =Hydantoinase Boxoprolinase
EGPTNAEIGGITPGSMPPFSKCIWEEGAAIKTFKLVERGVFQEEGIVQLLQSPCSDELSGYKIPGTRRIQDNLSDLRAQVAANQRGIALIKELINQYGLATVQSYMSHVQKNAEVAVREMLKAVASRVQKENGSCVIEDEDYMDDGSVLHLKLTLDASKGEATIDFEGTSPEVYGNWNAPEAVTTAAVIYCLRCLVDVDIPLNQGCLAPVKILIPKGSFLSPSDKAAVVGGNVLTSQRVTDVVLMAFQACACSQGCMNNLTFGDDTFGYYETIGGGCGAGPTWDGTSGVQCHMTNTRMTDPEIFEQRYPVLLHRFSIRENSGGSGFRRGGDGPLEFNEFRRRMDLSSLSEQLLHAPRGLKGGAHGARGANYLVRKDGRKIYLGGKNTVTVSAGDVLQIFTPGGGGFGSLC

SEQ ID NO: 73779 - protein, 163 aa, Setaria italica
  Transcript Sequence Number=SeqID_7805
  Gene Ontology: Mol. function=DNA photolyase activity; Cellular component=mitochondrion; Biological process=protein-chromophore linkage
  Homolog annotation: Hit_ID=Q651U1; Match level="QueryCoverage=98%, HitCoverage=27%, E-value=1e-87, Identity=91%"; Hit description =Cryptochrome DASH, chloroplastic/mitochondrial
  Pfam annotation: Domain name=FAD_binding_7; Domain location=1-161; Score=57.3; E_value=1.3e-16; Accession=PF03441.6; Description=FAD binding domain of DNA photolyase
DYFRFLSAKYGNSIFHLGGPRKVASKWSQDQALFESWREGKTGYPLIDANMRELSATGFMSNRGRQIVCSFLVRDMGIDWRMGAEWFETCLLDYDPASNYGNWTYGAGVGNDPREDRYFSIPKQAKTYDPEGEYVAYWLPELQSLTKERRNFPGASYIRQINT

SEQ ID NO: 73780 - protein, 106 aa, Setaria italica
  Transcript Sequence Number=SeqID_7806
  Gene Ontology: Mol. function=acid-amino acid ligase activity; Cellular component=intracellular; Biological process=ubiquitin -dependent protein catabolic process
  Homolog annotation: Hit_ID=Q6YU89; Match level="QueryCoverage=62%, HitCoverage=3%, E-value=1e-14, Identity=63%"; Hit description =Putative HECT ubiquitin-protein ligase 3
GAINKDHQEGSINALKGKGKAVLKSSLDEPKGPHTRNAARRKAASENDVELKPSNGHSTLEDEDLDASPVEIDDALMIDDDDEDVSQDEDADHEVLQGSRPACVPE

SEQ ID NO: 73781 - protein, 241 aa, Setaria italica
  Transcript Sequence Number=SeqID_7807
  Gene Ontology: Mol. function=cytokinin dehydrogenase activity; Cellular component=extracellular region; Biological process =cytokinin metabolic process
  Homolog annotation: Hit_ID=B6V8F7; Match level="QueryCoverage=98%, HitCoverage=45%, E-value=1e-108, Identity=82%"; Hit description =Cytokinin dehydrogenase 10
  Pfam annotation: Domain name=Cytokin-bind; Domain location=1-231; Score=321.1; E_value=2.2e-93; Accession=PF09265.2; Description =Cytokinin dehydrogenase 1, FAD and cytok
PIPGGARFDASLLPAGAGPVLYCLEVALYQYPDGAVEDDEDKAAAAAVSRMMAPLKYVRGLEFAAGVGYVDFLSRVNRVEEEARRNGSWDAPHPWLNLFVSSRDIADFDRAIIKGMLADGIDGPMLVYPMLKSKWDPNTSVALPDGEVFYLVALLRFCRGGGPAVDELVAQNGAILRACRANGYDHKAYFPSYRGEAEWARHFGAARWRRFVERKARYDPLAILAPGQKIFPRAPASVVAV

SEQ ID NO: 73782 - protein, 504 aa, Setaria italica
  Transcript Sequence Number=SeqID_7808
  Gene Ontology: Mol. function=GPI-anchor transamidase activity; Cellular component=plasma membrane; Biological process=attachment of GPI anchor to protein
  Homolog annotation: Hit_ID=Q8LIW5; Match level="QueryCoverage=98%, HitCoverage=78%, E-value=1e-174, Identity=64%"; Hit description =P0497A05.6 protein
  Pfam annotation: Domain name=PIG-S; Domain location=1-492; Score =516.3; E_value=3.9e-152; Accession=PF10510.1; Description =Phosphatidylinositol-glycan biosynthes
  Subcellular localization annotation: CTP_CleavageSite=35; ConfidenceScore=5.43e-01
ISTFPFASRLERAISAQLQLLPAASTAGNVSVSVTVESVGGCSSSGSVGSRWECGVVTTADLVLGDEVFDELLHSALGSGRGDGSRVYTVVVVETGDAEGMRVVIGKHRHAWVAGKVDEAKAVSVIGKVFVKYFMNGGVEEGETGIGKGEFMPVGSDGNVVLSFSLLNADPSDWVYDWEFEKIGERMLNPVIEALRPIAEINIESQVLYHTPKSSYSYSDDKLGGNVLSMGDIPFFVNSNEWHLDTSISATGQSKVLQFVVYIPSAKECPLYLQLPDGGLSKTNAFISPMWGGVLIWNPPDCSLGSQKTHGTRKKMSSQELMETLEIFIGQLRQLFGLKPSYLSQDMDMPTKFAVSEKGFTEWELDLLYRHHASSNLLSCLTTLESLSSLVHSLPRMIVMDEIGRQVELSLEAANLAQRNATLGISDSSAVSATRARALAEEAFFHPSIMSISYASIEHYFAIYMPFFAPVSLHVLLAAIKELKRYKAERAKYSAVLASRSTSS

SEQ ID NO: 73783 - protein, 100 aa, Setaria italica
  Transcript Sequence Number=SeqID_7809
CTVVVQAWEVDGETLEPIPSASSDAMPPELSERLFPRDDTDDEDDLDDIDPERLSIGVCGNAAGGYVYNAAEPSHGAVLYELREEEGKATAVARWEWVPC

SEQ ID NO: 73784 - protein, 163 aa, Setaria italica
  misc_feature (78)..(78): Xaa can be any naturally occurring amino acid
  Transcript Sequence Number=SeqID_7810
  Gene Ontology: Mol. function=nucleoside-triphosphatase activity; Cellular component=integral to membrane; Biological process=protein catabolic process
  Homolog annotation: Hit_ID=Q655S1; Match level="QueryCoverage=92%, HitCoverage=21%, E-value=3e-68, Identity=88%"; Hit description=Cell division protease ftsH homolog 2, chloroplastic
  Pfam annotation: Domain name=Peptidase_M41; Domain location=1-139; Score=86.5; E_value=9.2e-23; Accession=PF01434.10; Description =Peptidase family M41
SPRQQLFARIVGGLGGRAAEEIIFGEPEVTTGAAGDLQQITGLAKQMVVTFGMSEIGPWSLMEGGAQSGDVNTIEEMXMARNSMSEKLAEDIDSAVKQLSDEAYEIALMHIRNNREAIDKIVEVLIEKETLNGDEFRAILSEFVEIPVENRVPPATPAAALPA

SEQ ID NO: 73785 - protein, 82 aa, Setaria italica
  Transcript Sequence Number=SeqID_7811
  Subcellular localization annotation: CTP_CleavageSite=58; ConfidenceScore=5.29e-01
ASLPVAMPFSRALVSFLELHCRRRRVLARKDRGGMRAQESKRGSVAQVASRSSRSFACASSSDGWMDPLVADPPTTTSARAS

SEQ ID NO: 73786 - protein, 99 aa, Setaria italica
  Transcript Sequence Number=SeqID_7812
  Gene Ontology: Mol. function=kinase activity; Cellular component =nucleus
  Homolog annotation: Hit_ID=Q94CG5; Match level="QueryCoverage=86%, HitCoverage=8%, E-value=1e-24, Identity=60%"; Hit description=Kinase interacting protein 1
  Pfam annotation: Domain name=KIP1; Domain location=1-52; Score=71.8; E_value=2.5e-18; Accession=PF07765.4; Description=KIP1-like protein
MENRVKIMLKLLGQEADSFGKRPEMYYRTRPEVISHVEQVYRAYRALVERYDHISKELHKANHTIATACPEEVQYAMLEDDEDGDPPQSNHTNQLAQDT

SEQ ID NO: 73787 - protein, 521 aa, Setaria italica
  Transcript Sequence Number=SeqID_7813
  Gene Ontology: Mol. function=binding; Cellular component=nucleus
  Homolog annotation: Hit_ID=B9RUF4; Match level="QueryCoverage=91%, HitCoverage=44%, E-value=6e-90, Identity=35%"; Hit description =Peroxidase 31, putative
  Pfam annotation: Domain name=Noc2; Domain location=213-511; Score =197.3; E_value=4.2e-56; Accession=PF03715.5; Description=Noc2p family
KWQAELESYRSKEDSDEEDGMDAMDDDDDSNDGNYPNAKILTSKTISEWCQLVSKEPKSPALRNLLNAFRDACQYGVHSDSPSMQRFQNTRVFYQIITFVLSESDNLFRALLEIPDDANKGRIMNLKNSKKWQTVDPLLKSYLRSSLNLLSQLTDNKILAFVLTRLRASAVLFSAYPSTASTLLKILFRLWASGDQSLSLSAFLMIREVASLLPDCLDLCLIKAYNTYLASTKLVNDRNTKHIDFLMNCLVELYSLDVQNSCERAVTSVGQLNAILRQASKTKEKEDLRKIDNWQYINCVNLWVRFLCCNYKDYNLHPLFSQVLQVLRGVAHLFPGTRYLPLRLKLAQMLNELSTCSQMFFPIPSLLFDCLEFREISQKEQTQKTKVNFLSLLKVPKNMLKSRDFQEECVLSAIQVLSAHFAQWSYHISFPEVATIPLILLKRLHEQTTIESLHRPIKRLIDQVNENKEFIERKREVVSFSPNDKAPVDSFLQEEKSSGNASFTRFYASIAENRQPKGRKT

SEQ ID NO: 73788 - protein, 70 aa, Setaria italica
  Transcript Sequence Number=SeqID_7814
ASLLAPAHVRHHQRAYFPSLPSQIKALLSFPCILLIFILCCSGKKISFVLMNRKSSSLFICCATSFDSLI

SEQ ID NO: 73789 - protein, 38 aa, Setaria italica
  Transcript Sequence Number=SeqID_7815
PVQGMSNVVFKCIGDGMLEVEVVRLHWQSKLHTRTHVQ

SEQ ID NO: 73790 - protein, 100 aa, Setaria italica
  misc_feature (88)..(88): Xaa can be any naturally occurring amino acid
  Transcript Sequence Number=SeqID_7816
ESKGLQWDILNVQRVALAFSNDKRYLGSLSHDKMLKLWDLQELLNGPQAVNGEEPAESGSDDDNDNDNDNDGMDVDMAPTSSKGSRSXKKAGKGQSSSRP

SEQ ID NO: 73791 - protein, 54 aa, Setaria italica
  Transcript Sequence Number=SeqID_7817
FTDILFVVSDRFLGHTQSVDTMLKLDEETLISGSSDGVIRLVGILPNRIIQPLA

SEQ ID NO: 73792 - protein, 36 aa, Setaria italica
  misc_feature (31)..(31): Xaa can be any naturally occurring amino acid
  Transcript Sequence Number=SeqID_7818
DELLSLVVMKNGKKVVCGTPSGALLLYSWGXFKDCR

SEQ ID NO: 73793 - protein, 358 aa, Setaria italica
  Transcript Sequence Number=SeqID_7819
  Gene Ontology: Cellular component=nucleus
  Homolog annotation: Hit_ID=A9LK94; Match level="QueryCoverage=75%, HitCoverage=99%, E-value=1e-101, Identity=64%"; Hit description =Gland development-related protein 1
  Pfam annotation: Domain name=WD40; Domain location=125-163; Score =21.1; E_value=0.0046; Accession=PF00400.24; Description=WD domain, G- beta repeat
  Pfam annotation: Domain name=WD40; Domain location=210-247; Score =9.4; E_value=3.1; Accession=PF00400.24; Description=WD domain, G -beta repeat
  Pfam annotation: Domain name=WD40; Domain location=252-290; Score =20.4; E_value=0.0075; Accession=PF00400.24; Description=WD domain, G- beta repeat
  Pfam annotation: Domain name=WD40; Domain location=41-79; Score=17.0; E_value=0.078; Accession=PF00400.24; Description=WD domain, G-beta repeat
  Pfam annotation: Domain name=WD40; Domain location=83-121; Score =19.3; E_value=0.016; Accession=PF00400.24; Description=WD domain, G -beta repeat
  Pfam module annotation: Pfam domain module=WD40::WD40::WD40::WD40::WD4 0; Domain location=125-163::210-247::252-290::41-79::83-121
MEVLHEEMPFDLDFHPSSPLVVTSLITGELCLFRYGSESQPERLFSVKPHKESCRAVRFLDSGKAILSGSADCSVLASDVETGKAIARLEDAHENGINRLVCLTETTIATGDDEGCIKVWDTRERSCCNTFDVHEDYISDMSYVADSNQILATSGDGTLSVNNLRRNKVKSQSEFSEDELLSLVVMKNGKKVVCGTPSGALLLYSWGYFKDCSDRFLGHTQSVDTMLKLDEETLISGASDGVIRLVGILPNRIIQPLAEHSEYPIEALAFSNDKRYLGSLSHDKMLKLWDLQELLNGPQAVNGEEPAESGSDDDNDNDNDNDGMDVDMAPTSSKGSRSKKAGKGQSSSRPASDFFADL

SEQ ID NO: 73794 - protein, 69 aa, Setaria italica
  Transcript Sequence Number=SeqID_7820
  Gene Ontology: Cellular component=plasma membrane
MAGQSDAMIEKMQLRQSYRNVWHTDLTNAVVADLPWCCLSLWCGPCVSYMLRRRALYNDMSRYVCCAGY

SEQ ID NO: 73795 - protein, 458 aa, Setaria italica
  Transcript Sequence Number=SeqID_7821
CHKPPRRDPADSIHKVARREIGGGHRRPPRPAAPSSSAFSCPEKFRNFQLQEEYDTYDDEVHFLVQLPFLWTRTKIIEIVAAKDVIFALAQSGLCAAFNRTTNKRICYLNISPDEVIRSLFYNKNNDSLITVSVYESDRFSSLKCRTTPIEYIRRGQLNDGFPLFETESLKYPGFVEFDDVNGKVLTFSAQDSTYKVFDLKNYNFLYSICDKNIQEIKISPGIMLVIYQKTNCHVPLTILSIEDGSPLKTFSQLLHRNRKVDFIEQFNEKLLVKQDKENLQIIDVRNSDLIEVNKTEFMTPSAFIFLYENNLFLTFCNRTVAAWNFRGELVTSFEDHELWHPNCNTNNIYITADQDLIISYCKVSKQVADCVDSEAGGVSSMGSINMSNIFTGKCVAKISPSDPTLTIAPRNRGDKSRSTIHSTVSEALEDITALFYDEDRNEIYTGNSKGLVHVWSN

SEQ ID NO: 73796 - protein, 59 aa, Setaria italica
  Transcript Sequence Number=SeqID_7822
  Subcellular localization annotation: CTP_CleavageSite=43; ConfidenceScore=5.21e-01
MADEWWSSTSHRSHGTSACSAARAPLMVTDRVACGWATTSSPTAAAESTSSITFQDPYR

SEQ ID NO: 73797 - protein, 59 aa, Setaria italica
  misc_feature (4)..(4): Xaa can be any naturally occurring amino acid
  Transcript Sequence Number=SeqID_7823
CTPXLCSSDADESSVCAFLRYFVIGRLVSCLLLLALFKLTPFLLIYSGLCKSYCTTDAS

SEQ ID NO: 73798 - protein, 253 aa, Setaria italica
  Transcript Sequence Number=SeqID_7824
  Gene Ontology: Mol. function=oxidoreductase activity; Cellular component=mitochondrion; Biological process=oxidation reduction
  Homolog annotation: Hit_ID=B6TC19; Match level="QueryCoverage=100%, HitCoverage=100%, E-value=1e-114, Identity=81%"; Hit description =Dehydrogenase/reductase SDR family member 2
  Pfam annotation: Domain name=Epimerase; Domain location=13-246; Score= -53.7; E_value=0.004; Accession=PF01370.13; Description=NAD dependent epimerasedehydratase family
  Pfam annotation: Domain name=adh_short; Domain location=11-177; Score= 75.7; E_value=1.7e-19; Accession=PF00106.17; Description=short chain dehydrogenase
  Pfam module annotation: Pfam domain module=Epimerase::adh_short; Domain location=13-246::11-177
MEVKCRRLEGKVAVVTASTQGIGLAIAERLGLEGAAVVISSRKQKNVDEAVEGLKAKGITAVGAVCHVSNAQQRKDLIDTAVKNFGHIDILVSNAAANPTVDSILEMKEAVLDKLWDINVKASILLLQEAAPHLRKGSSVIIISSITGYNPEQGLTMYGVTKTALFGLTKALAGEMGPNTRVNCIAPGFVPTRFASFLTTNETIRKELTDKTALKRLGSVEDMAAAAAFLASDDASFITAETIVVAGGMQSRL

SEQ ID NO: 73799 - protein, 71 aa, Setaria italica
  misc_feature (31)..(31): Xaa can be any naturally occurring amino acid
  Transcript Sequence Number=SeqID_7825
VSIVIVLFQAKKVNTLIRPDGKKKAPTQSHXYVKLTPDYDALDVANKSASSKLLATVLGICVLVLWETRVL

SEQ ID NO: 73800 - protein, 121 aa, Setaria italica
  Transcript Sequence Number=SeqID_7826
  Gene Ontology: Mol. function=nucleotide binding; Cellular component =ribonucleoprotein complex
  Homolog annotation: Hit_ID=B4FF02; Match level="QueryCoverage=93%, HitCoverage=74%, E-value=2e-44, Identity=80%"; Hit description=60S ribosomal protein L23a
  Pfam annotation: Domain name=Ribosomal_L23; Domain location=39-118; Score=105.2; E_value=2.2e-28; Accession=PF00276.12; Description =Ribosomal protein L23
VSIPSTFLLTFHRPKTLKKARDPKYPRVSAPGRNKLDQYQILKYPLTTESAMKKIEDNNTLVFIVDLKADKKKIKAAVKKMYDIQAKKVNTLIRPDGKKKAYVKLTPDYDALDVANKIGII

SEQ ID NO: 73801 - protein, 155 aa, Setaria italica
  Transcript Sequence Number=SeqID_7827
  Gene Ontology: Mol. function=nucleotide binding; Cellular component =ribonucleoprotein complex
  Homolog annotation: Hit_ID=B4FF02; Match level="QueryCoverage=71%, HitCoverage=73%, E-value=9e-44, Identity=81%"; Hit description=60S ribosomal protein L23a
  Pfam annotation: Domain name=Ribosomal_L23; Domain location=73-152; Score=105.2; E_value=2.2e-28; Accession=PF00276.12; Description =Ribosomal protein L23
  Pfam annotation: Domain name=Ribosomal_L23eN; Domain location=14-67; Score=83.9; E_value=5.9e-22; Accession=PF03939.5; Description =Ribosomal protein L23, N-terminal domain
  Pfam module annotation: Pfam domain module=Ribosomal_L23::Ribosomal _L23eN; Domain location=73-152::14-67
  Subcellular localization annotation: CTP_CleavageSite=61; ConfidenceScore=5.24e-01
EAQMAPKAAPAKKGDAKAQALKVAKAVKSGTVKKKTKKIRTSVTFHRPKTLKKARDPKYPRVSAPGRNKLDQYQILKYPLTTESAMKKIEDNNTLVFIVDLKADKKKIKAAVKKMYDIQAKKVNTLIRPDGKKKAYVKLTPDYDALDVANKIGII

SEQ ID NO: 73802 - protein, 76 aa, Setaria italica
  Transcript Sequence Number=SeqID_7828
SLRSVRIQLTTLDGNSDISFIQHRTEEFFDGWKEDDEGFHLVLDLAPEILWIILCDYDKVLCHQFWTTLALYRVGP

SEQ ID NO: 73803 - protein, 101 aa, Setaria italica
  Transcript Sequence Number=SeqID_7829
MRREGRQHGWVFAVDRSLVDPEDKSRTRAVQVEGAAAANGGFVKAPRKPTNHSKPTVGRAYKGLIGKGEAGSGRGRSKFKHDEVKMYYLEDEVQGADDAFF

SEQ ID NO: 73804 - protein, 132 aa, Setaria italica
  Transcript Sequence Number=SeqID_7830
GMAAGGEHLRRRRGGVVRRASRDAPRLRRIWCYTASSMRSTASHYCPQMLPGRELWCDECRPCSTEGRSILCDAQLFPCGQRQAAISPEAYLSSRRRFGSVATQGSPRPWPSLSSPELSRIIRPLAPASRVD

SEQ ID NO: 73805 - protein, 296 aa, Setaria italica
  Transcript Sequence Number=SeqID_7831
  Gene Ontology: Mol. function=nucleic acid binding; Cellular component= ribonucleoprotein complex; Biological process=mRNA processing
  Homolog annotation: Hit_ID=B6SS58; Match level="QueryCoverage=98%, HitCoverage=85%, E-value=2e-95, Identity=66%"; Hit description =Ribonucleoprotein
  Pfam annotation: Domain name=RRM_1; Domain location=169-239; Score =77.6; E_value=4.4e-20; Accession=PF00076.14; Description=RNA recognition motif. (a.k.a. RRM, RBD, o
  Pfam annotation: Domain name=RRM_1; Domain location=70-140; Score =98.9; E_value=1.8e-26; Accession=PF00076.14; Description=RNA recognition motif. (a.k.a. RRM, RBD, o
  Pfam module annotation: Pfam domain module=RRM_1::RRM_1; Domain location=169-239::70-140
SSSPRGRPVLLPPSAAAAGEAFSSDGEEFDGEEDEYFDEGESEPEEQVEVPRAYSSPRGRPPRGEEPGRLFVGNLPYTFTSDELNDAFSEAGRVDDAQIIYDKVTNRSRGFAFVTMATAEEAAKAIQMFDGALLGGRTARVNYPEVPRGGERRTVTMDGRRRDDGTYKIYAGNLGWGVRADALRSVFEGQTGLLDARVIFERETGRSRGFGFVSFRTAEDAQAALEALDGVELEGRPLRLSLAEQNPPPGSPPSAVQAQQEETASDISDAETEATSSSESSDAQVDESNLQTATTY

SEQ ID NO: 73806 - protein, 112 aa, Setaria italica
  Transcript Sequence Number=SeqID_7832
TRMHSESRGKGTGWQESGPRIVMTHEGRGDCLTCRSDRVARTTEKCKRMAHTDPIQRVYSFGELPAYNEAYAATGKTEAQQTHEQGKDCIAGLAAGTTTTEMYRCIYGVKGR

SEQ ID NO: 73807 - protein, 120 aa, Setaria italica
  Transcript Sequence Number=SeqID_7833
  Gene Ontology: Mol. function=lipid binding; Biological process=lipid transport
  Homolog annotation: Hit_ID=B8A3E0; Match level="QueryCoverage=67%, HitCoverage=57%, E-value=5e-22, Identity=70%"; Hit description=Non -specific lipid-transfer protein
  Pfam annotation: Domain name=Tryp_alpha_amyl; Domain location=29-116; Score=93.1; E_value=9.8e-25; Accession=PF00234.14; Description =Protease inhibitorseed storageLTP f
  Subcellular localization annotation: CTP_CleavageSite=64; ConfidenceScore=5.20e-01
MAPRVAVVAVVAVLAALVAAETASAAVSCSEVTSAVLPCLGYATGSAASPSSACCNGVRSLSARASSTADRQAACTCLKSMTGRLGGGGASMGNAANIPSKCGVNVGVPISPNVDCSKIN

SEQ ID NO: 73808 - protein, 54 aa, Setaria italica
  Transcript Sequence Number=SeqID_7834
  Homolog annotation: Hit_ID=Q9S7S1; Match level="QueryCoverage=74%, HitCoverage=11%, E-value=2e-09, Identity=77%"; Hit description =F3L24.5 protein
SMDQVAVIELLVPSIFRAIVSLHPAGSTDPDAVAFFSPTEVIMSSKSFLCPAQL

SEQ ID NO: 73809 - protein, 328 aa, Setaria italica
  Transcript Sequence Number=SeqID_7835
  Homolog annotation: Hit_ID=Q9S7S1; Match level="QueryCoverage=77%, HitCoverage=79%, E-value=4e-73, Identity=52%"; Hit description =F3L24.5 protein
VQEEATMRRHFQDLRALGRQLEESGVLNGALKARGNSWGLHMPLVCPDGAVVAYAWKRQLAGQAGASAVDRTRLALKAFTDQKRRFFPHLEDEVLSHLHDGEPGVTKKPRLSASNGEQEEESLSEILKNLENEVPNMKIFTYRHLDWSKRASSLASLMDDDFVDPSKELNLQNTGNLRSSALTTSMDQVAVIELLVPSIFRAIVSLHPAGSTDPDAVAFFSPTEGGSYLHARGVSMHHVFKHVKEHADKALQYFISVEPSKALSLLLRWIASYQTLFTKVCSKCRRLLMMDKSLALLLPPVHRPYHQTSNVGPDLQEAYHIGCSSYDG

SEQ ID NO: 73810 - protein, 265 aa, Setaria italica
  misc_feature (23)..(23): Xaa can be any naturally occurring amino acid
  Transcript Sequence Number=SeqID_7836
  Gene Ontology: Mol. function=transposase activity; Biological process= transposition, DNA-mediated
  Homolog annotation: Hit_ID=Q7FA01; Match level="QueryCoverage=73%, HitCoverage=27%, E-value=9e-47, Identity=49%"; Hit description =OSJNBa0079C19.15 protein
ISANNAAFCELCVEEITAGNSNXGHLTNRAYNNIAAKFEERTGLRHSKQQFKNRWDALRRMYAFWLYANKQSGLGWGRGTVVADDAWWKKHTKNHGEWRKLRYGPPDNLDELQVMFQNIAVDGSSSCIPGEQVIESDEGDEGDVGDRSPERTLPRKRCRSTSTTATSPRKRTKSPMVKVMKGIWETMQENCAVAQKALQGDYIFESVQHCMRLAVESGAVEGTDEHFMASKLFVKTEHRAVFLSLTTKEGRLAWLKRWCQEKKSK

SEQ ID NO: 73811 - protein, 113 aa, Setaria italica
  misc_feature (6)..(6): Xaa can be any naturally occurring amino acid
  Transcript Sequence Number=SeqID_7837
  Homolog annotation: Hit_ID=B6UI68; Match level="QueryCoverage=100%, HitCoverage=40%, E-value=1e-51, Identity=91%"; Hit description=IDS4 -like protein
  Pfam annotation: Domain name=SPX; Domain location=1-113; Score=-12.4; E_value=3.3e-05; Accession=PF03105.11; Description=SPX domain
MKFGKXSLNNQIVETLPDWRDKFLSYKDLKKRLKQIGAGSGERRSKRQRVEDGGGSSPAMTPEEAGFVALLDAELEKFNAFFLEKEEDYVIRQKELQDRAVSAAETGSAEELL

SEQ ID NO: 73812 - protein, 94 aa, Setaria italica
  Transcript Sequence Number=SeqID_7838
  Gene Ontology: Mol. function=transferase activity
  Homolog annotation: Hit_ID=B6TQI2; Match level="QueryCoverage=100%, HitCoverage=40%, E-value=5e-27, Identity=67%"; Hit description =Glutathione S-transferase
PVCESLVILNYLDEAFPSAARSLLPSDPYARARARFWAAYSDKVYELGTKLWKLRGEEERAQARDELVQVLRNLDGELGDKEFFGGGEFAFVDV

SEQ ID NO: 73813 - protein, 135 aa, Setaria italica
  Transcript Sequence Number=SeqID_7839
  Gene Ontology: Mol. function=transferase activity
  Homolog annotation: Hit_ID=B6TQI2; Match level="QueryCoverage=97%, HitCoverage=56%, E-value=9e-49, Identity=72%"; Hit description =Glutathione S-transferase
  Pfam annotation: Domain name=GST_C; Domain location=13-109; Score =22.8; E_value=0.00044; Accession=PF00043.17; Description=Glutathione S-transferase, C-terminal domain
RYPYVRTGTRTFLGSAYSDKVYELGTKLWKLRGEEERAQARDELVQVLRNLDGELGDKEFFGGGEFAFVDVAVVTFMPWLPSYERYGGFTVKETAPRLAAWARRCGERESVAKSLHSPEKVDEFITMLKKFYGIE

SEQ ID NO: 73814 - protein, 290 aa, Setaria italica
  Transcript Sequence Number=SeqID_7840
  Homolog annotation: Hit_ID=Q6EPK9; Match level="QueryCoverage=95%, HitCoverage=39%, E-value=5e-74, Identity=52%"; Hit description =Ankyrin-like protein
  Pfam annotation: Domain name=Ank; Domain location=4-37; Score=21.5; E_ value=0.0034; Accession=PF00023.22; Description=Ankyrin repeat
QDNDGNTALHLAAQAGSLRMFCSLFGNPQVHINIINKKVQTPLDIARCKIPPGMYHNQSSEAKIRLILQLTGGRYGGHRWDHFEGKYIQREVESKELEKLKDSTQALCIGSVLIATVAFGATFALPGGYKADDHTNGGTPTLAGRYAFDAFIMANTIAFICSSIATVGFMFSGTSMVDLKIRKVYLGTAVFFMGSSVTSLAAAFALGVYMVLVPVAHKTAVAIVVTSPLVVIFTNIEIWLKNALSARAMCSRIGIIPVFMGTIFFIPVSALFQCWPLVPHYLVGCSRKDN

SEQ ID NO: 73815 - protein, 52 aa, Setaria italica
  Transcript Sequence Number=SeqID_7841
QPRFESLFAQILSHLIWPGLNPCNRFFPENFRCHGETFLTKLIALIFKHYFT

SEQ ID NO: 73816 - protein, 27 aa, Setaria italica
  Transcript Sequence Number=SeqID_7842
QKLKAPVGRVYFTGEHTSERYNGYVHG

SEQ ID NO: 73817 - protein, 58 aa, Setaria italica
  misc_feature (10)..(10): Xaa can be any naturally occurring amino acid
  misc_feature (47)..(47): Xaa can be any naturally occurring amino acid
  Transcript Sequence Number=SeqID_7843
  Gene Ontology: Mol. function=polyamine oxidase activity; Biological process=oxidation reduction
  Homolog annotation: Hit_ID=O64411; Match level="QueryCoverage=89%, HitCoverage=9%, E-value=2e-14, Identity=86%"; Hit description =Polyamine oxidase
GINVEVGANXWVEGVNGGKMKPPSGPIVNSTLKLRNFRSDFDYLAQXNVYKEKYAVDE

SEQ ID NO: 73818 - protein, 69 aa, Setaria italica
  Transcript Sequence Number=SeqID_7844
  Gene Ontology: Mol. function=electron carrier activity; Biological process=oxidation reduction
  Homolog annotation: Hit_ID=Q93WC0; Match level="QueryCoverage=81%, HitCoverage=11%, E-value=1e-22, Identity=87%"; Hit description =Flavin containing polyamine oxidase
MCSQPNGPSTPVDMALDYYKFDYEFAEPPRVTSLQNTEPTPTNADFGEDSNFVADQRGFSPSYTTSAAP

SEQ ID NO: 73819 - protein, 507 aa, Setaria italica
  misc_feature (304)..(304): Xaa can be any naturally occurring amino acid
  Transcript Sequence Number=SeqID_7845
  Gene Ontology: Mol. function=electron carrier activity; Biological process=oxidation reduction
  Homolog annotation: Hit_ID=Q93WC0; Match level="QueryCoverage=92%, HitCoverage=93%, E-value=0.0, Identity=80%"; Hit description=Flavin containing polyamine oxidase
  Pfam annotation: Domain name=Amino_oxidase; Domain location=36-477; Score=241.0; E_value=3e-69; Accession=PF01593.16; Description=Flavin containing amine oxidoreductase
  Pfam annotation: Domain name=DAO; Domain location=28-479; Score= -23.2; E_value=0.00037; Accession=PF01266.16; Description=FAD dependent oxidoreductase
  Pfam module annotation: Pfam domain module=Amino_oxidase::DAO; Domain location=36-477::28-479
MKPSVVIALAAVLVAAQYASLADAYGPRVIIVGAGMSGISAGKRLWESGVRELLFLEATERVGGRMHKHNFGGLNVEIGANWVEGIGGERVNPILPIVNDTLKLRNFYSDFDSVVGNFYRENGGLYDKDYVQKRMDRADEVEDLGANLTKMMDPSGRDDISILAMQRLFNHQPNGPSTPVDMALDYYKFDYEFAEPPRVTSLQNTEPTPTNADFGEDSNFVADQRGFESIIHYIGSSYLSTNANGKISDRRVLLNKVVRQIAYNNRGVVVKTEDGSSYAADFVVVSTSLGVLQSDLIQFKPQLXPFWKIFSIYRFDMAVYTKIFLKFPRRFWPVGDGKQFFVYASRRRGYYGMWQSFEREYPGVPVLLVTVTDDESRRIEQQPDDVTKAEAVAVLRKMFPDVDVPNATDIYVPRWWSNRFFKGSYSNWPIGVNRYEYDQLRAPVGRVYFTGEHTSERYNGYVHGAYLAGIDSADILINRIFKNEEYKVRGKYEDQAAEVNGQVAEAK

SEQ ID NO: 73820 - protein, 79 aa, Setaria italica
  Transcript Sequence Number=SeqID_7846
  Homolog annotation: Hit_ID=Q6ASW5; Match level="QueryCoverage=79%, HitCoverage=8%, E-value=2e-11, Identity=57%"; Hit description =Putative microtubule-associated protein
AVLEEHKQARLRQEEERRRLREQKKLRTLLSEKEAMPHLKRPGSSFGRAAEPCAVNRKRVDAGRHASSAPSVRSGASSS

SEQ ID NO: 73821 - protein, 210 aa, Setaria italica
  Transcript Sequence Number=SeqID_7847
  Gene Ontology: Mol. function=nucleoside-triphosphatase activity; Cellular component=signal recognition particle, endoplasmic reticulum targeting; Biological process=SRP-dependent cotranslational protein targeting to membrane
  Homolog annotation: Hit_ID=P49968; Match level="QueryCoverage=95%, HitCoverage=40%, E-value=2e-80, Identity=75%"; Hit description =Signal recognition particle 54 kDa protein 1
  Pfam annotation: Domain name=SRP54; Domain location=1-100; Score =44.6; E_value=1.2e-13; Accession=PF00448.14; Description=SRP54-type protein, GTPase domain
  Pfam annotation: Domain name=SRP_SPB; Domain location=130-207; Score =80.7; E_value=5.1e-21; Accession=PF02978.11; Description=Signal peptide binding domain
  Pfam module annotation: Pfam domain module=SRP54::SRP_SPB; Domain location=1-100::130-207
QEAALFEEMRQVSEATKPNLVIFVMDGSIGQAAFDQAQAFKQSASVGAVIVTKMDGHAKGGGALSAVAATKSPVIFIGTGEHIPDFEVFDVKPFVSRLLGMGDLSGLMDKIQDVMPADQLPELVDNLTGGFTLRLLYEQFQNLHSMGPIGQLFSMLPGFSSELMPKGHEKESQAKIKRYMTMMDSMTDAELDSTNPKLIVPLTSTYFVSF

SEQ ID NO: 73822 - protein, 235 aa, Setaria italica
  Transcript Sequence Number=SeqID_7848
  Gene Ontology: Mol. function=flavin-containing monooxygenase activity; Biological process=cellular aromatic compound metabolic process
  Homolog annotation: Hit_ID=B6SKY5; Match level="QueryCoverage=96%, HitCoverage=58%, E-value=4e-73, Identity=59%"; Hit description =Disulfide oxidoreductase/ monooxygenase/ oxidoreductase
RVMHASEYRSGKGMEGKSVLVVGCGNSSIRSPLNLAENGAITSIVVRSEVHILTKQILNLGVKLGFYLPIWMIDMLALFLCYLVFGDTSKHGIKRPAVGPFTMNRQTAALPVIDVGTYKKIKSGEIQVIPTGMTSVQGNVVEFADGRRHPFDAIVFATGYRSGIKRWLQDGSSELVGNDGILKQRSPKAGNGLYYAGLSGRGIFGSGTDAEFIADDISKQLQPVHEHEAHGKPEH

SEQ ID NO: 73823 - protein, 103 aa, Setaria italica
  Transcript Sequence Number=SeqID_7849
  Gene Ontology: Mol. function=transcription regulator activity; Cellular component=nucleus; Biological process=regulation of transcription
  Homolog annotation: Hit_ID=Q2R1K8; Match level="QueryCoverage=100%, HitCoverage=37%, E-value=5e-30, Identity=66%"; Hit description=Helix- loop-helix DNA-binding domain containing protein, expressed
LFLELGSMLDLDRQNTGKATVLGDAARVLRDLVTQVESLRKEQSALLSEQQYVSSEKNELQEENATLKSQISELANDLCARMGSSSLSLSSPGMSHPVANATS

SEQ ID NO: 73824 - protein, 90 aa, Setaria italica
  misc_feature (73)..(73): Xaa can be any naturally occurring amino acid
  Transcript Sequence Number=SeqID_7850
  Gene Ontology: Mol. function=metal ion binding; Biological process =metal ion transport
TIEAVADIYGIDSIAADLKENKMTIIGDMDAVAIAKKLKKIGKIDIVSVGPAKEEKKEEKKEEKKEEKKEEKXEEKKEEKKEEKKEEKEM

SEQ ID NO: 73825 - protein, 225 aa, Setaria italica
  misc_feature (160)..(160): Xaa can be any naturally occurring amino acid
  misc_feature (204)..(204): Xaa can be any naturally occurring amino acid
  misc_feature (216)..(216): Xaa can be any naturally occurring amino acid
  misc_feature (219)..(219): Xaa can be any naturally occurring amino acid
  Transcript Sequence Number=SeqID_7851
  Gene Ontology: Mol. function=ATP-dependent helicase activity
  Homolog annotation: Hit_ID=Q2QZE8; Match level="QueryCoverage=76%, HitCoverage=13%, E-value=1e-21, Identity=44%"; Hit description =Retrotransposon protein, putative, unclassified, expressed
QALYQQQQPHMQNQPPQYPNPHPQHMPYQQGPYNMQPQQQQQGPPYPYQADKQPQMPQPAYHQTQQPPMPQAAYNQGQQPPMPQSSYSQGQQPVIPQSAYNQAQPPQMPHGAYNQSQQPQGMRIPQNQVQHPQQSMSFHHPAQAPQLPQVSQSQGLQMPXQQGQLLHGLQFSQHGKQPLSHGQQSPLLKDDDSGGHEGKRTGFXLPLSQQRGQAPXSNXQLPSSH

SEQ ID NO: 73826 - protein, 340 aa, Setaria italica
  misc_feature (20)..(20): Xaa can be any naturally occurring amino acid
  Transcript Sequence Number=SeqID_7852
  Gene Ontology: Mol. function=oxidoreductase activity; Cellular component=plastid inner membrane; Biological process=oxidation reduction
  Homolog annotation: Hit_ID=B6SZC2; Match level="QueryCoverage=99%, HitCoverage=98%, E-value=1e-159, Identity=84%"; Hit description =Chloroplastic quinone-oxidoreductase
  Pfam annotation: Domain name=ADH_N; Domain location=36-121; Score =66.7; E_value=8.4e-17; Accession=PF08240.4; Description=Alcohol dehydrogenase GroES-like doma
  Pfam annotation: Domain name=ADH_zinc_N; Domain location=162-325; Score=33.6; E_value=7.7e-07; Accession=PF00107.18; Description=Zinc -binding dehydrogenase
  Pfam module annotation: Pfam domain module=ADH_N::ADH_zinc_N; Domain location=36-121::162-325
MAAPKKTMKAFQYDKYGGGXAEGLKHVEVPVPSLKKGEVLLKLEAASINPIDWKIQKGMVRPFLPRKFPFIPVGDISGEVVELGTGVTNFKTGDKVISISFPTGGGLAEYAVAPASLTVARPPEVSAAEGASLPTAASTALQQLKALRVTSFDGSGGGNNNAPKNVLVTAASGGVGHYAVQLAKLAGLHVTATCGARNLGFVRGLGADEVLDYKTPEGARLQSPSGVKYDAVAHCATGTPWSAFAPVLADSATVADVTPGIAATARSFLQKVTLAKQRLVPMILIPKKEEMEWLADMTRQGKLKTVIDSRYPLSRAREAWAKSIEGHATGKIVVEMGDEE

SEQ ID NO: 73827 - protein, 230 aa, Setaria italica
  Transcript Sequence Number=SeqID_7853
  Gene Ontology: Cellular component=integral to membrane
  Homolog annotation: Hit_ID=B6U566; Match level="QueryCoverage=90%, HitCoverage=90%, E-value=2e-91, Identity=81%"; Hit description =Cytochrome b561
  Pfam annotation: Domain name=Cytochrom_B561; Domain location=7-224; Score=187.4; E_value=4.1e-53; Accession=PF03188.8; Description =Eukaryotic cytochrome b561
MATPAHAKVARALASSAAALVLLWCVHFRGGLSLGSPTNKGLIFNVHPVLMLIGFIILGSEAIMSYKILPWSHDTNKMVHMLLHAVALFLGSVGIYAAFKFHNESGIANLYSLHSWIGLGTICLYGIQWLLGVTTFFFPGASPTVRRRMLPWHVRSGLVVYMLALLAAELGFLEKLTFLQANGLGRYSSEALLVNFTALLVVLLGASVVLFVTAPMHNEHTHGYSAVHKP

SEQ ID NO: 73828 - protein, 162 aa, Setaria italica
  misc_feature (98)..(98): Xaa can be any naturally occurring amino acid
  Transcript Sequence Number=SeqID_7854
  Gene Ontology: Mol. function=transferase activity, transferring glycosyl groups; Biological process=metabolic process
  Homolog annotation: Hit_ID=B9UYP6; Match level="QueryCoverage=90%, HitCoverage=28%, E-value=1e-31, Identity=45%"; Hit description =Flavonoid glucosyltransferase
GTVAGYVRTGDPGAFNAYMARFHAAGARSVAGIVDAFAARGRPVSRVVYTLLLPWAADVARERGVPSALYWIQPVAVFAIYYHYFHGQDGVITEHRHXPSFVVELPGLAPQTIGDLPSFLTESTDPSNMFHSVFTGIRDLIETLDKESPKAYRSFVLTTFVP

SEQ ID NO: 73829 - protein, 116 aa, Setaria italica
  Transcript Sequence Number=SeqID_7855
  Gene Ontology: Mol. function=electron carrier activity; Cellular component=integral to membrane; Biological process=oxidation reduction
  Homolog annotation: Hit_ID=B6SWK0; Match level="QueryCoverage=98%, HitCoverage=22%, E-value=7e-47, Identity=97%"; Hit description =Cytochrome P450 CYP90B14v2
RVQFTFNLMAKNIMSMDPGEEETERLRLEYITFMKGVVSAPLNFPGTAYWKALKSRASILGVIERKMEDRLEKMSKENSSVEEDDLLGWALKQSNLSKEQILDLLLSLLFAGHETS

SEQ ID NO: 73830 - protein, 85 aa, Setaria italica
  Transcript Sequence Number=SeqID_7856
  Gene Ontology: Mol. function=oxidoreductase activity; Biological process=oxidation reduction
  Homolog annotation: Hit_ID=B5M6A0; Match level="QueryCoverage=72%, HitCoverage=16%, E-value=4e-10, Identity=58%"; Hit description =Leucoanthocyanidin dioxygenase-like protein
MADCMQEWPEPVVRVQALAESGLSAIPRCYVKPPCDRPVAPPPAAALEKEHFLDDVSIPVIDLGELLAAEGGGAGLGDVTEAVAA

SEQ ID NO: 73831 - protein, 170 aa, Setaria italica
  misc_feature (112)..(112): Xaa can be any naturally occurring amino acid
  Transcript Sequence Number=SeqID_7857
  Gene Ontology: Mol. function=DNA ligase (ATP) activity; Cellular component=replication fork; Biological process=response to DNA damage stimulus
  Homolog annotation: Hit_ID=B8A7M7; Match level="QueryCoverage=81%, HitCoverage=12%, E-value=4e-64, Identity=81%"; Hit description=DNA ligase
  Pfam annotation: Domain name=DNA_ligase_A_N; Domain location=1-72; Score=-68.7; E_value=0.089; Accession=PF04675.6; Description=DNA ligase N terminus
  Subcellular localization annotation: CTP_CleavageSite=60; ConfidenceScore=5.17e-01
KFTKPASDRLVVMDMTNNSAISGSGSAGRRKILVLHLIRSCREMEMKFLVRTLVRNLRIGAMMKTILPALAHAVVFDRKCAGDPVVSLEGIQSQLQSLSTEVAEAYNVIPNXGTAFSASSLAMVPGTPIPPMLARITNGLTQSLKAFNGKSFTCEYKYDGQRAQIHRLLE

SEQ ID NO: 73832 - protein, 174 aa, Setaria italica
  Transcript Sequence Number=SeqID_7858
  Gene Ontology: Mol. function=DNA ligase (ATP) activity; Cellular component=nucleus; Biological process=DNA recombination
  Homolog annotation: Hit_ID=B9SPY8; Match level="QueryCoverage=93%, HitCoverage=11%, E-value=3e-73, Identity=74%"; Hit description=DNA ligase
  Pfam annotation: Domain name=DNA_ligase_A_C; Domain location=36-100; Score=80.4; E_value=6.4e-21; Accession=PF04679.7; Description=ATP dependent DNA ligase C terminal region
SICYHHCLQVKRDYVEGLGDSLDLVPVGAWYGNGRKAGWYSPFLMACYNPETEEFQSVCRVMSGFSDEFYKEMKEFYSGERILLRKPVYYKTDEQPEVWFTAEQVWEVRGADLTLSPVHHAAIGYVHPSRGISVRMPRYIRSVPDRSPEDCSTVADIATMFKAQTRKMDVSSEG

SEQ ID NO: 73833 - protein, 438 aa, Setaria italica
  misc_feature (80)..(80): Xaa can be any naturally occurring amino acid
  Transcript Sequence Number=SeqID_7859
  Gene Ontology: Mol. function=DNA ligase (ATP) activity; Cellular component=nucleus; Biological process=response to DNA damage stimulus
  Homolog annotation: Hit_ID=B8A7M7; Match level="QueryCoverage=96%, HitCoverage=34%, E-value=0.0, Identity=85%"; Hit description=DNA ligase
  Pfam annotation: Domain name=DNA_ligase_A_M; Domain location=189-408; Score=209.7; E_value=7.8e-60; Accession=PF01068.13; Description=ATP dependent DNA ligase domain
  Pfam annotation: Domain name=DNA_ligase_A_N; Domain location=1-120; Score=83.5; E_value=7.7e-22; Accession=PF04675.6; Description=DNA ligase N terminus
  Pfam module annotation: Pfam domain module=DNA_ligase_A_M::DNA_ligase_ A_N; Domain location=189-408::1-120
ELNIGGSLVVSALEESLGTSRSKIHEMYKTYGDLGNVAQECRQNQTLLAPPRPLSIRDVYSTLRKLSAISGSGSAGRRKXLVLHLIRSCREMEMKFLVRTLVRNLRIGAMMKTILPALAHAVVFDRKCAGDPVVSLEGIQSQLQSLSTEVAEAYNVIPNLDLLIPSLLSEGTAFSASSLAMVPGTPIPPMLARITNGLTQSLKAFNGKSFTCEYKYDGQRAQIHRLLDGSVRIFSRQMKESTPRFPDLVNMIKELCRPEVSSFILDAEVVGVDRKKGNKLMSFQELSSRERGNKHSSIAIDNIKVDICVFVFDIMFCDGERLLDCPLRQRRKYIHDLFQEKPGYFELAQQLTVEASEASPDNSSTLHRMNTFFKKACESSCEGIMLKTLDVDAGYSASKRYESWLKVKRDYVEGLGDSLDLVPVGAWYGNGRKAGFDN

SEQ ID NO: 73834 - protein, 73 aa, Setaria italica
  misc_feature (24)..(24): Xaa can be any naturally occurring amino acid
  Transcript Sequence Number=SeqID_7860
PSLLCYICVRVCACVSYVICLCVXCDISVCYVISLRVCCVISLCVCVCLALFLISSENLWCCRFLRKRYKSMS

SEQ ID NO: 73835 - protein, 80 aa, Setaria italica
  Transcript Sequence Number=SeqID_7861
  Subcellular localization annotation: CTP_CleavageSite=35; ConfidenceScore=5.04e-01
PIPCVPCLSPVAFLSFFSRKHLQFIRYHTHRKRITCTPPRTLLTLQARPHPPHTIHLTQQVEETNTTRRDCRLRQSSTQP

SEQ ID NO: 73836 - protein, 132 aa, Setaria italica
  Transcript Sequence Number=SeqID_7862
  Homolog annotation: Hit_ID=B4FA62; Match level="QueryCoverage=100%, HitCoverage=100%, E-value=1e-51, Identity=80%"; Hit description =Auxin-repressed protein
  Pfam annotation: Domain name=Auxin_repressed; Domain location=7-121; Score=100.1; E_value=7.8e-27; Accession=PF05564.4; Description =Dormancyauxin associated protein
MGLLDKLWDDTVAGPRPDTGLGRLRKQPARPAAVKINDPAGDATAFVPPSPASGSEETPVKVTRSIMIKRPAGYPSSPRSAASTPPASPLGTTPPISPFAGAGGRFRRKSSSDAYERASPPGTTSHPPPFEV

SEQ ID NO: 73837 - protein, 85 aa, Setaria italica
  Transcript Sequence Number=SeqID_7863
TNNITVEVRQPATYPRSPLDVFPPPSPDLGEVDACQGAKRGVNMLRAHTSKGGGWLVVPGGDALSYASDDDFLLKRPPDGFSAQS

SEQ ID NO: 73838 - protein, 97 aa, Setaria italica
  Transcript Sequence Number=SeqID_7864
FHLIESCLTLSTESISPSRRSPAPVVASEGNHHLMHMRGHPRQGRPATLLPLKCEHATCSHPFLLLDKHLLHLSQGKEEGRHQEGNGDKSLAVLPLL

SEQ ID NO: 73839 - protein, 162 aa, Setaria italica
  misc_feature (143)..(143): Xaa can be any naturally occurring amino acid
  Transcript Sequence Number=SeqID_7865
  Gene Ontology: Mol. function=protein tyrosine/serine/threonine phosphatase activity; Biological process=protein amino acid dephosphorylation
  Homolog annotation: Hit_ID=Q1EP41; Match level="QueryCoverage=82%, HitCoverage=30%, E-value=4e-59, Identity=75%"; Hit description=Dual specificity protein phosphatase family protein
MAAEAVGRRGAAARRKAKEAAVGVAARVLFYPTLLYNVVRSKAQAEFRWWDEVDQFILLGAVPFRRDVSRLQKLGVRGVITLNEPFETLVPSSMYQSRGIDHLVLPTRDYMFAPSLVDINQAVDFIHRNASSGKITYIHCKAXGRGRSTTIVLCYLVKYKNM

SEQ ID NO: 73840 - protein, 89 aa, Setaria italica
  Transcript Sequence Number=SeqID_7866
  Gene Ontology: Mol. function=protein dimerization activity; Cellular component=nucleus; Biological process=regulation of transcription, DNA-dependent
  Homolog annotation: Hit_ID=B6TRY4; Match level="QueryCoverage=41%, HitCoverage=16%, E-value=8e-13, Identity=94%"; Hit description=IAA2 -auxin-responsive Aux/IAA family member
  Pfam annotation: Domain name=AUX_IAA; Domain location=1-85; Score= -104.6; E_value=0.063; Accession=PF02309.8; Description=AUXIAA family
KNSLDCAAQRDPPAAAVGRRCGEEAAGEEAEEPVIGGEYTLVYEDEEGDRVLVGDVPWEMFVATAKRLRVLKSSDLPASSLRAGGGGRG

SEQ ID NO: 73841 - protein, 44 aa, Setaria italica
  Transcript Sequence Number=SeqID_7867
VLTHYRLDDKLSLTETLTTHQAVELMSGLATIPHLGLQLVPCGS

SEQ ID NO: 73842 - protein, 118 aa, Setaria italica
  Transcript Sequence Number=SeqID_7868
CAERERRGGRRSRAGQQLQPSTLRERGERERGREGAAGAAAEARSIRSGSGNQVASVDRASHLSIHLSSSTGINPHASVGGREGGEEGTGSGRHQANYLVWGRTGGGGFRRGRSGRET

SEQ ID NO: 73843 - protein, 240 aa, Setaria italica
  misc_feature (92)..(92): Xaa can be any naturally occurring amino acid
  misc_feature (146)..(146): Xaa can be any naturally occurring amino acid
  misc_feature (187)..(187): Xaa can be any naturally occurring amino acid
  Transcript Sequence Number=SeqID_7869
  Homolog annotation: Hit_ID=Q6Z954; Match level="QueryCoverage=98%, HitCoverage=45%, E-value=2e-34, Identity=42%"; Hit description=F-box protein family-like protein
SLPLRDAVRTSAVSRAWRRLWESAPGLALEWRPGTDAAVVDGVLPRYSGPVRSFEFDLHQGSFWRADDWVPHLADKGVQILKLHFSYDSFSXSAHYMDVSIFSCRELTSLDLSGGCKILAAPSGLAGFPKLTRLCLREVGFQGNGXRVLEALIAESPMLEVLLLDDLWFPDNNGLEEPTLRRPNSEXLSIYSDYGDYNWQIEDLPSIEEVVITTYEDTDGRDFVKLLTGLARVRKLNLEI

SEQ ID NO: 73844 - protein, 129 aa, Setaria italica
  Transcript Sequence Number=SeqID_7870
  Gene Ontology: Mol. function=DNA-directed RNA polymerase activity; Cellular component=nucleus; Biological process=transcription
  Homolog annotation: Hit_ID=P38420; Match level="QueryCoverage=95%, HitCoverage=10%, E-value=1e-59, Identity=89%"; Hit description=DNA -directed RNA polymerase II subunit RPB2
  Pfam annotation: Domain name=RNA_pol_Rpb2_1; Domain location=32-129; Score=13.2; E_value=5.8e-08; Accession=PF04563.7; Description=RNA polymerase beta subunit
MEEDGDAEQRDEEEITQEDAWAVISAYFEEKGLVRQQLDSFDEFIQNTMQEIVDESADIEIRPESQHNPGRQAEFAETLHKISFGQIYLSKPMMTEADGETATLFPKSARLRNLTYSAPLYVDVSYRVI

SEQ ID NO: 73845 - protein, 136 aa, Setaria italica
  Transcript Sequence Number=SeqID_7871
FFPVPSKSPQRRLSSSPPRRFVCIYREAEAGSNPVSPLKSFHLRRRHQIEGDVDIVFNPVPLPLLFCVHRGSAIFLVPAGEANRDERMLPMWPKPGAVQVGDGVADCDVQLQQRAAAQERDGSLLHPRARATTDSQ

SEQ ID NO: 73846 - protein, 138 aa, Setaria italica
  Transcript Sequence Number=SeqID_7872
  Gene Ontology: Mol. function=structural constituent of ribosome; Cellular component=intracellular; Biological process=translation
  Homolog annotation: Hit_ID=B6TRC5; Match level="QueryCoverage=42%, HitCoverage=38%, E-value=3e-15, Identity=72%"; Hit description =Ribosome-like protein
  Pfam annotation: Domain name=Ribosomal_S21; Domain location=49-102; Score=45.4; E_value=2.2e-10; Accession=PF01165.12; Description =Ribosomal protein S21
  Subcellular localization annotation: CTP_CleavageSite=42; ConfidenceScore=5.62e-01
MAAPATTSLLSTLLQLPLAPFSGKSSPPSVVHVPRRAPTAVVAAKGYNVQILVDENEGEESIFRRFRREVMRAGVLQEIKRRRRYESKKDEKKRKAREAGRRNRRRRMMDEPRFPEEDAGAAKARDDDDDNWEIDGLL

SEQ ID NO: 73847 - protein, 107 aa, Setaria italica
  Transcript Sequence Number=SeqID_7873
  Gene Ontology: Biological process=Mo-molybdopterin cofactor biosynthetic process
  Homolog annotation: Hit_ID=B6SXF8; Match level="QueryCoverage=73%, HitCoverage=84%, E-value=3e-32, Identity=88%"; Hit description =Molybdenum cofactor synthesis protein 2A
  Pfam annotation: Domain name=ThiS; Domain location=31-107; Score =78.6; E_value=2.3e-20; Accession=PF02597.12; Description=ThiS family
MATQDPKDAAPTEEEGPAAADPAAPAARLKVLYFARARDLTGVAESSVEVPAGGTAGECLARVLAQFPKLEEIRGSMVLALNEEYAPDSAKVADGDELAVIPPISGG

SEQ ID NO: 73848 - protein, 87 aa, Setaria italica
  Transcript Sequence Number=SeqID_7874
AVARIPEEVAKALTSFLSRAPSLCRTLVDQNRPPRYKLTFLNGLGTEVFTKKNIFDTNGEPLKICIIANYQEESDPRFVSAKIRVVV

SEQ ID NO: 73849 - protein, 810 aa, Setaria italica
  misc_feature (23)..(23): Xaa can be any naturally occurring amino acid
  misc_feature (74)..(74): Xaa can be any naturally occurring amino acid
  Transcript Sequence Number=SeqID_7875
  Gene Ontology: Cellular component=plasma membrane
  Homolog annotation: Hit_ID=Q9C6N3; Match level="QueryCoverage=21%, HitCoverage=15%, E-value=1e-16, Identity=36%"; Hit description =Transposon protein, putative
  Subcellular localization annotation: CTP_CleavageSite=64; ConfidenceScore=5.27e-01
QNFHPSSVPKRSFDSAVWLMDHXNAPQDRFRPLLSGVPASTFGSGNGNDVHKPMFSHISSLTTSSNASSDHGAXFGSYKHGNQEQQDLVGEWEADDSSRGHEDIFMFDKLDELNEENIHYKSTESMENSPSIVKRQVSDKQDFDMEGSGTCDQSLCHSTNSSLVGYGKTATCVRCGKFLDVDGEGDYCDICASKVGNTFTDSIAQTIEKANQQDDKAANLKPYIVSDRHIAPDSIDHRKEVSLDHQLVNNEPHTDCLDHALPLHSMMDTPQEMMLVQEGKIDAEHTKQHVGDSALGNRINIPFHQSSVTDPQQTELTSVEHELFRDQMDNRNHGLSQCGETISETVTCDDSHQLVSTSPKLENTEATGISVLLLQKSNSNRWPVVEGRALGSANTLCSEPYYARDGVNIMKRSFGRDSSSAASSSDLGSSRQSVIYCERPRSGKRGDFEKSQISSTMSRQSIASVSDMSISSSSASLCPQSDAVGDTYLPIDTLESSASRKVIPTKEHDSSGKVALTSAMECWSAAQAIVSDDSLVDLNTSSFVSVVEGDATIENHCTDRMADSDHFSSNICLSDTEMPSDIQESSAPEESCIPETEEDTSVISKHNTSSTPEHPSDENNLDNMQMQFEAAQGSNEENRLDDCCMSAISEEDVLVSEPKTNITELPNDEESHAVVEGSKKQIQRCFTLEEAADTILFCSSIVHDLAYKAATIALENEKESECLDSIRPTVTVVARSGQKEDSLPKLPHRRTPNRKVKRKRLEGETTTTETTEKDAVAKDSSPVRSASGITRNSDNMKPPKLESKCNCIIM

SEQ ID NO: 73850 - protein, 129 aa, Setaria italica
  Transcript Sequence Number=SeqID_7876
PPVSISSFSSHGDAIKFWQPGFAVGSACNALNLLSVERSETRWKPWQIEVLDRALLYEGPALADRLCWENGWDLKVSRLRWLQLALHYSMIADLEQSLDMLAEVNLAEEGVLQLLLASIHRLSGRSGSD

SEQ ID NO: 73851 - protein, 88 aa, Setaria italica
  Transcript Sequence Number=SeqID_7877
SPDPIHGGFESDELRRLCRGPNPEAAIRLLDQMLQRGGGAELQPEEQAALLQSCADSRSLALLRRAHRLLASRPSSAIPAPILHGIAT

SEQ ID NO: 73852 - protein, 136 aa, Setaria italica
  misc_feature (127)..(127): Xaa can be any naturally occurring amino acid
  Transcript Sequence Number=SeqID_7878
  Gene Ontology: Mol. function=structural molecule activity; Biological process=response to gibberellin stimulus
  Homolog annotation: Hit_ID=B6TP74; Match level="QueryCoverage=78%, HitCoverage=46%, E-value=2e-52, Identity=95%"; Hit description =Structural molecule
  Pfam annotation: Domain name=Motile_Sperm; Domain location=23-136; Score=105.0; E_value=2.5e-28; Accession=PF00635.18; Description=MSP (Major sperm protein) domain
PGSSRGGAGGVKVIRSLLPTRRRLRLDPPAKLYFPYEPGKQVRSAVRIKNISKSHVAFKFQTTAPKSCFMRPPGGILAPGESIIATVFKFVEHPENNEKPLEQKCKVKFKIVSLKVKGPMEYVPELXDEQKDQVAV

SEQ ID NO: 73853 - protein, 51 aa, Setaria italica
  Transcript Sequence Number=SeqID_7879
  Gene Ontology: Mol. function=structural molecule activity; Biological process=response to gibberellin stimulus
  Homolog annotation: Hit_ID=B6TP74; Match level="QueryCoverage=66%, HitCoverage=14%, E-value=3e-10, Identity=97%"; Hit description =Structural molecule
SFNIVLQFDEQKDQVAVEQILRVVFLDAERQSPQMDKLKRQLAEAEAALEA

SEQ ID NO: 73854 - protein, 71 aa, Setaria italica
  Transcript Sequence Number=SeqID_7880
CNMMGGRPLITLEGAFRDYITLSILIGQQLRECITFTCPQSTNSKYMASTDYLHTCRPKREVQHEAQILIT

SEQ ID NO: 73855 - protein, 192 aa, Setaria italica
  Transcript Sequence Number=SeqID_7881
  Gene Ontology: Mol. function=structural molecule activity; Biological process=response to gibberellin stimulus
  Homolog annotation: Hit_ID=B6TP74; Match level="QueryCoverage=95%, HitCoverage=79%, E-value=6e-82, Identity=84%"; Hit description =Structural molecule
  Pfam annotation: Domain name=Motile_Sperm; Domain location=5-117; Score=92.3; E_value=1.7e-24; Accession=PF00635.18; Description=MSP (Major sperm protein) domain
AEVLTLCCPPAKLYFPYEPGKQVRSAVRIKNISKSHVAFKFQTTAPKSCFMRPPGGILAPGESIIATVFKFVEHPENNEKPLEQKCKVKFKIVSLKVKGPMEYVPELFDEQKDQVAVEQILRVVFLDAERQSPQMDKLKRQLAEAEAALEARKKPPEDNGPRIVGEGLVIDEWKERRERYLARQQIEGVDSV

SEQ ID NO: 73856 - protein, 62 aa, Setaria italica
  Transcript Sequence Number=SeqID_7882
VAPILSTCLLANFPCPTHLKILHYLSTNTSVDYAQETAFVDRRQQRFSLIYRDGMNEGSKAK

SEQ ID NO: 73857 - protein, 50 aa, Setaria italica
  Transcript Sequence Number=SeqID_7883
SQRIASLSGHRTRPPPRLRRRTRLQEQLSLLRAVETAWLFLRHNLVMLGL

SEQ ID NO: 73858 - protein, 270 aa, Setaria italica
  Transcript Sequence Number=SeqID_7884
  Homolog annotation: Hit_ID=A6MGY3; Match level="QueryCoverage=90%, HitCoverage=34%, E-value=4e-28, Identity=32%"; Hit description=IFA binding protein
GLLSYLVTAFARLCKLQPPCPMCTRLDHVLGKVQKGFYCDLMCSSHKAEASSWAFCHIHQKLVDVHSMCEACLLSFATDKKSSLETYRSLVGKLGVGIDNAGRRDNFTSGNDTSEVQDMKETICSCCSRPLEVKSHPFVVLQSKASGIGIEGICRVVSRDHQNIDEINYAAYSELRTSDTESEPWQPVGNVGNLLKDYNDNLKEGFAMRHPLTKIADDMPPYDNSQGKIPEQSELTLVQNDGSDIKPFENSEELGNILDDGKANLQPTDL

SEQ ID NO: 73859 - protein, 48 aa, Setaria italica
  Transcript Sequence Number=SeqID_7885
  Gene Ontology: Mol. function=protein binding; Cellular component =cytoplasm; Biological process=meiosis
  Homolog annotation: Hit_ID=Q6K987; Match level="QueryCoverage=100%, HitCoverage=6%, E-value=7e-20, Identity=95%"; Hit description =Endoribonuclease L-PSP family protein-like
MEVVALVSGGKDSCFAMMRCLDYGHKVVALANLIPLDDAVDELDSYMY

SEQ ID NO: 73860 - protein, 99 aa, Setaria italica
  Transcript Sequence Number=SeqID_7886
  Gene Ontology: Mol. function=metal ion binding
  Homolog annotation: Hit_ID=B6TMV7; Match level="QueryCoverage=47%, HitCoverage=29%, E-value=7e-18, Identity=89%"; Hit description=RING -H2 finger protein ATL2L
  Pfam annotation: Domain name=zf-C3HC4; Domain location=36-78; Score =31.9; E_value=2.6e-06; Accession=PF00097.17; Description=Zinc finger, C3HC4 type (RING finger)
GSSSSASRRRPSARRGEDDEEASSSSSPPSGEPATCRVCLERLEATDEVRRLGNCAHAFHTRCIDRWIDMGEVTCPLCRSNLLPRRRAGLLGIGRARYG

SEQ ID NO: 73861 - protein, 76 aa, Setaria italica
  Transcript Sequence Number=SeqID_7887
  Gene Ontology: Cellular component=membrane
  Homolog annotation: Hit_ID=A6MZY1; Match level="QueryCoverage=90%, HitCoverage=31%, E-value=1e-11, Identity=39%"; Hit description =Serine incorporator 3 (Fragment)
GFGFFHLVFAMGAMYFAMIFVGWNAHQTMEKWTIDVGWASTWVRVGNEWLAAIVYIWMMIAPIIWKTRQVGSSAET

SEQ ID NO: 73862 - protein, 52 aa, Setaria italica
  Transcript Sequence Number=SeqID_7888
RFEFNFVQRAIDRSMSFLNRASRHLNYLVAVTTTTTTSCLFLDPCLPFTSSA

SEQ ID NO: 73863 - protein, 556 aa, Setaria italica
  Transcript Sequence Number=SeqID_7889
  Homolog annotation: Hit_ID=B9SKD3; Match level="QueryCoverage=47%, HitCoverage=44%, E-value=7e-77, Identity=54%"; Hit description=Yth domain-containing protein, putative
  Pfam annotation: Domain name=YTH; Domain location=406-496; Score =173.5; E_value=5.9e-49; Accession=PF04146.7; Description=YT521-B -like family
CVDYQARPVESNYVTDLRSHAYSEDPSPLGREYHRQKSCLPTSSCSCEKSSALEAAPSSPDALGHALGKMRTKINTLSARPDYFSSYPTTASHVRKHREVELDYGLDHSEHCYRRSGRVTAFSSHNGQSAGHCNEMVDYARGHHYVDDINPVSRQWCFDDGGPSLPRGLQYGDEIPSLSSKKYAPSRSSQWHYGPQTPLFSRRYEYGDEIPSLSPNWRYRDKIPSCSGHWCHDVGPHAPSRYRQGASHRNGHSRQNFSRINTNEQAKVTTSKHAFIKPRMVNRVANSSDHYRTNMKDNRCRNPEAVMDQVRGPRANKLNDASASSPVKDIMSPLVCREQFNRSDFSVQYKQAKFFMIKSYSEDDIHKGIKYNVWASTPNGNNKLDAAYHDAQILMKENGEKCPVFLFFSVNTSGQFVGLAEMLGPVDFKKTMDFWKDDRWSGFFPIIWHIIKDIPNRLFRHIILEYNDNRPVTFSRDTQEIGLLQGVQMLKIFKDHPQGASILDDFDFYEEKDSARGAQKRENPESTHQARFSEDLEPMGSLEASMESWSLYNNWD

SEQ ID NO: 73864 - protein, 96 aa, Setaria italica
  misc_feature (35)..(35): Xaa can be any naturally occurring amino acid
  Transcript Sequence Number=SeqID_7890
RLPSFDANAQSRCAEYLDLMRVEVDAQLGKLKGGXVTGLESYALPDNGRVIGGAHLGMSLDVMLIEIDERFNALKLLMGAVFRQAREMLGSVNASA

SEQ ID NO: 73865 - protein, 109 aa, Setaria italica
  Transcript Sequence Number=SeqID_7891
  Gene Ontology: Mol. function=heat shock protein binding; Cellular component=chloroplast; Biological process=protein folding
  Homolog annotation: Hit_ID=B6SUM8; Match level="QueryCoverage=77%, HitCoverage=68%, E-value=7e-26, Identity=70%"; Hit description =Chaperone protein dnaJ 11
  Pfam annotation: Domain name=DnaJ; Domain location=25-84; Score=79.5; E_value=1.2e-20; Accession=PF00226.23; Description=DnaJ domain
RRGGRFVARASAVAMAPALGTTARTHYEVLGVGAAASRGEIKAAYRRLAREVHPDAGGRGDEGFIRLHAAYATLADPDERARYDRSVARPAPARAVGFRPRRWETDQCW

SEQ ID NO: 73866 - protein, 91 aa, Setaria italica
  misc_feature (7)..(7): Xaa can be any naturally occurring amino acid
  Transcript Sequence Number=SeqID_7892
  Gene Ontology: Mol. function=transferase activity, transferring glycosyl groups; Cellular component=integral to membrane; Biological process=cell wall organization and biogenesis
  Homolog annotation: Hit_ID=Q9SB75; Match level="QueryCoverage=69%, HitCoverage=8%, E-value=1e-13, Identity=63%"; Hit description =Probable xyloglucan glycosyltransferase 5
TMENPNXYSVVEIDEPEAEALRAGLPPMDKDRGRSAKQFTWVLLLRAHRAAGCLTSLVAVAWALPSAVAKRFRRAAAATGMDGPELRRVAT

SEQ ID NO: 73867 - protein, 116 aa, Setaria italica
  Transcript Sequence Number=SeqID_7893
  Gene Ontology: Mol. function=oxidoreductase activity
  Homolog annotation: Hit_ID=Q5SMI8; Match level="QueryCoverage=94%, HitCoverage=24%, E-value=1e-47, Identity=80%"; Hit description =Putative D-amino acid dehydrogenase
SSTVSDEEALTAKDELLPKASGVYPGISKWDFVHARAGIRAMPPLTTNGSLPLLGCLDEMVGKKSNCKFWLVGGLGARGLLYHGLVGKLTAKAAICCDENVIPSEFTCWKGIKPSQ

SEQ ID NO: 73868 - protein, 269 aa, Setaria italica
  Transcript Sequence Number=SeqID_7894
  Gene Ontology: Mol. function=DNA binding; Biological process =transposition, DNA-mediated
  Homolog annotation: Hit_ID=Q852E1; Match level="QueryCoverage=96%, HitCoverage=69%, E-value=6e-82, Identity=53%"; Hit description =Putative regulatory protein
  Pfam annotation: Domain name=Nucleotid_trans; Domain location=15-220; Score=-125.1; E_value=0.085; Accession=PF03407.8; Description =Nucleotide-diphospho-sugar transferas
RTERTGTVESITCVNHAWAAPGSLLDLFLESFRIGDGIAHLLSHVLIVAMDPPAMERCRALHPHCYLYTIPGVDFASVKFFLSKEYLELVWSKLKLQRRVLQLGYNFLFTDVDVMWFRNPFKHVTAYADMSISSDVFFGDPDNIDNFPNTGFFHVRPNNRTIAMTRAWHEARERYPGRNEQPVFNAIKKGLVRDLGLRVQYMDPAFMGGFCSYGKDLRKICTMHANCCVGLANKLRDLATVLGDWKNYTRMPHWAKHAAKWTVPGACIH

SEQ ID NO: 73869 - protein, 87 aa, Setaria italica
  Transcript Sequence Number=SeqID_7895
PARAAGAGDDERRFKVANLHLGGLRLKSPDRQNMWDGEKQRLTAMHWLVAYGLGKAGKKSRAAAAGKAGNDVLWSMSSRVMADMWFK

SEQ ID NO: 73870 - protein, 103 aa, Setaria italica
  Transcript Sequence Number=SeqID_7896
  Gene Ontology: Cellular component=endoplasmic reticulum membrane
  Homolog annotation: Hit_ID=Q9FZ33; Match level="QueryCoverage=87%, HitCoverage=18%, E-value=3e-19, Identity=50%"; Hit description =Protein AUXIN RESPONSE 4
CGGRGGRHEVIEAWKAMNHSFQLGEWRGSSDEVRRLPMMVLWSGTWSDMWIDEGKKVAAALPDARFVYHSGGRWPQEDASEEISRLIAEFVTSSEEASDDRIE

SEQ ID NO: 73871 - protein, 154 aa, Setaria italica
  misc_feature (116)..(116): Xaa can be any naturally occurring amino acid
  misc_feature (145)..(145): Xaa can be any naturally occurring amino acid
  Transcript Sequence Number=SeqID_7897
  Gene Ontology: Mol. function=transferase activity, transferring glycosyl groups; Cellular component=plastid outer membrane; Biological process=biosynthetic process
  Homolog annotation: Hit_ID=B6UFC8; Match level="QueryCoverage=86%, HitCoverage=16%, E-value=2e-62, Identity=90%"; Hit description =Digalactosyldiacylglycerol synthase 1
GSRRRGCGRAAAEAEEGKEWEVVRMIRDGIKEFERRSQTSEIFEGLRSTGELVEKFKSSLKSFNMESQGSKEIPPLDLTEILANLARQSEPFLDQLGVRRDQCDRLVEALYRKQNXSLSEDTSLLVNDNSSDELDLRIASVLQSXGYHADDGSG

SEQ ID NO: 73872 - protein, 139 aa, Setaria italica
  misc_feature (130)..(130): Xaa can be any naturally occurring amino acid
  Transcript Sequence Number=SeqID_7898
  Gene Ontology: Mol. function=methyltransferase activity; Biological process=C-terminal protein amino acid methylation
  Homolog annotation: Hit_ID=B6T4W8; Match level="QueryCoverage=99%, HitCoverage=41%, E-value=9e-75, Identity=95%"; Hit description =Leucine carboxyl methyltransferase 1
  Pfam annotation: Domain name=LCM; Domain location=1-139; Score=-98.4; E_value=4e-07; Accession=PF04072.6; Description=Leucine carboxyl methyltransferase
NKGEVISTHYKLFSADIRDIPKLDSVIRMAEMDPSLPTFIIAECVLIYLDPTATGAIVNWASEKFTTAIFFLYEQIHPDDAFGEQMIRNLESRGCPLLGINATPTLSHKEKLFLDNGWQRAVAWDMLKIXNDFIDSQER

SEQ ID NO: 73873 - protein, 285 aa, Setaria italica
  misc_feature (131)..(131): Xaa can be any naturally occurring amino acid
  misc_feature (146)..(146): Xaa can be any naturally occurring amino acid
  Transcript Sequence Number=SeqID_7899
  Gene Ontology: Mol. function=methyltransferase activity; Biological process=C-terminal protein amino acid methylation
  Homolog annotation: Hit_ID=B6T4W8; Match level="QueryCoverage=98%, HitCoverage=86%, E-value=1e-148, Identity=87%"; Hit description =Leucine carboxyl methyltransferase 1
  Pfam annotation: Domain name=LCM; Domain location=1-271; Score=237.8; E_value=2.8e-68; Accession=PF04072.6; Description=Leucine carboxyl methyltransferase
MKDDYVRFFVRRATRRAPIINRGYYARWSVLRKLLHQFLNAGKNSNDEKPKQILSLGAGFDTTFFQLQDEGIAPHLYVELDFKEVTSKKAAIINHYSEMKEKLGSEASISIDKGEVISTHYKLFSADIRDXPKLDSVIRMAEMDPXCVLIYLDPTATGAIVNWASEKFTTAIFFLYEQIHPDDAFGEQMIRNLESRGCPLLGINATPTLSHKEKLFLDNGWQRAVAWDMLKIYNDFIDSQERRRIERLELFDEFEEWHMMQEHYCVAYGINDAEGIFQNFGFDKE

SEQ ID NO: 73874 - protein, 110 aa, Setaria italica
  Transcript Sequence Number=SeqID_7900
  Gene Ontology: Cellular component=chloroplast
  Homolog annotation: Hit_ID=B9SWD4; Match level="QueryCoverage=100%, HitCoverage=42%, E-value=1e-12, Identity=36%"; Hit description=ATP binding protein, putative
IWRRKKEMGKEGLMAVAQLKRLAALPPAGAHPRLEQFMGSHVSRLLRTDLLAVLAELLRQDHVILSMKIYGVVRKEIWYRPDMYFYRDMLYLLARNRKVDETRQVWADLK

SEQ ID NO: 73875 - protein, 264 aa, Setaria italica
  Transcript Sequence Number=SeqID_7901
  Gene Ontology: Mol. function=protein serine/threonine kinase activity; Cellular component=integral to membrane; Biological process=multicellular organismal development
  Homolog annotation: Hit_ID=Q40699; Match level="QueryCoverage=93%, HitCoverage=24%, E-value=1e-100, Identity=82%"; Hit description =Leucine-rich repeat/receptor protein kinase
  Pfam annotation: Domain name=Pkinase; Domain location=9-240; Score =64.3; E_value=4.4e-16; Accession=PF00069.17; Description=Protein kinase domain
  Pfam annotation: Domain name=Pkinase_Tyr; Domain location=3-264; Score=32.4; E_value=7e-16; Accession=PF07714.9; Description=Protein tyrosine kinase
  Pfam module annotation: Pfam domain module=Pkinase::Pkinase_Tyr; Domain location=9-240::3-264
KKTKQNGTGNGRLGRIQRRLVGRGCGDHDRGFTAEVTTLGRIRHRNIVRLLGFVSNREANLLLYEYMPNGSLGEMLHGGKGGHLGWEARARVAAEAACGLCYLHHDCAPRIIHRDVKSNNILLDSAFEAHVADFGLAKFLGGGGGGATSECMSAIAGSYGYIAPEYAYTLRVDEKSDVYSFGVVLLELITGRRPVGSFGDGVDIVHWVRKVTAELPDTSDAAAVLAVADRRLAPEPVALVVDLYKVAMACVEEASTARPTMREV

SEQ ID NO: 73876 - protein, 190 aa, Setaria italica
  misc_feature (102)..(102): Xaa can be any naturally occurring amino acid
  Transcript Sequence Number=SeqID_7902
  Gene Ontology: Mol. function=hydrolase activity, hydrolyzing O -glycosyl compounds; Cellular component=anchored to membrane; Biological process=carbohydrate metabolic process
  Homolog annotation: Hit_ID=Q7XVG8; Match level="QueryCoverage=100%, HitCoverage=46%, E-value=2e-75, Identity=76%"; Hit description =OSJNBa0073L04.8 protein
  Pfam annotation: Domain name=Glyco_hydro_17; Domain location=42-189; Score=-99.6; E_value=2.7e-05; Accession=PF00332.10; Description =Glycosyl hydrolases family 17
MAMAERFGARWPPSHFLFAGVVLVLLTVADRRVVLRAEAMSVGINYGQIADNLPSPARVSWMLRSMQVSKVKLYDADPYVLSAFLDTGVEFVVGIGNENVSXMMDPAAALAWIQRHVQPYLPGTRITCITVGNEVFKGNDTELKANLLPAMQSVYQAVTALGLQGRVNVTTAHSLDIMGSSFPPSAGAFR

SEQ ID NO: 73877 - protein, 40 aa, Setaria italica
  Transcript Sequence Number=SeqID_7903
NYSNNMLEVKQKTYTSNYRDPVSELFRDEHATNKEHKNIY

SEQ ID NO: 73878 - protein, 243 aa, Setaria italica
  misc_feature (8)..(8): Xaa can be any naturally occurring amino acid
  misc_feature (23)..(23): Xaa can be any naturally occurring amino acid
  misc_feature (36)..(36): Xaa can be any naturally occurring amino acid
  misc_feature (43)..(43): Xaa can be any naturally occurring amino acid
  Transcript Sequence Number=SeqID_7904
  Gene Ontology: Cellular component=integral to membrane
  Homolog annotation: Hit_ID=Q00W74; Match level="QueryCoverage=95%, HitCoverage=56%, E-value=7e-31, Identity=37%"; Hit description =Integral membrane family protein (ISS)
  Pfam annotation: Domain name=DUF92; Domain location=1-236; Score =229.7; E_value=7.5e-66; Accession=PF01940.8; Description=Integral membrane protein DUF92
LLVFFFTXSRVTRVGEARKRALXDPEFKEGGQRNWXPHSYWQXSKFLSNSGIASILVVLIALVTGGTDRCLDSKESTLVTALIGGVIGHYACCNGDTWSSELGILSKAEPRIITTFKRVQKGTNGGVTIDGLLAAAAAGFSIGLAFVLIGFLTTHCASDVFWRQLLVIPLATAAGLCGSLIDSILGATVQYSGFCSVRKKVVGVDGPTVTRISGINILDNNGVNVVSVFLTTVLTGVACTYIF

SEQ ID NO: 73879 - protein, 137 aa, Setaria italica
  Transcript Sequence Number=SeqID_7905
  Gene Ontology: Mol. function=protein binding; Biological process =defense response
  Homolog annotation: Hit_ID=Q2R0W6; Match level="QueryCoverage=87%, HitCoverage=21%, E-value=8e-33, Identity=55%"; Hit description =Leucine Rich Repeat family protein, expressed
TARPGVRLEAADEPMEMLSLCNSKFRCLKIFRLYGPIKGLMFEAGAVPQLEALSIEIRACEEQSAFADHPDLGIHHLASLRDLNVWINCEGAKVEEVEALEAAITDATNLLPNHPTPRFYRDNEEGMEKDGACVKGG

SEQ ID NO: 73880 - protein, 452 aa, Setaria italica
  Transcript Sequence Number=SeqID_7906
  Gene Ontology: Mol. function=protein serine/threonine kinase activity; Biological process=protein amino acid phosphorylation
  Homolog annotation: Hit_ID=B9RQE1; Match level="QueryCoverage=94%, HitCoverage=67%, E-value=1e-171, Identity=69%"; Hit description =Serine/threonine-protein kinase PBS1, putative
  Pfam annotation: Domain name=Pkinase; Domain location=141-424; Score =137.0; E_value=5.9e-38; Accession=PF00069.17; Description=Protein kinase domain
  Pfam annotation: Domain name=Pkinase_Tyr; Domain location=141-424; Score=142.1; E_value=1.8e-39; Accession=PF07714.9; Description =Protein tyrosine kinase
  Pfam module annotation: Pfam domain module=Pkinase::Pkinase_Tyr; Domain location=141-424::141-424
TTPPPAPAPAPTDNTLPETPDHHSTKFPFGWVIGSMGVALALIAVALLALVLWKSFRHNLQDPSNQGKSPDQHKFQLLKSGSFCYGSGRYLCCQFGNTKPTRADGGDHNTSVPKGVAADVFDREKPVVFTYEEILTSTDSFADANLLGHGTYGSVYYGVLRDQEVAIKRMMATKTKEFLVEMKVLCKVHHASLVELIGYAASKDELFLVYEYSQNGSLKNHLHDPESKGYSSLSWIFRVQIALDAARGLEYIHEHTKDHYVHRDIKSSNILLDGSFRAKISDFGLAKLVVKSSDAEASVTKVVGTFGYLAPEYLRDGLATTKSDVYAFGVVLFELISGKEAITRAEGMGASSNSERRSLASVMLNALRKCPSSMYMGNLKDCIDRNLRDLYPHDCVFKMAMLAKQCVDEDPVLRPDMKQVVITLSQILLSSIEWESTQAGNSQVFSGLVAGR

SEQ ID NO: 73881 - protein, 64 aa, Setaria italica
  misc_feature (50)..(50): Xaa can be any naturally occurring amino acid
  misc_feature (59)..(59): Xaa can be any naturally occurring amino acid
  Transcript Sequence Number=SeqID_7907
  Subcellular localization annotation: CTP_CleavageSite=37; ConfidenceScore=5.40e-01
MVKGLPFSSLFYTTNSAQDTPPPSPPPAAPPAWMWPSCKHPRTQSFRTPXAAAKTIASXFLDLR

SEQ ID NO: 73882 - protein, 73 aa, Setaria italica
  Transcript Sequence Number=SeqID_7908
  Subcellular localization annotation: CTP_CleavageSite=36; ConfidenceScore=5.43e-01
PTQQNLGLATSPSSRSSPQASLSVALQPSIVPIVVVVVEVGNVTCKLTSYSQGIGIAPHHHSYANFMWPNAKG

SEQ ID NO: 73883 - protein, 293 aa, Setaria italica
  Transcript Sequence Number=SeqID_7909
  Gene Ontology: Cellular component=vacuole
  Homolog annotation: Hit_ID=A8Y5V3; Match level="QueryCoverage=98%, HitCoverage=77%, E-value=8e-76, Identity=48%"; Hit description=Alpha galactosidase
  Pfam annotation: Domain name=DUF231; Domain location=172-293; Score =91.9; E_value=2.3e-24; Accession=PF03005.7; Description=Arabidopsis proteins of unknown function
ATPGAASCDVFSGSWVLGDASASAYTGYNCPLIDAEFNCQLYGRPDSDYLRYRWKPAGCELPRFDGADFLTRMKGKTVMFVGDSLGRNQWESLVCLLHAAAPQSPAQLVSSDPLYNYKFLEYEVTVSFYRAPYLVDIDVVQGKKVLMLDDITENAEAWRDADVLSFNSGHWWTHTGAMQGWDYMGEAGRYYEDMDRTVAFQRGLTTWANWVDLNVDPAKTRVFFQAMSPTHYSSKEWPNPVSKNCYGETTPVVGLNSTTTTGQASSGQEQVIQAVLRGMKSPVRLLDITALSA

SEQ ID NO: 73884 - protein, 117 aa, Setaria italica
  Transcript Sequence Number=SeqID_7910
  Homolog annotation: Hit_ID=Q8DL61; Match level="QueryCoverage=52%, HitCoverage=50%, E-value=2e-14, Identity=62%"; Hit description =Tlr0636 protein
QTQAGISAPPRPPELPLFLPGMVVLVKNPNNAYHMYCGIVQRVTDGKVAVLFEGGNWDRLITFNLDELEGREKGPPMVNPKSVVLEDLVAELVDDDDKKEDQAAKKEKEPEGTVAAA

SEQ ID NO: 73885 - protein, 89 aa, Setaria italica
  Transcript Sequence Number=SeqID_7911
VVHLGTSAATRRRSDGSNVTFHLTQLQWHHSELDTENGNVVCQEEAWFDSVSILGSDSDEDFSSVNGDLPAMSNSVGTQLMQCEDASSI

SEQ ID NO: 73886 - protein, 66 aa, Setaria italica
  Transcript Sequence Number=SeqID_7912
  Subcellular localization annotation: CTP_CleavageSite=46; ConfidenceScore=5.04e-01
KVYPNIFHIYLQFSTVLKYCYSLFKFRCSTCKLTVFCSSEAVAFVRDQLRQHGDVQVFSLSELRKL

SEQ ID NO: 73887 - protein, 159 aa, Setaria italica
  Transcript Sequence Number=SeqID_7913
  Gene Ontology: Mol. function=protein serine/threonine phosphatase activity; Cellular component=protein serine/threonine phosphatase complex; Biological process=protein amino acid dephosphorylation
  Homolog annotation: Hit_ID=Q5JKN1; Match level="QueryCoverage=100%, HitCoverage=40%, E-value=4e-76, Identity=86%"; Hit description =Probable protein phosphatase 2C 5
VSRAFGDIRFKTRKNEMLMKGVKEGRWTEKFISRIKFKEDIIISSPDVSLIELGPDVEFVLLATDGLWDYIKSSEAVAFVRDQLRQHGDVQLACEALGQKALDERSQDNISIVIADLGRTNWKALPVERPNLFLELSQAVVTLGFVSIGIWFSSFLALQ

SEQ ID NO: 73888 - protein, 324 aa, Setaria italica
  Transcript Sequence Number=SeqID_7914
  Gene Ontology: Mol. function=protein serine/threonine phosphatase activity; Cellular component=protein serine/threonine phosphatase complex; Biological process=protein amino acid dephosphorylation
  Homolog annotation: Hit_ID=Q5JKN1; Match level="QueryCoverage=91%, HitCoverage=76%, E-value=1e-153, Identity=88%"; Hit description =Probable protein phosphatase 2C 5
  Pfam annotation: Domain name=PP2C; Domain location=1-268; Score =138.5; E_value=2e-38; Accession=PF00481.13; Description=Protein phosphatase 2C
DEVVLRTGCLLDGFSFAAVFDGHAGFSAVKFLRDELYKECAAALDGGKVLSTKNLEAITDSIQRAFAAVDAKLSTWLEQMEKDDDSGATATAMFLRNDVLVVSHIGDSCLVISRGGRPEALTGSHRPYGNNKTSLEEVKRIRAAGGWIVDGRICGDISVSRAFGDIRFKTRKNEMLMKGVKEGRWTEKFISRIKFKEDIIISSPDVSLIELGPDVEFVLLATDGLWDYIKSSEAVAFVRDQLRQHGDVQLACEALGQKALDERSQDNISIVIADLGRTNWKALPVERPNLFLELSQAVVTLGTKLKGFKSKTKTKIKRKNLKGK

SEQ ID NO: 73889 - protein, 141 aa, Setaria italica
  Transcript Sequence Number=SeqID_7915
  Homolog annotation: Hit_ID=B6U013; Match level="QueryCoverage=100%, HitCoverage=34%, E-value=2e-48, Identity=73%"; Hit description=F-box protein
SWEGPVPLFRRSEDSSCPDAPGQAGDDDTVYFLSKSGDVVATNMQRSASKQYSSVVVPSPARGEEGAVAYFLSHSGTVVACDTARRTFRELPRILPVYFEYSIDVVACGGAAYAVVLSEYLDTASLRVWEFAGGAWRQVAA

SEQ ID NO: 73890 - protein, 296 aa, Setaria italica
  misc_feature (252)..(252): Xaa can be any naturally occurring amino acid
  misc_feature (269)..(269): Xaa can be any naturally occurring amino acid
  misc_feature (287)..(287): Xaa can be any naturally occurring amino acid
  Transcript Sequence Number=SeqID_7916
  Gene Ontology: Mol. function=protein binding; Cellular component =nucleus; Biological process=regulation of transcription, DNA -dependent
  Homolog annotation: Hit_ID=B6SHJ4; Match level="QueryCoverage=100%, HitCoverage=49%, E-value=1e-133, Identity=79%"; Hit description=BSD domain containing protein
  Pfam annotation: Domain name=BSD; Domain location=118-179; Score =37.3; E_value=6e-08; Accession=PF03909.9; Description=BSD domain
  Pfam annotation: Domain name=BSD; Domain location=194-255; Score =54.3; E_value=4.7e-13; Accession=PF03909.9; Description=BSD domain
  Pfam module annotation: Pfam domain module=BSD::BSD; Domain location =118-179::194-255
MGSLTIGAKYKTTLKDPGTPGILRMNDDKFTFTPNDPRSAMKLNVEFRSIKGHKFNKVDGNKPALLNLSKDSDKGGGYMFEFDNVGNRDLCRDFVARVLGKHQGMPPRPTMPPEISVPSAGMEQLSAAEVERRVKLLREDSELQKLHKKFVLGNILQESEFWATRKNLLDDVANKASKQKPGFKTAMSDVRPSADGRTNKVTFNLTPEMIHQIFAEKPAVRRAFLDFVPKKMTDLEFWRKYCRAEYLLRTKXNTAAAAAEAAEDEELAXFLKNDDILVKEAKVKDKXQVDPTLDME

SEQ ID NO: 73891 - protein, 83 aa, Setaria italica
  Transcript Sequence Number=SeqID_7917
KNVYELKKFCQIKTCASNIQLSSQLHIPDIKRNSAGTSSNHITYLLATVSHVAPLQQHSAVPYQQMELRFQEAWLVEGASLDV

SEQ ID NO: 73892 - protein, 405 aa, Setaria italica
  Transcript Sequence Number=SeqID_7918
  Gene Ontology: Mol. function=protein binding; Cellular component =nucleus; Biological process=regulation of transcription, DNA -dependent
  Homolog annotation: Hit_ID=B6SHJ4; Match level="QueryCoverage=99%, HitCoverage=66%, E-value=0.0, Identity=81%"; Hit description=BSD domain containing protein
  Pfam annotation: Domain name=BSD; Domain location=1-60; Score=45.5; E_ value=2.1e-10; Accession=PF03909.9; Description=BSD domain
LPKWKVYLVLTPEMIHHIYAEKPAVRRAFLDFVPKKMTDLEFWRKYCRAEYLLRTKNTAAAAAEAAEDEELAVFLKNDDILVKEAKLKIKQVDPTLDMEADAGDDYIHLPDHGILRDGSKETVDNDSEFARRTLSQELNRHAAVVLEGIASDVELTDAKSVAEALARSKKEPPSTSAVDDTSHERLLKVARMTEIEDLQAPRSLPYAPLCIKDPREYFDSQQANALRSLGASNDGRKSRNCSLSIEEAFHHLTDQISSIKVNKSNCTVIQSDMAVKVLNELNEGISRSRRLNLKNPQEGLLGRVPQHTRDELMDHWTAIQELLRHFWSSYPITSTVLYNKVQRVKDAMTQIYQKLQAIKESAQPDVRHEISRLVKPMTQALDAAFSHDLEQQQKSAKAGNKSNGF

SEQ ID NO: 73893 - protein, 173 aa, Setaria italica
  Transcript Sequence Number=SeqID_7919
  Homolog annotation: Hit_ID=Q9SA06; Match level="QueryCoverage=85%, HitCoverage=44%, E-value=1e-33, Identity=47%"; Hit description =F28K20.6 protein
ASESAPPSLSFVLFLLLVVFVFLGIHVYISALWHLASVVSVLEPLCGLAAMAKSKQLLQGRAGTAATLVVSYFAVCGVTSLLFRAAVVKARGEDGSFGLALPGRLLVGALLVCVLACVNLLGLLVQSVFYYACKAFHNQQIDRSALYEHLGGYLGEYVPLKSNIQMENLEIGA

SEQ ID NO: 73894 - protein, 53 aa, Setaria italica
  Transcript Sequence Number=SeqID_7920
PNHMFLVTVILAYVTRLELHSFLSFASSKLYLNREEIGQSFIKFMSCRKLSFF

SEQ ID NO: 73895 - protein, 98 aa, Setaria italica
  Transcript Sequence Number=SeqID_7921
GGYGGGMYGGGGMYGGGMYGGGGMGGYGSYGMGGMGGMGGMGMGPYGNQDPNAMGPPASPPGFWVSFLRVVRYLFMIHAINHYCESLKLIKHVFYLRC

SEQ ID NO: 73896 - protein, 77 aa, Setaria italica
  Transcript Sequence Number=SeqID_7922
LASRDLVPIIENYQTDRNLVVTAVKVLVFLTMPVEPSSEEVAQQIEYLWDLKAALTRNVAMTVIVSLLEDPLDRLER

SEQ ID NO: 73897 - protein, 88 aa, Setaria italica
  Transcript Sequence Number=SeqID_7923
LIAPNAFGFSEAREHKGLNSELWHVPCPHVLVACGSGVFSSSHGISICSGLERTSRMVRLSLACIIILFIFEIFRWSHLPYLSMSPPF

SEQ ID NO: 73898 - protein, 127 aa, Setaria italica
  misc_feature (5)..(6): Xaa can be any naturally occurring amino acid
  misc_feature (115)..(115): Xaa can be any naturally occurring amino acid
  Transcript Sequence Number=SeqID_7924
  Gene Ontology: Cellular component=cell wall
  Homolog annotation: Hit_ID=Q9XI11; Match level="QueryCoverage=90%, HitCoverage=16%, E-value=4e-22, Identity=49%"; Hit description=F8K7.9
PARRXXVAGRGGWPTWHGERTLFFHRVADDGWWSVFRVDLSPDTLEPTGDGERRVTPPGLHCFTPPRPAEVGAGWIAVATRRKDRAQRHIELFDLETERFSPLTELLNPDLHHYXPFFSPSGGRLGY

SEQ ID NO: 73899 - protein, 237 aa, Setaria italica
  misc_feature (25)..(25): Xaa can be any naturally occurring amino acid
  Transcript Sequence Number=SeqID_7925
  Gene Ontology: Mol. function=RNA binding; Cellular component =chloroplast; Biological process=response to stress
  Homolog annotation: Hit_ID=B6TZ31; Match level="QueryCoverage=100%, HitCoverage=64%, E-value=1e-118, Identity=89%"; Hit description=RNA binding S1
  Pfam annotation: Domain name=S1; Domain location=39-117; Score=62.7; E_value=1.3e-15; Accession=PF00575.15; Description=S1 RNA binding domain
VTKDLVGTSISVKVSEVNEEERKLXFSEKDASWSTYSSQIKIGDIYDGIVGSVFHYGAFVHLRFPDGLYHLTGLVHLSEVSWDLVQDVQDFLNEGDAVKVKVVNVDTVKSRIALSIRQLEEDPLLETLDKVIPLEADQSPDRVMSPSEVELLPGLDGICNELLQEDGITDVQFGRQALEKRVVSQDLELWLSNVPAKDNKFTLLARAGRQVQEVYLTTSLDQEGIKKAVQRVLGRVP

SEQ ID NO: 73900 - protein, 104 aa, Setaria italica
  Transcript Sequence Number=SeqID_7926
  Gene Ontology: Mol. function=oxidoreductase activity; Biological process=oxidation reduction
  Homolog annotation: Hit_ID=O81606; Match level="QueryCoverage=87%, HitCoverage=28%, E-value=2e-40, Identity=86%"; Hit description=1 -aminocyclopropane-1-carboxylate oxidase
MVVPVIDFSKLDGAAAERAETMAQIANGCEEWGFFQLVNHGIPLELLERVKKVCSECYRIREAGFKASEPVRTLEALVEAEQRGEAVAPVERTIGTREGTILTN

SEQ ID NO: 73901 - protein, 56 aa, Setaria italica
  misc_feature (46)..(56): Xaa can be any naturally occurring amino acid
  Transcript Sequence Number=SeqID_7927
AHAHPALGFFHVLKATIIIVRLMLYYYCSNAIKCDPFTSKKKKNNXXXXXXXXXXX

SEQ ID NO: 73902 - protein, 53 aa, Setaria italica
  misc_feature (18)..(18): Xaa can be any naturally occurring amino acid
  Transcript Sequence Number=SeqID_7928
  Gene Ontology: Mol. function=oxidoreductase activity; Biological process=oxidation reduction
  Homolog annotation: Hit_ID=Q2TVK1; Match level="QueryCoverage=100%, HitCoverage=38%, E-value=5e-16, Identity=84%"; Hit description=1 -aminocyclopropane-1-carboxylic acid oxidase (Fragment)
NEATISPAAVAGGEAYPXKYVFGDYMDVYAKQKFQAKEPRFEAVKAPKSSPAA

SEQ ID NO: 73903 - protein, 312 aa, Setaria italica
  Transcript Sequence Number=SeqID_7929
  Gene Ontology: Mol. function=oxidoreductase activity; Biological process=oxidation reduction
  Homolog annotation: Hit_ID=O81606; Match level="QueryCoverage=97%, HitCoverage=96%, E-value=1e-162, Identity=89%"; Hit description=1 -aminocyclopropane-1-carboxylate oxidase
  Pfam annotation: Domain name=2OG-FeII_Oxy; Domain location=159-259; Score=151.6; E_value=2.4e-42; Accession=PF03171.12; Description=2OG -Fe(II) oxygenase superfamily
MVVPVIDFSKLDGAAAERAETMAQIANGCEEWGFFQLVNHGIPLELLERVKKVCSECYRIREAGFKASEPVRTLEALVEAEQRGEAVAPVDDMDWEDIFYIHDGSQWPSNPPEFKETMREYRAELRKLAGRVMEAMDENLGLEKGAIQRAFSGDGRHEPFFGTKVSHYPPCPRPDLVTGLRAHTDAGGVILLYQDDQVGGLEVLKDGQWTDVQPLAGAIVVNTGDQIEVLSNGRYRSAWHRVLPMRNANRRSIASFYNPANEATISPAVAAGGEAYPKYVFGDYMDVYAKQKFQAKEPRFEAVKAPKSSPAA

SEQ ID NO: 73904 - protein, 277 aa, Setaria italica
  Transcript Sequence Number=SeqID_7930
  Gene Ontology: Mol. function=protein dimerization activity; Cellular component=nucleus; Biological process=regulation of transcription, DNA-dependent
  Homolog annotation: Hit_ID=B6TJZ4; Match level="QueryCoverage=100%, HitCoverage=98%, E-value=1e-104, Identity=71%"; Hit description=IAA7- auxin-responsive Aux/IAA family member
  Pfam annotation: Domain name=AUX_IAA; Domain location=32-269; Score =70.5; E_value=6.1e-18; Accession=PF02309.8; Description=AUXIAA family
MGEAAEGNKALRNWMGEPRPRDQDDEEKTLQLSLGLPGGGGGGAWGAAGREKGNHHHHHSAADTSMLSLGYSNAAAFSPCSQGKAKGSPAAAPATGHALASTNNASQTRSPNAPVIGWPPVRTFRRNLATSSKASLDHQNGKKAAKPEETTKRAPFVKINMDGIPIGRKIDLNALDSYENLSLAVDKLFRGLLAAQQDPLAAGTRECSQEEVAISGLLDGTGEYTLVYEDYEGDRVLVGDVPWGMFVSSVKRLRVLKTSDLSSSLTPSGRKRAVAEC

SEQ ID NO: 73905 - protein, 251 aa, Setaria italica
  Transcript Sequence Number=SeqID_7931
  Gene Ontology: Mol. function=protein dimerization activity; Biological process=lignin biosynthetic process
  Homolog annotation: Hit_ID=Q96565; Match level="QueryCoverage=100%, HitCoverage=69%, E-value=3e-55, Identity=46%"; Hit description=N -methyltransferase
  Pfam annotation: Domain name=Dimerisation; Domain location=32-84; Score=36.7; E_value=9e-08; Accession=PF08100.3; Description =Dimerisation domain
  Pfam annotation: Domain name=Methyltransf_2; Domain location=93-251; Score=39.9; E_value=9.2e-11; Accession=PF00891.10; Description=O -methyltransferase
  Pfam module annotation: Pfam domain module=Dimerisation::Methyltransf_ 2; Domain location=32-84::93-251
MDKIGFVNGAGVDEDSTCLHAQSLVYAYNVTMAVKAAVKLGLLDELSAADGRAVTADELAAKVVQAEDKTVSAAWIGRILRFLASFDVVRFSAEKGADGSVLWRYSPAPACRWLTRNNGDGSLGPMSVFAVDEDNLSSWHYIADAVAGGVKQTPFELAHGGTPAYEYFGKTPRLSTLFDQAMAQQSLLVIRKLLDHPKVFAGVGVLVDVGGGTGATLAVIRDRYKNIRGINMDLPHVISDAPLLPGVEHVA

SEQ ID NO: 73906 - protein, 128 aa, Setaria italica
  misc_feature (51)..(51): Xaa can be any naturally occurring amino acid
  misc_feature (104)..(104): Xaa can be any naturally occurring amino acid
  Transcript Sequence Number=SeqID_7932
  Gene Ontology: Mol. function=hydrolase activity; Biological process =metabolic process
  Homolog annotation: Hit_ID=B6T7L7; Match level="QueryCoverage=85%, HitCoverage=32%, E-value=1e-40, Identity=68%"; Hit description =Gibberellin receptor GID1L2
KMWGFVCPEGTDGADDPRLNPLTATAPSLRNFPCKRVLVCVAEKDFTRPRXRAYYEALAASGWSGTAELFESEGQEHVFFLFKPGCDEAAALMERLVSFFAGNXNTSCVTTTTLAETNGATSDGAADC

SEQ ID NO: 73907 - protein, 381 aa, Setaria italica
  Transcript Sequence Number=SeqID_7933
  Gene Ontology: Mol. function=cysteine-type endopeptidase activity; Cellular component=integral to endoplasmic reticulum membrane; Biological process=proteolysis
  Homolog annotation: Hit_ID=Q8GYI6; Match level="QueryCoverage=93%, HitCoverage=93%, E-value=1e-151, Identity=73%"; Hit description =Putative GPI-anchor transamidase
  Pfam annotation: Domain name=Peptidase_C13; Domain location=26-287; Score=81.8; E_value=2.5e-21; Accession=PF01650.10; Description =Peptidase C13 family
  Subcellular localization annotation: CTP_CleavageSite=32; ConfidenceScore=5.33e-01
ALLLPVLLLAFSSSSAAAAAAMHNNNWAVLVCTSRFWFNYRHMANTLSLYRTVKRLGIPDERIILMLADDMACNPRNSYPAQVFNNENHQLNLYGDNVEVDYRGYEVTVENFLRILTGRHESAVPRSKRLLSDEGSHILLYMTGHGGDEFLKFQDSEELQSHDLADAVKQMKEKHRFKELLIMVDTCQAATLFSQLHSPGVLAIGSSMKGENSYSHHLDSDIGVSVVDRFTYYTLAFFEKLNMYSNASLNSLFNSYDRSMLMSTAYYRMDLYERPLNEVPVTNFFGSVMKTLHTDSAYTGFLAAHDDEVPMSMRDNQHDHFMSKNEASARRLNREKEAQIIPHGWTEVLLEQLEGKNTDIVALYGLGAMGILLALSTWLSM

SEQ ID NO: 73908 - protein, 270 aa, Setaria italica
  Transcript Sequence Number=SeqID_7934
  Gene Ontology: Mol. function=catalytic activity; Biological process =metabolic process
  Homolog annotation: Hit_ID=B6TMM7; Match level="QueryCoverage=96%, HitCoverage=84%, E-value=1e-130, Identity=86%"; Hit description=HAD -superfamily hydrolase, subfamily IIA
  Pfam annotation: Domain name=Hydrolase; Domain location=44-230; Score= 18.0; E_value=0.0013; Accession=PF00702.18; Description=haloacid dehalogenase-like hydrolase
MARRIQVRQIAVEKLAGNGAKMVIISNSSRRSSVTIEKLQSLGFDTSCFLGTITSGELTHQHLLKRNDPWFAALGRKCIHITWGNRGAISLEGLGLQVVNNVDDAEFILAHGTEALGSPSGDPLPKSLEELEQVLMLGLEKRLPMVVANPDYVTVEARDLRVMPGTLAAKYESLGGEVKWMGKPDKVIYTSAMSLAGVDAHECIMVGDSLHHDIKGANATGIASAFITGGIHAAELGLTEFGETAGEDAINALCSKHGSYPSYVLPSFTW

SEQ ID NO: 73909 - protein, 95 aa, Setaria italica
  misc_feature (17)..(17): Xaa can be any naturally occurring amino acid
  misc_feature (53)..(53): Xaa can be any naturally occurring amino acid
  Transcript Sequence Number=SeqID_7935
RAGNSYPFPAPDQEVPXVLGNRCAVMHFWSAAAAAWHGVARARRELVHILMVXDRKKNLTFLCLRMWGCQCHRQASGGTGMWSTSRTTPSCPAFP

SEQ ID NO: 73910 - protein, 83 aa, Setaria italica
  Transcript Sequence Number=SeqID_7936
  Gene Ontology: Mol. function=oxidoreductase activity; Cellular component=extracellular region; Biological process=oxidation reduction
  Homolog annotation: Hit_ID=Q4VJ26; Match level="QueryCoverage=83%, HitCoverage=10%, E-value=2e-26, Identity=89%"; Hit description =Laccase 1
  Pfam annotation: Domain name=Cu-oxidase_3; Domain location=27-83; Score=6.6; E_value=3.4e-07; Accession=PF07732.7; Description =Multicopper oxidase
MVRLLLALALLLVGPVADAATAKYTFTVGSTQISQLCSTTSIIAVNGQLPGPSIEVNEGDAVEVKVINNSPYNVTIHWHGVFQ

SEQ ID NO: 73911 - protein, 577 aa, Setaria italica
  Transcript Sequence Number=SeqID_7937
  Gene Ontology: Mol. function=oxidoreductase activity; Cellular component=extracellular region; Biological process=oxidation reduction
  Homolog annotation: Hit_ID=Q4VJ26; Match level="QueryCoverage=100%, HitCoverage=88%, E-value=0.0, Identity=76%"; Hit description=Laccase 1
  Pfam annotation: Domain name=Cu-oxidase; Domain location=81-234; Score=175.6; E_value=1.4e-49; Accession=PF00394.14; Description =Multicopper oxidase
  Pfam annotation: Domain name=Cu-oxidase_2; Domain location=332-455; Score=167.7; E_value=3.5e-47; Accession=PF07731.6; Description =Multicopper oxidase
  Pfam annotation: Domain name=Cu-oxidase_3; Domain location=2-70; Score=74.2; E_value=4.7e-19; Accession=PF07732.7; Description =Multicopper oxidase
  Pfam module annotation: Pfam domain module=Cu-oxidase::Cu-oxidase _2::Cu-oxidase_3; Domain location=81-234::332-455::2-70
LEIDRHGVFQLMTPWADGPSMVSQCPIQPSGSYTYRFSVPGQEGTLWWHAHSSFLRATVYGAFIVRPRAGNSYPFPAPDQEVPIVLGEWWNRNVVDVENDAILSGQLPTQSDAFTVNGKTGLLYQCANETFTAVVEPNTRVLLRVINAGLNSHLFFKVAGHNFTVVAVDGSYTSNLNTDTLVIAPGQTVDALVTTSAAPGSYYMAVLAHDTMSPLAFAASDTTTATAILQYNGTSTNPPAMPVMPSSSDSATANAFYFGLRGLGTPAVPSPVDVSMTIELGLGQLPCDPSQTKCNGTAAAAAMNGVSFRLPAPETSLLGAHLNGLTGVFTADFPDGPPPSGTAMAVGTKVKKLAYNSVVEIVLQNPSAVPTENHPIHLHGFNFFVLAQGVGTFTPGSASYNLVDPVARNTIAVPGGGWAVIRFVANNPGMWFFHCHLDPHVPMGLGMVFHVDSGTTAGATLPPPPADWVGVCDAQNYATAAAAAAAATPAPVPAPAPAPTLAPGSAPAAATSPRAAAGSPVKPSSPVDHKPSPNLPQRRGDGRPSATSAAAEPRATGHLTCLLCTIILFFVLHEHKA

SEQ ID NO: 73912 - protein, 148 aa, Setaria italica
  misc_feature (19)..(19): Xaa can be any naturally occurring amino acid
  misc_feature (95)..(95): Xaa can be any naturally occurring amino acid
  Transcript Sequence Number=SeqID_7938
  Subcellular localization annotation: CTP_CleavageSite=60; ConfidenceScore=5.79e-01
SAAPDGPPQTPHFPSPPSXSRPSPCRRKSAALGRPRPAPHPAPRSRAPPRPRPTPSPSARSSAPTPPSSPPSAPSPPPPPPPPSPRPPPSSSRTXDPPMTPPPRTSWWPTRTPPPSPPASTASSSPPRAASSPAGASPSRCPPAPPPT

SEQ ID NO: 73913 - protein, 166 aa, Setaria italica
  misc_feature (21)..(21): Xaa can be any naturally occurring amino acid
  Transcript Sequence Number=SeqID_7939
  Gene Ontology: Mol. function=oxidoreductase activity; Cellular component=chloroplast envelope
  Homolog annotation: Hit_ID=B6TN73; Match level="QueryCoverage=96%, HitCoverage=42%, E-value=9e-78, Identity=88%"; Hit description=Aldo -keto reductase/ oxidoreductase
  Pfam annotation: Domain name=Aldo_ket_red; Domain location=1-152; Score=-108.4; E_value=0.024; Accession=PF00248.13; Description =Aldoketo reductase family
MSCQTFYSYLSSKGVPLSSAXRQVQFSLLSMGDEQMELKTVCDSLGIRLIAYSPLGLGMLTGKYDASNLPKGPRSVLFRQILPGLESLLSCLRRIAEKKGKTMSQVAINWCICRGTIPIPGVKTVRHVEENLGALGWRLSPAEISELESAAMAAPKRMIQNVFQTA

SEQ ID NO: 73914 - protein, 87 aa, Setaria italica
  Transcript Sequence Number=SeqID_7940
  Gene Ontology: Mol. function=protein binding; Cellular component =nucleus; Biological process=response to DNA damage stimulus
  Homolog annotation: Hit_ID=B4G0P1; Match level="QueryCoverage=85%, HitCoverage=26%, E-value=2e-26, Identity=84%"; Hit description =Double strand break repair protein
MAATTPAAAPRHSCAKLSVAVEDPKAAGGGAVFVRATWLPTRFSLAVTDGAGAWVADASDAEVRLRAEQWDQPVAEYLALAERYLAF

SEQ ID NO: 73915 - protein, 131 aa, Setaria italica
  Transcript Sequence Number=SeqID_7941
TGRLRRLVLMCPRRRLPLRVAQGMLWHLGIPEDYFKDPDHGIEHDGFRILTSADGVICQDNDGDGRELGLIDDGKGQEMPLSVLQMKFGSVADVPIPLFPSKGLRLKQKIKDWLEGFQRLPYVSPYEDFSH

SEQ ID NO: 73916 - protein, 103 aa, Setaria italica
  Transcript Sequence Number=SeqID_7942
MASTSSFSPMALVVALVLVLGTSTCHAARRLADDTAPAAAPAAIPAIPAVPKPTVPAVPTVPQIPAVPAVTVPPMPAVPAVTLPPMPAVTVPAVPAMPAVPGA

SEQ ID NO: 73917 - protein, 539 aa, Setaria italica
  Transcript Sequence Number=SeqID_7943
  Gene Ontology: Mol. function=electron carrier activity; Cellular component=membrane; Biological process=oxidation reduction
  Homolog annotation: Hit_ID=B9II24; Match level="QueryCoverage=91%, HitCoverage=92%, E-value=1e-127, Identity=46%"; Hit description =Cytochrome P450
  Pfam annotation: Domain name=p450; Domain location=41-527; Score =258.1; E_value=2e-74; Accession=PF00067.14; Description=Cytochrome P450
MLVVSMEEHPMGAVVLALIIAAVAAVSLQHLISRRASRRLPPGPTSLPVIGHLHLLRPPVHRTFQELAARVGPLMHIRLGSTHCVVASTAEVASELIRSHEGSISERPLTAVARQFAYGSAGFAFAPYNTHWRFMKRLCMSELLGPRTVEHLRPVRRAGTVSLLRAALAAASSPAAEPFDLTRELIRLSNTSIIRMVASTVPGSVADEAQELVKDVAELVGAFNADDYIALCRGWDLQGLRRRAAAVHRRFDALLEEILRHKEDAREARKLLMLDDDGDDGRKKEAATATMHKDLLDILMDKAEDKTAEVKLTRDNIKAFIIDVVTAGSDTSAAMVEWMLAELMNHPEALRNVVAEIDAVVGGDRIAGEADLPRLPYLIAAYKETLRLHPAAPIAHRQSSEEMQLRGFTVPPQTAVFINIWAIGRDPAFWEEPLAFRPERFMPGGAAESLEPRGQHFHFMPFGSGRRGCPGMGLALQSVPAVLAALVQCFDWATAGGGDDDGVKGMPIDMDESDGLVCARKHPLLLRPTPRLNPFPAVV

SEQ ID NO: 73918 - protein, 332 aa, Setaria italica
  misc_feature (151)..(151): Xaa can be any naturally occurring amino acid
  misc_feature (193)..(193): Xaa can be any naturally occurring amino acid
  Transcript Sequence Number=SeqID_7944
  Gene Ontology: Mol. function=transferase activity; Cellular component= cytoplasm; Biological process=mRNA processing
  Homolog annotation: Hit_ID=B9SDZ7; Match level="QueryCoverage=98%, HitCoverage=67%, E-value=2e-79, Identity=47%"; Hit description=Zinc finger protein, putative
MIYSVRSFELLKACIEDILSTIKPGEDDRMKRLRAIQELEDSIYSVGALRGAVVKPFGSFISNLYAKSGDLDVSVDLWSSSRPISKKKKQNALRELMRALQIRGVARCMEFIPNARVPIFQYLSNQFGISCDISINNYPGRIKSRIFYWIXTIDERFGDMVLLVKEWAKAQDINDPKNGTLNSYSLCLLVIFXFQTCEPAILPPLKEIYDGNVAEETVFYDEKHVDEVCMANIERFLCQNMRQRNQNSLTRLLASFFHKFLGIRRFSSKVISTYTGRIELIQDNPSWMAKSYSLFVEDPFERPDNAARAVDAEELERIELAFNHTSSRFVDG

SEQ ID NO: 73919 - protein, 54 aa, Setaria italica
  Transcript Sequence Number=SeqID_7945
MSLSGDRKLSGFPTSGQKAADVFLQESRPAADLVVLCAHTDLLFLLISWYFIIN

SEQ ID NO: 73920 - protein, 170 aa, Setaria italica
  Transcript Sequence Number=SeqID_7946
  Homolog annotation: Hit_ID=B9RZ08; Match level="QueryCoverage=89%, HitCoverage=19%, E-value=1e-26, Identity=42%"; Hit description =Transcription factor, putative
  Pfam annotation: Domain name=zf-C5HC2; Domain location=87-140; Score =66.9; E_value=7.5e-17; Accession=PF02928.8; Description=C5HC2 zinc finger
SKRYALLNRTPLLAHEELLCRSAVLLSQKLLTCDPEFLDKSEHPYSQYCVKSCFVRLMRFQRRARGLLAKMGSQICYKPKTFPNLSCSMCRRDCYITHVLCGCNFDPVCLHHEQEVRSCPCKSNRVVYVREDILELEALSRKFEQDISLYKERLCIGSSKEAEISDLNVE

SEQ ID NO: 73921 - protein, 74 aa, Setaria italica
  Transcript Sequence Number=SeqID_7947
MASGASSSPMVPALSLAVVLLLALCGAPGGEARPPPPLHGVRPLAFDEGYAQIFGSSNLALLRDGRRVHLALDE

SEQ ID NO: 73922 - protein, 83 aa, Setaria italica
  Transcript Sequence Number=SeqID_7948
  Gene Ontology: Mol. function=protein dimerization activity
  Homolog annotation: Hit_ID=B6SUG6; Match level="QueryCoverage=100%, HitCoverage=24%, E-value=6e-31, Identity=74%"; Hit description=O -methyltransferase ZRP4
  Pfam annotation: Domain name=Dimerisation; Domain location=36-83; Score=61.0; E_value=4.3e-15; Accession=PF08100.3; Description =Dimerisation domain
MALSKEQHSSSADQQAVRLDAQVQLWHHTFGYVKSMALKTALDLHIPDAIHQHGGSATLPQIVTEVTLHPSKIPCLRRLMRVL

SEQ ID NO: 73923 - protein, 84 aa, Setaria italica
  Transcript Sequence Number=SeqID_7949
  Pfam annotation: Domain name=DUF594; Domain location=18-74; Score =102.7; E_value=1.2e-27; Accession=PF04578.5; Description=Protein of unknown function, DUF594
EGTSVVHQAWSIAEDLMDLCKDNDQKMWRVIQGVWVEMLCFSAGRCRGYLHAKSLGTGGEYLSYVWLLLLYMGMETLSEKMQRT

SEQ ID NO: 73924 - protein, 110 aa, Setaria italica
  Transcript Sequence Number=SeqID_7950
  Subcellular localization annotation: CTP_CleavageSite=20; ConfidenceScore=5.13e-01
MLSGRRKQLLRFRQIRSPVHCGGAQGRRRRQGCRRGKAERRGRGPRTPGSGQAKATGSGAGEAAGGRRRPGRGEGRRAAAAVGDSDDGSGSGGGGRGGGTAGGRQRGRAW

SEQ ID NO: 73925 - protein, 141 aa, Setaria italica
  Transcript Sequence Number=SeqID_7951
  Homolog annotation: Hit_ID=B6U8B2; Match level="QueryCoverage=97%, HitCoverage=35%, E-value=4e-26, Identity=58%"; Hit description=WDL1
  Pfam annotation: Domain name=TPX2; Domain location=1-41; Score=36.7; E_value=9e-08; Accession=PF06886.3; Description=Targeting protein for Xklp2 (TPX2)
LEEKIHAQELEKSNLQAKSKEAEEAELKMLRKSLNFKAAPMPSFYKEPPPPKVELKKIPTTRPRSPKLGRSKNTTSTGTEGNTNPTVRSARLSLDERVSQNGIKKAPATNAVKKPQRKSLPKLPSEQKAKVDVAASLFYSY

SEQ ID NO: 73926 - protein, 383 aa, Setaria italica
  Transcript Sequence Number=SeqID_7952
  Homolog annotation: Hit_ID=B6U8B2; Match level="QueryCoverage=100%, HitCoverage=100%, E-value=1e-126, Identity=67%"; Hit description=WDL1
  Pfam annotation: Domain name=TPX2; Domain location=199-255; Score =99.0; E_value=1.6e-26; Accession=PF06886.3; Description=Targeting protein for Xklp2 (TPX2)
MDASAEVADAIGTMGIENAAKGKLPPCDNVEGHGEEHGALADGAHSGESEVINPSEEVEGEATSQSQDIKPRVPEGSQNHSPKVVKSQRQSPRGGDKSQARRSSPSPSYPKAPIARVSDPDLVDSSSSNGDASVSKKKAEKSSFRPVAKESPSHEDSKEKKKTQKPSNQHSVEKDIEEESNESIKPQRVGSTPAYGFSFKCDERAEKRREFYSKLEEKIHAQELEKSNLQAKSKEAEEAELKMLRKSLNFKAAPMPSFYKEPPPPKVELKKIPTTRPRSPKLGRSKNTTSTGTEGNTNPTVRSARLSLDERVSQNGIKKAPATNAVKKPQRKSLPKLPSEQKAKVDVAASLSSTEELENKPSTDPVREPIRAQVTPEEPGLNV

SEQ ID NO: 73927 - protein, 68 aa, Setaria italica
  Transcript Sequence Number=SeqID_7953
EQVKEDITSLVDTKGFYRSIQLSKTSQKVMINRKKKNITPLHLIRFYIEIILMSDQNASRQCKFDVCA

SEQ ID NO: 73928 - protein, 178 aa, Setaria italica
  Transcript Sequence Number=SeqID_7954
  Gene Ontology: Mol. function=actin binding; Cellular component =nuclear envelope; Biological process=intracellular protein transmembrane transport
  Homolog annotation: Hit_ID=B6TJY3; Match level="QueryCoverage=100%, HitCoverage=55%, E-value=1e-91, Identity=89%"; Hit description=Seh1 -like protein
  Pfam annotation: Domain name=WD40; Domain location=120-158; Score =30.9; E_value=5.3e-06; Accession=PF00400.24; Description=WD domain, G-beta repeat
  Pfam annotation: Domain name=WD40; Domain location=66-107; Score=5.8; E_value=8.2; Accession=PF00400.24; Description=WD domain, G-beta repeat
  Pfam module annotation: Pfam domain module=WD40::WD40; Domain location=120-158::66-107
  Subcellular localization annotation: CTP_CleavageSite=20; ConfidenceScore=5.08e-01
AEFQNVTDPVSRFGKPSCTSASIAWNPRRGGSQQASFAIGFDSDSSHFNSCKIWEFEEAHQRWLPLVELGSPEDKGDRVFAVAWAPNIGRSYEIIAVATCKGIAIWHIGSNTDSEGRPSTENVALLSGHDGEVWQLEWDMGGMTLASTGGDGMVKLWQANLDGVWHEQAVLDCSGSHV

SEQ ID NO: 73929 - protein, 154 aa, Setaria italica
  misc_feature (33)..(33): Xaa can be any naturally occurring amino acid
  misc_feature (58)..(58): Xaa can be any naturally occurring amino acid
  Transcript Sequence Number=SeqID_7955
  Gene Ontology: Cellular component=vacuole
  Homolog annotation: Hit_ID=UPI0000162B74; Match level="QueryCoverage =94%, HitCoverage=7%, E-value=5e-35, Identity=52%"; Hit description =glycine-rich protein
IHSNANLGVRGQGLLNLSGDGDTIEAQRLILSXFYSIQVGPGSILRGPLVNRSSGDVXILSPSAITLRCSFPYFLCLEYFCSLMISCISIRAPKLNCEDDSCPVEIIHPPEDCNLNSSLSFTLQVCRVEDIDVWGLVQGTVVHLQIRDKERVQL

SEQ ID NO: 73930 - protein, 117 aa, Setaria italica
  misc_feature (12)..(12): Xaa can be any naturally occurring amino acid
  misc_feature (30)..(30): Xaa can be any naturally occurring amino acid
  misc_feature (57)..(57): Xaa can be any naturally occurring amino acid
  Transcript Sequence Number=SeqID_7956
SLRTLRDRRDLXYPFSLILHNTKPVGHQVXSLPLLLFTELLWINSSFCANHSLVLTXDLVGLVISILLLADFSLVLLTFLQLYSYSMVDVLLVLFILPLGILSPFPAGINALFSHWV

SEQ ID NO: 73931 - protein, 113 aa, Setaria italica
  misc_feature (22)..(22): Xaa can be any naturally occurring amino acid
  Transcript Sequence Number=SeqID_7957
  Gene Ontology: Cellular component=vacuole
  Homolog annotation: Hit_ID=UPI0000162B74; Match level="QueryCoverage =59%, HitCoverage=4%, E-value=6e-16, Identity=52%"; Hit description =glycine-rich protein
GFLHYKSSNKKHSSMQPWNLAXDETSWWLFPTGLVLCKCIQARLVDWHVSILEIQDRAVYSNDPTIFLAVTAFWITGVLMMGALHNSSFLGVDEKKTRKSPFFVGQSGEACTK

SEQ ID NO: 73932 - protein, 316 aa, Setaria italica
  Transcript Sequence Number=SeqID_7958
  Gene Ontology: Cellular component=vacuole
  Homolog annotation: Hit_ID=UPI0001A7B2D3; Match level="QueryCoverage =98%, HitCoverage=23%, E-value=5e-85, Identity=54%"; Hit description =glycine-rich protein
YFFPLVGDEKRTDLPPRLHQRFPMSLIFGGDGSYMAPFSLHSDRVVTSLISQAVPSSIWHRLVAGLNAQLRLVRRGNLNTTFLPVLKWLETHANPALNTYHVRVDLAWFQTTALGYCQFGLVLHAVGGPVAAELQGDSVIITEQHSVNQNTYADSQLSHSRINDALLCKRITGTVLNVENLKMLKDRRDLFYPLSLILHNTKPVGHQDLVGLVISILLLADFSLVLLTFLQLYSYSMVDVLLVLFILPLGILAPFPAGINALFSHGPRRSAGLARVYALWNITSLVNVVVAFMCGFVHYKSSTKRHPSVQPWNLGT

SEQ ID NO: 73933 - protein, 356 aa, Setaria italica
  Transcript Sequence Number=SeqID_7959
  Gene Ontology: Cellular component=vacuole
  Homolog annotation: Hit_ID=UPI0001A7B2D3; Match level="QueryCoverage =94%, HitCoverage=25%, E-value=1e-103, Identity=58%"; Hit description= glycine-rich protein
WQQWRRRKKLQKLCEFVRSEYDHSCLRSCRSRALYEGLKVTATPDLMLGYLDFFLGGDEKRPDLPPRLRQRFPMSLIFGGDGSYMAPFSLHSDSVLTSLMSQAVPSWIWHRLVAGLNAQLRLVRCGNLKVTFLPVIDWLETHANPSLAVNGIRVDLAWFQATALGYCQLGLVVYAVDGEPVVAEHDGSPRIKLEQRSLTQNMLTDIQLGQARVKDALMRKRITGGVLDSNSLRTLRDRRDLFYPFSLILHNTKPVGHQDLVGLVISILLLADFSLVLLTFLQLYSYSMVDVLLVLFILPLGILSPFPAGINALFSHGPRRSAGLARVYALWNITSLVNVVVAFNSVVYVTINKVQY

SEQ ID NO: 73934 - protein, 959 aa, Setaria italica
  misc_feature (16)..(16): Xaa can be any naturally occurring amino acid
  misc_feature (754)..(754): Xaa can be any naturally occurring amino acid
  Transcript Sequence Number=SeqID_7960
  Gene Ontology: Cellular component=vacuole
  Homolog annotation: Hit_ID=UPI0000162B74; Match level="QueryCoverage =100%, HitCoverage=75%, E-value=0.0, Identity=59%"; Hit description =glycine-rich protein
  Pfam annotation: Domain name=GCC2_GCC3; Domain location=440-497; Score=6.7; E_value=0.068; Accession=PF07699.5; Description=GCC2 and GCC3
  Pfam annotation: Domain name=NCD3G; Domain location=440-480; Score= -6.7; E_value=0.052; Accession=PF07562.6; Description=Nine Cysteines Domain of family 3 GPC
  Pfam module annotation: Pfam domain module=GCC2_GCC3::NCD3G; Domain location=440-497::440-480
FLEFPNQPLWTNVFVXNHAKVAVPLLWSRVQVQGQLSLLSGGILTFGLTRYPYSEFELMAEELLMSDSTIKVFGALRMSVKMLLMWNSRMLIDGGGDSIVATSLLDASNLIVLKESSVIHSNANLGVRGQGLLNLSGDGDTIEAQRLILSLFYSIQVGPGSILRGPLVNRSSGDVAPKLNCEDDSCPVEIIHPPEDCNLNSSLSFTLQVCRVEDIDVWGLVQGTVVHFNRARRVTVHTSGTISASGLGCRTGVGQGKMLSSGVSGGGGHGGKGGDGFYNGSHAEGGPTYGNADLPCELGSGSGNDTTEFSTAGGGIIVMGSCEYSLPSLALYGSVESNGGSYVNMVTNGSTGGPGGGSGGTILLFVHTLSLAESSVLSSVGGFGSAGSGGGGGGRIHFHWSNIPTGDEYVPVAAVKGSILTSGGVSKGQGFSGGNGTVTGKACPKGLYGTFCKECPLGTYKNVTGSSKSLCLPCPPAELPHRAIYVNVRGGVAETPCPYRCVSDRYRMPHCYTALEELIYTFGGPWLFGLLLSGLLILLALVLSVARMKFVGTDELPGPAPTQQGSQIDHSFPFLESLNEVLETNRAEESHGHVHRMYFMGPNTFSEPWHLPHSPPEQITEIVYEDAFNRFVDDINTLAAYQWWEGSIYSILCILAYPLAWSWQQWRRRKKLQRLREFVRSEYDHSCLRSCRSRALYEGLKVAATPDLMLGYLDFFLGGDEKRPDLPPRLRQRFPMSLIFGGDGSYMAPFSLHXVVLVVVFYLVLYCSGFLRKVNSLRTLRDRRDLFYPFSLILHNTKPVGHQDLVGLVISILLLADFSLVLLTFLQLYSYSMVDVLLVLFILPLGILSPFPAGINALFSHGPRRSAGLARVYALWNITSLVNVVVAFMCGFVHYKSSTKRHPSVQPWNLGTDESGWWLFPTGLVLCKCIQARLVDWHVSNLEIQDRAVYSNDPTIFWQ

SEQ ID NO: 73935 - protein, 132 aa, Setaria italica
  misc_feature (13)..(13): Xaa can be any naturally occurring amino acid
  Transcript Sequence Number=SeqID_7961
  Gene Ontology: Cellular component=vacuole
  Homolog annotation: Hit_ID=UPI0000162B74; Match level="QueryCoverage =89%, HitCoverage=8%, E-value=3e-42, Identity=65%"; Hit description =glycine-rich protein
NRCSVVYIRGVLXPLPLGILAPFPAGINALFSHGPRRSAGLARVYALWNITSLVNVAVAFVCGFVHYKSSTKRHPSVQPWNLGTDESGWWLFPTGLMLLKCIQARLVDWHVANLEIQDRAVYSNDPNIFWQS

SEQ ID NO: 73936 - protein, 147 aa, Setaria italica
  Transcript Sequence Number=SeqID_7962
  Gene Ontology: Mol. function=protein phosphatase type 2A regulator activity; Cellular component=protein phosphatase type 2A complex; Biological process=signal transduction
  Homolog annotation: Hit_ID=B6SWX8; Match level="QueryCoverage=100%, HitCoverage=28%, E-value=5e-55, Identity=79%"; Hit description =Transposon protein
  Pfam annotation: Domain name=B56; Domain location=1-147; Score= -156.6; E_value=0.0071; Accession=PF01603.12; Description=Protein phosphatase 2A regulatory B subunit (B56 family)
LLLRKLRLVAAIFDLSDSLKHPREKEAKRQALLELVDYVQAPSQAANAAARLPDHVQEALVAAISANIFRPLPPALHESAAAIDPGAAPDDEEEPYLDPAWPHLQLVYELLLRYVVSPDTDTKVAKRYVDHAFVLRLLDLFDSEDPR

SEQ ID NO: 73937 - protein, 338 aa, Setaria italica
  misc_feature (6)..(6): Xaa can be any naturally occurring amino acid
  Transcript Sequence Number=SeqID_7963
  Gene Ontology: Mol. function=aminoacyl-tRNA ligase activity
  Homolog annotation: Hit_ID=Q2PF39; Match level="QueryCoverage=50%, HitCoverage=23%, E-value=3e-34, Identity=45%"; Hit description =Aminoacyl-tRNA synthetase
NDEMKXGANISNFRKDKLGIGSNGTVYWYDGDSTIGHRLYKEDVTVNFKQNWKGKSGHLTKPDINIHWETVATNLDEFLEISEKLSRKGRTESAIAEHLKAEIIPAVEKLQKKKERDLKRQEKKDKLLAFANSFQTRSLRNRRPVNYNYSDYDRSIEEAIKATSKAKEHDSHEAGTKEKCASHLGNKGANGRPDINSERNKDGGLDDAKYLSDLSSGDEEDRDYTEQDGGSADSDGDNNASDPYRSDLEEEDVFVPRKRTRLAARLLKEKPRQGLRRSQRNMKNDEEAMHPGQLTPPPMTKKTLRQRPTPVSKQPGAASSGSEDDVAQFVADSEDESE

SEQ ID NO: 73938 - protein, 256 aa, Setaria italica
  Transcript Sequence Number=SeqID_7964
  Gene Ontology: Mol. function=protein binding
  Homolog annotation: Hit_ID=Q9SRR3; Match level="QueryCoverage=82%, HitCoverage=35%, E-value=4e-26, Identity=32%"; Hit description =F21O3.24 protein
SKGLLAAWKEPCIVLCPHWSLRLGPAVHLLRRWHADKRCLLVLEQGNDAELSLKPFMPLAIQVLECSFLSGVRVAKIDSLLGVLNPKFVMLPEGLKSRCSVKKRPWSFLYYTKGKTIELPNLREDFEVHLAHNVALGLQPRQLNETTAVARLRTDLLVSSGQYQLAAAEKQSDRSKRHLLHWGAVDPDRLLPALQEKGMLCSFAADDNCAGERSVLITSPVDALVKITSDRTVIYCDDEGTSKHIYDALCSVWNGI

SEQ ID NO: 73939 - protein, 422 aa, Setaria italica
  misc_feature (144)..(144): Xaa can be any naturally occurring amino acid
  Transcript Sequence Number=SeqID_7965
  Gene Ontology: Mol. function=protein serine/threonine kinase activity; Biological process=protein amino acid phosphorylation
  Homolog annotation: Hit_ID=Q00RH9; Match level="QueryCoverage=100%, HitCoverage=35%, E-value=0.0, Identity=80%"; Hit description =OSIGBa0125M19.7 protein
  Pfam annotation: Domain name=Pkinase; Domain location=93-363; Score =175.0; E_value=2.2e-49; Accession=PF00069.17; Description=Protein kinase domain
  Pfam annotation: Domain name=Pkinase_Tyr; Domain location=93-363; Score=96.9; E_value=7.1e-26; Accession=PF07714.9; Description =Protein tyrosine kinase
  Pfam module annotation: Pfam domain module=Pkinase::Pkinase_Tyr; Domain location=93-363::93-363
  Subcellular localization annotation: CTP_CleavageSite=49; ConfidenceScore=5.40e-01
YVLGWSFAMGGAAPPLDTSKLPSLPRFGPKPRSKVLEIVLPIATAAFVLALLVGVFLFVRRRVRYAEVREDWEVEFGPHRFSYKELFHATEGFKSKKLLGIGGFGRVYKGVLPKSKLEVAVKRVSHESRQGIKEFVAEVVSIGXLRHRNLVQLLGYCRRKGELLLVYDYMPNGSLDKYLYDKRKTPLDWAQRFRIIKGVASGLLYLHEDWEQVVIHRDIKASNVLLDSEMNGRLGDFGLARLYDHGADPQTTHVVGTMGYLAPELVRTGKATPVTDVFAFGVFVLEVTCGRRPLGCIAPDEQNVLLDWVQEHERKGAGLDTVDPRLCGKYDADEARLAIRLGLMCAHPLPDARPGMRQVVQYLEGDAPMPEVAPTYVSYTMLALMQNEGFDSFAMSFPSTVTSGVSPVSGAFSDVSGLSGGR

SEQ ID NO: 73940 - protein, 151 aa, Setaria italica
  misc_feature (49)..(49): Xaa can be any naturally occurring amino acid
  Transcript Sequence Number=SeqID_7966
  Gene Ontology: Mol. function=microtubule motor activity; Cellular component=microtubule associated complex; Biological process =microtubule-based process
  Homolog annotation: Hit_ID=B6U3L9; Match level="QueryCoverage=99%, HitCoverage=81%, E-value=2e-61, Identity=80%"; Hit description =Microtubule motor
  Pfam annotation: Domain name=Dynein_light; Domain location=87-151; Score=-0.7; E_value=0.0011; Accession=PF01221.10; Description=Dynein light chain type 1
MAARQGSRTTKADKWLFGGKWRGTSKETRHPVVPEAKPPNPAVVQDEGXCLEKSRVHVSGLGQRKSIDIAPGRRSMPEMEINMKEVVGVLGVKVMAADMPPFMQLHAFRCAKRSHDSLDKFSSRQLAHDVKKEFDKVYGPTWHCIVGTSYG

SEQ ID NO: 73941 - protein, 56 aa, Setaria italica
  Transcript Sequence Number=SeqID_7967
  Gene Ontology: Mol. function=microtubule motor activity; Cellular component=microtubule associated complex; Biological process =microtubule-based process
  Homolog annotation: Hit_ID=B6U3L9; Match level="QueryCoverage=96%, HitCoverage=30%, E-value=7e-25, Identity=98%"; Hit description =Microtubule motor
  Pfam annotation: Domain name=Dynein_light; Domain location=1-49; Score=18.9; E_value=1.8e-05; Accession=PF01221.10; Description =Dynein light chain type 1
YPKKEFDKVYGPTWHCIVGTSYGSFVTHSRGCFLYFSMDKIIVMLFKTKIRKVLAS

SEQ ID NO: 73942 - protein, 246 aa, Setaria italica
  Transcript Sequence Number=SeqID_7968
  Gene Ontology: Mol. function=peptide deformylase activity; Cellular component=mitochondrion; Biological process=translation
  Homolog annotation: Hit_ID=B6RGY0; Match level="QueryCoverage=80%, HitCoverage=75%, E-value=1e-100, Identity=88%"; Hit description =Peptide deformylase 1A, chloroplastic
  Pfam annotation: Domain name=Pep_deformylase; Domain location=61-227; Score=140.7; E_value=4.7e-39; Accession=PF01327.13; Description =Polypeptide deformylase
  Subcellular localization annotation: CTP_CleavageSite=18; ConfidenceScore=5.65e-01
PSTLLLAPAAQLTSSAVAASAVSGRRWRSVRTNAGGGWLSGLLGGKGGGAPTAMTVTPGTVKAGDPVLHEPAQEVAPGDVRSDRVQGIIDRMIDVMRKAPGVGLAAPQIGVPLRIIVLEDTQEYISYTSKKDIEEQDRRPFALLVIINPKLKNTSKRTALFFEGCLSVDGYRAVVERHLDVEVSGLDHNGNPIKVQASGWQARILQHECDHLEGTLYVDKMVPRTFRIVDNLDMPLPIGCPPLGAR

SEQ ID NO: 73943 - protein, 33 aa, Setaria italica
  Transcript Sequence Number=SeqID_7969
  Pfam annotation: Domain name=zf-LSD1; Domain location=13-33; Score =24.8; E_value=0.00035; Accession=PF06943.4; Description=LSD1 zinc finger
ICNAGLDMAQLICGGCRTLLMYTRSADTVRCSC

SEQ ID NO: 73944 - protein, 72 aa, Setaria italica
  Transcript Sequence Number=SeqID_7970
QISTFMGSFARSQKYLVYLCSSRTTKQYLCSSRTTKQPITGQHYNLWYFLASDIEHTTMMYNVMIAVSFSQL

SEQ ID NO: 73945 - protein, 77 aa, Setaria italica
  Transcript Sequence Number=SeqID_7971
  Homolog annotation: Hit_ID=B2CR52; Match level="QueryCoverage=49%, HitCoverage=21%, E-value=9e-12, Identity=81%"; Hit description=LSD1 -like protein
  Pfam annotation: Domain name=zf-LSD1; Domain location=7-31; Score =42.4; E_value=1.8e-09; Accession=PF06943.4; Description=LSD1 zinc finger
MQNQIVCHACRTVLLYPRGAPSVCCALCQAVTTVPPPGTCWTLRFLSSELGRLAIITSTASRALAARNSWRAGEHKA

SEQ ID NO: 73946 - protein, 175 aa, Setaria italica
  Transcript Sequence Number=SeqID_7972
  Gene Ontology: Cellular component=ribosome
  Homolog annotation: Hit_ID=B2CR51; Match level="QueryCoverage=100%, HitCoverage=100%, E-value=3e-63, Identity=68%"; Hit description=LSD1- like protein
  Pfam annotation: Domain name=zf-LSD1; Domain location=46-70; Score =47.8; E_value=4.2e-11; Accession=PF06943.4; Description=LSD1 zinc finger
  Pfam annotation: Domain name=zf-LSD1; Domain location=7-31; Score =42.4; E_value=1.8e-09; Accession=PF06943.4; Description=LSD1 zinc finger
  Pfam annotation: Domain name=zf-LSD1; Domain location=84-108; Score =50.5; E_value=6.4e-12; Accession=PF06943.4; Description=LSD1 zinc finger
  Pfam module annotation: Pfam domain module=zf-LSD1::zf-LSD1::zf-LSD1; Domain location=46-70::7-31::84-108
MQNQIVCHACRTVLLYPRGAPSVCCALCQAVTTVPPPGLDMAQLICGGCRTLLMYTRSADTVRCSCCNTVNLVRPVNNIAHVNCGRCQTTLMYPYGAHSVKCAICNHVTATGVNTVAPTTSARPASNGPSYSTSSTSAPKSQPQNVTVVVENPMTVDDKGKLVSNVVVGVTTGKN

SEQ ID NO: 73947 - protein, 426 aa, Setaria italica
  Transcript Sequence Number=SeqID_7973
  Gene Ontology: Mol. function=nucleoside-triphosphatase activity; Cellular component=protein complex; Biological process=protein catabolic process
  Homolog annotation: Hit_ID=Q9SSB5; Match level="QueryCoverage=100%, HitCoverage=100%, E-value=0.0, Identity=96%"; Hit description=26S protease regulatory subunit 7
  Pfam annotation: Domain name=AAA; Domain location=204-391; Score =297.9; E_value=2.2e-86; Accession=PF00004.21; Description=ATPase family associated with various cellular activities (AAA)
  Pfam annotation: Domain name=AAA_2; Domain location=200-332; Score= -31.5; E_value=0.0031; Accession=PF07724.6; Description=ATPase family associated with various
  Pfam annotation: Domain name=AAA_5; Domain location=204-337; Score= -2.1; E_value=0.0014; Accession=PF07728.6; Description=ATPase family associated with various
  Pfam module annotation: Pfam domain module=AAA::AAA_2::AAA_5; Domain location=204-391::200-332::204-337
MAPEPDDDVLNEKNPRPLDEDDIALLKTYGLGPYSTSIKKVEKEIKEMAKKINDLCGIKESDTGLAPPSQWDLVSDKQMMQEEQPLQVARCTKIISPNTDDAKYVINVKQIAKFVVGLGDKVSPTDIEEGMRVGVDRNKYQIQIPLPPKIDPSVTMMTVEEKPDVTYNDVGGCKEQIEKMREVVELPMLHPEKFVKLGIDPPKGVLCYGPPGTGKTLLARAVANRTDACFIRVIGSELVQKYVGEGARMVRELFQMARSKKACIVFFDEVDAIGGARFDDGVGGDNEVQRTMLEIVNQLDGFDARGNIKVLMATNRPDTLDPALLRPGRLDRKVEFGLPDLEGRTQIFKIHTRTMNCERDIRFELLARLCPNSTGADIRSVCTEAGMYAIRARRKTVTEKDFLDAVNKVIKGYQKFSATPKYMVYN

SEQ ID NO: 73948 - protein, 82 aa, Setaria italica
  Transcript Sequence Number=SeqID_7974
  Pfam annotation: Domain name=MRP-S33; Domain location=1-76; Score =94.9; E_value=2.7e-25; Accession=PF08293.3; Description =Mitochondrial ribosomal subunit S27
ARAAIFGHALNPTGKRAATKLLRKKMVGDQVAQWYPYDIKRDDPLVMAREEKERLSKLEMLKRRGKGPPKKGQGRRAVKRSK

SEQ ID NO: 73949 - protein, 211 aa, Setaria italica
  Transcript Sequence Number=SeqID_7975
  Gene Ontology: Mol. function=transferase activity, transferring glycosyl groups; Cellular component=cell wall
  Homolog annotation: Hit_ID=B6UEE3; Match level="QueryCoverage=100%, HitCoverage=25%, E-value=7e-94, Identity=79%"; Hit description =Phosphoribosylanthranilate transferase
  Pfam annotation: Domain name=PRT_C; Domain location=59-211; Score =385.1; E_value=1.2e-112; Accession=PF08372.2; Description=Plant phosphoribosyltransferase C-ter
HMFSLRRSKANFYRITSLFSGAVAVGKWMDGICKWKNPLTTVLVHVLFLILVCYPELILPTVFLYLFMIGVWNYRRRPRKPPHMDTVLSHAEPGLVHPDELDEEFDTFPTSKPGDVVRMRYDRLRSVAGRVQTVVGDLATQGERAQSLLSWRDPRATAIFLILSLVVAVVLYVTPFQVVAVVVGLYLLRHPRFRSKQPSVPFNFYKRLPAK

SEQ ID NO: 73950 - protein, 124 aa, Setaria italica
  Transcript Sequence Number=SeqID_7976
  Gene Ontology: Mol. function=transcription regulator activity; Cellular component=nucleus; Biological process=regulation of transcription
  Homolog annotation: Hit_ID=Q10E12; Match level="QueryCoverage=97%, HitCoverage=96%, E-value=3e-46, Identity=69%"; Hit description =Transcription factor S-II family protein, expressed
  Pfam annotation: Domain name=TFIIS_C; Domain location=84-122; Score =38.7; E_value=2.3e-08; Accession=PF01096.10; Description =Transcription factor S-II (TFIIS)
MAFWQARDFLFCGVCGTLLTFDSIRSASCPLCGFKRKAKEIEGKETRYTVTAEDIRRELKIEPFVTLESAPMQEVVVRRPKTRKPCPECNHPIAEYYSRQMRSADEGETTFYECMKCHHNFINS

SEQ ID NO: 73951 - protein, 161 aa, Setaria italica
  Transcript Sequence Number=SeqID_7977
  Gene Ontology: Mol. function=DNA-3-methyladenine glycosylase I activity; Biological process=base-excision repair
  Homolog annotation: Hit_ID=Q01I90; Match level="QueryCoverage=84%, HitCoverage=35%, E-value=1e-38, Identity=51%"; Hit description =H0311C03.4 protein
  Pfam annotation: Domain name=Adenine_glyco; Domain location=1-108; Score=57.4; E_value=6e-17; Accession=PF03352.5; Description =Methyladenine glycosylase
LAPGSPASSLLSEHRLRIIIENARELLKVIEEFGSFDSYCWSFVSNKPMVGSYRHTREVPLRTAKADAISQDLMRRGFLGVGPTVVYAFMQAVGMANDHLVTCYRFEECLDIKAAAAAATDGYGDSCKPAAVSEQEVSMLCGLVQCVALEPSRAATVISIS

SEQ ID NO: 73952 - protein, 59 aa, Setaria italica
  Transcript Sequence Number=SeqID_7978
TAAHTKYAARLCLLPSPWLGHVSILQEPPSPTSHRRVAAPWPLLGPSRDQELGAALPRC

SEQ ID NO: 73953 - protein, 94 aa, Setaria italica
  misc_feature (46)..(46): Xaa can be any naturally occurring amino acid
  misc_feature (69)..(69): Xaa can be any naturally occurring amino acid
  Transcript Sequence Number=SeqID_7979
  Gene Ontology: Mol. function=protein serine/threonine kinase activity; Cellular component=plasma membrane; Biological process =protein amino acid phosphorylation
  Homolog annotation: Hit_ID=Q0DCT8; Match level="QueryCoverage=94%, HitCoverage=14%, E-value=3e-35, Identity=79%"; Hit description =Protein kinase G11A
MFARFYVAEVLLALEYLHMLGIIYRDLKPENVLVREDGHIMLSDFXDLSLRCDVSPTVVKSSNPGPDAXLQRNNQAYCVQPACIEPSCYSKPRQ

SEQ ID NO: 73954 - protein, 61 aa, Setaria italica
  Transcript Sequence Number=SeqID_7980
  Subcellular localization annotation: CTP_CleavageSite=53; ConfidenceScore=5.03e-01
DTKKQRIAPACSAGFTGDQISRVPVRFLHSRGVYTCTMKIPWPTYPMEDENVKVPMLFSRL

SEQ ID NO: 73955 - protein, 669 aa, Setaria italica
  misc_feature (182)..(182): Xaa can be any naturally occurring amino acid
  misc_feature (634)..(634): Xaa can be any naturally occurring amino acid
  misc_feature (666)..(666): Xaa can be any naturally occurring amino acid
  Transcript Sequence Number=SeqID_7981
  Gene Ontology: Mol. function=transferase activity, transferring glycosyl groups; Cellular component=plasma membrane; Biological process=sucrose metabolic process
  Homolog annotation: Hit_ID=A9QVI4; Match level="QueryCoverage=100%, HitCoverage=63%, E-value=0.0, Identity=89%"; Hit description=Sucrose phosphate synthase II
  Pfam annotation: Domain name=Glycos_transf_1; Domain location=482 -665; Score=60.9; E_value=4.7e-15; Accession=PF00534.12; Description =Glycosyl transferases group 1
MAGNDWINSYLEAILDAGGAAGEISAAAGGGGGGEGPAGEKRDKSSLMLRERGRFSPARYFVEEVISGFDETDLYKTWVRTSAMRSPQERNTRLENMSWRIWNLARKKKQIEGEEASRLSKRRLEREKARQYAAADLSEDLSEGEKGENNNDPSIHDEITRTRMPRIGSTDAIEAWASQQKXKKMYIVLISIHGLIRGENMELGRDSDTGGQVKYVVELARALGSTPGVYRVDLLTRQIPAPDVDWSYGEPTEMLSPISSDNFGHEVGESSGAYIVRIPFGPRDKYIPKEHLWPHIQEFVDGALVHIMQMSKVLGEQVGSGQPVWPVVIHGHYADAGDSAALLSGALNVPMVFTGHSLGRDKLEQILKQGRQTRDEINATYKIMRRIEAEELCLDASEIIITSTRQEIEQQWGLYDGFDLTMARKLRARIKRGVSCFGRYMPRMIAIPPGMEFSHIAPHDVDLDGEEGNEDGSASPDPPIWADIMRFFSNPRKPMILALARPDPKKNITTLVKAFGEHRELRNLANLTLIMGNRDVIDEMSSTNAAVLTSVLKLIDKYDLYGQVAYPKHHKQSEVPDIYRLAARTKGVFINCAFIEPFGLTLIEAAAYGLPMVATRNGGPVDIHRVLDNGILVXPHNQNEIAEALYKLVSDKHLWAQCRQNGLKNXHQF

SEQ ID NO: 73956 - protein, 571 aa, Setaria italica
  Transcript Sequence Number=SeqID_7982
  Gene Ontology: Mol. function=protein serine/threonine kinase activity; Biological process=protein amino acid phosphorylation
  Homolog annotation: Hit_ID=B9SWQ3; Match level="QueryCoverage=83%, HitCoverage=77%, E-value=0.0, Identity=75%"; Hit description =Serine/threonine protein kinase, putative
  Pfam annotation: Domain name=Pkinase; Domain location=175-517; Score =240.1; E_value=5.3e-69; Accession=PF00069.17; Description=Protein kinase domain
  Pfam annotation: Domain name=Pkinase_Tyr; Domain location=175-493; Score=-65.7; E_value=2.3e-09; Accession=PF07714.9; Description =Protein tyrosine kinase
  Pfam module annotation: Pfam domain module=Pkinase::Pkinase_Tyr; Domain location=175-517::175-493
MAGQAAKAKESGKDDRQEPGAEVMKEKVLPSHQQEESSASLMDKDSSGVSGDVSPVLDGDSGELKVENLDINGNKEKKTSQKSSTSEGFASAKVSDGTSSLRKTSGSATMSTRADFTESGKSSMCRASTGSDISDESSCSSMSSATTKPHKGNDSRWEAIHVVKSRDGILGLSHFRLLKKLGSGDIGSVYLSELNGTKSYFAMKVMDKGSLASRKKLLRAQTEREILQSLDHPFLPTLYTHFETDKFSCLVMEFCPGGDLHTLRQRQPGKYFSEQAAKFYVAEVLLALEYLHMLGIIYRDLKPENVLVREDGHIMLSDFDLSLRCSVSLTVIKSANPGLDALQRNNAAYCAQPACIEPSCIQPSCVAPTTCFGPRFFRKSKSKSKSKKDKSKPDAPNQENLFPELIAEPTDARSMSFVGTHEYLAPEIIKGEGHGSAVDWWTFGIFLYELLFGKTPFKGSGNRATLFNVVGQPLRFPESPIVSFSARDMIRGLLVKDPQHRLGYKRGATEIKQHPFFEGVNWALIRCASPPDIPKPVELDCRPKQVPSTNGKVAPVANPKGPDNYLEFEFF

SEQ ID NO: 73957 - protein, 103 aa, Setaria italica
  misc_feature (32)..(32): Xaa can be any naturally occurring amino acid
  Transcript Sequence Number=SeqID_7983
  Gene Ontology: Cellular component=chloroplast envelope
  Homolog annotation: Hit_ID=B6U4I8; Match level="QueryCoverage=100%, HitCoverage=36%, E-value=4e-48, Identity=93%"; Hit description=Tic22
  Subcellular localization annotation: CTP_CleavageSite=16; ConfidenceScore=5.21e-01
QGASLSLALAPDEVARALTGTPVFTVCNSNNXFGVLVSDPATGLRSLGLLCFRSEDANALLSHVRTRQPVLGRGAKVVPITLDQVYMLKAEGIAFRFLPDPLQ

SEQ ID NO: 73958 - protein, 69 aa, Setaria italica
  Transcript Sequence Number=SeqID_7984
  Homolog annotation: Hit_ID=B6TBE4; Match level="QueryCoverage=100%, HitCoverage=16%, E-value=6e-26, Identity=78%"; Hit description=F-box domain containing protein
ELKVLAILDGIVYMSTFETFRDFTSPCWYLSFCLETRKLEKLFYGKTDGHFHPYIMAWPSSLLGNKLSP

SEQ ID NO: 73959 - protein, 71 aa, Setaria italica
  Transcript Sequence Number=SeqID_7985
DAWRSPEASGYGIESEKGQMWRQENSRKSLERIRMQSNTQNIKDYFFSKKMATERRRNDDDESAGKRTAKR

SEQ ID NO: 73960 - protein, 114 aa, Setaria italica
  Transcript Sequence Number=SeqID_7986
  Gene Ontology: Mol. function=protein serine/threonine kinase activity; Cellular component=cell surface; Biological process =protein amino acid phosphorylation
  Homolog annotation: Hit_ID=Q2R917; Match level="QueryCoverage=100%, HitCoverage=20%, E-value=1e-25, Identity=49%"; Hit description=D -mannose binding lectin family protein, expressed
LAIGDKLVSRNGKFALGFFQLRHSVAGKAVSSPGWYLGIWFNKIPVCTTVWVANRDKPIAESDLNTTQLRISGDGNLVIFALNKNTSTESRLWFTEVANSTDTSISAVLNNTGN

SEQ ID NO: 73961 - protein, 98 aa, Setaria italica
  Transcript Sequence Number=SeqID_7987
  Gene Ontology: Mol. function=protein serine/threonine kinase activity; Biological process=protein amino acid phosphorylation
  Homolog annotation: Hit_ID=B9RHL2; Match level="QueryCoverage=90%, HitCoverage=13%, E-value=7e-12, Identity=47%"; Hit description=S -receptor kinase, putative
  Pfam annotation: Domain name=B_lectin; Domain location=1-96; Score =24.6; E_value=1.5e-05; Accession=PF01453.16; Description=D-mannose binding lectin
  Subcellular localization annotation: CTP_CleavageSite=82; ConfidenceScore=5.14e-01
FRTLNTTQLRISGDGNLVIFALNKNTSTESRLWFTEVANSTDTSISAVLNNTGNFALVQKTPSSGEPLWQSFDCPTDVGLPTAKIGRNKVTGFNWSFV

SEQ ID NO: 73962 - protein, 460 aa, Setaria italica
  Transcript Sequence Number=SeqID_7988
  Gene Ontology: Mol. function=transferase activity, transferring nitrogenous groups; Biological process=biosynthetic process
  Homolog annotation: Hit_ID=B6T9H3; Match level="QueryCoverage=100%, HitCoverage=100%, E-value=0.0, Identity=82%"; Hit description =Asparate aminotransferase
  Pfam annotation: Domain name=Aminotran_1_2; Domain location=100-453; Score=246.7; E_value=5.5e-71; Accession=PF00155.13; Description =Aminotransferase class I and II
  Pfam annotation: Domain name=Aminotran_5; Domain location=124-446; Score=-194.0; E_value=0.051; Accession=PF00266.11; Description =Aminotransferase class-V
  Pfam annotation: Domain name=Beta_elim_lyase; Domain location=116 -396; Score=-103.0; E_value=0.0019; Accession=PF01212.13; Description= Beta-eliminating lyase
  Pfam annotation: Domain name=Cys_Met_Meta_PP; Domain location=122 -376; Score=-284.2; E_value=0.029; Accession=PF01053.12; Description =CysMet metabolism PLP-dependent enzyme
  Pfam annotation: Domain name=DegT_DnrJ_EryC1; Domain location=116 -458; Score=-207.3; E_value=0.06; Accession=PF01041.9; Description =DegTDnrJEryC1StrS aminotransferase family
  Pfam module annotation: Pfam domain module=Aminotran_1_2::Aminotran _5::Beta_elim_lyase::Cys_Met_Meta_PP::DegT_DnrJ_EryC1; Domain location=100-453::124-446::116-396::122-376::116-458
  Subcellular localization annotation: CTP_CleavageSite=49; ConfidenceScore=5.67e-01
MNLAAFCSLATPKPAALPGHEMPLNPSSAFCSSLLCRSLRASLRRISPMASAAAPTSAPAIAAENGAAKATEQRPVQVAKRLEKFKTTIFTQMSMLAIKHGAINLGQGFPNFDGPDFVKEAAIQAINAGKNQYARGFGVPELNSAIAERFLKDSGLQVDPEKEVTVTSGCTEAIAATILGLINPGDEVILFAPFYDSYEATLSMAGANVKALTLRAPDFAVPLEELKAAVSKNTKAIMINTPHNPTGKMFTREELEFIATLCKENDVLLFSDEVYDKLAFEADHISMASIPGMYERTVTMNSLGKTFSLTGWKIGWAIAPPHLTWGLRQAHSFLTFATCTPMQAAAAAALRAPDSYYEELKRDYGAKKAILLEGLKAAGFIVYPSSGTYFIMVDHTPFGFHNDIEFCEYLIREVGVAAIPPSVFYLNPEEGKNLVRFTFCKDEDTLRAAVERMKTKLRKK

SEQ ID NO: 73963 - protein, 48 aa, Setaria italica
  Transcript Sequence Number=SeqID_7989
MGDYTIQISTKLIDQLARDDEKVKRKARKPKPKKKATVERHEEPQDSA

SEQ ID NO: 73964 - protein, 115 aa, Setaria italica
  Transcript Sequence Number=SeqID_7990
MVTANHTIVRLLCFYVLANGVFSEEFLLNDPFTCILLAIVNKLARQCQQYAIGAGHLSTMGDYTIQISTKLIDQLARDDEKVKRKARKPKPKKKATVERHEEPQDSAPKEFPSEP

SEQ ID NO: 73965 - protein, 502 aa, Setaria italica
  Transcript Sequence Number=SeqID_7991
  Gene Ontology: Mol. function=hydrolase activity
  Homolog annotation: Hit_ID=B9SGX0; Match level="QueryCoverage=100%, HitCoverage=100%, E-value=1e-173, Identity=62%"; Hit description =Catalytic, putative
  Pfam annotation: Domain name=Peptidase_S15; Domain location=48-265; Score=-98.9; E_value=0.0094; Accession=PF02129.10; Description=X-Pro dipeptidyl-peptidase (S15 family)
MIEQFVNFVIRPPRAEYNPDQYLWEPEFTLAGRKYKRLDLELTNERSQTLKCSHYVPAVIPEDTPLPCVIYCHGNSGCRADANEAAVILLPSNITLFTLDFAGSGLSSGEYVSLGWHEKQDLKCAVSFLRNNKQVSCIGLRGRSMGAVTSLLYGAEDPSIAGMVLDSAFSNLYDLMMELVEVYKIRVPKFTVKMAVQYMRRVIQRRAKFDIMDLNVVQFAPKTFIPALFGHASNDMFIQPHHTERIHEAYAGDKNLIKFEGDHNSPRPQFYYDSVSIFFYNVLHPPQFPSTCSNKFDKYYNLGAFKGGPGTNESLLYEIINGLRAAGTDAGSSSAATTNFTNATKSVVELLTERVNQLSVKNDNDLDFLLDENHNLTEMDGNTAECPLEDKANRQTEECCSYTSSNRESWGRCSSLGAASDGSSSGERTGIPNHKHESMTLRALATPLRRIRRKPLTIPKEKKNRSLWKRLKKERQEMGENLSQRLRLCLQGQARHKRTKSS

SEQ ID NO: 73966 - protein, 120 aa, Setaria italica
  Transcript Sequence Number=SeqID_7992
IVEHIINLLIRERNAHDAVTWSDETLRNTVRPSSFHRRICCSSDASPPSPFPALALQIMGHSLTLPSKSLAPNIWWAQQRGEERGELRELSAARAQWSSLRGWTRRCGGEQQLASPHIRP

SEQ ID NO: 73967 - protein, 256 aa, Setaria italica
  misc_feature (96)..(96): Xaa can be any naturally occurring amino acid
  Transcript Sequence Number=SeqID_7993
  Gene Ontology: Mol. function=metal ion binding
  Homolog annotation: Hit_ID=Q9SG87; Match level="QueryCoverage=23%, HitCoverage=8%, E-value=9e-10, Identity=55%"; Hit description =Putative RING zinc finger protein
MRPCSTRGLRAIEVHDSMEQPRWLHCLQAVRENVENLSIKLTNSKGSTVAPPTIVQASIILEVGNHQPSVPRMKQLAQTFANSSSGNLGLNHTVFXHSGGGTNAPSPAPMPYQDNPHHHHHHHHHNSHEEKKHFAPSPAPVHSPVQQPKYRSPSPSSPYGYTNKSKNKAPVAPAAEPVASNHHYASPATTPRPVPPPSISPLPSVHHSPNNPRRHNSAPAPSPALAKPHLHAAPLIHGHLAQTPAAAPAPHSSYAT

SEQ ID NO: 73968 - protein, 80 aa, Setaria italica
  misc_feature (61)..(61): Xaa can be any naturally occurring amino acid
  Transcript Sequence Number=SeqID_7994
  Subcellular localization annotation: CTP_CleavageSite=7; ConfidenceScore=5.05e-01
RRGNTVSIGAGQRRRHHNSTAPLVPIPFTCGNETSPQPPKCPGTPAPPPSPPQPNPRRRPXPSCPDYFRYIHEDLRPWRG

SEQ ID NO: 73969 - protein, 215 aa, Setaria italica
  misc_feature (37)..(37): Xaa can be any naturally occurring amino acid
  misc_feature (197)..(197): Xaa can be any naturally occurring amino acid
  Transcript Sequence Number=SeqID_7995
  Homolog annotation: Hit_ID=B9R7B4; Match level="QueryCoverage=99%, HitCoverage=30%, E-value=3e-46, Identity=44%"; Hit description=Fms interacting protein, putative
FAQQQAKKENGTLSNGDNNRMDDDVIDDDEVAQRRRXQDPKKNVMKEANNPAVAYQLHPLKIIVHVYDTEDSESEGLDNNVLCNLFPDDTGLELPHQMAKIYAGEPPNFTDKNSRPYKWAQHLAGIDFLPEVPPSAGDDSIRALSSSDLSSGLALYRQQNRAQTILQRIRSRKVTQMALMWQLDYLTKLKWPRIDHXNTPWASRTPLCSLHSWTM

SEQ ID NO: 73970 - protein, 153 aa, Setaria italica
  Transcript Sequence Number=SeqID_7996
  Gene Ontology: Mol. function=protein binding; Cellular component =cytoplasm; Biological process=cell differentiation
  Homolog annotation: Hit_ID=B9R7B4; Match level="QueryCoverage=99%, HitCoverage=18%, E-value=7e-56, Identity=71%"; Hit description=Fms interacting protein, putative
  Pfam annotation: Domain name=FimP; Domain location=28-153; Score= -75.6; E_value=5.4e-05; Accession=PF09766.1; Description=Fms -interacting protein
PRMLAIKRDGVPKSELRELVTQMSLLLVTLRQVNREILMEEDKVKAETEAAKAPVDSTTLQLHNLLYEKNHYVKAIRTCLDFQTKYPGIELVPEEEFQRAAPADIRDKTLAADASHDLMLKRLNFELVQRKELCKLHEKLALQRSSLLETIAN

SEQ ID NO: 73971 - protein, 378 aa, Setaria italica
  Transcript Sequence Number=SeqID_7997
  Gene Ontology: Mol. function=protein binding; Cellular component =cytoplasm; Biological process=negative regulation of macrophage differentiation
  Homolog annotation: Hit_ID=A0EXR2; Match level="QueryCoverage=99%, HitCoverage=78%, E-value=1e-113, Identity=56%"; Hit description=Cold- induced protein
  Pfam annotation: Domain name=FimP; Domain location=1-327; Score =465.2; E_value=9.3e-137; Accession=PF09766.1; Description=Fms -interacting protein
STTLQLHNLLYEKNHYVRCPSYFQTKYPGIELVPEEEFQRAAPADIRDKTLAADASHDLMLKRLNFELVQRKELCKLHEKLALQRSSLLETIANQKKFLSSLPSHLKSLKKASLPVQQQLGMQHTKKLKQHHAAELLPTPLYIAYTQLLGQKEAFGENIEVEIMGSTKDAQIFAQQQAKKENAGTLSNGDNNRMDDDVIDDDEVAQRRRSRSKKNVMKEANNPAVAYQLHPLKIIVHVYDTEDSGTKRRKLITLRFEYLAKLNVVCVGIEESEGLDNNVLCNLFPDDTGLELPHQMAKIYAGEPPNFTDKNSRPYKWAQHLAGIDFLPEVPPSAGDDSIRALSSSDLSSGLALYRQQNRAQTILQRIRSRKVTQMALM

SEQ ID NO: 73972 - protein, 149 aa, Setaria italica
  Transcript Sequence Number=SeqID_7998
VELVAALQPGGGSLPPAASTASRQIEQDTAAAFSSLPPPPPPPPQPRRPPPPPWAPHRRPSPPPSPLPSLSSPSPTAGFLGRIPKNPSRAGGKRGSKRPPRRQRGRAPCLGDRAPSGCSRRVQSRGTPPPSASSLSLSLSLVLSPLYLL

SEQ ID NO: 73973 - protein, 142 aa, Setaria italica
  Transcript Sequence Number=SeqID_7999
  Gene Ontology: Mol. function=protein dimerization activity; Cellular component=endoplasmic reticulum lumen; Biological process=proteolysis
  Homolog annotation: Hit_ID=B6U9G1; Match level="QueryCoverage=100%, HitCoverage=32%, E-value=1e-60, Identity=82%"; Hit description=IAA -amino acid hydrolase ILR1-like 4
  Pfam annotation: Domain name=Peptidase_M20; Domain location=4-124; Score=-29.3; E_value=0.057; Accession=PF01546.20; Description =Peptidase family M20M25M40
LKRRIEEVVVAQAAVHRCAASVDFGVGGSPLLPPTVNTPSLHAHFEAVAAETVGAGNVRGAMEPCMGSEDFAAFSEAVPASHFYFVGIGNEEVGSVHAAHSPHFLIDDDALPYGAAMHANLATGYLRRRAASSGPEDSHDEL

SEQ ID NO: 73974 - protein, 101 aa, Setaria italica
  Transcript Sequence Number=SeqID_8000
AASSLACHCKALARDHDVDLLRALQYNGNGTLHGEQQVPPQVLNSLSDGVDGDGRSKRPRICARDCAKRIMELPVEERVKVLDLLQRDDAALTVSDYNDIL

SEQ ID NO: 73975 - protein, 134 aa, Setaria italica
  misc_feature (128)..(128): Xaa can be any naturally occurring amino acid
  Transcript Sequence Number=SeqID_8001
  Gene Ontology: Mol. function=DNA-directed RNA polymerase activity; Cellular component=nucleus; Biological process=transcription
  Homolog annotation: Hit_ID=B6TWH7; Match level="QueryCoverage=97%, HitCoverage=50%, E-value=2e-58, Identity=82%"; Hit description=RNA polymerase Rpc34 subunit family protein
REARALWMLDVRKQLTISPNVATKVVRTLVGHGLLKEVSDVRHRSRKIFMATDFQPSDEITGGTWYHDGRLDTDAVSAVRRRCQAQVEKLGAATVQMIHHGILRDDPKAGYTIDKVRDIVKTMVLDKXVLEEVK

SEQ ID NO: 73976 - protein, 265 aa, Setaria italica
  Transcript Sequence Number=SeqID_8002
  Gene Ontology: Mol. function=oxidoreductase activity; Cellular component=endoplasmic reticulum membrane; Biological process =oxidation reduction
  Homolog annotation: Hit_ID=B6TX51; Match level="QueryCoverage=93%, HitCoverage=76%, E-value=1e-126, Identity=87%"; Hit description=3 -ketodihydrosphingosine reductase
  Pfam annotation: Domain name=adh_short; Domain location=1-144; Score =29.9; E_value=1.5e-07; Accession=PF00106.17; Description=short chain dehydrogenase
SILARNLARLEEARAAIQRDSGRGDVGVHAADVRDAALLERALREAGPVDVLVCNHGVFVPQELERQDMEEIKWMVDINLMGTFHLIKAALPAMKARTRETRLPGSIAIMSSQAGQVGIYGYTAYSASKFALRGLGEALQHEVITDNIHVSLIFPPDTETPGLEEEHKRRPELTNIIAGSSGGMKANDVAKKALDGIKSAKFIVPCNFEGAMLAVATAGLSPQSSPVMAFLEVIGAGLMRFAALCFQWNWFSTIEGYYAKNKKRE

SEQ ID NO: 73977 - protein, 134 aa, Setaria italica
  misc_feature (47)..(47): Xaa can be any naturally occurring amino acid
  Transcript Sequence Number=SeqID_8003
  Gene Ontology: Cellular component=chloroplast
  Homolog annotation: Hit_ID=Q6EVZ1; Match level="QueryCoverage=41%, HitCoverage=55%, E-value=9e-12, Identity=64%"; Hit description=Ycf68 protein
MAYSSCLNRSLKPNKLLLRRIDGAIQVRSHVDLTFYSLVGSGRSGGXPPRLLSSRESIHPLSVYGELSLEHRLRFVLNGKMEHLTTHLHRPRTTRSPLSFWGDGGIVPFEPFFHAFPGGLEKAVINRTSLILPS

SEQ ID NO: 73978 - protein, 74 aa, Setaria italica
  misc_feature (33)..(33): Xaa can be any naturally occurring amino acid
  misc_feature (40)..(40): Xaa can be any naturally occurring amino acid
  Transcript Sequence Number=SeqID_8004
  Gene Ontology: Cellular component=chloroplast
  Subcellular localization annotation: CTP_CleavageSite=46; ConfidenceScore=5.33e-01
HPHAATRGDMGTSKRGILSLSTNLFRPRIISSXAWSYFTXKRKKTSISKFSSDVAAFFLGVKQCQTKIPNKHKH

SEQ ID NO: 73979 - protein, 83 aa, Setaria italica
  Transcript Sequence Number=SeqID_8005
  Subcellular localization annotation: CTP_CleavageSite=73; ConfidenceScore=5.59e-01
KLIQELKCASSFVSNFLSFQKFNKSHLSLRGRWLPSDGGPAPGVTTSRGGPGAGRSSRNVRVGVGMEAAPLPRAAGLQGKTKP

SEQ ID NO: 73980 - protein, 417 aa, Setaria italica
  misc_feature (98)..(98): Xaa can be any naturally occurring amino acid
  Transcript Sequence Number=SeqID_8006
  Gene Ontology: Mol. function=protein tyrosine kinase activity; Cellular component=plasma membrane; Biological process=protein amino acid phosphorylation
  Homolog annotation: Hit_ID=O22938; Match level="QueryCoverage=98%, HitCoverage=51%, E-value=1e-118, Identity=43%"; Hit description =Leucine-rich repeat receptor-like protein kinase
  Pfam annotation: Domain name=LRR_1; Domain location=103-125; Score =14.2; E_value=0.56; Accession=PF00560.25; Description=Leucine Rich Repeat
  Pfam annotation: Domain name=LRR_1; Domain location=127-149; Score =10.8; E_value=2.6; Accession=PF00560.25; Description=Leucine Rich Repeat
  Pfam annotation: Domain name=LRR_1; Domain location=151-173; Score =8.0; E_value=9; Accession=PF00560.25; Description=Leucine Rich Repeat
  Pfam annotation: Domain name=LRR_1; Domain location=175-197; Score =5.6; E_value=26; Accession=PF00560.25; Description=Leucine Rich Repeat
  Pfam annotation: Domain name=LRR_1; Domain location=199-221; Score =13.1; E_value=0.93; Accession=PF00560.25; Description=Leucine Rich Repeat
  Pfam annotation: Domain name=LRR_1; Domain location=223-245; Score =9.8; E_value=4.1; Accession=PF00560.25; Description=Leucine Rich Repeat
  Pfam annotation: Domain name=LRR_1; Domain location=247-270; Score =13.4; E_value=0.82; Accession=PF00560.25; Description=Leucine Rich Repeat
  Pfam annotation: Domain name=LRR_1; Domain location=271-293; Score =9.2; E_value=5.3; Accession=PF00560.25; Description=Leucine Rich Repeat
  Pfam annotation: Domain name=LRR_1; Domain location=295-317; Score =6.1; E_value=21; Accession=PF00560.25; Description=Leucine Rich Repeat
  Pfam annotation: Domain name=LRR_1; Domain location=30-52; Score =18.6; E_value=0.026; Accession=PF00560.25; Description=Leucine Rich Repeat
  Pfam annotation: Domain name=LRR_1; Domain location=344-366; Score =14.7; E_value=0.38; Accession=PF00560.25; Description=Leucine Rich Repeat
  Pfam annotation: Domain name=LRR_1; Domain location=368-389; Score =14.6; E_value=0.4; Accession=PF00560.25; Description=Leucine Rich Repeat
  Pfam annotation: Domain name=LRR_1; Domain location=54-76; Score =15.6; E_value=0.2; Accession=PF00560.25; Description=Leucine Rich Repeat
  Pfam annotation: Domain name=LRR_1; Domain location=6-28; Score=9.1; E_value=5.6; Accession=PF00560.25; Description=Leucine Rich Repeat
  Pfam annotation: Domain name=LRR_1; Domain location=78-100; Score =7.3; E_value=12; Accession=PF00560.25; Description=Leucine Rich Repeat
  Pfam module annotation: Pfam domain module=LRR_1::LRR_1::LRR_1::LRR _1::LRR_1::LRR_1::LRR_1::LRR_1::LRR_1::LRR_1::LRR_1::LRR_1::LRR _1::LRR_1::LRR_1; Domain location=103-125::127-149::151-173::175 -197::199-221::223-245::...
  Pfam module annotation: Domain location=247-270::271-293::295-317::30- 52::344-366::368-389::54-76::6-28::78-100
LGALPRLEFLDLSMNALTGPVPAALAGASGLRFLNLSNNALSGTIPDELRGLRALQELQISGNNLTGALPGWLAGLPALRVLSAYENSLSGPIPPRGXGLSSELQVLNLHSNALEGSIPGSLFQLGNLQVLILTLNRLNGTIPDAIGRCRGLSNVRIGDNRLSGAIPPSIGDATSLTYFEANTNDLSGGIPAQFARCANLTLLNLAYNRLAGEVPDVLGELRNLQELIVSGNGLGGEFPKAILRCRNLSKLDLSYNSFHGDLPEDICNGSRMQFLLLDHNGFSGGIPPGIGSCTRLLALQLSSNNLGGGIPAEIGKVKSLQIALNLSFNHLVGTLPRELGRLDKLVTLDLSSNEISGQIPGDMRGMLSLIEVNLSNNRLSGAIPAFGPFQKSAASSFSGNAKLCGDPLDVDCASIYG

SEQ ID NO: 73981 - protein, 293 aa, Setaria italica
  misc_feature (23)..(23): Xaa can be any naturally occurring amino acid
  misc_feature (180)..(180): Xaa can be any naturally occurring amino acid
  Transcript Sequence Number=SeqID_8007
  Gene Ontology: Mol. function=transferase activity, transferring phosphorus-containing groups; Cellular component=membrane; Biological process=peptidyl-histidine phosphorylation
  Homolog annotation: Hit_ID=A1IIY0; Match level="QueryCoverage=100%, HitCoverage=46%, E-value=1e-122, Identity=76%"; Hit description =Ethylene receptor protein
  Pfam annotation: Domain name=HisKA; Domain location=137-202; Score =76.0; E_value=1.4e-19; Accession=PF00512.17; Description=His Kinase A (phosphoacceptor) domain
VPINLPIVTAIFNSNRAERISHXSPLASIKTKTSRYVPPEVVGVRVPLLQLTNFQINDWPELSAKAFAVMVLMLPPDSARKWRPHELELVEVVADQVAVALSHAAILEESMRARDLLMEQNIALDAARREAEMAICARNDFLAVMNHEMRTPMRAIISLSSLLLETKLTAEQRLMIETIXKSSDLLETLSNDVLDISKLEDGSLELEIAPFNLHATFTDVVDLIKPVAAFKKQSVMVHLAPELPTWAIGDQKRLMQIILNVAGNSVKFTKEGHISITASVARPDSLRDPYAPD

SEQ ID NO: 73982 - protein, 185 aa, Setaria italica
  Transcript Sequence Number=SeqID_8008
MKSNSFDTRYSFLMSKLLDFIAEPHSAADSGLSDDQGSNSRKRKRGGKSASKTPEGTPSSSRKKFGDDSTSDKRRKKALKYDTDEDEDGDESMKSDSEADEQEDDYDSGKEKARKFSEVKESSGKKKTDRASGHKTGPSKTISKSPVKKPSSKISEDVTMDADAKEDTSARTEEGEDTKMTEAEA

SEQ ID NO: 73983 - protein, 88 aa, Setaria italica
  misc_feature (58)..(58): Xaa can be any naturally occurring amino acid
  misc_feature (68)..(68): Xaa can be any naturally occurring amino acid
  Transcript Sequence Number=SeqID_8009
MAEAEDAKEGDGDAAAAKQVDSEDVTMDADAKEDTSARTEEGEDTKMTEAEAGNAEVXKDKEEKEDKXDNTNVDKVDESKEQEKEGSA

SEQ ID NO: 73984 - protein, 62 aa, Setaria italica
  Transcript Sequence Number=SeqID_8010
  Homolog annotation: Hit_ID=B9RAB2; Match level="QueryCoverage=83%, HitCoverage=9%, E-value=3e-09, Identity=57%"; Hit description =Protein DEK, putative
KGKLPDFKVHILQFSGFVWHESDEKQRAKAKEKLDKCVKDMLLDLCWILAIPHHPHLHQYHT

SEQ ID NO: 73985 - protein, 62 aa, Setaria italica
  Transcript Sequence Number=SeqID_8011
YKSGIGYLLTCPKNVDIVIHLGKKVTKGKGESAGVDLPSKDELRKTITAILKKVDFNTVSIF

SEQ ID NO: 73986 - protein, 519 aa, Setaria italica
  Transcript Sequence Number=SeqID_8012
  Gene Ontology: Mol. function=nucleic acid binding; Cellular component= nucleus; Biological process=regulation of transcription from RNA polymerase II promoter
  Homolog annotation: Hit_ID=B9S9T4; Match level="QueryCoverage=32%, HitCoverage=24%, E-value=1e-43, Identity=49%"; Hit description =Transporter, putative
GSAWLPEADPAPAMEEKAVANGAAAADVTAPDSTDTANKVEAGKSKEPAVANKDAEEQNKGSENGTEGASDGDVKMAEAEDAKEGDGDAAAAKQVDSEDVTMDADAKEDTSARTEEGEDTKMTEAEAGNAEVKDKEEKEDNVDNTNVDKVDESKEQEKEGSAEQEEKEVKETEENKQQEDAKEEKDGANGKQQEEEGEEKDSADKKDEADKVEENKETPKNKKARSARDRNQGKDKKQDGSKSREAKSLLETPSPYGIDRPQRERKTVERLVEVIEKEPNRNFVVEKGRGTPLKDIPTVAHRIGRKKPGDLKFLHNILFGRKGKLPDFKVHILQFSGFVWHESDEKQRAKAKEKLDKCVKDMLLDLCWILAIPVPKSNIRKEDLVSKLLDFIAEPHSAADSGLSDDQGSNSRKRKRGGKSASKTPEGTPSSSRKKFGDDSTSDKRRKKALKYDTDEDEDGDESMKSDSEADEQEDDYDSGKEKARKFSEVKESSGKKKTDRASGHKKTRYLTKEQITKL

SEQ ID NO: 73987 - protein, 295 aa, Setaria italica
  Transcript Sequence Number=SeqID_8013
  Homolog annotation: Hit_ID=B9S9T4; Match level="QueryCoverage=56%, HitCoverage=25%, E-value=2e-09, Identity=33%"; Hit description =Transporter, putative
  Pfam annotation: Domain name=DEK_C; Domain location=212-265; Score =74.0; E_value=5.3e-19; Accession=PF08766.3; Description=DEK C terminal domain
TKETKVPPKVTSYIRKEDLVSKLLDFIAEPHSAADSGLSDDQGSNSRKRKRGGKSASKTPEGTPSSSRKKFGDDSTSDKRRKKALKYDTDEDEDGDESMKSDSEADEQEDDYDSGKEKARKFSEVKESSGKKKTDRASGHKTGPSKTISKSPVKKPSSKISEEKESPNDSAKVFSRKKKTTVKDEKDIKETKSSGKKVTKGKGESAGVDLPSKDELRKTITAILKKVDFNTATFSDILKKLDNHYKMDLTPKKEAIKVMIQDELTKMSEEAGEDEDASEDAEKKQQQPQVKEVEA

SEQ ID NO: 73988 - protein, 79 aa, Setaria italica
  misc_feature (46)..(46): Xaa can be any naturally occurring amino acid
  Transcript Sequence Number=SeqID_8014
  Gene Ontology: Mol. function=oxidoreductase activity; Biological process=protein amino acid phosphorylation
  Homolog annotation: Hit_ID=B4FSX7; Match level="QueryCoverage=96%, HitCoverage=24%, E-value=3e-29, Identity=82%"; Hit description =Carbonyl reductase 1
MEEAIPKPSEKRVALVTGGNRGMGFEICRQLASSGLAVVLTARDEXRGAEAVDRLRGLGLPDVVFHQLEITEPASAARL

SEQ ID NO: 73989 - protein, 46 aa, Setaria italica
  Transcript Sequence Number=SeqID_8015
SREGFAQKMFKLICCCYFLLQMDLYVHATCGSFGMATHSCMLIDPL

SEQ ID NO: 73990 - protein, 56 aa, Setaria italica
  Transcript Sequence Number=SeqID_8016
MKHTDKIQESTGDDESIASAQSRSGGFPMLNWWLINQGVSAAIVVIACGAMFLNNR

SEQ ID NO: 73991 - protein, 97 aa, Setaria italica
  Transcript Sequence Number=SeqID_8017
PISVNFLTVGCESYFCHYNANNPRLVLRSFMLSSRAGTFILVGCVQPCCEISIFFIFWYVGVGKCCKKLPICSRPVAHQSITFDDFDVAFLLLSCFP

SEQ ID NO: 73992 - protein, 105 aa, Setaria italica
  misc_feature (28)..(28): Xaa can be any naturally occurring amino acid
  misc_feature (50)..(50): Xaa can be any naturally occurring amino acid
  misc_feature (67)..(67): Xaa can be any naturally occurring amino acid
  Transcript Sequence Number=SeqID_8018
  Gene Ontology: Mol. function=sugar:hydrogen symporter activity; Cellular component=integral to membrane; Biological process =carbohydrate transport
  Homolog annotation: Hit_ID=Q7X7C4; Match level="QueryCoverage=96%, HitCoverage=24%, E-value=5e-38, Identity=82%"; Hit description =OSJNBa0076N16.10 protein
  Subcellular localization annotation: CTP_CleavageSite=13; ConfidenceScore=5.44e-01
KLWQLLMSTSSTVATIFTGLASAAFFGXPLTVNFLLGISIVFISMHQFFXSPLAKVKDEKTAGTVEXEMHQNHRSESSFVNMTAGAADDASHLSATDERKPLLPI

SEQ ID NO: 73993 - protein, 404 aa, Setaria italica
  Transcript Sequence Number=SeqID_8019
  Gene Ontology: Mol. function=sugar:hydrogen symporter activity; Cellular component=integral to membrane; Biological process =carbohydrate transport
  Homolog annotation: Hit_ID=Q7X7C4; Match level="QueryCoverage=100%, HitCoverage=100%, E-value=0.0, Identity=89%"; Hit description =OSJNBa0076N16.10 protein
  Pfam annotation: Domain name=Nuc_sug_transp; Domain location=105-341; Score=23.1; E_value=9.5e-15; Accession=PF04142.7; Description =Nucleotide-sugar transporter
  Pfam annotation: Domain name=UAA; Domain location=40-356; Score= -163.5; E_value=0.035; Accession=PF08449.3; Description=UAA transporter family
  Pfam module annotation: Pfam domain module=Nuc_sug_transp::UAA; Domain location=105-341::40-356
MQRNGVLECSVCRSKVAVPSPRSVSMAYDKHRSKISSKYHALNVLLVSGDCILVGLQPILVFMSKVDGKFQFSPISVNFLTEVAKVIFAIIMLIIQSRKQKVGEKPLLSLSTFVQAARSNVLLAVPALLYAINNYLKFIMQLYFNPATVKMLSNLKVLVIAVLLKVIMRRKFSIIQWEALALLLIGISVNQLRSIPAGTNAFGLPVTAIAYAYTLIFVTVPSFASVYNEYALKSQFDTSIYLQNLFLYGYGAIFNFLGILGTVIFQGPESFDILRGHSRATMFLICNNAAQGILSSFFFKYADTILKKYSSTVATIFTGLASAAFLGQPLTVNFLLGISIVFISMHQFFSPLAKVKDEKTAGTVELGDAQNHRSESSFVNMTAGAADDASHLSATDERKPLLPI

SEQ ID NO: 73994 - protein, 84 aa, Setaria italica
  Transcript Sequence Number=SeqID_8020
PAVGISLRSWLWQRDNGSSKVLSRVEVCVVRSPIGFDCRLCFDCNCFFCINKCPANFLPLVFQKDNATTGNEPRICKPCQFLSV

SEQ ID NO: 73995 - protein, 104 aa, Setaria italica
  Transcript Sequence Number=SeqID_8021
  Gene Ontology: Mol. function=nucleic acid binding
  Homolog annotation: Hit_ID=B4FT80; Match level="QueryCoverage=99%, HitCoverage=62%, E-value=2e-44, Identity=84%"; Hit description=OB -fold nucleic acid binding domain containing protein
LEARTVLEKHSPHIGRTRVAECLVGDHTGTILVTARNDQVDLVKPNTTVIFRNAKIDMFKGTMRLAVDKWGRIEVTDAADFKVKEDNNMSLVEYELVDVAEEED

SEQ ID NO: 73996 - protein, 83 aa, Setaria italica
  Transcript Sequence Number=SeqID_8022
IFLKTQLSSDSKLRWFCTPLTDHLNIIWSMKNLKCPRSGGWEMQTLSACHHSFEIYRCLQTSASSIGYSIERHSSNTSFSNRL

SEQ ID NO: 73997 - protein, 59 aa, Setaria italica
  Transcript Sequence Number=SeqID_8023
PTANSITTIDGTNMHSHLYPCLLFLLFLCSFCPCLILPAFDYTKLRRAALPARGLRQML

SEQ ID NO: 73998 - protein, 51 aa, Setaria italica
  Transcript Sequence Number=SeqID_8024
PSLSMPHLACVCPCLILPAFDYTKLRRAALPARGSRSNWSEHLPQPPSSAS

SEQ ID NO: 73999 - protein, 74 aa, Setaria italica
  Transcript Sequence Number=SeqID_8025
PPLERCGYYQAISGSISGNPRGSRSNWSEHLPQPPSRKRCSPQFCVVKRRQDEAIGTKRQGQRIEGMDKDGYAC

SEQ ID NO: 74000 - protein, 55 aa, Setaria italica
  Transcript Sequence Number=SeqID_8026
PSLSMPHLACVCPCLILPAFDYTKLRRAALPARGSRSNWSEHLPQPPKTRRLTLV

SEQ ID NO: 74001 - protein, 175 aa, Setaria italica
  misc_feature (8)..(8): Xaa can be any naturally occurring amino acid
  misc_feature (88)..(88): Xaa can be any naturally occurring amino acid
  Transcript Sequence Number=SeqID_8027
  Gene Ontology: Mol. function=transferase activity, transferring glycosyl groups; Cellular component=chloroplast; Biological process =carbohydrate metabolic process
  Homolog annotation: Hit_ID=B5AMJ9; Match level="QueryCoverage=88%, HitCoverage=18%, E-value=2e-79, Identity=87%"; Hit description =Phosphorylase
  Pfam annotation: Domain name=Phosphorylase; Domain location=1-171; Score=-521.6; E_value=3.1e-06; Accession=PF00343.12; Description =Carbohydrate phosphorylase
TLNYPAWXYGLRYKYGLFKQLITKDGQEEIAENWLEMGYPWEIVRNDVSYPVKFYGKVVEGTDGRKHWIGGENIKAVAHDVPIPGYKXRTTNNLRLWSTTVPAQDFDLEAFNAGDHTKAYEAHLNAEKICHVLYPGDESPEGKSSQLRESPALLSKRAIISCSEAEHNVYCCFKR

SEQ ID NO: 74002 - protein, 451 aa, Setaria italica
  misc_feature (104)..(104): Xaa can be any naturally occurring amino acid
  misc_feature (395)..(395): Xaa can be any naturally occurring amino acid
  Transcript Sequence Number=SeqID_8028
  Gene Ontology: Mol. function=transferase activity, transferring glycosyl groups; Cellular component=chloroplast; Biological process =carbohydrate metabolic process
  Homolog annotation: Hit_ID=B5AMJ9; Match level="QueryCoverage=97%, HitCoverage=51%, E-value=0.0, Identity=78%"; Hit description =Phosphorylase
  Pfam annotation: Domain name=Phosphorylase; Domain location=1-451; Score=85.8; E_value=6e-31; Accession=PF00343.12; Description =Carbohydrate phosphorylase
GRNLPLPKVRQVDKMNDTHPTLCIPELMRILIDFKGLSWDEAWSITERTVAYTNHTVLPEALEKWSLDIMQKLLPRHVEIIETIDQELINNIVTKYGTADTALXKKKLKEMRILDNVDLPASIAQLFVKPKEKKESPIKSKKKLLVKSLDTIAEVEEETELEEEETEVLSETEEENVESKEVEAEEDSEDELDPFVKSDPKLPRVVRMANLCVVGGHSVNGVAEIHSEISRKQGIVFNSFYEMWPTKFQNKTNGVTPRRWIRFCNPELSTIISKWTGSDDWVLNTDKLAELKKFADNEDLHSEWRAAKWANKMKVVSLIRDKTGYIVSPDAMFDVQVKRIHEYKRQLLNILGIVYRYKKMKEMSAEERIKSFVPRVCIFGGKAFATYIQAKRIVXKFITDVAATVNHDSDIGDLLKVVFVPDYNVSVAEALIPASELSQHISTAGMEASGT

SEQ ID NO: 74003 - protein, 667 aa, Setaria italica
  misc_feature (105)..(105): Xaa can be any naturally occurring amino acid
  misc_feature (286)..(286): Xaa can be any naturally occurring amino acid
  misc_feature (345)..(345): Xaa can be any naturally occurring amino acid
  misc_feature (446)..(446): Xaa can be any naturally occurring amino acid
  misc_feature (467)..(467): Xaa can be any naturally occurring amino acid
  misc_feature (615)..(615): Xaa can be any naturally occurring amino acid
  Transcript Sequence Number=SeqID_8029
  Gene Ontology: Mol. function=transferase activity, transferring glycosyl groups; Cellular component=chloroplast; Biological process =carbohydrate metabolic process
  Homolog annotation: Hit_ID=B2LXU4; Match level="QueryCoverage=95%, HitCoverage=64%, E-value=0.0, Identity=75%"; Hit description =Phosphorylase
  Pfam annotation: Domain name=Phosphorylase; Domain location=127-667; Score=363.5; E_value=3.9e-106; Accession=PF00343.12; Description =Carbohydrate phosphorylase
GRGRAQRRVAARSVASDRDVQGPVSLEEGLPSVLNSIDSSAIASNIKHHAEFKPLFSPEHFSPLKAYHATAKSVLDALLINWNATYDYYDKMNVKQAYYLSMEFXLQGRALTNAIGNLELTGEYAEALKQLGQNLEDVASQEPDAALGNGGLGRLASCFLDSLATLNYPAWGYGLRYKYGLFKQLITKDGQEEIAENWLEMGYPWEIVRNDVSYPVKFYGKVVEGTDGRKHWIGGENIKAVAHDVPIPGYKTRTTNNLRLWSTTVPAQDFDLEAFNAGDHTKAYEXAHLNAEKICHVLYPGDESPEGKVLRLKQQYTLCSASLQDIIARFESRAGDSLNWEDFPXSKVAVQMNDTHPTLCIPELMRILIDFKGLSWDEAWSITERTVAYTNHTVLPEALEKWSLDIMQKLLPRHVEIIETIDQELINNIVTKYGTADTALLKEEAXKEMRILDNVDLPASIAQLFVXKPKRRKKEYYLIKSKKKLLVKSLDTIAEVEEETELEEEETEVLSETEEENVESKEVEAEEDSEDELDPFVKSDPKLPRVVRMANLCVVGGHSVNGVAEIHSEIVKQDVFNSFYEMWPTKFQNKTNGVTPRRWIRFCNPELSTIISKWXGSDDWVLNTDKLAELKKFADNEDLHSEWRAAKWANKMKVVSLNKGNKEQGNK

SEQ ID NO: 74004 - protein, 663 aa, Setaria italica
  Transcript Sequence Number=SeqID_8030
  Gene Ontology: Mol. function=transferase activity, transferring glycosyl groups; Cellular component=chloroplast; Biological process =carbohydrate metabolic process
  Homolog annotation: Hit_ID=B5AMJ9; Match level="QueryCoverage=95%, HitCoverage=74%, E-value=0.0, Identity=84%"; Hit description =Phosphorylase
  Pfam annotation: Domain name=Phosphorylase; Domain location=6-659; Score=788.2; E_value=5.4e-234; Accession=PF00343.12; Description =Carbohydrate phosphorylase
NQSVSSLTRECIVLDECHSSALQPLGGESPPAWKQQYTLCSASLQDIIARFESRAGDSLNWEDFPSKVAVQMNDTHPTLCIPELMRILIDFKGLSWDEAWSITERTVAYTNHTVLPEALEKWSLDIMQKLLPRHVEIIETIDQELINNIVTKYGTADTALLKKKLKEMRILDNVDLPASIAQLFVKPKEKKESPIKSKKKLLVKSLDTIAEVEEETELEEEETEVLSETEEENVESKEVEAEEDSEDELDPFVKSDPKLPRVVRMANLCVVGGHSVNGVAEIHSEIVKQDVFNSFYEMWPTKFQNKTNGVTPRRWIRFCNPELSTIISKWTGSDDWVLNTDKLAELKKFADNEDLHSEWRAAKWANKMKVVSLIRDKTGYIVSPDAMFDVQVKRIHEYKRQLLNILGIVYRYKKMKEMSAEERIKSFVPRVCIFGGKAFATYIQAKRIVKFITDVAATVNHDSDIGDLLKVVFVPDYNVSVAEALIPASELSQHISTAGMEASGTSNMKFAMNGCILIGTLDGANVEIREEVGEENFFLFGAEAHEIVGLRKERAEGKFVPDPRFEEVKGFIRSGVFGTYNYDELMGSLEGNEGYGRADYFLVGKDFPSYIECQEKVDEAYRDQKLWTKMSILNTAGSSKFSSDRTIHEYAKDIWNIRPVILP

SEQ ID NO: 74005 - protein, 238 aa, Setaria italica
  Transcript Sequence Number=SeqID_8031
  Gene Ontology: Cellular component=endomembrane system; Biological process=plant-type hypersensitive response
  Homolog annotation: Hit_ID=B4G0G9; Match level="QueryCoverage=99%, HitCoverage=98%, E-value=1e-87, Identity=72%"; Hit description =Nitrate-induced NOI protein
  Pfam annotation: Domain name=NOI; Domain location=165-234; Score =42.0; E_value=2.4e-09; Accession=PF05627.3; Description=Nitrate -induced NOI protein
MAQHQGVPKFGSWEDEGDHLYTQYFENARKGKSPGHKGDPETPSKDPPSAKASPLRTGSDPVVRKPKDERRASREDDLRRHEATARKPYAESPNHKHGDHTNYDSAARKTGMERSPLHPHHQARVVNKGGVSSPSWERRGSSEGNRGAAPTTPGRSKMRSSGRGDETPERGSAVPKFGEWDEKDPSTGEGFTDIFNKVREEKQSGDAPVITSDAGYNRSNQGRKYESSGCSCFSWFRN

SEQ ID NO: 74006 - protein, 353 aa, Setaria italica
  Transcript Sequence Number=SeqID_8032
  Homolog annotation: Hit_ID=B8Q8A7; Match level="QueryCoverage=76%, HitCoverage=96%, E-value=1e-105, Identity=73%"; Hit description=SKIP interacting protein 21 (Fragment)
  Subcellular localization annotation: CTP_CleavageSite=57; ConfidenceScore=5.08e-01
SVVIASGSTCSATQLVLQAHKEAVNSLGENSPAKLGTVATVVAVANATAIEATKEVEAAMKISLRAALGSTTNKLTKGQLDDLTIMMETLRVKDDELHQLLQDIRARDSTINEIADKLQETAEAAETAASAARSIDGERRFLSSEFERLKQDHEKQVEVSLLRLKESEEKAKLLVEERDHLLTERDSALQEAQMWRSELGKARGNAVILEAAVVRAEEKARVSAADADMRVKEAMSRLESAIKEKEDLLALVDALQSQIKRQETSTIQVCEENSELCSTTSKHMEDDNVDKACVSDTDPIPVAENIVELDDEGVDIRTIGDTEWGNSHYLEVSDVREVTTEPEENSLDIPVDT

SEQ ID NO: 74007 - protein, 650 aa, Setaria italica
  misc_feature (501)..(501): Xaa can be any naturally occurring amino acid
  Transcript Sequence Number=SeqID_8033
  Gene Ontology: Mol. function=ubiquitin-protein ligase activity; Cellular component=ubiquitin ligase complex; Biological process =ubiquitin-dependent protein catabolic process
  Homolog annotation: Hit_ID=Q0IMG9; Match level="QueryCoverage=99%, HitCoverage=93%, E-value=0.0, Identity=80%"; Hit description=Protein spotted leaf 11
  Pfam annotation: Domain name=Arm; Domain location=354-394; Score =46.4; E_value=1.1e-10; Accession=PF00514.15; Description =Armadillobeta-catenin-like repeat
  Pfam annotation: Domain name=Arm; Domain location=395-435; Score =32.8; E_value=1.4e-06; Accession=PF00514.15; Description =Armadillobeta-catenin-like repeat
  Pfam annotation: Domain name=Arm; Domain location=436-476; Score =34.4; E_value=4.5e-07; Accession=PF00514.15; Description =Armadillobeta-catenin-like repeat
  Pfam annotation: Domain name=Arm; Domain location=519-559; Score =25.6; E_value=0.00021; Accession=PF00514.15; Description =Armadillobeta-catenin-like repeat
  Pfam annotation: Domain name=U-box; Domain location=228-302; Score =95.3; E_value=2.1e-25; Accession=PF04564.7; Description=U-box domain
  Pfam module annotation: Pfam domain module=Arm::Arm::Arm::Arm::U-box; Domain location=354-394::395-435::436-476::519-559::228-302
EFRNAYRRQLLALSRRIRLLGPFAEELREARGGAAEGEQERALAPLADALGTALDLLRLGRDGSRIFLVLERDNIMKKFQGVIAQLEQALCDFPYSKLDISDEVREQVELVHAQLRRAKERADMPDDEFYNDVLSLYNKSYDPSAELDILKRLSEKLHLMTITDLTQESLALHEMVASGGGQDPGEHIEKMSMLLKKIKDFVQIQNPEMGPPIGTKLMDSNGEPRPANIPDEFRCPISLELMKDPVIVSTGQTYERVCIEKWLASGHHTCPNTQQRMANTTLTPNYVLRSLIAQWCEANGIEPPKRSSQPNKPTSACSSSERANIDALLSQLCSHDPEEQMSAAAELRLLAKRNANNRICIAEAGAIPLLLSLLSSSDLRTQEHAVTALLNLSIHEDNKASIISSGAVPSIVHVLKNGSMGARENAAATLFSLSVIDEYKVTIGGTGAIPALVVLLSEGSQRGKKDAAAALFNLCIYQGNKGRAIRAGLVPLIMGLVTNPXTGALMDEAMAILSILSSHPEGKAAIGAAEPVPVLVEMIGSGSPRNRENAAAVMLHLCSGEQQLVHLARAQECGIMVPLRELALNGTERGKRKAVHLLERMSRFLVQQQEEKEAQLLASTQAIPQIPEQVQEIDIPEQLDSPSSQYPTVA

SEQ ID NO: 74008 - protein, 143 aa, Setaria italica
  Transcript Sequence Number=SeqID_8034
  Gene Ontology: Mol. function=hydrolase activity, hydrolyzing O -glycosyl compounds; Cellular component=extracellular region; Biological process=carbohydrate metabolic process
  Homolog annotation: Hit_ID=Q5JJV0; Match level="QueryCoverage=100%, HitCoverage=24%, E-value=1e-61, Identity=79%"; Hit description=Beta -fructofuranosidase, insoluble isoenzyme 4
  Pfam annotation: Domain name=Glyco_hydro_32N; Domain location=1-95; Score=-178.7; E_value=0.021; Accession=PF00251.12; Description =Glycosyl hydrolases family 32 N termi
DNCDKYMVGVYDLKSDTFVPDTILDDRRLWSRIDYGNYYASKSFFDSKRGRRIIWGWTNETDSSLDDVAKGWAGIHAIPRTIWLDSNSKQLLQWPVEEVESLRSEEVSHQGLELKQGDLFDIKGIDTLQADVEIDFELTSIDS

SEQ ID NO: 74009 - protein, 587 aa, Setaria italica
  Transcript Sequence Number=SeqID_8035
  Gene Ontology: Mol. function=hydrolase activity, hydrolyzing O -glycosyl compounds; Cellular component=extracellular region; Biological process=carbohydrate metabolic process
  Homolog annotation: Hit_ID=Q5JJV0; Match level="QueryCoverage=95%, HitCoverage=94%, E-value=0.0, Identity=84%"; Hit description=Beta -fructofuranosidase, insoluble isoenzyme 4
  Pfam annotation: Domain name=Glyco_hydro_32C; Domain location=419 -537; Score=146.6; E_value=7.7e-41; Accession=PF08244.4; Description =Glycosyl hydrolases family 32 C termi
  Pfam annotation: Domain name=Glyco_hydro_32N; Domain location=60-378; Score=539.2; E_value=4.8e-159; Accession=PF00251.12; Description =Glycosyl hydrolases family 32 N termi
  Pfam module annotation: Pfam domain module=Glyco_hydro_32C::Glyco _hydro_32N; Domain location=419-537::60-378
MALVLRPWAFLLFLVLVSYDESGLQSRRNGVAQATQRVFLYPQSPKVSSIVSTKYRTAYHFQPPKNWINDPNGPMYYNGIYHQFYQYNPNGSLWGNIVWGHSVSTDLINWIRLEPAIERTIPSDINGCWTGSATILKGNRPAIIYTGADTEKRQVQNIVFPKNVSDPYLREWIKPDNNPLIQPIGQGLNSGQFRDPTTGWIGPDGLWRIAVGAELNGYSAALLYKSEDFVNWTRVDHSLYSSNASTMWECPDFFAVLPGNNSGLDLSAAIPNGAKHVLKMSLDNCDKYMVGVYDLKSDTFVPDTILDDRRLWSRIDYGNYYASKFVSFDSKRGRRIIWGWTNETDSSLDDVAKGWAGIHAIPRTIWLDSNSKQLLQWPVEEVESLRSEEVSHQGLELKQGDLFDIKGIDTLQADVEIDFELTSIDSADPFDPSWLLDIEKHCREADASVHGGVGPFGLVVLASDNMEEHTSVHFRVYKSQEKYMVLMCSDLRKSSLRPELYTPAYGGFFEFDLEKESTISLRTLIDRSAVESFGGGGRLCIMARVYPVTLINGGTRMYAFNNGTSTVKVPQLKAWSMRRAQVNVKKG

SEQ ID NO: 74010 - protein, 51 aa, Setaria italica
  misc_feature (3)..(3): Xaa can be any naturally occurring amino acid
  Transcript Sequence Number=SeqID_8036
SGXEVKDRLGSCCLLASGPIHPSDVGRIRLSGSRTAAWLVGAQSRAVEERA

SEQ ID NO: 74011 - protein, 75 aa, Setaria italica
  Transcript Sequence Number=SeqID_8037
RQGRVSDRARGNKQTTPTWVWVYLIARTFALRPFNYLRESVGCLPGVGRPAGRPGALHRTGSAPRGQVAVRSSPA

SEQ ID NO: 74012 - protein, 88 aa, Setaria italica
  Transcript Sequence Number=SeqID_8038
AQPQPEQAEERVAASLLAAEQPPPSCTAAFTDTAPFAAGSDGELSAGPSDWPTAGIFELAGGNAGDASLPEHWNHGSWTDPDPAVYLP

SEQ ID NO: 74013 - protein, 51 aa, Setaria italica
  Transcript Sequence Number=SeqID_8039
  Gene Ontology: Mol. function=hydrolase activity, hydrolyzing O -glycosyl compounds; Cellular component=cell wall; Biological process= carbohydrate metabolic process
  Homolog annotation: Hit_ID=Q5JZX2; Match level="QueryCoverage=82%, HitCoverage=15%, E-value=1e-14, Identity=90%"; Hit description =Xyloglucan endo-transglycosylase/hydrolase
ITDDAPDEQLQLSSGDGDDHDEIDMEFMGNSSGQPVVLNTNVWASGDGKKE

SEQ ID NO: 74014 - protein, 137 aa, Setaria italica
  misc_feature (19)..(19): Xaa can be any naturally occurring amino acid
  Transcript Sequence Number=SeqID_8040
  Gene Ontology: Mol. function=hydrolase activity, hydrolyzing O -glycosyl compounds; Cellular component=cell wall; Biological process= carbohydrate metabolic process
  Homolog annotation: Hit_ID=C5IG72; Match level="QueryCoverage=78%, HitCoverage=38%, E-value=1e-46, Identity=83%"; Hit description =Xyloglucan xyloglucosyl transferase
  Pfam annotation: Domain name=Glyco_hydro_16; Domain location=26-137; Score=17.8; E_value=4.9e-08; Accession=PF00722.13; Description =Glycosyl hydrolases family 16
ALARRVLSVAVAVALLAAXASADSWLYEKFTTDGNVRADYNSQGQQVTSLILNQQSGGAFSSRQKYLYGEFSIQMKLIPRNSAGTVTSFYLTSGDGPGHDEIDMEFMGNSSGQPVVLNTNVWDQTDERTKKGRQPSY

SEQ ID NO: 74015 - protein, 126 aa, Setaria italica
  Transcript Sequence Number=SeqID_8041
  Gene Ontology: Mol. function=hydrolase activity, hydrolyzing O -glycosyl compounds; Cellular component=cell wall; Biological process= carbohydrate metabolic process
  Homolog annotation: Hit_ID=C5IG72; Match level="QueryCoverage=99%, HitCoverage=44%, E-value=4e-61, Identity=89%"; Hit description =Xyloglucan xyloglucosyl transferase
  Pfam annotation: Domain name=Glyco_hydro_16; Domain location=5-126; Score=67.3; E_value=5.7e-17; Accession=PF00722.13; Description =Glycosyl hydrolases family 16
ADSWLYEKFTTDGNVRADYNSQGQQVTSLILNQQSGGAFSSRQKYLYGEFSIQMKLIPRNSAGTVTSFYLTSGDGPGHDEIDMEFMGNSSGQPVVLNTNVWANGDGKKEHQFYLWFDPSADYHTYT

SEQ ID NO: 74016 - protein, 276 aa, Setaria italica
  Transcript Sequence Number=SeqID_8042
  Gene Ontology: Mol. function=hydrolase activity, hydrolyzing O -glycosyl compounds; Cellular component=cell wall; Biological process= carbohydrate metabolic process
  Homolog annotation: Hit_ID=B6TM34; Match level="QueryCoverage=91%, HitCoverage=90%, E-value=1e-118, Identity=81%"; Hit description =Xyloglucan endotransglycosylase/hydrolase protein 8
  Pfam annotation: Domain name=Glyco_hydro_16; Domain location=24-205; Score=262.6; E_value=9.3e-76; Accession=PF00722.13; Description =Glycosyl hydrolases family 16
  Pfam annotation: Domain name=XET_C; Domain location=226-273; Score =73.2; E_value=9.6e-19; Accession=PF06955.4; Description=Xyloglucan endo-transglycosylase (XET)
  Pfam module annotation: Pfam domain module=Glyco_hydro_16::XET_C; Domain location=24-205::226-273
MARRSLALLAVVLAYLQVVSATYWLRQFTTDGTVRKGYDASGQQVVMLRLDRNSGAAGLNSKQQYLYGEFSFEMKLIRGNSAGTVSCFYLSSGTDDWRDEIDMEFMGNSSGQPVVLNTNVWANGDGKKEHQFNLWFDPSADYHTYTIIWNPTNILFKVDNVFIRSFKRYADLPYPSSKPMTLHATLWDGSYWATEKGKIPIDWNSAPFVVSYRSFYANACVAGGACNAGRGGWMRKRLNGAELGTVRWAERNYMRYNYCQDGWRFPQGLPAECSRK

SEQ ID NO: 74017 - protein, 288 aa, Setaria italica
  Transcript Sequence Number=SeqID_8043
  Gene Ontology: Mol. function=hydrolase activity, hydrolyzing O -glycosyl compounds; Cellular component=cell wall; Biological process= carbohydrate metabolic process
  Homolog annotation: Hit_ID=B6TR01; Match level="QueryCoverage=93%, HitCoverage=92%, E-value=1e-128, Identity=80%"; Hit description =Xyloglucan endotransglycosylase/hydrolase protein 8
  Pfam annotation: Domain name=Glyco_hydro_16; Domain location=30-213; Score=257.4; E_value=3.4e-74; Accession=PF00722.13; Description =Glycosyl hydrolases family 16
  Pfam annotation: Domain name=XET_C; Domain location=238-285; Score =70.5; E_value=6.1e-18; Accession=PF06955.4; Description=Xyloglucan endo-transglycosylase (XET)
  Pfam module annotation: Pfam domain module=Glyco_hydro_16::XET_C; Domain location=30-213::238-285
MARRSLVLLLSSLAVAVLSILQPASAQSAWLDEFTTDGEVRADFDATGKQVASLVLDRSSGAGFNSTQKYLFGEFSVEMKLVPGNSAGTVTSFYLTSGETGKGDDHDEIDMEFMGNSSGAPTVLNTNVWASGDGKKEHQFYLWFDPAADYHKYTIIWNDKNIIFRVDDVTVRAFRRYADLPYPDAKPMAVHATLWDGSYWATEKGNIPIDWSAAPFVVSYRGYTANACVASEHGKPSCPAGRNEWMDRELDDTDRLTVAWARRNCLQYNYCEDGWRFPEGFPGECSRE

SEQ ID NO: 74018 - protein, 278 aa, Setaria italica
  Transcript Sequence Number=SeqID_8044
  Gene Ontology: Mol. function=hydrolase activity, hydrolyzing O -glycosyl compounds; Cellular component=cell wall; Biological process= carbohydrate metabolic process
  Homolog annotation: Hit_ID=B6TM34; Match level="QueryCoverage=91%, HitCoverage=91%, E-value=1e-125, Identity=84%"; Hit description =Xyloglucan endotransglycosylase/hydrolase protein 8
  Pfam annotation: Domain name=Glyco_hydro_16; Domain location=26-207; Score=258.7; E_value=1.4e-74; Accession=PF00722.13; Description =Glycosyl hydrolases family 16
  Pfam annotation: Domain name=XET_C; Domain location=228-275; Score =70.8; E_value=4.9e-18; Accession=PF06955.4; Description=Xyloglucan endo-transglycosylase (XET)
  Pfam module annotation: Pfam domain module=Glyco_hydro_16::XET_C; Domain location=26-207::228-275
MARRSPALLAVVVALAILQVASAASWLREFTTDGTVRTGYDASGQKVMMLNLDRSSGPAGFNSKEQFLYGEFSIEMKLIRGDSAGTVSCFYLSSGTDDWRDEIDMEFMGNSSGQPVVLNTNVWANGDGKKEHQFDLWFDPSADYHTYTIIWNPTNILFKVDNVFIRSFKRYADLAYPSSKPMTLHATLWDGSYWATEKGKVPIDWNRAPFVVSYRSFYANACVAGGACHAGRDGWMGKRLNGAEWGTVRWAERNYMRYNYCQDAWRFPQGLPAECNRN

SEQ ID NO: 74019 - protein, 284 aa, Setaria italica
  misc_feature (181)..(181): Xaa can be any naturally occurring amino acid
  Transcript Sequence Number=SeqID_8045
  Gene Ontology: Mol. function=hydrolase activity, hydrolyzing O -glycosyl compounds; Cellular component=cell wall; Biological process= carbohydrate metabolic process
  Homolog annotation: Hit_ID=C5IG72; Match level="QueryCoverage=91%, HitCoverage=91%, E-value=1e-132, Identity=86%"; Hit description =Xyloglucan xyloglucosyl transferase
  Pfam annotation: Domain name=Glyco_hydro_16; Domain location=27-208; Score=256.2; E_value=7.8e-74; Accession=PF00722.13; Description =Glycosyl hydrolases family 16
  Pfam annotation: Domain name=XET_C; Domain location=234-281; Score =78.3; E_value=2.8e-20; Accession=PF06955.4; Description=Xyloglucan endo-transglycosylase (XET)
  Pfam module annotation: Pfam domain module=Glyco_hydro_16::XET_C; Domain location=27-208::234-281
MALARRVLSVAVAVALLAASASADSWLYEKFTTDGNVRADYNSQGQQVTSLILNQQSGGAFSSRQKYLYGEFSIQMKLIPRNSAGTVTSFYLTSGDGPGHDEIDMEFMGNSSGQPVVLNTNVWANGDGKKEHQFYLWFDPSADYHTYTIIWNDKNVIFKVDDLFIRSFKRYADLPYPGGKXPMSVHATLWDGSYWATQQGKVKVDWADSPFVVSYRGYNADACTPNGDGRPLSCPAGTDRWMNRQLNAAEWGTVAWAKKNYMHYDYCEDGWRFPKGFPAECSRH

SEQ ID NO: 74020 - protein, 280 aa, Setaria italica
  misc_feature (47)..(47): Xaa can be any naturally occurring amino acid
  misc_feature (223)..(223): Xaa can be any naturally occurring amino acid
  Transcript Sequence Number=SeqID_8046
  Gene Ontology: Mol. function=hydrolase activity, hydrolyzing O -glycosyl compounds; Cellular component=cell wall; Biological process= carbohydrate metabolic process
  Homolog annotation: Hit_ID=Q5JZX2; Match level="QueryCoverage=90%, HitCoverage=90%, E-value=1e-122, Identity=83%"; Hit description =Xyloglucan endo-transglycosylase/hydrolase
  Pfam annotation: Domain name=Glyco_hydro_16; Domain location=28-208; Score=293.3; E_value=5.2e-85; Accession=PF00722.13; Description =Glycosyl hydrolases family 16
  Pfam annotation: Domain name=XET_C; Domain location=230-277; Score =71.6; E_value=2.8e-18; Accession=PF06955.4; Description=Xyloglucan endo-transglycosylase (XET)
  Pfam module annotation: Pfam domain module=Glyco_hydro_16::XET_C; Domain location=28-208::230-277
MARRSLLLPLLASLALMAAAVASADSWLYEKFNTDGTVRTDYDASGXQVAMLNLDRSSGAGFNSKEKYLYGEFSIQMKLIAGDSAGTVSCFYLSSGDGDDHDEIDMEFMGNSSGQPVVLNTNVWASGDGKKEHQFDLWFNPADDYHTYTIIWNPTNIIFKVDGNVIRCFKRYDGLAYPSSRPMALHATLWDGSYWATQKGKVPIDWSGAPFVVSYRGYSADAXCVSGGACPAGSDRWMNKQPDSAEWGTIKWAESNYMRYDYCQDGWRFPQGLPAECSRS

SEQ ID NO: 74021 - protein, 214 aa, Setaria italica
  Transcript Sequence Number=SeqID_8047
  Gene Ontology: Mol. function=nucleic acid binding; Cellular component= nucleolus; Biological process=hermaphrodite genitalia development
  Homolog annotation: Hit_ID=B6TP11; Match level="QueryCoverage=100%, HitCoverage=78%, E-value=2e-88, Identity=74%"; Hit description=Actin depolymerizing factor
  Pfam annotation: Domain name=zf-CCHC; Domain location=10-27; Score =20.5; E_value=0.00024; Accession=PF00098.15; Description=Zinc knuckle
  Pfam annotation: Domain name=zf-CCHC; Domain location=114-131; Score =10.2; E_value=0.014; Accession=PF00098.15; Description=Zinc knuckle
  Pfam annotation: Domain name=zf-CCHC; Domain location=35-52; Score =16.4; E_value=0.0012; Accession=PF00098.15; Description=Zinc knuckle
  Pfam annotation: Domain name=zf-CCHC; Domain location=60-77; Score =23.0; E_value=8.8e-05; Accession=PF00098.15; Description=Zinc knuckle
  Pfam annotation: Domain name=zf-CCHC; Domain location=87-104; Score =28.1; E_value=1.1e-05; Accession=PF00098.15; Description=Zinc knuckle
  Pfam module annotation: Pfam domain module=zf-CCHC::zf-CCHC::zf -CCHC::zf-CCHC::zf-CCHC; Domain location=10-27::114-131::35-52::60 -77::87-104
MRVPGMRPGECCFICKSTDHVAKACPEKALWDKNKICLHCRERGHSLKNCPEKSEGNLKKFCYNCGESGHSLSKCPKPIENGGTKFASCFVCKQQGHLSKDCPENKHGIYPKGGCCKICGEVTHLAKHCPNKGKQDLMSSRDDDVNMEEHYQEGPVVHHGGDDLEDDFIEEEEPKPTKSKKAKQPGSKSVGNDEKNANTKAKAKQSPKVVKFFG

SEQ ID NO: 74022 - protein, 84 aa, Setaria italica
  Transcript Sequence Number=SeqID_8048
  Subcellular localization annotation: CTP_CleavageSite=56; ConfidenceScore=5.16e-01
RSRRSPHARCRRSYRSRRSRGLPATGASTGVVPAGLAELLLPHARAGRRTGRSRLRAGTGRRSSPRCVGYRLPSAPVTSPHGQP

SEQ ID NO: 74023 - protein, 61 aa, Setaria italica
  Transcript Sequence Number=SeqID_8049
KIIFFRFKKLVFTKLLIKIAFKKLCHCPKQCLFVNGGNSPGDTFFWFLFIAINEKYIIHVT

SEQ ID NO: 74024 - protein, 117 aa, Setaria italica
  Transcript Sequence Number=SeqID_8050
  Gene Ontology: Mol. function=cyclin-dependent protein kinase activity; Biological process=protein amino acid phosphorylation
  Homolog annotation: Hit_ID=Q6Z8C8; Match level="QueryCoverage=98%, HitCoverage=25%, E-value=4e-59, Identity=93%"; Hit description =Cyclin-dependent kinase F-4
  Pfam annotation: Domain name=Pkinase; Domain location=1-111; Score= -71.3; E_value=0.0003; Accession=PF00069.17; Description=Protein kinase domain
KPENLLVNKDVIKLADFGLAREVSSVPPYTEYVSTRWYRAPEVLLQSSAYDSAVDMWAMGAIMAELLTLHPLFPGTSEADEIHKICNVIGSPDEQSWPQGLSLAEAMKYQFPQVNIH

SEQ ID NO: 74025 - protein, 246 aa, Setaria italica
  Transcript Sequence Number=SeqID_8051
  Gene Ontology: Mol. function=cyclin-dependent protein kinase activity; Biological process=protein amino acid phosphorylation
  Homolog annotation: Hit_ID=Q6Z8C8; Match level="QueryCoverage=86%, HitCoverage=46%, E-value=4e-93, Identity=77%"; Hit description =Cyclin-dependent kinase F-4
  Pfam annotation: Domain name=Pkinase; Domain location=1-156; Score= -53.0; E_value=2.5e-05; Accession=PF00069.17; Description=Protein kinase domain
MHVSKSLKNLKAPVADIRLREVSSVPPYTEYVSTRWYRAPEVLLQSSAYDSAVDMWAMGAIMAELLTLHPLFPGTSEADEIHKICNVIGSPDEQSWPQGLSLAEAMKYQFPQIKGNKLSEVMTSASSEAIDLISSLCSWDPCKRPKATEVLQHTFFQGCTYVPPPVRSKASAPPKTPPCVGAKGVSENNVARRYSTGTLSTMKSHSTTSTKLNSLSKTGVQRKLHYWYSFRLTVLSKVKFNVKVTF

SEQ ID NO: 74026 - protein, 459 aa, Setaria italica
  Transcript Sequence Number=SeqID_8052
  Gene Ontology: Mol. function=cyclin-dependent protein kinase activity; Cellular component=cytoplasm; Biological process=protein amino acid phosphorylation
  Homolog annotation: Hit_ID=Q6Z8C8; Match level="QueryCoverage=100%, HitCoverage=100%, E-value=0.0, Identity=81%"; Hit description=Cyclin- dependent kinase F-4
  Pfam annotation: Domain name=Pkinase; Domain location=4-283; Score =341.5; E_value=1.6e-99; Accession=PF00069.17; Description=Protein kinase domain
  Pfam annotation: Domain name=Pkinase_Tyr; Domain location=4-283; Score=81.7; E_value=2.6e-21; Accession=PF07714.9; Description =Protein tyrosine kinase
  Pfam module annotation: Pfam domain module=Pkinase::Pkinase_Tyr; Domain location=4-283::4-283
MDRFKLIKEVGDGTFGSVWRAINKQNGEVVAVKKMKKKYYSFEECMSLREVKSLRRMNHPNIVKLKEVIRENDILYFIMEYMECNLYQLMKDRVKPFPESDVRNWCFQIFQALAYMHQRGYFHRDLKPENLLVNKDVIKLADFGLAREVSSVPPYTEYVSTRWYRAPEVLLQSSAYDSAVDMWAMGAIMAELLTLHPLFPGTSEADEIHKICNVIGSPDEQSWPQGLSLAEAMKYQFPQIKGNKLSEVMTSASSEAIDLISSLCSWDPCKRPKATEVLQHTFFQGCTYVPPPVRSKASAPPKTPPCVGAKGVSENNVARRYSTGTLSTMKSHSTTSTKLNSLSKTGVQRKLHMDRPAPQKSTRPPENSNKLTMNRVPARNSPGNPVLRHSRSLPETGRGTIQKVSSITEKLSHMSVTSRTRSTLKPAVPMLKAGHGKSDFLGKSDDIPPAKRLTRKLVS

SEQ ID NO: 74027 - protein, 100 aa, Setaria italica
  Transcript Sequence Number=SeqID_8053
  Gene Ontology: Mol. function=sequence-specific DNA binding; Cellular component=cytoplasm; Biological process=regulation of transcription, DNA-dependent
  Homolog annotation: Hit_ID=Q8H7Y6; Match level="QueryCoverage=74%, HitCoverage=20%, E-value=3e-36, Identity=95%"; Hit description=Heat stress transcription factor A-2d
  Pfam annotation: Domain name=HSF_DNA-bind; Domain location=40-100; Score=-52.9; E_value=1.9e-05; Accession=PF00447.9; Description=HSF -type DNA-binding
MVTVKEEWPPGSPPPEEEVEDMDAEGAPRPMEGLHEVGPPPFLTKTFDLVADPATDQVVSWGRAGNSFVVWDPHVFAAVLLPRFFKHNNFSSFVRQLNTY

SEQ ID NO: 74028 - protein, 83 aa, Setaria italica
  Transcript Sequence Number=SeqID_8054
LRSNKLNKERVRNLTACHGDACRFCHLPSSSCASESFFSVLYATFVTTKLRILANDSISSTRNPDCAENSSNVTTIYKKKNSS

SEQ ID NO: 74029 - protein, 64 aa, Setaria italica
  Transcript Sequence Number=SeqID_8055
  Homolog annotation: Hit_ID=B6T6J7; Match level="QueryCoverage=62%, HitCoverage=35%, E-value=6e-16, Identity=100%"; Hit description=E2 protein isoform 5
  Pfam annotation: Domain name=EnY2; Domain location=7-64; Score=4.8; E_ value=0.00083; Accession=PF10163.1; Description=Transcription factor e(y)2
LVNIYLSLCSSFFVFLHLLYVLVCRAYARKKGRNNVTVDDLIHVITPKGRASVPDSVKAELLQT

SEQ ID NO: 74030 - protein, 112 aa, Setaria italica
  Transcript Sequence Number=SeqID_8056
  Gene Ontology: Mol. function=transcription activator activity; Cellular component=nucleus; Biological process=regulation of transcription, DNA-dependent
  Homolog annotation: Hit_ID=B6T6J7; Match level="QueryCoverage=100%, HitCoverage=100%, E-value=4e-47, Identity=82%"; Hit description=E2 protein isoform 5
  Pfam annotation: Domain name=EnY2; Domain location=22-107; Score =160.8; E_value=4e-45; Accession=PF10163.1; Description=Transcription factor e(y)2
MRASINRPPTPSAEQDRDKEPSLEEVINIKLVESGEKEKLMELLRERLVECGWRDEMKALCRAYARKKGRNNVTVDDLIHVITPKGRASVPDSVKAELLQRIRSFLMSTSLR

SEQ ID NO: 74031 - protein, 160 aa, Setaria italica
  misc_feature (85)..(85): Xaa can be any naturally occurring amino acid
  misc_feature (143)..(143): Xaa can be any naturally occurring amino acid
  Transcript Sequence Number=SeqID_8057
  Gene Ontology: Mol. function=DNA binding; Cellular component =intracellular; Biological process=translation
  Homolog annotation: Hit_ID=B9S0I6; Match level="QueryCoverage=90%, HitCoverage=18%, E-value=1e-11, Identity=36%"; Hit description=DNA binding protein, putative
  Subcellular localization annotation: CTP_CleavageSite=80; ConfidenceScore=5.32e-01
PRVDMCVSSPSPIVGKTPGNEAFPLKFLPVDAQNGSRVASPKGAFFKRMAETNSSKSGATKGDLSATRTVKQKRRAGGVVASAAXKKWERAAMAGVSLVADAAEELERNTINPGMLCNVDARTLTSSSDKLSTVDGISTNHMXKEADSQAPAKLKLQLFQ

SEQ ID NO: 74032 - protein, 458 aa, Setaria italica
  misc_feature (19)..(19): Xaa can be any naturally occurring amino acid
  Transcript Sequence Number=SeqID_8058
  Gene Ontology: Mol. function=DNA binding; Cellular component =intracellular; Biological process=translation
  Homolog annotation: Hit_ID=B9S0I6; Match level="QueryCoverage=94%, HitCoverage=55%, E-value=3e-71, Identity=40%"; Hit description=DNA binding protein, putative
HKNCEQKRRAGETIPTRQXKKWERAAMAGVSLVADAAEELERNTINPGMLCNVDARTLTSSSDKLSTVDGISTNHMKEADSQAPAKLKLQLFPINEATRKALEKDEHNPHLELTLSSRKKISSVLEHLNRKWGNSNIASGELILFPYCAHQEDLATYQRWTTRDTVAVADVFLSVNSPSVFRLRYGWFSLVELEAGVSEISLTHFENCMMPEDIQVKSPSGDKSCVQKDDALLSSNIHEQYPCSSIDQSALLHITPSSTGKITELPEQTPSQFGSQKQVRVPVTQAFEDDQGMNCAAISEGEWADTLTDISVGYLLTEASKGTHLDCIGTSSVKNALLLENPCSYDSFDAAVALHVSRFQASEQPAHTPHSTIWGGEETCDEFSFNLSASRKQEGSNTPSSSSPDTDNEVHPLNSEGFQGFLQDLTGGEAAADNPCNDDGKDREEFCAKSPPRNDDTN

SEQ ID NO: 74033 - protein, 87 aa, Setaria italica
  misc_feature (37)..(37): Xaa can be any naturally occurring amino acid
  Transcript Sequence Number=SeqID_8059
  Gene Ontology: Mol. function=small conjugating protein ligase activity; Cellular component=cytosol; Biological process=ubiquitin -dependent protein catabolic process
  Homolog annotation: Hit_ID=Q8LGF7; Match level="QueryCoverage=100%, HitCoverage=55%, E-value=6e-43, Identity=94%"; Hit description =Probable ubiquitin carrier protein E2 21
  Pfam annotation: Domain name=UQ_con; Domain location=1-87; Score =87.2; E_value=5.9e-23; Accession=PF00179.18; Description=Ubiquitin -conjugating enzyme
LIKGPSETPYEGGVFQLAFAIPEQYPLLPPQVRFLTXIFHPNVHFKTGEICLDILKNAWSPAWTLQSVCRAIIALMAHPEPDSPLNC

SEQ ID NO: 74034 - protein, 157 aa, Setaria italica
  Transcript Sequence Number=SeqID_8060
  Gene Ontology: Mol. function=small conjugating protein ligase activity; Cellular component=cytosol; Biological process=ubiquitin -dependent protein catabolic process
  Homolog annotation: Hit_ID=Q8LGF7; Match level="QueryCoverage=100%, HitCoverage=100%, E-value=7e-84, Identity=92%"; Hit description =Probable ubiquitin carrier protein E2 21
  Pfam annotation: Domain name=UQ_con; Domain location=7-148; Score =200.2; E_value=5.5e-57; Accession=PF00179.18; Description=Ubiquitin -conjugating enzyme
MQASRARLFKEYKEVQREKSADPDIQLICDDSNIFKWTALIKGPSETPYEGGVFQLAFAIPEQYPLLPPQVRFLTRIFHPNVHFKTGEICLDILKNAWSPAWTLQSVCRAIIALMAHPEPDSPLNCDSGNLLRSGDIRGFQSMAKMYTKLAAMPKKN

SEQ ID NO: 74035 - protein, 104 aa, Setaria italica
  Transcript Sequence Number=SeqID_8061
QVLWPAGEYLYWSKGQLFQTRQSPKLRSNEENPVGWCGSESLYNGKSLQEPFLGSWTKALHKATRKQLLWLNIVCLTFIKQHLSGGVAQKFLLGNCMYLFCKCF

SEQ ID NO: 74036 - protein, 666 aa, Setaria italica
  misc_feature (21)..(21): Xaa can be any naturally occurring amino acid
  Transcript Sequence Number=SeqID_8062
  Gene Ontology: Mol. function=phosphatidylinositol phosphate kinase activity; Cellular component=plasma membrane; Biological process =phosphatidylinositol metabolic process
  Homolog annotation: Hit_ID=Q8SA90; Match level="QueryCoverage=100%, HitCoverage=92%, E-value=0.0, Identity=92%"; Hit description =Putative phosphatidylinositol-4-phosphate-5-kinase
  Pfam annotation: Domain name=MORN; Domain location=1-21; Score=13.6; E_value=0.24; Accession=PF02493.12; Description=MORN repeat
  Pfam annotation: Domain name=MORN; Domain location=114-136; Score =33.8; E_value=7e-07; Accession=PF02493.12; Description=MORN repeat
  Pfam annotation: Domain name=MORN; Domain location=23-44; Score=16.4; E_value=0.1; Accession=PF02493.12; Description=MORN repeat
  Pfam annotation: Domain name=MORN; Domain location=45-67; Score=25.5; E_value=0.00022; Accession=PF02493.12; Description=MORN repeat
  Pfam annotation: Domain name=MORN; Domain location=68-90; Score=39.3; E_value=1.5e-08; Accession=PF02493.12; Description=MORN repeat
  Pfam annotation: Domain name=MORN; Domain location=91-113; Score =36.8; E_value=8.4e-08; Accession=PF02493.12; Description=MORN repeat
  Pfam annotation: Domain name=PIP5K; Domain location=347-662; Score =477.6; E_value=1.8e-140; Accession=PF01504.10; Description =Phosphatidylinositol-4-phosphate 5-Kinase
  Pfam module annotation: Pfam domain module=MORN::MORN::MORN::MORN::MOR N::MORN::PIP5K; Domain location=1-21::114-136::23-44::45-67::68 -90::91-113::347-662
GEWRKGKASGKGRFSWPPGPXVQGEFRGGRIEGQGAFVGPDGATYRGAWVADRRHGVGAKSYANGDFYEGQWRRNLQDGHGRYVWANGNQYVGEWRAGVLSGRGVLIWANGSRYDGVWENGVPRGTGVFTWPDGSRYVGSWPGTCVDLPAISGTFFPPVGAGAAGTVRKRSSVEGVGEKAAPRICIWESEGEAGDITCDIVDALEASMLYKEAAAVAGGATYMRTLPQRSTRRAASGVPRWASSAATTPESKRPGQTISKGHKNYELMLQLQLGIRYSVGKSAAVPMRALIQADFDPKEKFWTKFPPEGSKVTPPHSSAEFRWKDYCPMVFRHLRKLFAVDPADYMLAICGNDALRELSSPGKSGSFFYLTQDDRFMIKTVRKSEVKLLIRMLNSYYQHVSQYKNSLITRFYGVHCVKPFNGQKVRFIVMGNLFCSEYRIHRRFDLKGSSYGRTADKFDDEIDETTTLKDLDLNFVFRLQRSWYTDLHEQLRRDCNFLESEGIMDYSFLVGVHFCDDISASKMGSSTFTASPKLLTKSESFQGGGTPELCFSDDDFDMMPDCRRKPLIRLGSHMPARAEQASRRSEFDPYLFTGGGFLFPNQTGEVHDVILYFGIIDILQDYDITKKLEHAYKSLQTDPNSISAVDPKLYSKRFQDFIGRIFVEDG

SEQ ID NO: 74037 - protein, 78 aa, Setaria italica
  Transcript Sequence Number=SeqID_8063
ATSSRCRGRGMLVPAAGRPAAALSDRRRRSCEEAHPGTQHALQPETCDTGGSGDAIVAFSVRVDGLCTFSLVAGAQLL

SEQ ID NO: 74038 - protein, 121 aa, Setaria italica
  misc_feature (13)..(13): Xaa can be any naturally occurring amino acid
  Transcript Sequence Number=SeqID_8064
RGGEQVASVLQEXMLTLMEDMEMDGAFEPVAVELVAQGVIGKRVDEMESGFLMALDYMIQLAQKDADDERKSLLEVIKQTVLDHLTKKCPPHVQVVGLLCQTEKKESRHELLRRVAAGVGR

SEQ ID NO: 74039 - protein, 217 aa, Setaria italica
  Transcript Sequence Number=SeqID_8065
  Gene Ontology: Mol. function=peptidyl-prolyl cis-trans isomerase activity; Cellular component=nucleus; Biological process=protein folding
  Homolog annotation: Hit_ID=Q653M7; Match level="QueryCoverage=82%, HitCoverage=32%, E-value=2e-76, Identity=79%"; Hit description =Putative multidomain cyclophilin type peptidyl-prolyl cis-trans isomerase
  Pfam annotation: Domain name=RRM_1; Domain location=36-106; Score =59.2; E_value=1.6e-14; Accession=PF00076.14; Description=RNA recognition motif. (a.k.a. RRM, RBD, o
  Pfam annotation: Domain name=zf-CCHC; Domain location=130-147; Score =31.8; E_value=2.7e-06; Accession=PF00098.15; Description=Zinc knuckle
  Pfam module annotation: Pfam domain module=RRM_1::zf-CCHC; Domain location=36-106::130-147
ELEEMIRSKEAHTNAVILESFADIPDAEIKPPDNVLFVCKLNPVTQDEEIYTIFSRFGTVTSAEIIRDFKTGDSLCYAFIEFETKEACERAYFKMDNCLIDDRRIHVDFSQSVSKLWGQFRQSKRNAKKDGCFKCGAPDHIAKDCDQDGDQKNKGQNYVLKDENAQRGGNHRRSYDLVFDEDDADYSDKKDHDHHEVEALIFDHHFFGSFLLLAIFR

SEQ ID NO: 74040 - protein, 244 aa, Setaria italica
  Transcript Sequence Number=SeqID_8066
  Gene Ontology: Mol. function=peptidyl-prolyl cis-trans isomerase activity; Biological process=protein folding
  Homolog annotation: Hit_ID=Q653M7; Match level="QueryCoverage=39%, HitCoverage=17%, E-value=8e-23, Identity=62%"; Hit description =Putative multidomain cyclophilin type peptidyl-prolyl cis-trans isomerase
  Pfam annotation: Domain name=zf-CCHC; Domain location=28-45; Score =20.2; E_value=0.00026; Accession=PF00098.15; Description=Zinc knuckle
LYCSKGNSRSLVKVRIVLGNSSRIRRKQKGFKCGAPDHIAKDCDQDGDQKNKGQNYVLKDENAQRGGNHRRSYDLVFDEDDADYSDKKDHENGHRRKIQRNDDRRSELPPRGDRDRNNRERTYSDEKGIRRGKDDDRNRGGRKNDDYRSGDRSSSRYDDRDYSKRHSRNRSGDDEDDYRLRDRSDGERHHRDDGYEKRDRHRRDEVDHRKRSPESRRREDGGHRERNQHSDDRSYKEKRHRDGR

SEQ ID NO: 74041 - protein, 32 aa, Setaria italica
  Transcript Sequence Number=SeqID_8067
  Pfam annotation: Domain name=Rpn3_C; Domain location=4-32; Score=0.8; E_value=0.0077; Accession=PF08375.3; Description=Proteasome regulatory subunit C-terminal
MWRQIAFNSRIAFCLNMHNEAVKAMRFPTYRE

SEQ ID NO: 74042 - protein, 187 aa, Setaria italica
  misc_feature (134)..(134): Xaa can be any naturally occurring amino acid
  Transcript Sequence Number=SeqID_8068
  Gene Ontology: Mol. function=enzyme regulator activity; Cellular component=proteasome complex; Biological process=regulation of protein catabolic process
  Homolog annotation: Hit_ID=P93768; Match level="QueryCoverage=88%, HitCoverage=33%, E-value=1e-69, Identity=76%"; Hit description =Probable 26S proteasome non-ATPase regulatory subunit 3
  Pfam annotation: Domain name=PCI; Domain location=1-100; Score=84.2; E_value=4.6e-22; Accession=PF01399.19; Description=PCI domain
  Pfam annotation: Domain name=Rpn3_C; Domain location=103-169; Score =134.3; E_value=3.8e-37; Accession=PF08375.3; Description=Proteasome regulatory subunit C-terminal
  Pfam module annotation: Pfam domain module=PCI::Rpn3_C; Domain location=1-100::103-169
AVRVGDLELFRAVADKFASTFSADRTRNLIVRLRHNVIRTGLRNISISYSRISLADIAKKLRLDSENPVADAESIVAKAIRDGAIDATIDHANGWMVSKETGDVYSTNEPQIAFNSRIAFCLNMHNEAVKAMRXPPNSHKEKESAEKRRERLQQEEELAKHMAEEGMNRTNLLKLRLGPLDDKTNLD

SEQ ID NO: 74043 - protein, 491 aa, Setaria italica
  Transcript Sequence Number=SeqID_8069
  Gene Ontology: Mol. function=enzyme regulator activity; Cellular component=proteasome complex; Biological process=regulation of protein catabolic process
  Homolog annotation: Hit_ID=Q06364; Match level="QueryCoverage=100%, HitCoverage=100%, E-value=0.0, Identity=70%"; Hit description =Probable 26S proteasome non-ATPase regulatory subunit 3
  Pfam annotation: Domain name=PCI; Domain location=314-421; Score =108.8; E_value=1.8e-29; Accession=PF01399.19; Description=PCI domain
  Pfam annotation: Domain name=Rpn3_C; Domain location=424-490; Score =156.2; E_value=1e-43; Accession=PF08375.3; Description=Proteasome regulatory subunit C-terminal
  Pfam module annotation: Pfam domain module=PCI::Rpn3_C; Domain location=314-421::424-490
MPEDVQMNDSEPQPAAPTPAAAAPALSTLHHLKEIASVIEAGSLSKEVRRISRAVRLTVALRRRLAARDVSAFLGFALPASSEAYARLTALVPKEDDTEMDVDAAAPATQISIKHGLPEIEIYCYLLVLIFLIDQKKYDEAKACATSSIARLKNLNRRTVDVLASRLYFYYSYVYELTNSLAEIRGNLLALHRMATLHRDELGQETLLNLLLRNYLHYNLYDQAEKLRSKAPRFEAHSNQQFCRYLFYLGKIRTIQLEYTDAKESLLQAARKAPTSARGFRIQCNKWAIIVRLLLGEIPERTVFMQKGMKKALTPYFELTNAVRVGDLELFRAVADKFASTFSADRTRNLIVRLRHNVIRTGLRNISISYSRISLADIAKKLRLDSENPVADAESIVAKAIRDGAIDATIDHANGWMVSKETGDVYSTNEPQIAFNSRIAFCLNMHNEAVKAMRFPPNSHKEKESAEKRRERLQQEEELAKHMAEEDDDDF

SEQ ID NO: 74044 - protein, 58 aa, Setaria italica
  Transcript Sequence Number=SeqID_8070
  Gene Ontology: Cellular component=integral to membrane; Biological process=transport
MFHMHLVCPTQGNFCTVSAGSYKLVWDNSYSSFFKKSLRYKVDAVPPVVEPAVPALEP

SEQ ID NO: 74045 - protein, 139 aa, Setaria italica
  Transcript Sequence Number=SeqID_8071
WDFSLQQGALNMDIGFHVEYISPSGEKTVSFLFNRIFFWGSCSLGFDTQFINETEISKRHLHCSWTLIGLILFFIALCIVLWFYKKWFDCYEGSLVIFYRTASMCLPLVFYRISITWSILLFLISHYGRSVCIGLFGSY

SEQ ID NO: 74046 - protein, 124 aa, Setaria italica
  Transcript Sequence Number=SeqID_8072
QKSGKNKQNKLSVQSETRPSIKKLRRWGKAIPRYFTKKLSVNRPREGPKPRLHPGHTFTLAGDHCHYTCRAAMLPQASALPARELFLVPPGFAGSSLTWGVKSYIIKGMAKRDHLFVEKNKLNL

SEQ ID NO: 74047 - protein, 437 aa, Setaria italica
  Transcript Sequence Number=SeqID_8073
  Gene Ontology: Cellular component=integral to membrane; Biological process=transport
  Homolog annotation: Hit_ID=Q1STP4; Match level="QueryCoverage=95%, HitCoverage=96%, E-value=1e-148, Identity=61%"; Hit description =Proteinase inhibitor I4, serpin; emp24/gp25L/p24
MATTEGLVPITRAYLARYYDKYPLPPLPDAATDLAARLRALSADLAAVAPITPDEELLKQEAAGIPAHKIDENMWKNREQMEEILFLLNTSRRPVALQQKSTPEDTEIVSKLDDIEAKLKDMLKKLEQFQLKNADNVFNTVMTYMPQDFRGTLIRQQRERSERNKQAEVDALASAGGSIRDRYALLWKQQMERRVQLAQLGSATGVYKTLVRYLVGVPQVLLDFIRQINDDNGPMEEQRERYGPALYTLTKLVLAIRLYLHVSLARYGQRKIDKDDIAVLQHAVIIYTEEFVKFTEFIGEVFVNAPFFISAEDAGAADARKSDEYKETIIPAGKTHEVILSVEAINSYIAWDFSLQQGALNMDIGFHVEYISPSGEKTLILPYRRYEADQGNFCTVSAGSYKLVWDNSYSSFFKKSLRYKVDAVPPVVEPAVPALEP

SEQ ID NO: 74048 - protein, 325 aa, Setaria italica
  Transcript Sequence Number=SeqID_8074
  Gene Ontology: Mol. function=binding; Biological process=DNA integration
  Homolog annotation: Hit_ID=B9RTL2; Match level="QueryCoverage=99%, HitCoverage=96%, E-value=1e-136, Identity=71%"; Hit description=Heat shock protein 70 (HSP70)-interacting protein, putative
  Pfam annotation: Domain name=TPR_1; Domain location=12-45; Score =28.2; E_value=3.2e-05; Accession=PF00515.20; Description =Tetratricopeptide repeat
  Pfam annotation: Domain name=TPR_1; Domain location=46-79; Score =14.0; E_value=0.12; Accession=PF00515.20; Description=Tetratricopepti de repeat
  Pfam annotation: Domain name=TPR_1; Domain location=80-113; Score =37.5; E_value=5.2e-08; Accession=PF00515.20; Description =Tetratricopeptide repeat
  Pfam annotation: Domain name=TPR_2; Domain location=12-45; Score =27.4; E_value=6e-05; Accession=PF07719.9; Description=Tetratricopepti de repeat
  Pfam annotation: Domain name=TPR_2; Domain location=46-79; Score =13.6; E_value=0.69; Accession=PF07719.9; Description=Tetratricopeptid e repeat
  Pfam annotation: Domain name=TPR_2; Domain location=80-113; Score =35.4; E_value=2.2e-07; Accession=PF07719.9; Description =Tetratricopeptide repeat
  Pfam annotation: Domain name=TPR_3; Domain location=12-45; Score=9.9; E_value=0.68; Accession=PF07720.4; Description=Tetratricopeptide repeat
  Pfam annotation: Domain name=TPR_3; Domain location=77-113; Score =8.2; E_value=1.1; Accession=PF07720.4; Description=Tetratricopeptide repeat
  Pfam module annotation: Pfam domain module=TPR_1::TPR_1::TPR_1::TPR _2::TPR_2::TPR_2::TPR_3::TPR_3; Domain location=12-45::46-79::80 -113::12-45::46-79::80-113::12-45::77-113
MADGGGEGVSPSAALKDQGNEQFKSGSYLKAAALYTQAIKLDPDNATLYSNRAAAFLQLVKLSKALADAETTVKLKPEWEKGHFRKGCVLEAMERYEEAISAFEIALQLNPQNTEVSRKIKRLSQLAREKKRALDVESMRSNVNVGKNLESLKTELAAKYGDVETGQSIFSFVVNVIESAIKAWHDTGKVDPRVNFLLDDQKTNTQKYAPVVNVDKAFESPQTHSECFTFLRQYAEDSFAKAACMVAPKTIISYPQVWKGQGSRKWKLDQSDGFFVQFESPALRKIWFVPSTKEKGRTLCRSPETLDIGIHEVIPRIFKEGDPQT

SEQ ID NO: 74049 - protein, 114 aa, Setaria italica
  Transcript Sequence Number=SeqID_8075
TDAASGDEEAVMPAYKRRGRPQKHLKADDTDEEEQDSAKVEPMEDSDGVKPAVPGKGSAENGGKKRRRRQPRKRGCDPAAEEKDEAVKQSGFRHHGSRRKSTPRRAAEAGVECK

SEQ ID NO: 74050 - protein, 170 aa, Setaria italica
  Transcript Sequence Number=SeqID_8076
  Gene Ontology: Mol. function=zinc ion binding
  Homolog annotation: Hit_ID=B6UCK1; Match level="QueryCoverage=25%, HitCoverage=26%, E-value=7e-16, Identity=95%"; Hit description=DNA binding protein
PGEAVRAVVEDLGLNRAKDPAAMGFRPPKASIADRLMLTKRKMEEVKEAPVQPTVSTPQTAVSTGMAEFHGFNGASKFGVGVPRNPQVAAVAATSPLTSTSPVVLKPPGSSPVKPVANSSGVALPHTGPSHLKLDKDVNGPLNLTRSGAAVVHPNKSTLDTSARSNVNAV

SEQ ID NO: 74051 - protein, 262 aa, Setaria italica
  misc_feature (62)..(62): Xaa can be any naturally occurring amino acid
  Transcript Sequence Number=SeqID_8077
  Gene Ontology: Mol. function=transferase activity, transferring phosphorus-containing groups; Cellular component=chloroplast; Biological process=phosphorylation
  Homolog annotation: Hit_ID=A1IM62; Match level="QueryCoverage=94%, HitCoverage=26%, E-value=1e-124, Identity=87%"; Hit description =Pyruvate orthophosphate dikinase
  Pfam annotation: Domain name=PPDK_N; Domain location=10-261; Score =243.8; E_value=4.3e-70; Accession=PF01326.11; Description=Pyruvate phosphate dikinase, PEPpyruvate bi
MAPLNVWPRRGCPLRQGQERGNKTMKELLGGKGANLAEMSSIGLSVPPGFTVSTEACQQYQXPGRSLPQGLWDEIIDGLAWVEEEMGARLGDPQRPLLLSVRSGAAVSMPGMMDTVLNLGLNDEVAAGLGAKSGERFANDSYRRFLDMFGNVVMDIPHALFEEKLEAMKEAKGVKNDNDLTASDLKELVAQYKEVYVEAKGEPFPSDPKKQLELAVLAVFNSWDSPRANKYRSINQITGLKGTAVNVQSMVFGNMGDTSGTG

SEQ ID NO: 74052 - protein, 105 aa, Setaria italica
  Transcript Sequence Number=SeqID_8078
  Subcellular localization annotation: CTP_CleavageSite=46; ConfidenceScore=5.63e-01
QVRHGYSTSTSPPPPSSLLRRSGLAVAERDKPPAPPRPAPSPRAPRVSMEPASPSTASPPAEEAAARRRLPEELKLRRRTLETVLEQCQRTLEMIREADLGLEEG

SEQ ID NO: 74053 - protein, 239 aa, Setaria italica
  misc_feature (8)..(8): Xaa can be any naturally occurring amino acid
  Transcript Sequence Number=SeqID_8079
  Gene Ontology: Mol. function=protein serine/threonine kinase activity; Cellular component=integral to membrane; Biological process=protein amino acid phosphorylation
  Homolog annotation: Hit_ID=C0LGM5; Match level="QueryCoverage=99%, HitCoverage=59%, E-value=6e-52, Identity=36%"; Hit description =Leucine-rich repeat receptor-like protein kinase (Fragment)
  Pfam annotation: Domain name=LRR_1; Domain location=109-131; Score =7.5; E_value=11; Accession=PF00560.25; Description=Leucine Rich Repeat
  Pfam annotation: Domain name=LRR_1; Domain location=133-155; Score =17.8; E_value=0.046; Accession=PF00560.25; Description=Leucine Rich Repeat
  Pfam annotation: Domain name=LRR_1; Domain location=15-34; Score =11.7; E_value=1.7; Accession=PF00560.25; Description=Leucine Rich Repeat
  Pfam annotation: Domain name=LRR_1; Domain location=215-237; Score =9.7; E_value=4.2; Accession=PF00560.25; Description=Leucine Rich Repeat
  Pfam annotation: Domain name=LRR_1; Domain location=37-59; Score =10.7; E_value=2.7; Accession=PF00560.25; Description=Leucine Rich Repeat
  Pfam annotation: Domain name=LRR_1; Domain location=61-83; Score =18.9; E_value=0.02; Accession=PF00560.25; Description=Leucine Rich Repeat
  Pfam annotation: Domain name=LRR_1; Domain location=85-107; Score =18.1; E_value=0.036; Accession=PF00560.25; Description=Leucine Rich Repeat
  Pfam module annotation: Pfam domain module=LRR_1::LRR_1::LRR_1::LRR _1::LRR_1::LRR_1::LRR_1; Domain location=109-131::133-155::15-34::215- 237::37-59::61-83::85-107
GLRGEIPXEIWGLEKLEVVNLSGNSLQGALPAVFPPRLRVLTLASNLLHGEIPSSLSTCKDLERLDLSGNRLTGSVPGALGGLPKLKWLDLSGNLLAGSIPTGLGNCAQLLSLRLFSNLLNGSVPAEIGRLTKLRVLDVSSNRLSGPIPQELGNCSDLSVLVLSSQFNSMNSHELNLFEGGIPESVTALPRLRVLWAPRAGLEGNVPTNWGRCHSLEMVNLGENLFSGPIPRELGQCSN

SEQ ID NO: 74054 - protein, 154 aa, Setaria italica
  Transcript Sequence Number=SeqID_8080
  Gene Ontology: Mol. function=protein serine/threonine kinase activity; Biological process=protein amino acid phosphorylation
  Homolog annotation: Hit_ID=Q9LQ97; Match level="QueryCoverage=62%, HitCoverage=12%, E-value=3e-14, Identity=40%"; Hit description =F4N2.23
MTLQIVFRLDPVCPNRAPPESSSSWLVARRCRSWRYPDSGGADHCTWPEVTCDARSRVVALEVPSPSRRSVPGRELAGELPATVGLLTELKEISFPFHGLRGEIPCEIWGLEKLEVVNLAGNSLQGALPAVFPPRLRVLTLASNLLHAEGSGTL

SEQ ID NO: 74055 - protein, 67 aa, Setaria italica
  Transcript Sequence Number=SeqID_8081
  Homolog annotation: Hit_ID=C0L9Q9; Match level="QueryCoverage=62%, HitCoverage=7%, E-value=2e-11, Identity=83%"; Hit description=Sister of indeterminate spikelet 1 (Fragment)
AYDRAAIRFNGPDAVTNFDSSSYDGDVPLPPEIEKDGTLGTIYFSSVQCPLEQMNNPLQNLISVDFS

SEQ ID NO: 74056 - protein, 159 aa, Setaria italica
  Transcript Sequence Number=SeqID_8082
  Gene Ontology: Mol. function=transcription factor activity; Cellular component=nucleus; Biological process=regulation of transcription, DNA-dependent
  Homolog annotation: Hit_ID=C0L9Q9; Match level="QueryCoverage=55%, HitCoverage=17%, E-value=4e-29, Identity=75%"; Hit description =Sister of indeterminate spikelet 1 (Fragment)
KDVVDRDILDLNLRISQPNVHDPKSDGILTGFGSNRDSPEASSSIASQPIRPQWLVHPHSTLGSPQQPQLYASPPGFFVNLREAPGMENYRTVEPAPQAFPPWAWQMQGSPAPLLPATAASSGFSTAAAAATAGVPPPPLGPSPFAGRHHHQLRFPPTA

SEQ ID NO: 74057 - protein, 255 aa, Setaria italica
  Transcript Sequence Number=SeqID_8083
  Gene Ontology: Mol. function=transcription factor activity; Cellular component=nucleus; Biological process=regulation of transcription, DNA-dependent
  Homolog annotation: Hit_ID=C0L9Q9; Match level="QueryCoverage=97%, HitCoverage=47%, E-value=1e-120, Identity=85%"; Hit description =Sister of indeterminate spikelet 1 (Fragment)
  Pfam annotation: Domain name=AP2; Domain location=3-53; Score=58.5; E_ value=2.5e-14; Accession=PF00847.12; Description=AP2 domain
  Pfam annotation: Domain name=AP2; Domain location=95-146; Score=56.3; E_value=1.2e-13; Accession=PF00847.12; Description=AP2 domain
  Pfam module annotation: Pfam domain module=AP2::AP2; Domain location =3-53::95-146
CLRSYRGVTFYRRTGRWESHIWDCGKQVYLGGFDTAHAAARAYDRAAIKFRGLDADINFHLKDYESDLKQMRNWTKEEFVHILRRQSTGFARGSSKYRGVTLHKCGRWEARMGQLLGKKYIYLGLFDSEIEAARAYDRAAIRFNGPDAVTNFDSSSYDGDVPLPPEIEKDVVDRDILDLNLRISQPNVHDPKSDGILTGFGSNRDSPEASSSIASQPIRPQWLVHPHSTLGSPQQPQLYASPPGFFVNLREAPDM

SEQ ID NO: 74058 - protein, 187 aa, Setaria italica
  misc_feature (169)..(169): Xaa can be any naturally occurring amino acid
  misc_feature (174)..(174): Xaa can be any naturally occurring amino acid
  Transcript Sequence Number=SeqID_8084
  Gene Ontology: Mol. function=protein disulfide oxidoreductase activity
KAAGDDDEEDSSDEDEEEEETDDEEQEEEEEKPAVKTVVPLPLLDKLEGYELAPASWSEVSKALEDMKPVLDSNNQQAYTMPPPAAPKKKKTKKAKKKKKKKKKEQQPTTTPAAAAADEVANKKAPAPPPELAGRRVVKDNPFLMRDRESKGSDGSAPRWKRRDPFEGXPRKYXPGAAGGGVVTTNN

SEQ ID NO: 74059 - protein, 64 aa, Setaria italica
  Transcript Sequence Number=SeqID_8085
  Gene Ontology: Mol. function=serine-type carboxypeptidase activity; Biological process=proteolysis
GVFDLHSAPASVEAWVRELEWPGLPAFLDADRAVWRLESGRLAGYVQRSGTLANVVIVGGGAHG

SEQ ID NO: 74060 - protein, 177 aa, Setaria italica
  Transcript Sequence Number=SeqID_8086
  Subcellular localization annotation: CTP_CleavageSite=77; ConfidenceScore=5.23e-01
GWMGSAQAVPRVGHATSFTCSSPPESFRDPDPVEMPFQVGHSFTRSNGCGVKRRASKTFLKLPAFQSQLQCQSCRVRAVQAVEQMDQRVQSATGRGLILGCCEQFDFHTVPERTVFWNRCRSCPFRCLHSLKHVRGVADDPPKLHPHPHVQICRTDLEPSMIGILIGIVQVSDLCSL

SEQ ID NO: 74061 - protein, 347 aa, Setaria italica
  misc_feature (68)..(68): Xaa can be any naturally occurring amino acid
  Transcript Sequence Number=SeqID_8087
  Gene Ontology: Biological process=response to stress
  Homolog annotation: Hit_ID=Q9SPA6; Match level="QueryCoverage=43%, HitCoverage=31%, E-value=3e-14, Identity=42%"; Hit description =Dehydrin
  Pfam annotation: Domain name=Dehydrin; Domain location=3-347; Score =134.5; E_value=3.3e-37; Accession=PF00257.11; Description=Dehydrin
MAHHQQGLYGQPATRVDEYGNPIPGGHGSIQGQAGGYGGAGTGSYDAGGYGQQAGYGPTGTGTHDIGXYGGSGHAAYGATGTGVHDAGGPGGYGATGTGPHGTHGVTGIHDARGVGNGRTGAHGVTATGTHGTGYGTHGATGATGVHDTGVLGGGAHTGMPGAAGMGTHGAGHGATGVTTGTHGAATGAAFPHAAEHKTGGILRRSSSSSSSSSSEDDGMGGRRKKGLKQKIKEKMPGGHKGNQGQATAPGAYGGTTGYTGPTGTGTTGGTYAPTTHGAHEKKGVMEKIKEKLPGGHKDHDQQHTTATGGYAPGRTGTTDTYGTTTEGTHEKKGFMEKVKEKLPGQH

SEQ ID NO: 74062 - protein, 83 aa, Setaria italica
  Transcript Sequence Number=SeqID_8088
  Subcellular localization annotation: CTP_CleavageSite=47; ConfidenceScore=5.81e-01
WKSRVLPATASSSSRNFPRSKPKVSNAQHHRDLLAFHRSAPTTLSVSMAMAAPWSSPSCCPATASTSAPRLLGPRSLRGRGLL

SEQ ID NO: 74063 - protein, 231 aa, Setaria italica
  Transcript Sequence Number=SeqID_8089
  Gene Ontology: Cellular component=chloroplast
  Homolog annotation: Hit_ID=B6TJB0; Match level="QueryCoverage=93%, HitCoverage=88%, E-value=1e-100, Identity=83%"; Hit description =Permeases of the major facilitator superfamily
  Subcellular localization annotation: CTP_CleavageSite=52; ConfidenceScore=5.64e-01
MALLLPPVRLLPLTPSRATAPTSSPLSIRRTQPRALPLPPVRCCASRTSHPAASAREAAASWASEFAGVVPWKAAVSGALALAVCFTCFVGSANARTGVNKPELLPKEFTTVIDVAGFLSSGQENRLRQEIEDLEKDTGYKLRVLAQNYPDTPGLAIKDYWQVDERTIVFVADPTFGNIINFNIGPLVDLDIPRSFWSQVSGKYGNMFYWKEKGEDASIEAAVTAISRCLR

SEQ ID NO: 74064 - protein, 56 aa, Setaria italica
  Transcript Sequence Number=SeqID_8090
  Gene Ontology: Cellular component=chloroplast
  Homolog annotation: Hit_ID=B6TJB0; Match level="QueryCoverage=96%, HitCoverage=22%, E-value=2e-24, Identity=94%"; Hit description =Permeases of the major facilitator superfamily
LILDIPRSFWSQVSGKYGNMFYWKEKGEDASIEAAVTAISRCLRDPSGTNNCSEVL

SEQ ID NO: 74065 - protein, 284 aa, Setaria italica
  Transcript Sequence Number=SeqID_8091
  Homolog annotation: Hit_ID=Q01JE0; Match level="QueryCoverage=98%, HitCoverage=32%, E-value=1e-107, Identity=69%"; Hit description =B0402A04.2 protein
SFSFCGFVTIADAYGHVQLVGITCLGECFVVEMKGWKEPTPLQLDIDSKSIKDVEPPATGMISKELIAGPDPPILPSSSSLKSLTPDSIEGKSTLHHYIKVFHEYYVEYGHKVFIELKEHADYVKTELEDKQKRLEAVKKSLLSIETKDQDINKRIDRAFKVYELLEKRIDSFKMLPAANKKPLSQAEQEFKAQLDRFADVELDALRSSIAALSARMKRFAQQPEGGTAGTGVILWQAPKAGRSHISESQMSLLKSSLEKLSILNEENNLKLRLIDHELKNKEQ

SEQ ID NO: 74066 - protein, 76 aa, Setaria italica
  Transcript Sequence Number=SeqID_8092
  Subcellular localization annotation: CTP_CleavageSite=48; ConfidenceScore=5.01e-01
MEAMTKTSARGAKGKVAMVYSKYVKPQGNSAVSVTHQLKPSPVGAAASASYVDDIDERASAFILAVRERFKNEHNM

SEQ ID NO: 74067 - protein, 82 aa, Setaria italica
  Transcript Sequence Number=SeqID_8093
  Gene Ontology: Mol. function=copper ion transmembrane transporter activity; Cellular component=integral to membrane; Biological process=copper ion transport
  Homolog annotation: Hit_ID=A9PD84; Match level="QueryCoverage=70%, HitCoverage=38%, E-value=4e-16, Identity=70%"; Hit description =Copper transporter
  Pfam annotation: Domain name=Ctr; Domain location=3-71; Score=-29.7; E_value=0.0071; Accession=PF04145.7; Description=Ctr copper transporter family
  Subcellular localization annotation: CTP_CleavageSite=24; ConfidenceScore=5.32e-01
PSRAPLLAPALAFAAGRWPARVAVAAMFGVNSGLGYLLMLAVMSFNAGVFIAVVVGLALGYLAFRSSDGEDLVVVDNPCACA

SEQ ID NO: 74068 - protein, 80 aa, Setaria italica
  Transcript Sequence Number=SeqID_8094
MTMGADDKRPPPPTPPAGEEGAVVADKALHALGFEFTRISAGEVAGRLPVTGTCCQPFGVLNGGVSALVAESAASVGAYM

SEQ ID NO: 74069 - protein, 61 aa, Setaria italica
  Transcript Sequence Number=SeqID_8095
KDNYKGLAVRGILKTCSKNSAWLLIWHAGIEMAVAYRGPAPAPWTRTALRIACISTWLQRP

SEQ ID NO: 74070 - protein, 502 aa, Setaria italica
  Transcript Sequence Number=SeqID_8096
  Gene Ontology: Mol. function=kinase activity; Cellular component =plasma membrane
  Homolog annotation: Hit_ID=B9T6U1; Match level="QueryCoverage=46%, HitCoverage=20%, E-value=4e-44, Identity=42%"; Hit description =Myosin-1, putative
MKAPVVESTEPSSNEYDMKEVGLQIAEPHADNAGPASGVVQPDDPDDVLVAGTDDSSGSTKSSEQQLDAVQDKSSRERGSLVRLRHISSDNLGGYDKQEEMSKVGSSSADGITDMMKLQERLSDSLEDKEKALLGEYTSLLEEYKDAKRRLVEMEKKNQECLNEIRSLREEIASSAGEGGSEGSCKRSSSSCSRRGHRRTPSYSSVHQRRPSVSSISRLIRMGSTIQESGEPAGAEQQGGINLEDLRLPAVAEAENASPLEERFRRDIDTLLDENLEFWMKFSSSLQRVQEFQSKHEGLQLKLLNNKEEGKQDGATEKQLRALKTELQVWSEQNAMLRGELQCRFTSLCDIQEEITAALDMEADQFTSYQAAKFQGEVLNMQQENNRVSDELQAGLDHVKGLQAEVEQALGKLHIRSVSLPAQMAGADDSDPGGSGAGSGSGSAHGGGGGNLLGRPPSNKSKVPLQSFLFPAKNKKTSLLARVTPVLQKPQAEMKFLAKLPR

SEQ ID NO: 74071 - protein, 211 aa, Setaria italica
  misc_feature (38)..(38): Xaa can be any naturally occurring amino acid
  Transcript Sequence Number=SeqID_8097
  Gene Ontology: Cellular component=chloroplast
  Homolog annotation: Hit_ID=Q9S720; Match level="QueryCoverage=78%, HitCoverage=66%, E-value=9e-59, Identity=62%"; Hit description=PsbP domain-containing protein 3, chloroplastic
  Pfam annotation: Domain name=PsbP; Domain location=19-211; Score= -32.4; E_value=0.0028; Accession=PF01789.8; Description=PsbP
LQVCHCRPARVEGLDRREALLGVALSAAAPALFAPAGXALAAEATELQEGFTTYEDEANKFSIVVPQGWLIGAGESSGIKSVTAFYPEQAADSNVSVAITGIGPDFTSLKSFGDVDAFAEGLVNGLDRSWQRPPGLAAKLIDSKAANGLYYVEYTLQNPGERRRHILSAIGMAFNGWYNRLYTVTGQYIEDEESEKFRPQIEKAVRSFKLT

SEQ ID NO: 74072 - protein, 84 aa, Setaria italica
  Transcript Sequence Number=SeqID_8098
  Gene Ontology: Mol. function=hydrolase activity; Biological process =metabolic process
  Homolog annotation: Hit_ID=B6UC04; Match level="QueryCoverage=92%, HitCoverage=22%, E-value=1e-20, Identity=62%"; Hit description =Gibberellin receptor GID1L2
PGRSLPASAWRALPPARVLMTVSDQDRLGPFQRAYVDALRASGWGGRARLYVTPGEGHCYFLNNIASPKAAAHMATLAAFINGS

SEQ ID NO: 74073 - protein, 49 aa, Setaria italica
  Transcript Sequence Number=SeqID_8099
MGKAAAVGTAVVVCAAVGVAVVLARRRRRRDAELLGSADADRKRRAAAV

SEQ ID NO: 74074 - protein, 150 aa, Setaria italica
  Transcript Sequence Number=SeqID_8100
WWWSSSARVWMNSRSCRREEAARCAAAGQVAGSTGVGRGAGMEVILAAAAVVAMGTGNRVLYKLALVPLREYPFFLAQFATFGYVVIYFSILYLRYQAGIVNDEMLSLPQKPFLAVGLLEAFGAAAGMAAGAVLSGASIPILSQSYLVWQ

SEQ ID NO: 74075 - protein, 83 aa, Setaria italica
  Transcript Sequence Number=SeqID_8101
  Gene Ontology: Mol. function=binding
  Homolog annotation: Hit_ID=Q10GR2; Match level="QueryCoverage=95%, HitCoverage=6%, E-value=4e-21, Identity=62%"; Hit description=HEAT repeat family protein
SKYKSNSNEELAVAAGAAWQINEIVKAEELRGSFLQSSYLEIAFSSLKVISQVFVEQCLYLDSLDLAPVLAYLSLATYNALPD

SEQ ID NO: 74076 - protein, 64 aa, Setaria italica
  Transcript Sequence Number=SeqID_8102
CLFSCCAMSCTNHLVLCSGDELSQVAYILLKTIKELRRQYFLRYFFCLKDLKKMCLLDELMIHW

SEQ ID NO: 74077 - protein, 316 aa, Setaria italica
  Transcript Sequence Number=SeqID_8103
  Gene Ontology: Mol. function=oxidoreductase activity
  Homolog annotation: Hit_ID=B6TB94; Match level="QueryCoverage=92%, HitCoverage=92%, E-value=1e-131, Identity=83%"; Hit description =Nucleic acid binding protein
  Pfam annotation: Domain name=RRM_1; Domain location=9-76; Score=18.2; E_value=0.004; Accession=PF00076.14; Description=RNA recognition motif. (a.k.a. RRM, RBD, o
MAASMFSTVKVSNVSLKAAQRDIKEFFSFSGDIVHVEMQSGDELSQVAYITFKDNQGAETAMLLTGATIVDMAVIVTPATDYELPAYVLADLEPKDTKPSALQKAEDIVGTMLAKGFILGRDALDKAKALDEKHQLTSTATARVSSFDKRIGLSEKISVGTSAVNDKVKEMDQKYQVSEKTKSALAAAEQSVSTAGSAIMKNRYVLTGAAWVTGAFSKVTSAANDVGAKAKEKIAAEQEHKIVEGGSAAQPDIPEGPATHRELDGEFAKIHVSETPDDIPISTVATVPAVIDEEPSKASPPADAPKKPEPAQGLIL

SEQ ID NO: 74078 - protein, 56 aa, Setaria italica
  Transcript Sequence Number=SeqID_8104
SVQVDGPSGVDDVSLHGFGDTGASCWEFQEHFDSIDQMSTTGFCDLLSMSEYFGLN

SEQ ID NO: 74079 - protein, 261 aa, Setaria italica
  misc_feature (4)..(4): Xaa can be any naturally occurring amino acid
  misc_feature (203)..(203): Xaa can be any naturally occurring amino acid
  misc_feature (215)..(215): Xaa can be any naturally occurring amino acid
  Transcript Sequence Number=SeqID_8105
  Gene Ontology: Mol. function=transcription regulator activity; Cellular component=nucleus; Biological process=regulation of transcription
  Homolog annotation: Hit_ID=Q2HVX8; Match level="QueryCoverage=59%, HitCoverage=16%, E-value=2e-60, Identity=72%"; Hit description=Helix- loop-helix DNA-binding
RGLXSISAVEQLLSADAPPPAGHGPLGAEASALANCVSNYQLPQFPFRDCITAYNAQVPSLASSSYTSGNVQNGSSKATSVPPANISVDDTCSFNTTNSKGSQSNNTEGTKVAKKRARASESTRPRPKDRQLIQDRVKELREIVPNGAKCSIDALLERTIKHMLFLQSVTKYAEKIKQADEPKLIDKESGVILKDNQDAGKNXGGATWAYEVAGXTMVCPIIVEDLSPPGQMLVEMLCEERGLFLEIADNIRGFGLTILKG

SEQ ID NO: 74080 - protein, 146 aa, Setaria italica
  misc_feature (26)..(26): Xaa can be any naturally occurring amino acid
  Transcript Sequence Number=SeqID_8106
  Gene Ontology: Mol. function=sequence-specific DNA binding; Cellular component=nucleus; Biological process=regulation of transcription, DNA-dependent
  Homolog annotation: Hit_ID=B6TNC5; Match level="QueryCoverage=100%, HitCoverage=43%, E-value=2e-45, Identity=67%"; Hit description =Homeobox-leucine zipper protein HAT7
ALLSHNKKLQAEILALKGREAGSELXNLNKETEASCSNRSENSSEINLDISRTPPSEGPMDPPPPDHQHPSSGGGGGGGMIPFYPSAGRPSGVDIDQLLHTTSVPKLEQHSGGGVQGAETASFGNLLCGVDEPPPFWPWADHQHFH

SEQ ID NO: 74081 - protein, 168 aa, Setaria italica
  Transcript Sequence Number=SeqID_8107
  Gene Ontology: Mol. function=sequence-specific DNA binding; Cellular component=nucleus; Biological process=regulation of transcription, DNA-dependent
  Homolog annotation: Hit_ID=Q8S7W9; Match level="QueryCoverage=75%, HitCoverage=34%, E-value=6e-63, Identity=92%"; Hit description =Homeobox-leucine zipper protein HOX21
  Pfam annotation: Domain name=HALZ; Domain location=59-103; Score =65.3; E_value=2.3e-16; Accession=PF02183.10; Description=Homeobox associated leucine zipper
  Pfam annotation: Domain name=Homeobox; Domain location=4-58; Score =61.8; E_value=2.5e-15; Accession=PF00046.21; Description=Homeobox domain
  Pfam module annotation: Pfam domain module=HALZ::Homeobox; Domain location=59-103::4-58
EDKVDGRLNVEQVRTLERSFEVANKLEPERKLQLARALGLQPRQVAIWFQNRRARWKTKQLEKDYDALKRQLDAVKADNDALLSHNKKLQAEILALKGREAGSELINLNKETEASCSNRSENSSEINLDISRTPPSEGPMDPPPPGRQEEEEEGAGGDGPLQRVELAP

SEQ ID NO: 74082 - protein, 186 aa, Setaria italica
  Transcript Sequence Number=SeqID_8108
  Gene Ontology: Mol. function=sequence-specific DNA binding; Cellular component=nucleus; Biological process=regulation of transcription, DNA-dependent
  Homolog annotation: Hit_ID=Q8S7W9; Match level="QueryCoverage=81%, HitCoverage=37%, E-value=3e-55, Identity=76%"; Hit description =Homeobox-leucine zipper protein HOX21
  Pfam annotation: Domain name=HALZ; Domain location=87-131; Score =57.4; E_value=5.3e-14; Accession=PF02183.10; Description=Homeobox associated leucine zipper
  Pfam annotation: Domain name=Homeobox; Domain location=32-86; Score =70.5; E_value=6.1e-18; Accession=PF00046.21; Description=Homeobox domain
  Pfam module annotation: Pfam domain module=HALZ::Homeobox; Domain location=87-131::32-86
YGADVGGGDETNGGGGVNEDELSDDGSTDGEKKRRLNVEQVRTLERSFEVGNKLEPERKLQLARALGLQPRQVAIWFQNRRARWKTKQLEKDYDALRRQLDAARAENDALLAHNKKLHAEIMALKGGGGNGGGGGGRQEAASELINLNVKETEASCSNRSENSSEINLDISRPPAPAAAADESPIN

SEQ ID NO: 74083 - protein, 88 aa, Setaria italica
  Transcript Sequence Number=SeqID_8109
  Subcellular localization annotation: CTP_CleavageSite=58; ConfidenceScore=5.46e-01
PALAAVSSLLDYYRRRSGLPWPPPLALSTSRHLLNPLTPPPTTSTASPSAPTSAPAPNAAAPAAASQPRPPTSPPSPTRPPPRTASTR

SEQ ID NO: 74084 - protein, 122 aa, Setaria italica
  Transcript Sequence Number=SeqID_8110
  Homolog annotation: Hit_ID=B6UBA9; Match level="QueryCoverage=100%, HitCoverage=33%, E-value=6e-31, Identity=68%"; Hit description=IQ calmodulin-binding motif family protein
  Subcellular localization annotation: CTP_CleavageSite=44; ConfidenceScore=5.70e-01
TTHNTPASARSGLPGSPASKSGRGATCRDAGGSPRYMADTASSVARTRWQSAPRQRQGEHAAAQGQVAEPRPSVGRSGSRKQARPQLQALESFSFKSSEASRVEDSELSDEVTRDYYLDRLW

SEQ ID NO: 74085 - protein, 119 aa, Setaria italica
  Transcript Sequence Number=SeqID_8111
  Subcellular localization annotation: CTP_CleavageSite=48; ConfidenceScore=5.35e-01
HLQMRVTALYRSTAYQGPVSVLRRQILFAVGPTCRLLLSRTCRNHQTMVMFEQTGRYRNTTISTEQLIKKVIAPYDNIRRATEQQLVIANLKAEHQKFKSIIHKFINTNKQLLRDNELA

SEQ ID NO: 74086 - protein, 241 aa, Setaria italica
  Transcript Sequence Number=SeqID_8112
  Gene Ontology: Mol. function=protein dimerization activity; Cellular component=nucleus; Biological process=regulation of transcription, DNA-dependent
  Homolog annotation: Hit_ID=B6TVC2; Match level="QueryCoverage=100%, HitCoverage=67%, E-value=1e-76, Identity=64%"; Hit description=BZIP transcription factor ABI5
  Pfam annotation: Domain name=bZIP_1; Domain location=157-214; Score =42.6; E_value=1.5e-09; Accession=PF00170.13; Description=bZIP transcription factor
  Pfam annotation: Domain name=bZIP_2; Domain location=157-212; Score =46.9; E_value=7.8e-11; Accession=PF07716.7; Description=Basic region leucine zipper
  Pfam module annotation: Pfam domain module=bZIP_1::bZIP_2; Domain location=157-214::157-212
EVWRDIMCFGGPSAAPAEAAPPSPAQRQQTLGEITLEEFLVRAGVVSEDMTAPPPVPPVPVAAAPPRPPPPQPPMLFPHSNVFAPLMPPLPFGTGLVSGAVGQGDGAAPPAVSPVRPVTSNGFGKMEGGDLSSLSPSPVPYVFNGGLRGRKAPAMEKVVERRQRRMIKNRESAARSRQRKQAYMMELEAEIAKLKEINEELQKKQVEMLEKQKDEVLERRSRQVGPTAKRICLRRTLTGPW

SEQ ID NO: 74087 - protein, 86 aa, Setaria italica
  misc_feature (72)..(72): Xaa can be any naturally occurring amino acid
  Transcript Sequence Number=SeqID_8113
  Gene Ontology: Mol. function=protein dimerization activity; Biological process=RNA-dependent DNA replication
  Homolog annotation: Hit_ID=B6T4X7; Match level="QueryCoverage=100%, HitCoverage=23%, E-value=3e-27, Identity=74%"; Hit description=O -methyltransferase ZRP4
  Pfam annotation: Domain name=Dimerisation; Domain location=31-80; Score=56.2; E_value=1.3e-13; Accession=PF08100.3; Description =Dimerisation domain
MALTTTSSANQVLLDAQVELWNSTFAYIKSMALKSALDLRIADAIHSHGGAATLAQIVATVKLHPSKIPCLXRRLMRVLGATGVLS

SEQ ID NO: 74088 - protein, 111 aa, Setaria italica
  Transcript Sequence Number=SeqID_8114
  Gene Ontology: Mol. function=metallocarboxypeptidase activity; Biological process=proteolysis
  Homolog annotation: Hit_ID=B9R8M1; Match level="QueryCoverage=71%, HitCoverage=17%, E-value=2e-20, Identity=60%"; Hit description =Carboxypeptidase B2, putative
MAASPPRPLLHLLLTLALALTVAAAGKISADRTPISRDIYHSSDSLLREIKDLVARHSNKLSMDTIRTSNKGYSAELFVVTFNPVKESVDNGSKVHILLSFGQHGRELITS

SEQ ID NO: 74089 - protein, 113 aa, Setaria italica
  Transcript Sequence Number=SeqID_8115
KRSSRRVASGLSARDSEASASAGAAELAAPKRRRSIGGSADWRAGLLLPTTTAASARKGQARRGGAARLDDAAGIGLILAALERTWRKTVAGASKMFVERHRTNHVLLISDMV

SEQ ID NO: 74090 - protein, 380 aa, Setaria italica
  Transcript Sequence Number=SeqID_8116
  Gene Ontology: Mol. function=3'-5' exonuclease activity; Cellular component=intracellular; Biological process=nucleobase, nucleoside, nucleotide and nucleic acid metabolic process
  Homolog annotation: Hit_ID=Q7XE52; Match level="QueryCoverage=87%, HitCoverage=37%, E-value=1e-171, Identity=83%"; Hit description =Nucleolar protein, putative, expressed
  Pfam annotation: Domain name=3_5_exonuc; Domain location=136-305; Score=206.8; E_value=5.9e-59; Accession=PF01612.12; Description=3' -5' exonuclease
EEASGRRAASEAGDGDGFQVVYGKKKKKVGDGEEGVERAEAFGASSSVKMAKDKAAAPGMKAKVPFHIRTIPRPQGVYRIVVDNSTKPFEHALLERSEDGTRPVHPLEKLPIEQLINRNVPDSEPVKPPALDDTPFTFVEDLKTLEVLATKLKSATEFAVDLEHNHYRTFQGLTCLMQISTRTEDFIVDTLKLRRYLGDYLREFFRDPTKRKVMHGAGRDIIWLQRDFSIYVCNLFDTGQASKVLQMDRNSLEHLLHHFCGVTANKEYQAADWRLRPLPDEMIKYAREDTHYLLYIYDLMRLRLVKESSADSDMLLEVCKRSNEICLQLYEKEQLTDSSYLHLHGLKENELDARQLSVLSSLYRWRDGIPRAEDESTGYI

SEQ ID NO: 74091 - protein, 487 aa, Setaria italica
  Transcript Sequence Number=SeqID_8117
  Gene Ontology: Mol. function=protein serine/threonine kinase activity; Cellular component=plasma membrane; Biological process =protein amino acid phosphorylation
  Homolog annotation: Hit_ID=B9REV9; Match level="QueryCoverage=95%, HitCoverage=81%, E-value=0.0, Identity=75%"; Hit description =Serine/threonine-protein kinase cdk9, putative
  Pfam annotation: Domain name=Pkinase; Domain location=29-313; Score =293.3; E_value=5.2e-85; Accession=PF00069.17; Description=Protein kinase domain
  Pfam annotation: Domain name=Pkinase_Tyr; Domain location=29-312; Score=12.4; E_value=1.5e-14; Accession=PF07714.9; Description =Protein tyrosine kinase
  Pfam module annotation: Pfam domain module=Pkinase::Pkinase_Tyr; Domain location=29-313::29-312
QLAAGWPPWLVAVAGEALRGWAPRRADTFEKLNKIGSGTYSNVYRARDTVSGRIVALKKVRFDNLEPESVKFMAREILILRRLDHPNVIKLEGLVTSRMSCSLYLVFEYMEHDLAGLAASPDVKFTLPQIKCYMQQLLSGLEHCHDNNVLHRDIKGSNLLLDNNGILKIADFGLATFFDPRHKRPMTSRVVTLWYRPPELLLGATDYGVGIDLWSAGCILAELLYGKPIMPGRTEVEQLHKIFKLCGSPSEEYWKKSKLPHATIFKPQQPYKRCIRETFKDFPASALPLVETLLAIDPAERQTATAALHSDFFSTEPYACDPSSLPTYPPSKEMDAKLRDEEARRLRAAAKAKGEAKRTRPRDRSHRAGPAPEANAEIQANLDQRRRMITHANAKSKSEKFPPPHQDGAMGNPLGSCRHMEPMFEHQDASFSTVVPIEKGTSQTWSGPLFDPSALGQSRRKKQTTLDAKAAAYSKQLQKEKGGIRAR

SEQ ID NO: 74092 - protein, 141 aa, Setaria italica
  misc_feature (8)..(8): Xaa can be any naturally occurring amino acid
  misc_feature (18)..(18): Xaa can be any naturally occurring amino acid
  misc_feature (42)..(42): Xaa can be any naturally occurring amino acid
  Transcript Sequence Number=SeqID_8118
QTFLLRLXPAFVAAALRXPQLATHPLPSLHFFRVLHYSSDLXAHPQNLLSCYVSLLHSFARSRDAVPDAVGQARQLVAELRERGDAVLQHLTPASSASLIRSLAALGLSDELLWAWQAMRLAGVEPSRLTYNCLLDGLVNA

SEQ ID NO: 74093 - protein, 225 aa, Setaria italica
  Transcript Sequence Number=SeqID_8119
  Gene Ontology: Mol. function=binding
  Homolog annotation: Hit_ID=Q53K35; Match level="QueryCoverage=95%, HitCoverage=6%, E-value=1e-83, Identity=72%"; Hit description=HEAT repeat, putative
TLRQIRDDLEEFAAAIRVISIGDFEMVLDLMPVIVEEDSKKKPSSGLFEQIVNGLTIACKAGPLPADSFTFIFPIMERILLSSKKTCLHDDVLHILSMHLDPILPLPRPRMLSVLYHVLSTVPAYHPSVGPMLNELCLGLRSHELAQALGGVYAKEVHVRLACLNAIKCVPIHSVQRDLQVSTSLWIAAHDPEKVVAELAEELWDRFGFDVITDYSGIFNALSHK

SEQ ID NO: 74094 - protein, 76 aa, Setaria italica
  misc_feature (58)..(58): Xaa can be any naturally occurring amino acid
  Transcript Sequence Number=SeqID_8120
FLKFWSCSFVVASADLSLRRAEVEEKRDKVHKESKALLDYTRKAINKLTELKKMLEKXFKNDVEKQQAEQMTDWQT

SEQ ID NO: 74095 - protein, 195 aa, Setaria italica
  Transcript Sequence Number=SeqID_8121
  Homolog annotation: Hit_ID=B9ST48; Match level="QueryCoverage=92%, HitCoverage=58%, E-value=1e-64, Identity=68%"; Hit description =Coiled-coil domain-containing protein, putative
PPAAAAARAVAAVGNLLAIRDTEMSSFVVASADLSLRRAEVEEKRDKVHKESKALLDYTRKAINKLTELKKMLEKFKNDVEKQQAEQMTDWQTKLVMMDSKERQYILQVSNYKAMLNRVGYTPEINHGVLMEMAEHKKDLERKTKPIADTLRSYQDLPPDKALAALAIEDKKRQYAAAEKYLEDVLQSALTTTGL

SEQ ID NO: 74096 - protein, 50 aa, Setaria italica
  Transcript Sequence Number=SeqID_8122
TIKNKYSWKQNIIAKHARYLEDYQYLPSIMRIVNTDQLHDSLFRYYSVWS

SEQ ID NO: 74097 - protein, 99 aa, Setaria italica
  Transcript Sequence Number=SeqID_8123
  Subcellular localization annotation: CTP_CleavageSite=41; ConfidenceScore=5.02e-01
TTVLKMVNIWKRGALDVAMLLVFVLFNNSCVHRCIPTLNIPAASNPSTNSLTGLICNIWFLTVSINRRKHACDMFVKNAKMIQPSGINICHVHREFCNR

SEQ ID NO: 74098 - protein, 76 aa, Setaria italica
  Transcript Sequence Number=SeqID_8124
  Subcellular localization annotation: CTP_CleavageSite=69; ConfidenceScore=5.16e-01
MCNAQTPVKEFVEGLLAAGMLSVGMQRCTQLLLKSTNTNSMATSSAPLFQMFTILSTVVYVHLFFISTRCNHLPEA

SEQ ID NO: 74099 - protein, 131 aa, Setaria italica
  Transcript Sequence Number=SeqID_8125
  Gene Ontology: Mol. function=manganese ion transmembrane transporter activity; Cellular component=fungal-type vacuole membrane; Biological process=cellular manganese ion homeostasis
  Homolog annotation: Hit_ID=B6TQ15; Match level="QueryCoverage=94%, HitCoverage=46%, E-value=1e-39, Identity=67%"; Hit description =Protein CCC1
  Pfam annotation: Domain name=DUF125; Domain location=29-130; Score =12.7; E_value=2.2e-06; Accession=PF01988.11; Description=Integral membrane protein DUF125
MDGDGASRGQPMLEKRPSHRERHFTAGEVVRDVIMGVSDGLTVPFALAAGLSGASAPSSLVLTAGLAEVAAGAISMGLGGYLAAQSEADHYKREMKREQEEIITVPDTEAAEIGEIMSQYGLEPHEYGPVI

SEQ ID NO: 74100 - protein, 73 aa, Setaria italica
  Transcript Sequence Number=SeqID_8126
IYAYASCQVIERAYSLYLNYYIDHHDRHKLRHDNKKCSLPLQQSPHQNQFILCVYLPLELFLELPLSLLGEYP

SEQ ID NO: 74101 - protein, 80 aa, Setaria italica
  Transcript Sequence Number=SeqID_8127
MRQRWGSCFSGGDVRVGAPALEEPEPEVFSFAEPLPPWPPGGGFARGRMSIGGGELELAAATSFQKICTLSPRRWGGAQQ

SEQ ID NO: 74102 - protein, 92 aa, Setaria italica
  Transcript Sequence Number=SeqID_8128
  Homolog annotation: Hit_ID=B6SQD4; Match level="QueryCoverage=97%, HitCoverage=98%, E-value=1e-24, Identity=68%"; Hit description =Catalytic/ oxidoreductase, acting on NADH or NADPH
  Pfam annotation: Domain name=Complex1_LYR; Domain location=7-71; Score=88.0; E_value=3.3e-23; Accession=PF05347.7; Description =Complex 1 protein (LYR family)
MAAVAAPTRAEVLSLFRSLLRTAKQFSDYNIREYTRRRAADAFRDNRALADPPAAAAAFAEGKKQLEVARRQAVVYSLYAPKAKSVMELKVQ

SEQ ID NO: 74103 - protein, 116 aa, Setaria italica
  Transcript Sequence Number=SeqID_8129
  Subcellular localization annotation: CTP_CleavageSite=10; ConfidenceScore=5.62e-01
VTNNRFQEPSASAVPSDGNKTFPNAAASQFTDRLGLVEQPTSSSSSTQTVQPSSFGQAGVISNEVSTSAKVMVRATPSKVNPGTASGVVSNPNGGQVTNMAPKAHQSSLSSDQSVT

SEQ ID NO: 74104 - protein, 1397 aa, Setaria italica
  misc_feature (1299)..(1299): Xaa can be any naturally occurring amino acid
  Transcript Sequence Number=SeqID_8130
SSPPSSPPHVSHDEMDVSGDSPALPTSADGERTVLSDNDHAALTVDAASTSRVAASGVSHLEDDEWSSENNDDRRKQDEYDEDDESYQEDEINEADGENLDLDDEFLEEQNTSLELEPVILGFDEGVQVEIPSNSELELTSMRSTERTVEVHLSSGVAEQETVSGSVVHSDPVTEAEKALQALTLDCVNALTEDSNGERASSLVTPASSSQLSQASLAATITSSTSAVVEQNEVPVSLQFGLFTGPPLIPTPVPAIQIGSIQMPIHLHNQINPSLAHMHPSTTPLYQFGQLRYVRPIASSARPLPSQAISPAHSSVPAQHPSNQNASSVLPELMDRDTHQNIPTQAISSNSINRSAAPTAKLPLAMGNSNSQYLNAPANIQAAAVEGFHGQVDKQPVGGTTPSERDQDLSLKRNCRPASNSIESSQFGLEGRALNGPKAPGAVSAGRGRRYGYAVKDPNMRSTGSVVEPSHKDSRGGFQRRARRNVRRTEFRVRENVEKNQNEASESFAHGEQDERPYSNGTARDFPVRNANRRELDINKSSRINEASDQSASFRSTHKAPYERSHGGNKKSRTGAIPEGDTTLLQAGAVRVVKQQGIEVPVDADGFIEVRSKRQIMSVRREQREKENRSKMRMTKAPRKQHTSLQSSVAPSVNKRTATLSGEVAKKVPSDSAITVEGRIADYAESLVALKGDTASMSPIGPPSTNTETHTNCYANQPIQIQASSDLVTSSPSAKLVSGLSEDNNKGTSINTPFNMVSWDNSQINQQVMPLTQTQLEEAMRPAKFEQQAGSSFSLESNNALSPTVTTEKAFPSSASPINSLLAGEKIQFGAVTSPTMLPPVSRTVSSGLGAPGSSRPDMKIDRGLPGDNSGPDKASSKELCPNTEDVEAEAEAAASAVAVAAISTDEGSPADATTASAPDKKSFSSKDLGGLTSGGAIAGQAGQSSTEEPLTVALPADLSVDTPAMSLWPPLASPQASGPMLSQFPGAQPSHFSCFDMNTMLGGHIFAFGPSDESAGSQGQHPQRSNPLPSAPLGAWPQCHSGVDSFYRPPTGFAGPFITPGGIPGVQGPPHMVVYNHFAPVGQFGQMGLGFMGATYIPGDKQPDWKQSQGPPIVGVSQSDPNNQNIVSGQVNPPSVPTPVQHLRPTSIMPIPSPLTMFDIAPFQASTDIQMQTCWPHMPVPPLHSVPLSVPLQQHPVEGTAVQQFVHNVPVDNKTSTNNRFQEPSASAVPSDGNKTFPNAAASQFTDRLGLVEQPTSSSSSTQTVQPSSFGQAGVISNEVSTSAKVMVRATPSKVNPXGTASGVVSNPNGGQVTNMAPKAHQSSLSSDQQYQHPVNNQDRRARMTQKTGPGNEWQRRSGYQGRNQGSGSDRSSGTGRMKQIYVAKPSAASGHAQSG

SEQ ID NO: 74105 - protein, 355 aa, Setaria italica
  Transcript Sequence Number=SeqID_8131
  Gene Ontology: Mol. function=zinc ion binding; Cellular component =intracellular
  Homolog annotation: Hit_ID=B6TEI1; Match level="QueryCoverage=100%, HitCoverage=79%, E-value=1e-124, Identity=67%"; Hit description=Zinc finger protein CONSTANS-LIKE 16
  Pfam annotation: Domain name=CCT; Domain location=300-344; Score =85.3; E_value=2.2e-22; Accession=PF06203.6; Description=CCT motif
  Pfam annotation: Domain name=CCT_2; Domain location=297-324; Score =13.6; E_value=0.069; Accession=PF09425.2; Description=Divergent CCT motif
  Pfam module annotation: Pfam domain module=CCT::CCT_2; Domain location=300-344::297-324
PAWFRRKARTPRGGHAKSVAQVLSRRLVVPEAAGGDGDSPEGRNGEGEVEEEQLLYRVPIFDPALAEFCSPPPLEDAAAVASSCNEDGTVEDPANPHPAAPAPPPVQFFPDGHASFEPTDAELREFAADMEALLGRGLDDGNEDSSFYMETLGLLDPVDDDAGVARVKLEIDGGGAFDASGTPACGVQLEAEASDEMLDIDFDYGSPQETPDDKAASSDTSAAATDAQFLQTSLSLTLNYEAIIQSWGSSPWTGSGERPHVKLDGSWPHDYTSMWVVGGMVGHVGEELGTPRLGMMDGGREARVSRYREKRRTRLFAKKIRYEVRKLNAEKRPRMKGRFVKRATAGGSVAVAGLA

SEQ ID NO: 74106 - protein, 66 aa, Setaria italica
  misc_feature (11)..(11): Xaa can be any naturally occurring amino acid
  Transcript Sequence Number=SeqID_8132
  Pfam annotation: Domain name=CCT; Domain location=6-50; Score=85.1; E_ value=2.5e-22; Accession=PF06203.6; Description=CCT motif
MGGGWREARVXRYREKRRTRLFAKKIRYEVRKLNAEKRPRMKGRFVKRPAAGGAGPAAAAAPCAVT

SEQ ID NO: 74107 - protein, 384 aa, Setaria italica
  Transcript Sequence Number=SeqID_8133
  Gene Ontology: Mol. function=zinc ion binding; Cellular component =intracellular
  Homolog annotation: Hit_ID=B6TFB2; Match level="QueryCoverage=100%, HitCoverage=94%, E-value=1e-144, Identity=72%"; Hit description=CCT motif family protein
  Pfam annotation: Domain name=CCT; Domain location=300-344; Score =86.8; E_value=7.6e-23; Accession=PF06203.6; Description=CCT motif
  Pfam annotation: Domain name=zf-B_box; Domain location=1-40; Score =19.1; E_value=0.0014; Accession=PF00643.16; Description=B-box zinc finger
  Pfam module annotation: Pfam domain module=CCT::zf-B_box; Domain location=300-344::1-40
CMRRRARWHCPADDAFLCQACDASVHSANPLARRHHRVRLPSASCSSPPRDPDAPAWLHGLKRRPRTPRSKPGVSKHETTPASIAAAVSAAVPDLEAEESAGSGIVGDNDYHGLEEDDEDLLYRVPVFDPMLAELYNPVADEGEQKPAACLISSLAETSPEFASGLAEADGLSGYDVPDMELASFAADMESLLMGVDEGFDDLGFLDEEKPQVNVDLGSMNLETMAAPAPERDDKKRKRPEMILKLNYDGVIASWARDGGSPWFHGERPHLDPHESWSDFPAGSRGLLGGTVTAVTGGEREARVSRYREKRRTRLFAKKIRYEVRKLNAEKRPRMKGRFVKRSSLPPLPRPPPPPSQQQQPRAMMPHVGMVLAPPLGAHGRFRF

SEQ ID NO: 74108 - protein, 112 aa, Setaria italica
  Transcript Sequence Number=SeqID_8134
  Gene Ontology: Mol. function=hydrolase activity, acting on acid anhydrides, catalyzing transmembrane movement of substances; Cellular component=integral to membrane; Biological process=calcium ion transport
  Homolog annotation: Hit_ID=Q2QMX9; Match level="QueryCoverage=99%, HitCoverage=10%, E-value=3e-43, Identity=75%"; Hit description =Calcium-transporting ATPase 1, plasma membrane-type
MESYLKENFGGVQAKHSSEEALGRWRKVVGVVKNPKRRFRFTANLDKRSEVTAMKRKNHEKLRVAVLVSKAALQFVHSITPSGEYKVPADVKEAGFGICAEELSSIVEGHDL

SEQ ID NO: 74109 - protein, 158 aa, Setaria italica
  Transcript Sequence Number=SeqID_8135
  Gene Ontology: Mol. function=diaminopimelate decarboxylase activity; Cellular component=chloroplast; Biological process=lysine biosynthetic process via diaminopimelate
  Homolog annotation: Hit_ID=B6T3H3; Match level="QueryCoverage=84%, HitCoverage=27%, E-value=6e-70, Identity=95%"; Hit description =Diaminopimelate decarboxylase
CFYLFYSWGSYLFTKGSYYYFRDAATLMVNYVDEIRAQGFELEYLNIGGGLGIDYHHTDAVLPTPMDLINTVRELVLSRDLTLIIEPGRSLIANTCCFVNKVTGVKSNGTKNFIVVDGSMAELIRPSLYGAYQHIELVSPPSPGAEVATFDILVRNQV

SEQ ID NO: 74110 - protein, 453 aa, Setaria italica
  Transcript Sequence Number=SeqID_8136
  Gene Ontology: Mol. function=diaminopimelate decarboxylase activity; Cellular component=chloroplast; Biological process=lysine biosynthetic process via diaminopimelate
  Homolog annotation: Hit_ID=B6T3H3; Match level="QueryCoverage=93%, HitCoverage=86%, E-value=0.0, Identity=95%"; Hit description =Diaminopimelate decarboxylase
  Pfam annotation: Domain name=Ala_racemase_N; Domain location=64-286; Score=-30.5; E_value=0.00014; Accession=PF01168.12; Description =Alanine racemase, N-terminal domain
  Pfam annotation: Domain name=Orn_Arg_deC_N; Domain location=65-315; Score=201.3; E_value=2.7e-57; Accession=PF02784.8; Description =Pyridoxal-dependent decarboxylase, pyridoxal binding domain
  Pfam annotation: Domain name=Orn_DAP_Arg_deC; Domain location=318 -426; Score=118.9; E_value=1.7e-32; Accession=PF00278.14; Description= Pyridoxal-dependent decarboxylase, C-terminal sheet domain
  Pfam module annotation: Pfam domain module=Ala_racemase_N::Orn_Arg _deC_N::Orn_DAP_Arg_deC; Domain location=64-286::65-315::318-426
PCPPALPCAPPSPRLPIPPPQPTAAAAAAPKHCFRRGADGYLYCEGVRVEDAMAAAARSPFYLYSKPQVLRNFEAYREALGGLRSVVGYAVKANNNLPVLRLLRELGCGAVLVSGNELRLALQAGFDPARCIFNGNGKTLEDLKLAAESGVFVNVDSEFDLENIVRAAKATGKKVPVLLRINPDVDPQVHPYVATGNKTSKFGIRNEKLQWFLDSIKSYSNDIKLVGVHCHLGSTITKVDIFRDAATLMVNYVDEIRAQGFELEYLNIGGGLGIDYHHTDAVLPTPMDLINTVRELVLSRDLTLIIEPGRSLIANTCCFVNKVTGVKSNGTKNFIVVDGSMAELIRPSLYGAYQHIELVSPPSPGAEVATFDIVGPVCESADFLGKDRELPTPDEGVGLVVHDAGAYCMSMASTYNLKLRPPEYWVEEDGSIVKIRHEEKLDDYMKFFDGLPA

SEQ ID NO: 74111 - protein, 226 aa, Setaria italica
  Transcript Sequence Number=SeqID_8137
  Gene Ontology: Mol. function=glutathione transferase activity; Biological process=response to stress
  Homolog annotation: Hit_ID=Q9FQA1; Match level="QueryCoverage=100%, HitCoverage=100%, E-value=1e-81, Identity=70%"; Hit description =Glutathione S-transferase GST 38
  Pfam annotation: Domain name=GST_C; Domain location=101-204; Score =30.6; E_value=6.4e-06; Accession=PF00043.17; Description=Glutathione S-transferase, C-terminal domain
  Pfam annotation: Domain name=GST_N; Domain location=6-79; Score=74.0; E_value=5.4e-19; Accession=PF02798.12; Description=Glutathione S -transferase, N-terminal domain
  Pfam module annotation: Pfam domain module=GST_C::GST_N; Domain location=101-204::6-79
MAAKGGELKLLGVWDSPYVNRVQIMLNLKGISYEYIEEDLLNKSKLLLNSNPVHKKVPVLIHDGKPIAESQVIVQYLDEVFSGTGPSVLPADPYKRATARFWAAFVDDKVGSPWHTILFAREAEKKADAAARIITALGTLEGAFKDCSRGGDYFGGDGIGFVDVVLGSYLGWFKVFEKMVGVRVLDAARTPLLAAWGERFAAADAAKDVLPSDVDKVIEFLQTFLD

SEQ ID NO: 74112 - protein, 132 aa, Setaria italica
  Transcript Sequence Number=SeqID_8138
  Homolog annotation: Hit_ID=B6TTY9; Match level="QueryCoverage=67%, HitCoverage=29%, E-value=4e-24, Identity=65%"; Hit description=PHI-1
CLALLLILLAAVAGARARATPRQLFLVSQAPVALTNHHGQLLTGNYSVNLLWYGRFTPAQRAVVADFLLSLSAPVTAPSAPSVAAWWATTARYHPGAARLTLGRQVLDASLSLGRRLSEASLAALAARLSPH

SEQ ID NO: 74113 - protein, 176 aa, Setaria italica
  Transcript Sequence Number=SeqID_8139
  Gene Ontology: Mol. function=sequence-specific DNA binding; Cellular component=nucleus; Biological process=regulation of transcription, DNA-dependent
  Homolog annotation: Hit_ID=A1YKF1; Match level="QueryCoverage=99%, HitCoverage=57%, E-value=1e-51, Identity=61%"; Hit description =Homeobox
  Pfam annotation: Domain name=HALZ; Domain location=105-149; Score =60.7; E_value=5.5e-15; Accession=PF02183.10; Description=Homeobox associated leucine zipper
  Pfam annotation: Domain name=Homeobox; Domain location=50-104; Score =69.2; E_value=1.5e-17; Accession=PF00046.21; Description=Homeobox domain
  Pfam module annotation: Pfam domain module=HALZ::Homeobox; Domain location=105-149::50-104
MRASTSPDSAAALSSGTSGGGDNKRELERTGSGGVRSDEEDGADGAGGRKKLRLSKDQAAVLEECFKTHSTLNPKQKVALANRLGLRPRQVEVWFQNRRARTKLKQTEVDCEYLKRWCERLADENKRLEKELADLRALKAAPSTAAQPASSPAATLTMCPSCRRVAANHQQQCQPK

SEQ ID NO: 74114 - protein, 102 aa, Setaria italica
  Transcript Sequence Number=SeqID_8140
MVKEIHDKDSGAGTSSNLTEKLGNLDTNENPNGGEVDGFATSDASTLNGKTEVVNREERLRSYEGMHVESHEALIEELERSLSFSSDDEYFSDEAENIGLSD

SEQ ID NO: 74115 - protein, 276 aa, Setaria italica
  Transcript Sequence Number=SeqID_8141
  Gene Ontology: Mol. function=ARF guanyl-nucleotide exchange factor activity; Cellular component=intracellular; Biological process =regulation of ARF protein signal transduction
  Homolog annotation: Hit_ID=B9RR10; Match level="QueryCoverage=100%, HitCoverage=15%, E-value=1e-105, Identity=71%"; Hit description =Guanine nucleotide-exchange, putative
NSALFTDILNMVCGCVDNTSSDSTVLQVLKVLLNAVASNRFRVHGEPLLGVIRVCYNIALNSKSPVNQATSKAMLTQMISIVFRRMESEQVSVSPASSAVKETPPSSTKDSENGEISTDSQDEEKVTLGDALSMNRASEAPPTSVEELQNLAGGADIKGLEAVLDKAVELEDGKKVSRGIDLDTVNIIQRDALLLFRTLCKMSMKEESDEVATKTRLLSLELLQGLLEGVSDAFTKNFHFIDSVKAYLSYALLRASVSSSPVVFQYACGIFSVLLL

SEQ ID NO: 74116 - protein, 70 aa, Setaria italica
  Transcript Sequence Number=SeqID_8142
  Homolog annotation: Hit_ID=B6UAE1; Match level="QueryCoverage=100%, HitCoverage=20%, E-value=7e-18, Identity=70%"; Hit description =Vacuolar protein-sorting protein bro1
GEFQRAAGAFRAVGEMMEEEEGTTVDMSSQASSMLERLMLAQAQECCFERALAGGKSPAVCSKVPGQAAL

SEQ ID NO: 74117 - protein, 49 aa, Setaria italica
  Transcript Sequence Number=SeqID_8143
MAAVGAATKEMEALHVGQNDEIKENLIKQDKVASSTSAVLASKSSPPED

SEQ ID NO: 74118 - protein, 59 aa, Setaria italica
  Transcript Sequence Number=SeqID_8144
  Homolog annotation: Hit_ID=B6SQJ4; Match level="QueryCoverage=100%, HitCoverage=19%, E-value=3e-11, Identity=67%"; Hit description =Uncharacterized secreted protein
MAPRLLACFGRRGGATASAPDEQEDQQQQQQVAPGPVLLELFASQGCGASPEADAVAAR

SEQ ID NO: 74119 - protein, 60 aa, Setaria italica
  Transcript Sequence Number=SeqID_8145
RSHPVLHVSTGPFLEDGMKKCVVISDWSLKLWIGTDNLRCFVQGSVRTVHYADLEAVERA

SEQ ID NO: 74120 - protein, 153 aa, Setaria italica
  Transcript Sequence Number=SeqID_8146
  Homolog annotation: Hit_ID=Q7FAT5; Match level="QueryCoverage=77%, HitCoverage=53%, E-value=3e-18, Identity=49%"; Hit description =Cyclin-P2-1
  Pfam annotation: Domain name=Cyclin; Domain location=1-139; Score =75.3; E_value=2.2e-19; Accession=PF08613.3; Description=Cyclin
  Pfam annotation: Domain name=Cyclin_N; Domain location=16-140; Score=- 6.2; E_value=0.0059; Accession=PF00134.15; Description=Cyclin, N -terminal domain
  Pfam module annotation: Pfam domain module=Cyclin::Cyclin_N; Domain location=1-139::16-140
DIARNERALAPGSDREVAASGDDDDSAATRRRVRAFDGGTELDMSLRAFLERFSRYAQVSPAVYVVAYAYLDRLRRGDAGVRVVRANAQRLLTAAILVASKFVEDRNYSNSYFAAVGGLGAAELGALELDFLFLMQFRLNVCASVFQSYCRHL

SEQ ID NO: 74121 - protein, 73 aa, Setaria italica
  Transcript Sequence Number=SeqID_8147
  Gene Ontology: Mol. function=oxidoreductase activity; Cellular component=extracellular region; Biological process=oxidation reduction
  Homolog annotation: Hit_ID=Q9LYQ2; Match level="QueryCoverage=61%, HitCoverage=7%, E-value=6e-12, Identity=71%"; Hit description =Laccase-13
MARSGLVKLLCSSAFLLLCCFLLRGALAEERFYEFVVQETPVKRLCSSQKIITVNGQFPGPTIEVYNGDTLAI

SEQ ID NO: 74122 - protein, 161 aa, Setaria italica
  Transcript Sequence Number=SeqID_8148
  Gene Ontology: Mol. function=oxidoreductase activity; Cellular component=extracellular region; Biological process=oxidation reduction
  Homolog annotation: Hit_ID=B9S478; Match level="QueryCoverage=99%, HitCoverage=27%, E-value=7e-67, Identity=72%"; Hit description =Laccase, putative
  Pfam annotation: Domain name=Cu-oxidase; Domain location=64-161; Score=29.6; E_value=3.5e-06; Accession=PF00394.14; Description =Multicopper oxidase
  Pfam annotation: Domain name=Cu-oxidase_3; Domain location=1-53; Score=32.1; E_value=7e-10; Accession=PF07732.7; Description =Multicopper oxidase
  Pfam module annotation: Pfam domain module=Cu-oxidase::Cu-oxidase_3; Domain location=64-161::1-53
GPEFVTQCPIRPGGSYTYRFTIQDQEGTLWWHAHSSWLRATVHGALIIHPRRGLPYPFPKPHSEFPVILAEWWRRDPIAVLRQSMITGAPPNVSDALLINGQPGDLLPCSSQETSIIPVVAGETSLLRIINAAMNTELFVSLAGHKMTVVAADAMYTKPFE

SEQ ID NO: 74123 - protein, 604 aa, Setaria italica
  Transcript Sequence Number=SeqID_8149
  Gene Ontology: Mol. function=oxidoreductase activity; Cellular component=extracellular region; Biological process=oxidation reduction
  Homolog annotation: Hit_ID=B6T3I3; Match level="QueryCoverage=90%, HitCoverage=95%, E-value=0.0, Identity=91%"; Hit description=L -ascorbate oxidase
  Pfam annotation: Domain name=Cu-oxidase; Domain location=194-346; Score=209.5; E_value=9.1e-60; Accession=PF00394.14; Description =Multicopper oxidase
  Pfam annotation: Domain name=Cu-oxidase_2; Domain location=452-588; Score=187.0; E_value=5.2e-53; Accession=PF07731.6; Description =Multicopper oxidase
  Pfam annotation: Domain name=Cu-oxidase_3; Domain location=68-184; Score=256.3; E_value=7.2e-74; Accession=PF07732.7; Description =Multicopper oxidase
  Pfam module annotation: Pfam domain module=Cu-oxidase::Cu-oxidase _2::Cu-oxidase_3; Domain location=194-346::452-588::68-184
  Subcellular localization annotation: CTP_CleavageSite=57; ConfidenceScore=5.62e-01
QLVSLQPKATSYSRTRLSSIGARKTTSSTLRQHSLGAMASPPSRMLILLSCLALSLLAGAEVHHHEFVVQETPVKRLCKTHNIITVNGQFPGPTLEVREGDTLVINVVNRAQYDVTIHWHGIRQLRTGWADGPEFVTQCPIKPGGSYKYRFTIEGQEGTLWWHAHSSWLRATVYGALIIRPRENKTYPFEKPSREVPVILGEWWNANPVDVIREAQRTGGAPNVSDAFTINGQPGDFLKCSEKETTAIPVKPGETALLRFINAALNHELFVTIAQHKMTVVAADASYTKPFTTSVLMIAPGQTTDVLVTMDQAPTRYYVAARAYVSGQNVAFDNTTTTAVIEYDCGCASDFGPKIQPAFPALPAFNDTAAATAFAAGIKSPDRVKVHENVDEYLFFTVGLGLFNCKPGELCAGPNNNTRFTASMNNVSFVFPKKDSLLHAHYYKVPGVFTTDFPAYPPVQFDYTAKNVSQALWQPVPATKLYPLRFGSVVQLVLQDTSIVTPENHPIHIHGYDFFILAEGFGNFDPKKDVEKFNYVDPPQRNTVAVPVNGWTVIQFVADNPGVWLMHCHLDVHINWGLAMAFLVEDGYGELQSLEPPPVDLPMC

SEQ ID NO: 74124 - protein, 143 aa, Setaria italica
  Transcript Sequence Number=SeqID_8150
  Gene Ontology: Mol. function=RNA methyltransferase activity; Cellular component=cytoplasm; Biological process=RNA processing
  Homolog annotation: Hit_ID=B9SWC0; Match level="QueryCoverage=79%, HitCoverage=13%, E-value=9e-47, Identity=77%"; Hit description=RNA m5u methyltransferase, putative
LSDSLEPGSGKTCQDSSIPNKNVLDSSACKFKNVVAIVDPPRVGLHPTVIKALRTHPLIRRLVYISCNPDSLVANAIELCTPTSEKQEKNKGNRGWRSMSAAGLARQRTKSMPNSEPFIPKRAMAVDLFPHTSHCEMVMLFER

SEQ ID NO: 74125 - protein, 562 aa, Setaria italica
  misc_feature (24)..(24): Xaa can be any naturally occurring amino acid
  Transcript Sequence Number=SeqID_8151
  Gene Ontology: Mol. function=RNA methyltransferase activity; Cellular component=cytoplasm; Biological process=RNA processing
  Homolog annotation: Hit_ID=B9SWC0; Match level="QueryCoverage=94%, HitCoverage=55%, E-value=1e-159, Identity=55%"; Hit description=RNA m5u methyltransferase, putative
TATENGSNAAATAGEASAAEAVAXNKKSARDAVTPLAHMSYNDQLEHKKHSMAQILKRLTRNARKACPPAIPLPNWIFKSKEIGGLPCKLEGILESPIVDGYRNKCEFSVGYSLEGKKTVGFMLGNFREGVTAVEEPVNCPNVSEISCKYAQIFQDFLQSSSLPLWSRVDNCGFWRQLTVREGRYPAEAVVLQNAESKISEVMLIVQVCSTDVDEALMKEEFDKLSAALIEGAAMCSPSLPLTTIVVQDHKGISNAAPADCPLIPLLVPKGDQLGGGAEDKTRIHDHISNLKFSISPTAFFQVNTLAAERLYSLAGDWANLNSDTLLFDVCCGTGTIGLTLAHRVGMVVGIEMNESAVSDAHRNALINDIKNCRFVCGKAEDVIGSLLTEYLGSPQQHIAASESNSIINDTRENEDTVDCLESNGENMDSSTETNNNGESEQPGDMSVDLPTCAGDEEIKEDSMDRVNKEVDSSHNEHNEAAGEQKCGEASLINDECTDTTLSDSLEPGSGKTCQDSSIPNKNVLDSSACKFKNVVAIVDPPRVGLHPTVIKALRTHPLIRK

SEQ ID NO: 74126 - protein, 221 aa, Setaria italica
  misc_feature (75)..(75): Xaa can be any naturally occurring amino acid
  misc_feature (161)..(161): Xaa can be any naturally occurring amino acid
  Transcript Sequence Number=SeqID_8152
REERRWGRSCAFGHLSPAITGPGAASLRDLRLEEVVLREWPCLPSLRSLTLNAVTVEAPFPPGTWCPLLENLSKXSIFNSKIEQARVDIRLLPLLKSLDDQVDVNAHGNSIGSPFGDITVDAPELEDLEVNCITGCTAEYKSFTLWAPMLSYLYWHNQFAXSVAIDVGSPGSVTAGKIQFEWKHESSCRELKSYKAQMMRMLEGLIPELSPKRVADAAPAP

SEQ ID NO: 74127 - protein, 198 aa, Setaria italica
  Transcript Sequence Number=SeqID_8153
  Gene Ontology: Mol. function=electron carrier activity; Cellular component=endoplasmic reticulum membrane; Biological process =oxidation reduction
  Homolog annotation: Hit_ID=Q1WCP1; Match level="QueryCoverage=85%, HitCoverage=46%, E-value=8e-43, Identity=56%"; Hit description =Cytochrome P450 monooxygenase CYP94D24 (Fragment)
CVHSELHGRLLPLLRRAAASGAGARLDLQDVLERFAFDNICRVAFDHDPRQLPDDGDDGTAADGSFADAFRDAANLSAGRFRYAVPGFWKIKKALNVGSERRLRESIAMVHDFADGIIQSRREEMLRDGFEKHDLLSRFMASQDATYSESEVPLRDVVISFLLAGRETTSSALTWFFWLLSSRPDVRRRIRDEVAAVR

SEQ ID NO: 74128 - protein, 287 aa, Setaria italica
  misc_feature (10)..(10): Xaa can be any naturally occurring amino acid
  Transcript Sequence Number=SeqID_8154
QQRRRLHRSXWRRGVAWKPSSPGGEEGAAPVVFRLDHGGEVDADGNCLFTAARTAAAAKADARELRHRAVRRFAEVYDAAGEDDRGAVDAAVRHLYAPDLKAGWGVHVVQEIKVLAPKAQRDALDAAIQELVDLGIQREIAAETIYKERCIAVNNGDSWAKYMSISGSAEDEHDIITLQYTEEGLLTIDENRDGRAAAFGDDIAIECLATEFKREVYVVQAHGADAMVDEDNCVFFLPHRPRGEICEPPIFLFMKGTAWCGAGADHYEPLIATVLQHVTSDKAAVVL

SEQ ID NO: 74129 - protein, 153 aa, Setaria italica
  misc_feature (28)..(28): Xaa can be any naturally occurring amino acid
  misc_feature (103)..(103): Xaa can be any naturally occurring amino acid
  Transcript Sequence Number=SeqID_8155
  Gene Ontology: Mol. function=protein transporter activity; Cellular component=nuclear pore; Biological process=intracellular protein transport
  Homolog annotation: Hit_ID=Q7F2F7; Match level="QueryCoverage=93%, HitCoverage=37%, E-value=1e-71, Identity=88%"; Hit description =P0402A09.9 protein
  Subcellular localization annotation: CTP_CleavageSite=36; ConfidenceScore=5.07e-01
EWMVDAPPHLASDWHVFARPSGKPQCEXSSNGMTISRARNGSILHRFPSALPNGSKRDISGPASSYSILDCIFHEPDQTYYIIDMICWRGYSLYDCTAEFRFXWVNSKLTETSAGDPPSTYHRYRFSAVPIYECTLEGLQAAYSGSTPYVKDG

SEQ ID NO: 74130 - protein, 88 aa, Setaria italica
  Transcript Sequence Number=SeqID_8156
PVVRANALPASGRAGIGDGDGDCDDDGAGSESSSDLFEIKSLMIEDCRYEPSEASIQWSVVTASATDASEPRGDRVPGRWVGGRGPVA

SEQ ID NO: 74131 - protein, 273 aa, Setaria italica
  misc_feature (16)..(16): Xaa can be any naturally occurring amino acid
  misc_feature (194)..(194): Xaa can be any naturally occurring amino acid
  misc_feature (209)..(209): Xaa can be any naturally occurring amino acid
  Transcript Sequence Number=SeqID_8157
  Gene Ontology: Mol. function=protein serine/threonine kinase activity; Cellular component=plasma membrane; Biological process =protein amino acid phosphorylation
  Homolog annotation: Hit_ID=B9T5V6; Match level="QueryCoverage=98%, HitCoverage=37%, E-value=1e-84, Identity=60%"; Hit description=ATP binding protein, putative
  Pfam annotation: Domain name=Pkinase_Tyr; Domain location=1-154; Score=-149.0; E_value=0.0008; Accession=PF07714.9; Description =Protein tyrosine kinase
EDSNPHVIHRDFKASXILLEEDFTPKVTDFGLAREASNATQPISTRLMGTFAPEYAMTGHLLVKSDVYSYGVVLLELLSGRKPVSISESKDPENLVTWARPLLSHKEGLEKLIDPSLDGKFNFDNVAKVASIASMCVHTDPSQRPFMGEVVQALKLIYNDPDEACNDSYSPRNSSDQDGDYEGGLAFESGSWGXSGASGCLDYRNSLPXFVTMDYSSGRLEGPREPQTTLSTGSHVQSPVLQNRSGPLRMKKKLASFYRSRGSISEHGHLPHH

SEQ ID NO: 74132 - protein, 133 aa, Setaria italica
  Transcript Sequence Number=SeqID_8158
  Gene Ontology: Mol. function=molecular_function; Cellular component =membrane; Biological process=auxin mediated signaling pathway
  Homolog annotation: Hit_ID=B4FK55; Match level="QueryCoverage=92%, HitCoverage=33%, E-value=1e-59, Identity=93%"; Hit description =Nodulin-like protein
MGRDQAAAAVMAPEKLKLFMGVLALQFLLAGFHIVTRAALNMGISKIVFIVYRNIISLALLAPFAYFLEKKDRPPLTFSLLVVNFLLALCGITANQGFYLLGLYHLSPTYASAIQNTVPAITFAMAAVLRLEQ

SEQ ID NO: 74133 - protein, 293 aa, Setaria italica
  Transcript Sequence Number=SeqID_8159
  Gene Ontology: Mol. function=protein kinase activity; Cellular component=cytoplasm; Biological process=protein amino acid phosphorylation
  Homolog annotation: Hit_ID=B9T5N2; Match level="QueryCoverage=99%, HitCoverage=32%, E-value=1e-125, Identity=71%"; Hit description =Ubiquitin ligase protein cop1, putative
  Pfam annotation: Domain name=WD40; Domain location=110-149; Score =35.5; E_value=2.1e-07; Accession=PF00400.24; Description=WD domain, G-beta repeat
  Pfam annotation: Domain name=WD40; Domain location=153-191; Score =12.7; E_value=1.2; Accession=PF00400.24; Description=WD domain, G -beta repeat
  Pfam annotation: Domain name=WD40; Domain location=18-56; Score=12.8; E_value=1.2; Accession=PF00400.24; Description=WD domain, G-beta repeat
  Pfam annotation: Domain name=WD40; Domain location=196-233; Score =31.6; E_value=3.1e-06; Accession=PF00400.24; Description=WD domain, G-beta repeat
  Pfam annotation: Domain name=WD40; Domain location=243-281; Score =11.7; E_value=1.6; Accession=PF00400.24; Description=WD domain, G -beta repeat
  Pfam annotation: Domain name=WD40; Domain location=68-106; Score =14.2; E_value=0.54; Accession=PF00400.24; Description=WD domain, G -beta repeat
  Pfam module annotation: Pfam domain module=WD40::WD40::WD40::WD40::WD4 0::WD40; Domain location=110-149::153-191::18-56::196-233::243 -281::68-106
LDELCKYLSFSKLKVQAELKQCDLLNSSNLVCSVGFDRDKEFFATAGVNKKIKVFEYNMIVNEHRDIHYPVVEMSNRSKLSCICWNSYMKSHIASSDFEGIVQVWDVTRSQVFVDMREHERRVWSVDFSIVDPTKLVSGSDDGSVKLWDMNQAGSIGTIRTRANVCSVQFQPDTARSIAIGSADHKIYCYDLRNIRAPYCTLVGHTKTVSYVKYLDASTIVSASTDNSLRLWDLSMSPGRIIDSPIQTFTGHTNTKNFVGLSISDGYIATGSETNEVCIQSLSFHKFVSEPVA

SEQ ID NO: 74134 - protein, 659 aa, Setaria italica
  Transcript Sequence Number=SeqID_8160
  Gene Ontology: Mol. function=microtubule motor activity; Cellular component=microtubule associated complex; Biological process =microtubule-based movement
  Homolog annotation: Hit_ID=Q93XG3; Match level="QueryCoverage=100%, HitCoverage=86%, E-value=0.0, Identity=80%"; Hit description=Kinesin heavy chain (Fragment)
  Pfam annotation: Domain name=Kinesin; Domain location=1-135; Score= -14.1; E_value=1.4e-14; Accession=PF00225.15; Description=Kinesin motor domain
NEKSSRSHQILRVTVESTAREFLGKDKSTTLVASANFVDLAGSERASQALSAGTRLKEGCHINRSLLALGTVIRKLSMGSNAHIPYRDSKLTRILQPSLGGNARTAIICTLSPATSHIEQSRNTLLFGSCAKEVVTNAQVNVVMSDKALVKHLQKEVARLESELRQPASNSSLEALVKEKDNQIRKMEKEIKELKSQRDLAQSRLQNLLQTVGDHPKHSGSGKRSARSPPSIGMPPGIIRDDSSQVSQDDSDLYKEVRCIETSGTGGNEQLDMSAGESSSPQGSNVNSSLRGNGSNTSVNSRRSRLLGESPITLEQHLENIRRPFASVGRDLGSSTRNSSGSRLLGRSRSCRSLTASTMFDGMEADDGTPVHRSLVGFPGRPERDHTSGSVLNYDAESETLSRAGSIVSAKTNGACDAEFTGIGEFVAELKEMAQVHYQKQYGDQNANGEFGEGTIKSIGLDPIADASQSPSRWPLEFEKKQQEIIELWHACSISLVHRTYFFLLFKGDQADSIYMEVELRRLSFLRDTYSRGGTPSNVVVGSLNSSPAASAKKLQREREMLARQMQKRLTAVERDHLYSKWGISLDSKKRKLQVARRLWTETKDLEHVRESASLVAKLLGLQEPGLREMFGLSFAPQQQPPPRRRSSNGWKYGLPSFG

SEQ ID NO: 74135 - protein, 94 aa, Setaria italica
  Transcript Sequence Number=SeqID_8161
CLWFPEIKTYEDDGTRITVTTSEITCEDDDIGPRNVGPVSSYTNKNSSSMAKKNSSLGVKKKPQKRTFKNKSKAKKGDKKRGAVKGKRKGRGRK

SEQ ID NO: 74136 - protein, 258 aa, Setaria italica
  Transcript Sequence Number=SeqID_8162
  Gene Ontology: Mol. function=metal ion binding; Cellular component =integral to membrane
  Homolog annotation: Hit_ID=Q9SYW7; Match level="QueryCoverage=97%, HitCoverage=91%, E-value=4e-95, Identity=70%"; Hit description =Nucleic acid binding protein
  Pfam annotation: Domain name=PHD; Domain location=204-254; Score =48.7; E_value=2.2e-11; Accession=PF00628.21; Description=PHD-finger
MDPGAGAHYSARTAEEVFRDFRGRRAGMIKALTTDVEKFYQLCDPEKENLCLYGYPNETWEVTLPAEEVPPEIPEPALGINFARDGMNEKDWLALVAVHSDSWLLAVAFYFAARFGFDKEARRRLFNMINNLPTIFEVVTGVAKKQTKEKGPNSTSKSNKPSSKMPSRPESHSKATKGSAPPKDDDDDESGEEYEEEEERDNTLCGSCGTNDGKDEFWICCDSCERWYHGKCVKITPARAEHIKHYKCPDCSNKRARA

SEQ ID NO: 74137 - protein, 216 aa, Setaria italica
  Transcript Sequence Number=SeqID_8163
  Pfam annotation: Domain name=Nop25; Domain location=42-210; Score =97.7; E_value=4e-26; Accession=PF09805.1; Description=Nucleolar protein 12 (25kDa)
MAWEEEAVEEEEYGEEMAASESEAEDVVVGQMPTVMVPKHIKKRSLKNKALSVTLDKKALRDFVTGFHKRKKKRRKEAQKVLQEKERKKRIEARKRRKQEKEIALYGRVLSSDDVELENEDIGDDGEEMENDEPLSEIKTYEDDGTRITVTTSEITCEDDDIGPRNVGPVSSYTNKNSSSMAKKNSSLGVKKKPQKRTFKNKSKAKKGDKKPGASW

SEQ ID NO: 74138 - protein, 78 aa, Setaria italica
  Transcript Sequence Number=SeqID_8164
  Subcellular localization annotation: CTP_CleavageSite=60; ConfidenceScore=5.75e-01
MIGGQAADSQPPSASASCSSSSSSSPSGPAAGGGLRIHRSKRRPDILNMLMTAACLSSSSSDTGKGQSKLSSNKVTHG

SEQ ID NO: 74139 - protein, 131 aa, Setaria italica
  Transcript Sequence Number=SeqID_8165
  Subcellular localization annotation: CTP_CleavageSite=51; ConfidenceScore=5.59e-01
MATANAHHLLVLPHRLAPMRHNSSCSPLLHPASRCSVTGRPPVQLQATPARAERAAKFAARVAFNPSGNFDLSLSMEQDDAPQVQPPPPPTEGRFEIVINKDIIRALDLSPVQEALGDLSSLTAADARNLL

SEQ ID NO: 74140 - protein, 59 aa, Setaria italica
  Transcript Sequence Number=SeqID_8166
MARACNHALRLLPNPATTPLPGSRSRGARCRNLAVHAQLSTEDDEPLKKVQITQVHSVA

SEQ ID NO: 74141 - protein, 45 aa, Setaria italica
  Transcript Sequence Number=SeqID_8167
ARSVSKAQMDVCSPPKQRQQLIAELHAFLRINGGQFGHVSYLIGL

SEQ ID NO: 74142 - protein, 189 aa, Setaria italica
  misc_feature (99)..(99): Xaa can be any naturally occurring amino acid
  misc_feature (174)..(174): Xaa can be any naturally occurring amino acid
  Transcript Sequence Number=SeqID_8168
ALEQVLVLLAGLGLHGGGPRHDLLHEPGGGPARRRPSGGRIAARPGPVQVHSTSLPQHLVVLDQPLLSSRLQAPSPDPPRRPRRRCRRAGRTLCGGTPXTARPSPSPARCARRLRPRPAESRPRPAGSPAPSAARIDPARPGSGRGGSRRRSRIPGRQPGRICRRRGGGGTRQXPARGRATRARCGGRP

SEQ ID NO: 74143 - protein, 78 aa, Setaria italica
  Transcript Sequence Number=SeqID_8169
KRAVATCYLSMETQIYCFMVADIISRDQLAFCRSLQRNCVLDLARTQSRIPLLVLLGPNMTSFCLRKETIVTAMCYHS

SEQ ID NO: 74144 - protein, 118 aa, Setaria italica
  Transcript Sequence Number=SeqID_8170
MKRRLLTDVMGANNLTYPNVISKVESADEILDVPNKPSAVTPQLFDSSFSQSGKDQKGFGATTLNKCSSQDLKKGFPLKVEPLNVFNPFEQQMMDLSHQKQEKTVCDDSCFSLQIMLE

SEQ ID NO: 74145 - protein, 142 aa, Setaria italica
  Transcript Sequence Number=SeqID_8171
  Homolog annotation: Hit_ID=B6SZQ1; Match level="QueryCoverage=97%, HitCoverage=63%, E-value=1e-66, Identity=97%"; Hit description =Cyclase/dehydrase family protein
  Pfam annotation: Domain name=Bet_v_I; Domain location=3-132; Score= -51.4; E_value=0.038; Accession=PF00407.11; Description=Pathogenesis -related protein Bet v I family
  Pfam annotation: Domain name=Polyketide_cyc; Domain location=1-131; Score=-0.2; E_value=0.083; Accession=PF03364.12; Description =Streptomyces cyclasedehydrase
  Pfam annotation: Domain name=Polyketide_cyc2; Domain location=1-135; Score=32.0; E_value=2.3e-06; Accession=PF10604.1; Description =Polyketide cyclase  dehydrase and li
  Pfam module annotation: Pfam domain module=Bet_v_I::Polyketide _cyc::Polyketide_cyc2; Domain location=3-132::1-131::1-135
PAAAVWSVVRRFDQPQAYKRFVRSCALLAGDGGVGTLREVRVVSGLPAASSRERLEILDDESHVLSFRVVGGEHRLQNYLSVTTVHPSPAAPDAATVVVESYMVDVPPGNTPEDTRVFVDTIVRCNLQSLATTAEKLAAVST

SEQ ID NO: 74146 - protein, 187 aa, Setaria italica
  misc_feature (15)..(15): Xaa can be any naturally occurring amino acid
  Transcript Sequence Number=SeqID_8172
  Gene Ontology: Mol. function=1,2-diacylglycerol 3-beta-galactosyltrans ferase activity; Cellular component=chloroplast; Biological process =biosynthetic process
  Homolog annotation: Hit_ID=Q0DWQ1; Match level="QueryCoverage=96%, HitCoverage=35%, E-value=2e-75, Identity=77%"; Hit description =Probable monogalactosyldiacylglycerol synthase 3, chloroplastic
  Pfam annotation: Domain name=MGDG_synth; Domain location=106-186; Score=-30.1; E_value=0.0051; Accession=PF06925.3; Description =Monogalactosyldiacylglycerol (MGDG) syntha
MAASMASPRGRSIRXTVLETVAAYHNQQRMRRKLRKSLTYAGELSSAGRARGDGASSSASVSSLCGPEDDDEPFWEEEEGTVELVQLGANRAKNVLILMSDTGGGHRASAEAIKDAFRIEFGDEYRVFVKDLCKDHAGWPLNNMESSYKFMVKHVQLWKVAFHSTSPRWVHCFYLAALASFYAKKVE

SEQ ID NO: 74147 - protein, 468 aa, Setaria italica
  Transcript Sequence Number=SeqID_8173
  Gene Ontology: Mol. function=1,2-diacylglycerol 3-beta-galactosyltrans ferase activity; Cellular component=chloroplast; Biological process =biosynthetic process
  Homolog annotation: Hit_ID=Q0DWQ1; Match level="QueryCoverage=93%, HitCoverage=86%, E-value=0.0, Identity=89%"; Hit description =Probable monogalactosyldiacylglycerol synthase 3, chloroplastic
  Pfam annotation: Domain name=Glyco_tran_28_C; Domain location=267 -430; Score=-19.0; E_value=0.0013; Accession=PF04101.8; Description =Glycosyltransferase family 28 C-terminal domain
  Pfam annotation: Domain name=Glycos_transf_1; Domain location=252 -421; Score=-17.0; E_value=0.011; Accession=PF00534.12; Description =Glycosyl transferases group 1
  Pfam annotation: Domain name=MGDG_synth; Domain location=73-241; Score=282.5; E_value=9.5e-82; Accession=PF06925.3; Description =Monogalactosyldiacylglycerol (MGDG) syntha
  Pfam module annotation: Pfam domain module=Glyco_tran_28_C::Glycos _transf_1::MGDG_synth; Domain location=267-430::252-421::73-241
EDLNLTTGEATTSAGRARGDGASSSASVSSLCGPEDDDEPFWEEEEGTVELVQLGANRAKNVLILMSDTGGGHRASAEAIKDAFRIEFGDEYRVFVKDLCKDHAGWPLNNMESSYKFMVKHVQLWKVAFHSTSPRWVHCFYLAALASFYAKKVEAGLKKYKPDIIISVHPLMQHIPLWVLKWQGLQNRVVFVTVITDLNTCHPTWFHANVNRCYCPSEEVAKRAALDDLQPSQIRVFGLPIRPSFCRAVLVKDELRKELELDPELPAVLLMGGGEGMGPVKKTAKALGESLFGREHGKPIGQLIVICGRNKTLSSSLQALEWKIPVKVRGFETQMEKWMGACDCIITKAGPGTIAEALIRGLPIILNDFIPGQEVGNVPYVVDNGAGVFSKSPKETASLVARWFGPDSEELKRMSENALKLAQPEAVFDIVRDIHELSREQGVISQISSSLTSSFFIPSPETTPLQLI

SEQ ID NO: 74148 - protein, 133 aa, Setaria italica
  Transcript Sequence Number=SeqID_8174
  Gene Ontology: Mol. function=heat shock protein binding
  Homolog annotation: Hit_ID=B6T3S9; Match level="QueryCoverage=100%, HitCoverage=69%, E-value=8e-19, Identity=45%"; Hit description =Chaperone protein dnaJ 72
  Pfam annotation: Domain name=DnaJ; Domain location=3-71; Score=82.1; E_value=2e-21; Accession=PF00226.23; Description=DnaJ domain
MGDHYQTLGLRRDATKAEVKAAFRRSALRDHPDRHASSTDSAARADAARRFRQASDAYHVLSDDRRRAEYDLRLRGSASSYARTSSSGWASSSSAPYGYGYGYGHGGGSWRRTPPGAGAGAAAGSIDWEFLLK

SEQ ID NO: 74149 - protein, 82 aa, Setaria italica
  Transcript Sequence Number=SeqID_8175
IRIGRETKLVSEVEYYLTNLISAKMFILDVNARSLSMEETEFQKHMESARLVTQISVASPSSSQGLPTSARARKEEADLAVL

SEQ ID NO: 74150 - protein, 60 aa, Setaria italica
  Transcript Sequence Number=SeqID_8176
YITGSKFPFMDSETESLSPEEVKHLHDLYRQVVSRYTLLSKALTKLSIDEDQLLSSVDDS

SEQ ID NO: 74151 - protein, 271 aa, Setaria italica
  Transcript Sequence Number=SeqID_8177
  Gene Ontology: Mol. function=hydrolase activity, hydrolyzing O -glycosyl compounds; Cellular component=cell wall; Biological process= carbohydrate metabolic process
  Homolog annotation: Hit_ID=B6U5W7; Match level="QueryCoverage=82%, HitCoverage=70%, E-value=1e-124, Identity=94%"; Hit description =Xyloglucan endotransglucosylase/hydrolase protein 32
  Pfam annotation: Domain name=Glyco_hydro_16; Domain location=57-243; Score=309.4; E_value=7.3e-90; Accession=PF00722.13; Description =Glycosyl hydrolases family 16
  Subcellular localization annotation: CTP_CleavageSite=68; ConfidenceScore=5.38e-01
MAAAPPSCGSSSMSRRAAAVVPALLLVLVVAISATSGADAQPSPGYYPSSRFRPIPFNRGYSNKWGPQHQTLSGDHSALTIWLDRTCGSGFKSKHAYRNGYFSTRIKLPAGYTAGTNTAFYLSNNEAHPGFHDEIDMEFLGTIPGEPYTLQTNVYVRGSGDGRIVGREMRFHLWFDPTAGYHTYAILWNPDAITFFVDDVPVRRYERRAELTFPDRPMWVYGSIWDASDWATDDGRHRADYRYQPFVAHLDRFVIAGCSAAAPPACRPVPA

SEQ ID NO: 74152 - protein, 239 aa, Setaria italica
  Transcript Sequence Number=SeqID_8178
  Gene Ontology: Mol. function=histone-lysine N-methyltransferase activity; Cellular component=nucleus; Biological process=ecdysone receptor-mediated signaling pathway
  Homolog annotation: Hit_ID=Q8H6A9; Match level="QueryCoverage=94%, HitCoverage=66%, E-value=1e-109, Identity=84%"; Hit description =Histone-lysine N-methyltransferase, H3 lysine-36 and H4 lysine -20specific
  Pfam annotation: Domain name=SET; Domain location=78-207; Score =185.7; E_value=1.3e-52; Accession=PF00856.20; Description=SET domain
DFDPRPLLKQWNVLGRYEPIKRNVYHIKRRTEDYGIFGSCKPSSGSSVVCGKDCHCGMLFSCCSSNCECDNTCANKPFQHRPLKQTKLITTEKCGFGLVAEDEIKKGEFVVEYVGEVIDDRACEKRLWQMKRLSDTNFYLCEVSSNMVIDATDKGNMSRFINHSCEPNTEMQKWTVDGETRVGIFALRDIKKGEELTYDYKFVQFGADQDCHCGSSNCRKMLGATKSLNSIVFEVAIFQ

SEQ ID NO: 74153 - protein, 180 aa, Setaria italica
  Transcript Sequence Number=SeqID_8179
  Gene Ontology: Mol. function=histone-lysine N-methyltransferase activity; Cellular component=nucleus; Biological process=regulation of transcription, DNA-dependent
  Homolog annotation: Hit_ID=Q8H6A9; Match level="QueryCoverage=89%, HitCoverage=43%, E-value=9e-62, Identity=77%"; Hit description =Histone-lysine N-methyltransferase, H3 lysine-36 and H4 lysine -20specific
  Pfam annotation: Domain name=SET; Domain location=1-67; Score=11.0; E_ value=0.00024; Accession=PF00856.20; Description=SET domain
PKLLVVLSSKLVLVNYCSRFINHSCEPNTEMQKWTVDGETRVGIFALRDIKKGEELTYDYKFVQFGADQDCHCGSSNCRKMLGATKSLNSIVFRSGHFSVRSQNQYVKKKKRKTKSENCIGQFLRLWHRRQKMYVGCWIIDFDQETKIHTLQFTDEHVEKFNLKEEEWHFLPVDSSDDEK

SEQ ID NO: 74154 - protein, 118 aa, Setaria italica
  Transcript Sequence Number=SeqID_8180
  Subcellular localization annotation: CTP_CleavageSite=74; ConfidenceScore=5.63e-01
TFFTKLFKAYHLCPKLPQTPSKSHVALTWLPSSFFSLPHQLSIPSMAPSLPSSLHRQVPPLLPAKPHQRSLAASEALEWNHQPSPSSSISYTAPISFLVRLGLSSSPPPPRSVQAFHP

SEQ ID NO: 74155 - protein, 53 aa, Setaria italica
  Transcript Sequence Number=SeqID_8181
  Gene Ontology: Mol. function=nucleotide binding; Cellular component =plasma membrane; Biological process=response to cadmium ion
  Homolog annotation: Hit_ID=Q9FNX5; Match level="QueryCoverage=100%, HitCoverage=8%, E-value=9e-17, Identity=75%"; Hit description =Dynamin-related protein 1E
MATMENVIVLVNRIQRACTVLGDHGGGDGAASLPTLWEALPSVAVVGGQSSGK

SEQ ID NO: 74156 - protein, 85 aa, Setaria italica
  Transcript Sequence Number=SeqID_8182
MSYFQTTTCKPHCGLIVNRPIAGLGSTSQYPICSHALGFRKLQQKVYPRLVLIAASQKRLTPVCALSGKGNPRTSRLRISNYLLN

SEQ ID NO: 74157 - protein, 247 aa, Setaria italica
  Transcript Sequence Number=SeqID_8183
  Gene Ontology: Cellular component=chloroplast envelope
MSYFQTTTCKPHCGLIVNRPIAGLGSTSQYPICSHALGFRKLQQKVYPRLVLIAASQKRLTPVCALSGKGNPDSADDPLMESLKKAMADAKKPRPIQDLLKEQMAKLREQASGGGGGNGNRRGGSGGSGGPEDESFKETLDEIVQVILATVSFILVYIHIIRGEELYRLARDYTRYLVTGKRTARLKRAMQKWHNFSERFMQKEDSEEDPYDRPAASKPTWWQQPQKFVHLMEELCRGNWRPHAQES

SEQ ID NO: 74158 - protein, 265 aa, Setaria italica
  Transcript Sequence Number=SeqID_8184
  Gene Ontology: Mol. function=receptor activity; Cellular component =anchored to membrane; Biological process=cell wall catabolic process
  Homolog annotation: Hit_ID=B6SSR0; Match level="QueryCoverage=84%, HitCoverage=54%, E-value=1e-104, Identity=84%"; Hit description =Erwinia induced protein 1
  Pfam annotation: Domain name=LysM; Domain location=38-80; Score=42.5; E_value=1.7e-09; Accession=PF01476.12; Description=LysM domain
NGMPEGAALDAGTTLFVPLHCACFGGADAGVPAVYLTYVVAEGDTVPAIARRFRTTGNDLMSVNDMATADVATGDIIVVPLPACASSFPAYTSDAGLSVANGTYAITANRCVQCSCGPGNLDLFCVPAPLADSTCSSMQCSNSSMMLGNFTLQMTSAGCSVTSCSYGGYVNGTILTTLTTSLKPQCPGPHQFPPLMPPPTTSFFETYLGPSPTPMPSEGGIGPQMAGMAPTSSPPASSGRPASADRRVGDVLALVALCLVANLLW

SEQ ID NO: 74159 - protein, 262 aa, Setaria italica
  misc_feature (175)..(175): Xaa can be any naturally occurring amino acid
  Transcript Sequence Number=SeqID_8185
  Gene Ontology: Mol. function=sulfotransferase activity; Cellular component=integral to membrane
  Homolog annotation: Hit_ID=Q6ZF61; Match level="QueryCoverage=83%, HitCoverage=40%, E-value=9e-89, Identity=73%"; Hit description =Putative flavonol 3-sulfotransferase
  Pfam annotation: Domain name=Sulfotransfer_1; Domain location=89-262; Score=31.6; E_value=1.2e-09; Accession=PF00685.19; Description =Sulfotransferase domain
MANVTACTGPATVLSGLPAPVPLKDVVVGDGDAGQQDADASAPEEYASAVISDLPSNPKLFLRRYQGTWVLESWVPGIVAIQRGFAPRGGDVVLASPPKCGTTWLKALAFATMARGVHPPAGDPGHPLLRVNPHDCVPFMEKLFAAGLGSKVMDALPSPRLMATHMHHSVLPASXIKKNPDCKIVYIWDPKDMLVSMWQFSRRIQQDLELSDLLEAACDGSCLSGPIWDHVLGYWNASKATPETVMFLRYEEMLHGPRQQCR

SEQ ID NO: 74160 - protein, 82 aa, Setaria italica
  Transcript Sequence Number=SeqID_8186
  Homolog annotation: Hit_ID=B6SW62; Match level="QueryCoverage=98%, HitCoverage=19%, E-value=5e-17, Identity=66%"; Hit description =Calmodulin binding protein
  Subcellular localization annotation: CTP_CleavageSite=45; ConfidenceScore=5.40e-01
SRAAGRGPAEGAKMQRSSSLAGAAPRGGGGQSSPWPAGLRLDASSASLKDSECGSTSSVLTAATVYSRTRSLVGFEVRRGLY

SEQ ID NO: 74161 - protein, 86 aa, Setaria italica
  Transcript Sequence Number=SeqID_8187
  Subcellular localization annotation: CTP_CleavageSite=13; ConfidenceScore=5.12e-01
ADVPSATLINDTQASKLPVLLRNSRILFLKTSSCDGWCSGAAASDARAPAAAAASGSGSISGGARVPPLAWARPRGWSDGGVLGSG

SEQ ID NO: 74162 - protein, 403 aa, Setaria italica
  Transcript Sequence Number=SeqID_8188
  Gene Ontology: Mol. function=nucleic acid binding; Cellular component= mitochondrion
  Homolog annotation: Hit_ID=B6TR84; Match level="QueryCoverage=27%, HitCoverage=44%, E-value=9e-31, Identity=56%"; Hit description =Glycine-rich RNA-binding protein 7
  Pfam annotation: Domain name=GRP; Domain location=72-194; Score= -14.9; E_value=0.0028; Accession=PF07172.3; Description=Glycine rich protein family
  Pfam annotation: Domain name=RRM_1; Domain location=34-104; Score =94.4; E_value=3.8e-25; Accession=PF00076.14; Description=RNA recognition motif. (a.k.a. RRM, RBD, o
  Pfam module annotation: Pfam domain module=GRP::RRM_1; Domain location=72-194::34-104
  Subcellular localization annotation: CTP_CleavageSite=27; ConfidenceScore=5.35e-01
MAFASRIGNALRRTSVPSSSPLLQAVRCMSSSKLFVGGLSYATDETTLRNKIVKCGDVLEARVIMDRESGRSRGFGFVTYTSSEEASAAITAMDGKELQGRPVKVNHANDRAGGIRGGGGFGSGGAYGGGGGYATGGYGGGGGYNSGGYGGNSGGYSSGGYGGNSGGYGGDGGGSGGYGSNSNNASGGGYAGKSGYNDGATSGGYASNFNSASGGGYGNVGSYGTTGNPGGNADGYSSPNTYGAGNYNDASGGGYAGNSGYNDGATSGGYASNFNSASGGGYGSGGNYGTTGNPGGNTGGYSSPNTYGAGNNNSGAPSGGSFGGFGGSFSNGGFTAAAAAAGPNSGSNFAGNATSVGFSGHNSAGGFSGGGATGFGANKPQYNGQDDLLGDSYFADKEAAENR

SEQ ID NO: 74163 - protein, 70 aa, Setaria italica
  Transcript Sequence Number=SeqID_8189
  Gene Ontology: Mol. function=protein serine/threonine kinase activity; Biological process=protein amino acid phosphorylation
  Homolog annotation: Hit_ID=UPI000034ED93; Match level="QueryCoverage =90%, HitCoverage=9%, E-value=6e-31, Identity=90%"; Hit description =protein kinase family protein
FLVCKKKMATSPESLCCFCPQPFREFVEYVVNLKFDEEPNYAKCVSLFDSVVGPNPDIRPINTVLRAFPS

SEQ ID NO: 74164 - protein, 138 aa, Setaria italica
  misc_feature (40)..(40): Xaa can be any naturally occurring amino acid
  misc_feature (89)..(89): Xaa can be any naturally occurring amino acid
  Transcript Sequence Number=SeqID_8190
  Gene Ontology: Mol. function=protein serine/threonine kinase activity; Biological process=protein amino acid phosphorylation
  Homolog annotation: Hit_ID=UPI000034ED93; Match level="QueryCoverage =56%, HitCoverage=12%, E-value=7e-24, Identity=63%"; Hit description =protein kinase family protein
APPAETRRRATRAAARAEEREREEIRRAEVVAWEGGGDGXQGERGMDDPDSAARSADKLIADDEGSPPVPDMVQVGNSPKYRVDRKLTXGKDGQVYVGHRMSPTGPGAVEVALKFEHRTSKGCNHAPPYEWAVYNDIV

SEQ ID NO: 74165 - protein, 186 aa, Setaria italica
  Transcript Sequence Number=SeqID_8191
  Gene Ontology: Mol. function=protein serine/threonine kinase activity; Biological process=protein amino acid phosphorylation
  Homolog annotation: Hit_ID=UPI000034ED93; Match level="QueryCoverage =91%, HitCoverage=25%, E-value=1e-69, Identity=71%"; Hit description =protein kinase family protein
FLIRVIISLFFWFDEGERGMDDPDSAARSADKLIADDEGSPPVPDMVQVGNSPKYRVDRKLGKGGFGQVYVGHRMSPTGPGAVEVALKFEHRTSKGCNHAPPYEWAVYNAVGGIHGVPRVHYKGRQGDYYVMVMDMLRPSLWDVWNNNSHTMSVEMVACIAIEAISILEKMHSKGYVHGDVKPEKF

SEQ ID NO: 74166 - protein, 138 aa, Setaria italica
  Transcript Sequence Number=SeqID_8192
  Gene Ontology: Mol. function=protein serine/threonine kinase activity; Biological process=protein amino acid phosphorylation
  Homolog annotation: Hit_ID=B9T069; Match level="QueryCoverage=100%, HitCoverage=19%, E-value=6e-69, Identity=86%"; Hit description =Casein kinase, putative
  Subcellular localization annotation: CTP_CleavageSite=34; ConfidenceScore=5.03e-01
MSKGTAYTQQSYKVSDTFPYKWINKKWRDGFYVTSMATAGSRWAVVMSRNAGFSDQVVELDFLYPSEGIHKRWDNGYRITATAATWDQAAFVLSVPRRRPTDETQETLRTSAFPSQHVKEKWSKNLYLASVCYGRTVS

SEQ ID NO: 74167 - protein, 505 aa, Setaria italica
  Transcript Sequence Number=SeqID_8193
  Gene Ontology: Mol. function=protein serine/threonine kinase activity; Biological process=protein amino acid phosphorylation
  Homolog annotation: Hit_ID=UPI000034ED93; Match level="QueryCoverage =97%, HitCoverage=72%, E-value=0.0, Identity=84%"; Hit description =protein kinase family protein
  Pfam annotation: Domain name=Pkinase; Domain location=1-226; Score= -52.8; E_value=2.4e-05; Accession=PF00069.17; Description=Protein kinase domain
LVTNWYYCLWYPSSCHGVPRVHYKGRQGDYYVMVMDMLGPSLWDVWNNNSHTMSVEMVACIAIEAISILEKMHSKGYVHGDVKPENFLLGTPGTPEEKKLFLVDLGLATKWKDSSTGLHVDYDQRPDVFRGTVRYASVHAHLGRIGSRRDDLESLAYTLVFLLRGRLPWQGYQGENKGFLVCKKKMATSPESLCCFCPQPFREFVEYVVNLKFDEEPNYAKCVSLFDSVVGPNPDIRPINTDGAQKLIHQVGQKRGRLLIEEEADEQPKKKIRMGMPATQWISVYNARRPMKQRYHYNVADSRLVQHIEKGNEDGLYISCITSCSNLWALIMDAGTGFTSQVYELTPHFLHKEWIMDQWERNYYITALAGANNGSSLVVMSKGTAYTQQSYKVSDTFPYKWINKKWRDGFYVTSMATAGSRWAVVMSRNAGFSDQVVELDFLYPSEGIHKRWDNGYRITATAATWDQAAFVLSVPRRRPTDETQETLRTSAFPSQHVKEKWSKNL

SEQ ID NO: 74168 - protein, 195 aa, Setaria italica
  misc_feature (144)..(144): Xaa can be any naturally occurring amino acid
  Transcript Sequence Number=SeqID_8194
  Homolog annotation: Hit_ID=B6U669; Match level="QueryCoverage=98%, HitCoverage=50%, E-value=6e-62, Identity=61%"; Hit description=mTERF family protein
ISKLLTIELGVLRLSPDRMSQIFEDLKSLGLGVTDTGLLYGIRALSCISRETWLRKVSLYKSFGVSEGELLKAFKTQPTMLLFSDESIKKKLRFLLDELKLELSEVMRLPVVISYSVEKCIIPRCAVLRVLMREGKIEPNINLXSALIGSAKIFSKRYVLRYAHDVPDVVKAYEGKIAFEGFRDRDVLVPLKPSG

SEQ ID NO: 74169 - protein, 430 aa, Setaria italica
  misc_feature (33)..(33): Xaa can be any naturally occurring amino acid
  Transcript Sequence Number=SeqID_8195
  Gene Ontology: Mol. function=transferase activity, transferring glycosyl groups; Cellular component=integral to membrane; Biological process=1,3-beta-glucan biosynthetic process
  Homolog annotation: Hit_ID=B9SVW5; Match level="QueryCoverage=99%, HitCoverage=22%, E-value=1e-180, Identity=69%"; Hit description =Transferase, transferring glycosyl groups, putative
RTVGFYFNSLISVVGVYVFFYGQLYLVLSGLQXALLHDAQTQNIKSLETALASQSFLQLGLLTGLPMVMELGLEKGFRSALSDFILMQLQFASVFFTFSLGTKAHYYGRTILHGGAKYRPTGRKFVVFHASFTENYQLYSRSHFVKGFELVFLLIVYHIFRRSYVSSVVHVMITYSTWFMAVTWLFTPFLFNPAGFAWQKIVDDWADWNRWMRNQGGIGVQPEKSWESWWNAENAHLRHSVLSSRILEVLLSLRFFIYQYGLVYHLNISQDNKNFLVYLLSWVVIIAVIGLVKLVNCASRRLSSKHQLIFRVIKLLIFLAVVTSLILLYCLCQLSIMDLIICCLAFIPTGWGLLLIVQVLRPKIEYYAIWEPIQVIAHAYDYGMGFLLFSPIAVLAWMPVISAIQTRVLFNRAFSRQEIQPFIVGKTKRR

SEQ ID NO: 74170 - protein, 239 aa, Setaria italica
  Transcript Sequence Number=SeqID_8196
  Gene Ontology: Mol. function=electron carrier activity; Cellular component=extracellular region; Biological process=response to oxidative stress
  Homolog annotation: Hit_ID=B6STZ5; Match level="QueryCoverage=68%, HitCoverage=48%, E-value=1e-83, Identity=90%"; Hit description =Peroxidase 1
  Pfam annotation: Domain name=peroxidase; Domain location=91-239; Score=190.2; E_value=5.9e-54; Accession=PF00141.15; Description =Peroxidase
CCNASVRRSYISSDHRTPGVPQPLVHPTIHLALAAQQHKDIHPFHSMASMAAMVTMGVAALFLSAAASSAMAAGLQMDFYSSTCPRVEEIVKDEMVEILRAAPTLAGPLLRLHFHDCFVRGCDGSVLLDSTPANTAEKDATPNLTLRGFGSVQRVKDRLEQACPGTVSCADILALMARDAVVLARGPSWPVALGRRDGRVSIANETNQLPPPTANFTRLVQMFAAKGLGVKDLVVLSGG

SEQ ID NO: 74171 - protein, 143 aa, Setaria italica
  Transcript Sequence Number=SeqID_8197
  Gene Ontology: Cellular component=chloroplast
  Subcellular localization annotation: CTP_CleavageSite=42; ConfidenceScore=5.70e-01
MAGARAVAVATPAAPPRAADPSTNLAPRRCSLYRVSCRQNPRVAAPVGLAATRSRGTRGPARLSSRDPAEAETDAGAGRIPKDDSSYLWTLGLGSVGGAAVIKYGSILLPDITRPNIVLALLMVSLPVVAAVLILLKASSSED

SEQ ID NO: 74172 - protein, 74 aa, Setaria italica
  Transcript Sequence Number=SeqID_8198
RWIEPDGMSASDIGASEQNFCFPFFWELVHWCCVCGSWCQSLANNAFAESACIQVPVLVIYAWFQNSLPCCAIR

SEQ ID NO: 74173 - protein, 161 aa, Setaria italica
  misc_feature (160)..(160): Xaa can be any naturally occurring amino acid
  Transcript Sequence Number=SeqID_8199
  Gene Ontology: Mol. function=binding
  Homolog annotation: Hit_ID=Q8LIW8; Match level="QueryCoverage=100%, HitCoverage=27%, E-value=2e-64, Identity=73%"; Hit description =P0497A05.3 protein
  Pfam annotation: Domain name=TPR_1; Domain location=127-160; Score =17.1; E_value=0.052; Accession=PF00515.20; Description =Tetratricopeptide repeat
  Pfam annotation: Domain name=TPR_1; Domain location=3-36; Score=23.2; E_value=0.0011; Accession=PF00515.20; Description=Tetratricopeptide repeat
  Pfam annotation: Domain name=TPR_1; Domain location=93-126; Score =9.2; E_value=0.46; Accession=PF00515.20; Description=Tetratricopeptid e repeat
  Pfam annotation: Domain name=TPR_2; Domain location=127-160; Score =19.9; E_value=0.011; Accession=PF07719.9; Description=Tetratricopepti de repeat
  Pfam annotation: Domain name=TPR_2; Domain location=3-36; Score=26.9; E_value=8.1e-05; Accession=PF07719.9; Description=Tetratricopeptide repeat
  Pfam annotation: Domain name=TPR_2; Domain location=93-126; Score =15.8; E_value=0.18; Accession=PF07719.9; Description=Tetratricopeptid e repeat
  Pfam module annotation: Pfam domain module=TPR_1::TPR_1::TPR_1::TPR _2::TPR_2::TPR_2; Domain location=127-160::3-36::93-126::127-160::3 -36::93-126
KNAHAHFMLGLMYQRLGQAQKAIASYEKSTEILLQDEEEVRRPDLLSSVRIHHAQCILQASMGDSFDEELETGEVDEILVKLKSSVESDHRQAAVWNILGLVLLRGGQIQSAISVLSSLAAVAPDYLDSLANLGVAYVQSGDLELSAKCFQELLLKDQNXP

SEQ ID NO: 74174 - protein, 113 aa, Setaria italica
  Transcript Sequence Number=SeqID_8200
  Gene Ontology: Mol. function=binding
  Homolog annotation: Hit_ID=Q8LIW8; Match level="QueryCoverage=99%, HitCoverage=18%, E-value=1e-54, Identity=91%"; Hit description =P0497A05.3 protein
  Pfam annotation: Domain name=TPR_1; Domain location=36-69; Score =34.5; E_value=4.3e-07; Accession=PF00515.20; Description =Tetratricopeptide repeat
  Pfam annotation: Domain name=TPR_2; Domain location=2-35; Score=0.7; E_value=27; Accession=PF07719.9; Description=Tetratricopeptide repeat
  Pfam annotation: Domain name=TPR_2; Domain location=36-69; Score =33.7; E_value=7.4e-07; Accession=PF07719.9; Description =Tetratricopeptide repeat
  Pfam module annotation: Pfam domain module=TPR_1::TPR_2::TPR_2; Domain location=36-69::2-35::36-69
GAGGNVSAGPYLHQKEALAVAKDCLLAAVKADPKAASVWVNLANAYYMAGEHRNSKKCLEQAAKLEPNHMPARYAIAVHRIRDAVRSQCTDDQLLWAANEMATVLKEGDPSAS

SEQ ID NO: 74175 - protein, 218 aa, Setaria italica
  Transcript Sequence Number=SeqID_8201
  Gene Ontology: Mol. function=binding
  Homolog annotation: Hit_ID=Q8LIW8; Match level="QueryCoverage=97%, HitCoverage=35%, E-value=1e-107, Identity=88%"; Hit description =P0497A05.3 protein
  Pfam annotation: Domain name=TPR_1; Domain location=80-113; Score =34.5; E_value=4.3e-07; Accession=PF00515.20; Description =Tetratricopeptide repeat
  Pfam annotation: Domain name=TPR_2; Domain location=46-79; Score=0.7; E_value=27; Accession=PF07719.9; Description=Tetratricopeptide repeat
  Pfam annotation: Domain name=TPR_2; Domain location=80-113; Score =33.7; E_value=7.4e-07; Accession=PF07719.9; Description =Tetratricopeptide repeat
  Pfam module annotation: Pfam domain module=TPR_1::TPR_2::TPR_2; Domain location=80-113::46-79::80-113
VTYVPSGDLELSAKCFQELLLKDQNHPAALVNYAALLLCKYGSLSAGGNVSAGPYLHQKEALAVAKDCLLAAVKADPKAASVWVNLANAYYMAGEHRNSKKCLEQAAKLEPNHMPARYAIAVHRIRDAVRSQCTDDQLLWAANEMATVLKEGDPSAVDAPIAWAGLAMAHRAQHEIAAAYDTEHNNLNDAEERALYTLKQGQKEDPDDAVQWHQLGLY

SEQ ID NO: 74176 - protein, 218 aa, Setaria italica
  Transcript Sequence Number=SeqID_8202
  Gene Ontology: Mol. function=binding; Cellular component =intracellular; Biological process=biosynthetic process
  Homolog annotation: Hit_ID=Q8LIW8; Match level="QueryCoverage=100%, HitCoverage=35%, E-value=1e-108, Identity=87%"; Hit description =P0497A05.3 protein
  Pfam annotation: Domain name=TPR_1; Domain location=134-167; Score =24.2; E_value=0.00052; Accession=PF00515.20; Description =Tetratricopeptide repeat
  Pfam annotation: Domain name=TPR_1; Domain location=168-201; Score =24.4; E_value=0.00047; Accession=PF00515.20; Description =Tetratricopeptide repeat
  Pfam annotation: Domain name=TPR_1; Domain location=65-98; Score=2.0; E_value=3.4; Accession=PF00515.20; Description=Tetratricopeptide repeat
  Pfam annotation: Domain name=TPR_1; Domain location=99-131; Score =0.9; E_value=4.7; Accession=PF00515.20; Description=Tetratricopeptide repeat
  Pfam annotation: Domain name=TPR_2; Domain location=134-167; Score =21.2; E_value=0.0042; Accession=PF07719.9; Description =Tetratricopeptide repeat
  Pfam annotation: Domain name=TPR_2; Domain location=168-201; Score =30.1; E_value=9.2e-06; Accession=PF07719.9; Description =Tetratricopeptide repeat
  Pfam annotation: Domain name=TPR_2; Domain location=65-98; Score =11.3; E_value=1.3; Accession=PF07719.9; Description=Tetratricopeptide repeat
  Pfam annotation: Domain name=TPR_2; Domain location=99-131; Score =0.9; E_value=26; Accession=PF07719.9; Description=Tetratricopeptide repeat
  Pfam module annotation: Pfam domain module=TPR_1::TPR_1::TPR_1::TPR _1::TPR_2::TPR_2::TPR_2::TPR_2; Domain location=134-167::168-201::65 -98::99-131::134-167::168-201::65-98::99-131
MATVLKEGDPSAVDAPIAWAGLAMAHRAQHEIAAAYDTEHNNLNDAEERALYTLKQAIQEDPDDAVQWHQLGLYNICMTRFSRSVNFLKAALARSPDCSYAWSNLGIALQLSDDPSSETVYKRALVLSSTQQLHAIFSNLGILYRQHRNYEFARKMLSRSLELCPGYAPANNNLGLVFVAEGRWEDARSCFEKALQSDPLLDAAKSNLLKVLALSKKQ

SEQ ID NO: 74177 - protein, 87 aa, Setaria italica
  Transcript Sequence Number=SeqID_8203
  Gene Ontology: Mol. function=oxidoreductase activity
  Homolog annotation: Hit_ID=Q2LGK1; Match level="QueryCoverage=98%, HitCoverage=31%, E-value=2e-12, Identity=50%"; Hit description =Putative oxidoreductase (Fragment)
DARYPALAPELRAALFDGAVKPLFALPVDAKPCNNYGPEKPFPGYLGESQGLDGQESLAMVDAPKPEAVRAFADLMWPDGGGNPSFW

SEQ ID NO: 74178 - protein, 76 aa, Setaria italica
  Transcript Sequence Number=SeqID_8204
  Subcellular localization annotation: CTP_CleavageSite=61; ConfidenceScore=5.62e-01
PPSPSASSTACRLGFASAAPSIAPVLPGPIPSIPTSARPCSPSTLFSPYNPNRKLLGPSPAGSTKENGIPPPSSAT

SEQ ID NO: 74179 - protein, 357 aa, Setaria italica
  Transcript Sequence Number=SeqID_8205
  Gene Ontology: Mol. function=cation transmembrane transporter activity; Cellular component=membrane; Biological process=cation transport
  Homolog annotation: Hit_ID=B9T072; Match level="QueryCoverage=99%, HitCoverage=87%, E-value=1e-157, Identity=75%"; Hit description =Cation efflux protein/ zinc transporter, putative
  Pfam annotation: Domain name=Cation_efflux; Domain location=63-343; Score=214.3; E_value=3.2e-61; Accession=PF01545.13; Description =Cation efflux family
VDPERPSHVDFSRSKGLPEGEREYYEKQFATLRSFEEVDSIEESNEIDEEEELAEQNQSEFAMKISNYANIILLALKVYATIKSGSIAIAASTLDSLLDLMAGGILWFTHLSMKSINVYKYPIGKLRVQPVGIIIFAAVMATLGFQVFIQAVEKLIVNEAPAKLNQVQLLWLYSIMIFATVVKLALWLYCRTSGNKIVRAYAKDHYFDVVTNVVGLAAAVLGDRFYWWIDPVGAIALAVYTITNWSGTVWENAVSLVGESAPPEMLQKLTYLAIRHHPQIKRVDTVRAYTFGVLYFVEVDIELPEDLPLKEAHAIGESLQIKIEELPEVERAFVHLDFECDHKPEHSILSKLPSNQP

SEQ ID NO: 74180 - protein, 88 aa, Setaria italica
  Transcript Sequence Number=SeqID_8206
  Gene Ontology: Mol. function=phosphoprotein phosphatase activity; Biological process=actin cytoskeleton organization and biogenesis
  Homolog annotation: Hit_ID=Q6K8Z4; Match level="QueryCoverage=94%, HitCoverage=5%, E-value=9e-36, Identity=90%"; Hit description=Formin- like protein 7
  Subcellular localization annotation: CTP_CleavageSite=20; ConfidenceScore=5.26e-01
KKETVKDRSTARSKSPRSLRANQPSKRTPLKPLHWVKVSRATQGSLWAETQKSDEASRAPEIDISELESLFSVMMPNMEAKRQRQHPS

SEQ ID NO: 74181 - protein, 101 aa, Setaria italica
  Transcript Sequence Number=SeqID_8207
FHISSTCAVFLQQWAAAVVICWASMQTIFWLTHVLLIQTRNYYHVYFWLTHSSNLAVHGQSSFNNGQSPIALSVHAATLPPYTDHETRLLIDTTISHLLHL

SEQ ID NO: 74182 - protein, 47 aa, Setaria italica
  Transcript Sequence Number=SeqID_8208
DDRDASIQIAGPSSQNVDVSIDNPLENTCHRLIDRLLTCYSFPCKRS

SEQ ID NO: 74183 - protein, 135 aa, Setaria italica
  misc_feature (123)..(123): Xaa can be any naturally occurring amino acid
  Transcript Sequence Number=SeqID_8209
  Subcellular localization annotation: CTP_CleavageSite=57; ConfidenceScore=5.47e-01
MRSSENKTVCSNSGRSSKRRKETSSELVPVSNRPSRRNASRQCKHDSPLKRSPRKVRNATLAKSIKNKYHCSPLKRRRGSDSVAGKVVTGLVARRRKKRKRQNTDEATRLERRARYFLIKVKXLEQNLLDAYSGD

SEQ ID NO: 74184 - protein, 48 aa, Setaria italica
  Transcript Sequence Number=SeqID_8210
ICLIQLWLIQLHARYKDVTHRYSCCPNMLSCVPFGCYIYIEVLCFAVL

SEQ ID NO: 74185 - protein, 208 aa, Setaria italica
  Transcript Sequence Number=SeqID_8211
  Gene Ontology: Cellular component=chloroplast
  Homolog annotation: Hit_ID=C3SAD0; Match level="QueryCoverage=98%, HitCoverage=76%, E-value=3e-82, Identity=76%"; Hit description =Phosphoglycerate mutase family protein
  Pfam annotation: Domain name=PGAM; Domain location=3-205; Score=53.1; E_value=1e-12; Accession=PF00300.14; Description=Phosphoglycerate mutase family
MQRVVVMRHGDRLDQAEPIWPANKPRPWDPPLTDAGLLRAWTVGKRIRAAATAGGWAVHRVLVSPFLRCRQTAERAVAALCAVPDDAALLAIEDAANVPLDTSRLKVSIEYGLSEMMNTHAMGGIVGKVAPGVKKWFPDLPELEAVFPAGTIDHSAEPIYPEVPKWEESIMEARSRYASVIKALADKYPNENLLLVTHGEGVGDNNRK

SEQ ID NO: 74186 - protein, 137 aa, Setaria italica
  Transcript Sequence Number=SeqID_8212
  Gene Ontology: Cellular component=chloroplast
  Homolog annotation: Hit_ID=C3SAD0; Match level="QueryCoverage=92%, HitCoverage=46%, E-value=1e-42, Identity=69%"; Hit description =Phosphoglycerate mutase family protein
KWFPDLPELEAVFPAGTIDHSAEPIYPEVPKWEESIMEARSRYASVIKALADKYPNENLLLVTHGEGVGASVSYFEMGLEIYDVEYCAYSVLERQVAMKPGDEQGGEGFTADSFKVLTKSGTTGIQYAPVPESWFVG

SEQ ID NO: 74187 - protein, 95 aa, Setaria italica
  misc_feature (87)..(87): Xaa can be any naturally occurring amino acid
  Transcript Sequence Number=SeqID_8213
  Homolog annotation: Hit_ID=Q7XR64; Match level="QueryCoverage=53%, HitCoverage=22%, E-value=2e-19, Identity=92%"; Hit description =OSJNBa0043A12.21 protein
  Subcellular localization annotation: CTP_CleavageSite=40; ConfidenceScore=5.56e-01
MSSLVRFLFTLAAAIAAASLLVASLRRRTPPPGLPAQLVPSSHMAGRNRSFVLWLHGLGDSGPANEPIRNFFSAPEFRLTKWSFPSXAPRSPVSC

SEQ ID NO: 74188 - protein, 62 aa, Setaria italica
  Transcript Sequence Number=SeqID_8214
HSIQLVCQSKFAGDMLLLCLISVSVCGNYKLFSCLYILTGNKCPMNNTLIRCYGSSMLIISN

SEQ ID NO: 74189 - protein, 408 aa, Setaria italica
  misc_feature (273)..(273): Xaa can be any naturally occurring amino acid
  Transcript Sequence Number=SeqID_8215
  Gene Ontology: Mol. function=protein serine/threonine kinase activity; Cellular component=plasma membrane; Biological process =protein amino acid phosphorylation
  Homolog annotation: Hit_ID=Q6I5Q6; Match level="QueryCoverage=97%, HitCoverage=85%, E-value=1e-131, Identity=59%"; Hit description =Putative serine/threonine protein kinase
  Pfam annotation: Domain name=Pkinase; Domain location=28-302; Score =151.3; E_value=2.9e-42; Accession=PF00069.17; Description=Protein kinase domain
  Pfam annotation: Domain name=Pkinase_Tyr; Domain location=28-302; Score=122.7; E_value=1.2e-33; Accession=PF07714.9; Description =Protein tyrosine kinase
  Pfam module annotation: Pfam domain module=Pkinase::Pkinase_Tyr; Domain location=28-302::28-302
MEGSQPIGRHDEAIIFPLHQLADATKNFSQDCLLGRGGFGCVYKATLSDGQVVAVKQLDLNGLQGNREFLVEVLMLNLLHHPNLVNLFGYCVDGDQRLLVYEYMPLGSLEDHLHDLAPDQEPLDWKTRMKIAASAAAGLEYLHDEAHPPVIYRDIKPSNILLGEGYHAKLSDFGLAKLGPVGDKTHVTTRVMGTHGYCAPEYFLTGQLTIKSDIYSFGVVFLELITGRRPNDSNRPPEEQDLVAWARPLFKDQRKFSRMADPLLHGRFPRRGXLYQALAIAAMCLQEKAKHRPPIREVATALSYLASQTYDRNNTTARRNRAGPSTSRVLDDQMNQDTTLASQQEVQMSIHCQTNQVVPEVKETSWSGSHRPGRGRVAPNGIDRERALADANVWAEAWRRQEKASKMW

SEQ ID NO: 74190 - protein, 295 aa, Setaria italica
  misc_feature (68)..(68): Xaa can be any naturally occurring amino acid
  Transcript Sequence Number=SeqID_8216
  Gene Ontology: Mol. function=nucleic acid binding; Biological process= DNA integration
  Homolog annotation: Hit_ID=Q8GZY5; Match level="QueryCoverage=65%, HitCoverage=18%, E-value=3e-76, Identity=74%"; Hit description =Putative gag-pol polyprotein
  Pfam annotation: Domain name=PPR; Domain location=34-68; Score=23.1; E_value=0.0012; Accession=PF01535.12; Description=PPR repeat
  Pfam annotation: Domain name=PPR; Domain location=72-106; Score=1.2; E_value=6.5; Accession=PF01535.12; Description=PPR repeat
  Pfam module annotation: Pfam domain module=PPR::PPR; Domain location =34-68::72-106
WSILMDIHGTSQNRDGAVQALRRMQRIGIRLNVSAYTVAIKACVENKDLKLALHLFDEMKAHQLKHSXVTYKTLLTAHSNYGSLQEVQQCLAIYQEMRKAGYQANDYYLKELIVEWCEGVLSSGSDNRDFYNLDLQPKRKESFNLFLEKVVTVLQKDVDHNQIVDVRGLSKVEARIVVLSVLRKIKEQYLLGRAVQDDVVIITGHDKTSRTEVETSAVDVEHAIVTVLTDDLGLEVLIGPGSWPPVSAKPKAPTKSISNLEQVSNKVTRRPQGVIKIPVNSLNHWLKKKAVRVVQ

SEQ ID NO: 74191 - protein, 227 aa, Setaria italica
  Transcript Sequence Number=SeqID_8217
  Gene Ontology: Mol. function=nucleic acid binding
  Homolog annotation: Hit_ID=B9SGS7; Match level="QueryCoverage=96%, HitCoverage=29%, E-value=2e-53, Identity=47%"; Hit description =Pentatricopeptide repeat-containing protein, putative
  Pfam annotation: Domain name=PPR; Domain location=128-161; Score=4.9; E_value=2.3; Accession=PF01535.12; Description=PPR repeat
  Pfam annotation: Domain name=PPR; Domain location=162-196; Score =18.7; E_value=0.024; Accession=PF01535.12; Description=PPR repeat
  Pfam annotation: Domain name=PPR; Domain location=26-60; Score=50.3; E_value=7.2e-12; Accession=PF01535.12; Description=PPR repeat
  Pfam annotation: Domain name=PPR; Domain location=61-95; Score=21.1; E_value=0.0046; Accession=PF01535.12; Description=PPR repeat
  Pfam module annotation: Pfam domain module=PPR::PPR::PPR::PPR; Domain location=128-161::162-196::26-60::61-95
ISLSPEQTASNIKEDMQAGGVRLNLVTWSSLINAYANSGLVDRAIEILEEMIRDGCQPTAPCFNIILTACVKSCQYDRAFRLFYSWKKSGIKISLSPEQKSLDGAFTFCKEYPSDGGTILVVPFRPTVTTYNILMKACGTNAERAKSVMNEMRRNGLCPDLISWSILMDIHGTSQNRDGAVQALRRMQRIGIRLNVSAYTVAIKACVENKDLKLALHLFDRNRKHTN

SEQ ID NO: 74192 - protein, 388 aa, Setaria italica
  Transcript Sequence Number=SeqID_8218
  Gene Ontology: Mol. function=acetylglucosaminyltransferase activity; Cellular component=membrane
  Homolog annotation: Hit_ID=B6UFI5; Match level="QueryCoverage=95%, HitCoverage=83%, E-value=0.0, Identity=91%"; Hit description =Acetylglucosaminyltransferase
  Pfam annotation: Domain name=Branch; Domain location=42-267; Score =395.2; E_value=1.1e-115; Accession=PF02485.13; Description=Core-2I -Branching enzyme
YLPFSFSPLPSAASAEPLFVEAKLRQQMRAEDRPPRGAVPRIAYLVSGSAGDGAALRRTLRALYHPANTYVVHLDLEAPAAERAELAAAIRSDPVYARFRNVKVVTRANLVTYRGPTMVANTLHAAAILLREGGDWDWFINLSASDYPLVTQDDLLHVLSELPRQLNFIEHTSDIGWKEYQRAKPVIIDPGLYSLQKSDVFWITEKRSVPTAFKLFTGSAWMMLTHQFIEYCIWGWDNLPRTVLMYYANFLSSPEGYFHTVICNVPEFRNTTVNHDLHFISWDNPPKQHPHYLTLDDFDGMVNSNAPFARKFGREDPVLDKIDQELLGRQPDGFVPGGWTDLLNTTEKGGPFTVEHVQDLRPGPGVDRLKKLVTGLLTQEGFDDKHCL

SEQ ID NO: 74193 - protein, 544 aa, Setaria italica
  misc_feature (33)..(33): Xaa can be any naturally occurring amino acid
  Transcript Sequence Number=SeqID_8219
  Gene Ontology: Cellular component=nucleus; Biological process =regulation of transcription, DNA-dependent
  Homolog annotation: Hit_ID=B9GXE7; Match level="QueryCoverage=74%, HitCoverage=71%, E-value=1e-131, Identity=59%"; Hit description=PAF1 complex component
  Pfam annotation: Domain name=Paf1; Domain location=153-544; Score =0.8; E_value=1.4e-10; Accession=PF03985.5; Description=Paf1
  Subcellular localization annotation: CTP_CleavageSite=65; ConfidenceScore=5.41e-01
MYYQPPPPPYGGNSNPPPPPPSVPPPPPSPPPXAPPPPPPPPAQPPPAQAPPPRKEQQPKAALPRAETEEERRARKKREFEKQRVEDRKQQQMMRESQATVLQKTQQTRPAHQQPSQSRHHHPPGGSRAVATGSRPASAPNAERFENRLKKPTTFLCKHKFRNELPDPSAQLKWLPLNRDKDRYTKYRITSLEKNYMPKMIVPEDLGIPLDLLDMSVYNPPAVQQPLAPEDEELLRDDEVLTPIKQEGIRKKERPTDKGVSWLVKTQYISPLSTDAAKTSLTEKQAKEIRESRMGRNAFLDNLNDREKQIKAIEESFRTAKSRPVHQTKRGMQVEWVMPLLPDFDRYDDPFVMANFDGDPTADSEQYNKLERTARDECESRAVMKSFSVNGSDPTKQEKFLAYMAPAPHELARDLDDEDDIQYSWLREYHWDVRGDDKDDPTTYLVTFDEEEGARYLPLPTKLVLQKKKAKEGRSGDEIEHFPVPSRITVSRTAHGGTMERGESSGMHENSKRRRSPVDDDLDEHPKHSRGEDMEQYSGDEYSE

SEQ ID NO: 74194 - protein, 124 aa, Setaria italica
  Transcript Sequence Number=SeqID_8220
  Gene Ontology: Mol. function=DNA-directed DNA polymerase activity; Cellular component=nucleus; Biological process=nucleobase, nucleoside, nucleotide and nucleic acid metabolic process
  Homolog annotation: Hit_ID=O48653; Match level="QueryCoverage=100%, HitCoverage=8%, E-value=2e-56, Identity=88%"; Hit description=DNA polymerase alpha catalytic subunit
YPYKDPVLPADLRGEHFHALLGTNNSALELFLIKRKIKGPSWLSVSKFVTRPSTQRVSWCKFEVAVDCPKDISVLTTSTSLEAPPVVVAAVNLKTIINEKHNVHEIVSASVICCHRVKIDSPMR

SEQ ID NO: 74195 - protein, 80 aa, Setaria italica
  Transcript Sequence Number=SeqID_8221
  Gene Ontology: Mol. function=pantothenate kinase activity; Biological process=coenzyme A biosynthetic process
  Homolog annotation: Hit_ID=B6SPI3; Match level="QueryCoverage=100%, HitCoverage=45%, E-value=1e-28, Identity=72%"; Hit description =Pantothenate kinase family protein
LIVSVCPSFLVSLYQIGLPASTTAASFGKVNSNKLSDYKMEDLAAALLNSFTYNIGQIAYFVANLSGLKRIFFRGAYVCG

SEQ ID NO: 74196 - protein, 622 aa, Setaria italica
  Transcript Sequence Number=SeqID_8222
  Gene Ontology: Mol. function=pantothenate kinase activity; Cellular component=cytoplasm; Biological process=coenzyme A biosynthetic process
  Homolog annotation: Hit_ID=B6SPI3; Match level="QueryCoverage=99%, HitCoverage=91%, E-value=0.0, Identity=90%"; Hit description =Pantothenate kinase family protein
  Pfam annotation: Domain name=Fumble; Domain location=3-319; Score =407.5; E_value=2.3e-119; Accession=PF03630.6; Description=Fumble
  Pfam annotation: Domain name=Fumble; Domain location=321-542; Score =180.4; E_value=5.3e-51; Accession=PF03630.6; Description=Fumble
  Pfam module annotation: Pfam domain module=Fumble::Fumble; Domain location=3-319::321-542
VAGTLIKLVYTASCGGGGSGDGDGDGDGAELRFAKFERRRLQECFDFVRAKGLLGCNGTRSSKENMPLKATGGGAYKFADDFREKLGVCLDKLDEMDSVVSGANFLLQNIPGAAFTHMNGQRNPVDVSPNNLFPYLLVNIGSGVSILKVTGNRKFERVTGTHIGGGTMFGLAKLLTGCKSYDEFLQLSQKGDNFVLDLIVKDICGELVCQKQGLSMSTLASSFGKVITSKKKLTDYKPEDLASTLLSAFTYNIAQIAFLVASLLGLRRVFFGGSYIRGHKSTMENISFAIDFWSQSQMQAVFLRHEGYLGALGALMSYGDLSGENLTLEESKEKEPHHEATAPVDGISADEENDSNIFPYLLVNIGSGVSMIEVIGKGKFERIIGSHLGGGTILGLARLLTGCSSYEEFLELSQRGNNLSVDLTVGDIYGEEGYPKIGLPASTTAASFGKVNSNKLSDYKMEDLAAALLNSFTYNIGQIAYFVANLSGLKRIFFRGAYVCGHEKTMDKISRSLKYWSKGEVETTFLCHEGFLGTLGAFWSYENMGIDSLAAHEVIREVLLGAPYTGQFPSLPVTEQQENGENNTLEGEVESLRHENAALKAEVERLQRENVELRAKLGAATL

SEQ ID NO: 74197 - protein, 57 aa, Setaria italica
  Transcript Sequence Number=SeqID_8223
  Gene Ontology: Mol. function=glycine hydroxymethyltransferase activity; Cellular component=phagocytic vesicle; Biological process =one-carbon compound metabolic process
  Homolog annotation: Hit_ID=B8LLP6; Match level="QueryCoverage=92%, HitCoverage=11%, E-value=3e-24, Identity=90%"; Hit description =Serine hydroxymethyltransferase
RPMDFRPKLIICGGSAYPRDWDYARLRAIADKCGAMLLCDMAHISGLVAAQEALKSS

SEQ ID NO: 74198 - protein, 143 aa, Setaria italica
  Transcript Sequence Number=SeqID_8224
  Gene Ontology: Mol. function=glycine hydroxymethyltransferase activity; Cellular component=phagocytic vesicle; Biological process =one-carbon compound metabolic process
  Homolog annotation: Hit_ID=Q2QT32; Match level="QueryCoverage=99%, HitCoverage=26%, E-value=1e-75, Identity=95%"; Hit description =Serine hydroxymethyltransferase
  Pfam annotation: Domain name=SHMT; Domain location=1-143; Score= -24.8; E_value=6.2e-15; Accession=PF00464.11; Description=Serine hydroxymethyltransferase
TSGNFTSLAVMEALGSPLTNKYSEGMPGARYYGGNEVIDEVEELCRARALAAFHLDPARWGVNVQPYSGSPANFAAYTGLLQPHDRIMGLDLPSGGHLTHGYYTAGGKKISATSIYFESLPYKVSSDTGYVDYDRLEEKAMDF

SEQ ID NO: 74199 - protein, 486 aa, Setaria italica
  Transcript Sequence Number=SeqID_8225
  Gene Ontology: Mol. function=glycine hydroxymethyltransferase activity; Cellular component=phagocytic vesicle; Biological process =one-carbon compound metabolic process
  Homolog annotation: Hit_ID=Q2QT32; Match level="QueryCoverage=95%, HitCoverage=87%, E-value=0.0, Identity=89%"; Hit description=Serine hydroxymethyltransferase
  Pfam annotation: Domain name=Aminotran_1_2; Domain location=55-427; Score=-102.3; E_value=0.04; Accession=PF00155.13; Description =Aminotransferase class I and II
  Pfam annotation: Domain name=SHMT; Domain location=27-427; Score =896.5; E_value=1.4e-266; Accession=PF00464.11; Description=Serine hydroxymethyltransferase
  Pfam module annotation: Pfam domain module=Aminotran_1_2::SHMT; Domain location=55-427::27-427
AAAVFTASAPIAAAAMDAVADWGLTPLSEADPEVYDLIEREKRRQRAGIELIASENFTSLAVMEALGSPLTNKYSEGMPGARYYGGNEVIDEVEELCRARALAAFHLDPARWGVNVQPYSGSPANFAAYTGLLQPHDRIMGLDLPSGGHLTHGYYTAGGKKISATSIYFESLPYKVSSDTGYVDYDRLEEKAMDFRPKLIICGGSAYPRDWDYARLRAIADKCGAMLLCDMAHISGLVAAQEALNPFEYADVITTTTHKSLRGPRSGMIFYRKGPKPPKKGQPEGSLYDYEDKINFAVFPSLQGGPHNHQIAALAVALKQSMSPGFKAYIQQVKANAVALGNHLMSKGYKLVTDGTENHLVLWDLRPLGLTGNKVELLCDLCSITLNKNAVFGDSSALSPGGVRIGTPAMTSRGLVEKDFVQIAEYLHQAVTICLKVQEGHGKILKDFKKGLVNNQDIEDLRAEVEKFATSFEMPGFRVSDMKYKD

SEQ ID NO: 74200 - protein, 472 aa, Setaria italica
  misc_feature (264)..(264): Xaa can be any naturally occurring amino acid
  Transcript Sequence Number=SeqID_8226
  Gene Ontology: Mol. function=glycine hydroxymethyltransferase activity; Cellular component=phagocytic vesicle; Biological process =one-carbon compound metabolic process
  Homolog annotation: Hit_ID=Q0ISV6; Match level="QueryCoverage=100%, HitCoverage=100%, E-value=0.0, Identity=92%"; Hit description=Serine hydroxymethyltransferase
  Pfam annotation: Domain name=Aminotran_1_2; Domain location=40-409; Score=-94.5; E_value=0.017; Accession=PF00155.13; Description =Aminotransferase class I and II
  Pfam annotation: Domain name=SHMT; Domain location=12-413; Score =888.6; E_value=3.2e-264; Accession=PF00464.11; Description=Serine hydroxymethyltransferase
  Pfam module annotation: Pfam domain module=Aminotran_1_2::SHMT; Domain location=40-409::12-413
MDPVATWGLTPLAGADPEIYDLLEREKRRQRRGIELIASENFTSFAVMEALGSPLTNKYSEGMPGARYYGGNDVIDEIENLCRSRALAAFRLDPAAWGVNVQPYSGSPANFAAYTALLNPHDRIMGLDLPSGGHLTHGYYTAGGKKISATSIYFESLPYKVSAATGYIDYEKLEEKALDFRPKLIICGGSAYPRDWDYARLRAVADKVGALLLCDMAHISGLVAAQEAANPFEYCDVVTTTTHKSLRGPRAGMIFYRKGPKPPXKKGQPEGALYDYEDKINFAVFPSLQGGPHNHQIAALAVALQQTMTPGFKAYAKQVKANAVAIGNYLMSKGYKMVTDGTENHLVLWDLRPLGLTGNKVEKLCDLCHITLNKNAVFGDSSALAPGGVRIGAPAMTSRGLVEKDFEQIGEFLHRAVTICLSIQKEYGKLLKDFNKGLVNNKDIENLKAEVEKFADSFDMPGFTLESMKYKE

SEQ ID NO: 74201 - protein, 474 aa, Setaria italica
  misc_feature (192)..(192): Xaa can be any naturally occurring amino acid
  misc_feature (265)..(265): Xaa can be any naturally occurring amino acid
  misc_feature (394)..(394): Xaa can be any naturally occurring amino acid
  Transcript Sequence Number=SeqID_8227
  Gene Ontology: Mol. function=glycine hydroxymethyltransferase activity; Cellular component=phagocytic vesicle; Biological process =one-carbon compound metabolic process
  Homolog annotation: Hit_ID=Q0ISV6; Match level="QueryCoverage=100%, HitCoverage=100%, E-value=0.0, Identity=92%"; Hit description=Serine hydroxymethyltransferase
  Pfam annotation: Domain name=Aminotran_1_2; Domain location=33-407; Score=-102.3; E_value=0.04; Accession=PF00155.13; Description =Aminotransferase class I and II
  Pfam annotation: Domain name=SHMT; Domain location=12-415; Score =869.0; E_value=2.6e-258; Accession=PF00464.11; Description=Serine hydroxymethyltransferase
  Pfam module annotation: Pfam domain module=Aminotran_1_2::SHMT; Domain location=33-407::12-415
MDPVATWGLTPLAGADPEIYDLLEREKRRQRRGIELIASENFTSFAVMEALGSALTNKYSEGMPGARYYGGNDVIDEIENLCRSRALAAFRLDPASWGVNVQPYSGSPANFAAYTALLNPHDRIMGLDLPSGGHLTHGYYTSGGKKISATSIYFESLPYKVSATTGYIDYEKLEEKALDFRPKLIICGGSAXYPRDWDYARLRAVADKVGALLLCDMAHISGLVAAQEAANPFEYCDVVTTTTHKSLRGPRAGMIFYRKGPKPPXKKGQPEGAVYDYEDKINFAVFPSLQGGPHNHQIAALAVALQQTMTPGFKAYAKQVKANAVAIGNYLMSKGYKMVTDGTENHLVLWDLRPLGLTGNKVEKLCDLCHITLNKNAVFGDSSALSPGGVRIGXPPAMTSRGLVEKDFEQIGEFLHRAVTICLNIQKEHGKLLKDFNKGLVNNKDIENLKAEVEKFADSFDMPGFTLESMKYKE

SEQ ID NO: 74202 - protein, 115 aa, Setaria italica
  Transcript Sequence Number=SeqID_8228
  Gene Ontology: Mol. function=hydrolase activity, acting on acid anhydrides, in phosphorus-containing anhydrides; Cellular component =nucleus; Biological process=nucleobase, nucleoside, nucleotide and nucleic acid metabolic process
  Homolog annotation: Hit_ID=Q8W4M7; Match level="QueryCoverage=100%, HitCoverage=15%, E-value=4e-31, Identity=58%"; Hit description=DNA repair helicase UVH6
MRFDLDGMPVHFPYAAIYPEQHAYMGELKRALDARGHALLEMPTGTGKTAALISLITSYSLANPSRPLRLIYCTRTVHEMEKTLAELRLLFAHLPPAASRSLLALGLSSRKNLCV

SEQ ID NO: 74203 - protein, 95 aa, Setaria italica
  misc_feature (8)..(8): Xaa can be any naturally occurring amino acid
  Transcript Sequence Number=SeqID_8229
  Gene Ontology: Mol. function=metal ion transmembrane transporter activity; Cellular component=membrane; Biological process=metal ion transport
  Homolog annotation: Hit_ID=C1KC70; Match level="QueryCoverage=84%, HitCoverage=28%, E-value=2e-37, Identity=96%"; Hit description=ZIP -like protein 1
GKQADDGXSGKDMMRKHRRQVLFSGIITAVGISLHNFPEGMAVFLGSVKGLHVGLNLAVAIALHNIPEGVAVALPIYFATKRYLFSHGDSHGEWS

SEQ ID NO: 74204 - protein, 210 aa, Setaria italica
  misc_feature (54)..(54): Xaa can be any naturally occurring amino acid
  Transcript Sequence Number=SeqID_8230
  Gene Ontology: Mol. function=metal ion transmembrane transporter activity; Cellular component=membrane; Biological process=metal ion transport
  Homolog annotation: Hit_ID=C1KC70; Match level="QueryCoverage=100%, HitCoverage=78%, E-value=6e-98, Identity=81%"; Hit description=ZIP -like protein 1
  Pfam annotation: Domain name=Zip; Domain location=7-197; Score=-83.4; E_value=0.015; Accession=PF02535.14; Description=ZIP Zinc transporter
AHNAMNSIGFLKGNLWFFAGVLFFGFIVKFIPEPDFSPEADPSEKKFSLYDLRXQADDGGSGKDMMRKHRRQVLFSGIITAVGISLHNFPEGMAVFLGSVKGVAVALPIYFATKSKWKAFYMAAGSGLAEPVGVIAVAYLFPSSLNPDILEGLLGSVGGVMAFLTLHEMLPLAFDYCGQKRAVKAVFVGMACMSASLYFLEISLPKEISL

SEQ ID NO: 74205 - protein, 52 aa, Setaria italica
  misc_feature (12)..(12): Xaa can be any naturally occurring amino acid
  misc_feature (28)..(28): Xaa can be any naturally occurring amino acid
  Transcript Sequence Number=SeqID_8231
IVYSIQIINIVXNLQPTGYFAYQHDFSXYINLQNPCSPHFLLVAHFLLVDQI

SEQ ID NO: 74206 - protein, 196 aa, Setaria italica
  Transcript Sequence Number=SeqID_8232
  Gene Ontology: Mol. function=DNA binding; Biological process =regulation of transcription
  Homolog annotation: Hit_ID=Q01JG1; Match level="QueryCoverage=96%, HitCoverage=56%, E-value=4e-61, Identity=63%"; Hit description =H0502G05.5 protein
  Pfam annotation: Domain name=NAM; Domain location=1-73; Score=110.0; E_value=7.8e-30; Accession=PF02365.7; Description=No apical meristem (NAM) protein
NEWYFFSHKDKKYPTGTRTNRATTAGFWKATGRDKPIYVKNCLVGMRKTLVFYKGRAPNGQKSDWIMHEYRLETHETGIPHEEGWVVCRVFRKRLATVQRMAGDSPYWFNDHAGFMAPELGSPRQVAHHQQSAVMYHRAQSSYPCKVELDYHHLLPQEHFLQQLPQLESPNKLPDLIGHVATTLQPCSLTPEHGAA

SEQ ID NO: 74207 - protein, 107 aa, Setaria italica
  Transcript Sequence Number=SeqID_8233
ANSFLPDLLKHGTSASLIRCESIVVLIHPPFHSLTKLTVSYKWSIKKMCKHRVKMVQNACSVGVTTPLGEHQCNTEIFVQSFDFTRALFPCKKKVFHACSKEDTQIL

SEQ ID NO: 74208 - protein, 72 aa, Setaria italica
  Transcript Sequence Number=SeqID_8234
PEENRTRFLPAGNGNIKVVSPFPPLLCYVLLLFTYIRFPRSSEMIDEELRRVLAFYLTHLCILFLWSYHVYP

SEQ ID NO: 74209 - protein, 105 aa, Setaria italica
  Transcript Sequence Number=SeqID_8235
  Gene Ontology: Mol. function=glutathione transferase activity
  Homolog annotation: Hit_ID=Q3MUP2; Match level="QueryCoverage=98%, HitCoverage=46%, E-value=2e-31, Identity=62%"; Hit description =Glutathione-S-transferase
  Pfam annotation: Domain name=GST_C; Domain location=1-79; Score=21.0; E_value=0.00069; Accession=PF00043.17; Description=Glutathione S -transferase, C-terminal domain
KAGSEPQLQARREMVEALRILEAELGDKPYLAGEAFGFVDLAIVPFAAWFLGYGRLGEFSVEEVCPRLAAWGERCGERESVARSLHPPEKVYEFIGYLKDKYGDK

SEQ ID NO: 74210 - protein, 55 aa, Setaria italica
  Transcript Sequence Number=SeqID_8236
  Homolog annotation: Hit_ID=B6U683; Match level="QueryCoverage=76%, HitCoverage=25%, E-value=1e-17, Identity=92%"; Hit description=ATP binding protein
FLGSDVIKMFAPFGKIAAEDFLWHTRGPKQGEPRGYAFVQYTTKEVRVVFFSCGK

SEQ ID NO: 74211 - protein, 135 aa, Setaria italica
  misc_feature (62)..(62): Xaa can be any naturally occurring amino acid
  misc_feature (106)..(106): Xaa can be any naturally occurring amino acid
  Transcript Sequence Number=SeqID_8237
  Homolog annotation: Hit_ID=B6U683; Match level="QueryCoverage=91%, HitCoverage=52%, E-value=1e-32, Identity=59%"; Hit description=ATP binding protein
ISNQLELQDVKGLEGDKLENRLYVGNLDFRISEWVTYFFVYLVACSFHGSPSPLRSANQHLXALFFRSDVIKMFAPFGKIAAEDFLWHTRGPKQGEPRGYAFVNTXQGVSMQEAQLAKEKMNGKLVCGRPMVFTG

SEQ ID NO: 74212 - protein, 160 aa, Setaria italica
  Transcript Sequence Number=SeqID_8238
  Gene Ontology: Mol. function=nucleic acid binding
  Homolog annotation: Hit_ID=B6U683; Match level="QueryCoverage=95%, HitCoverage=91%, E-value=1e-62, Identity=79%"; Hit description=ATP binding protein
  Pfam annotation: Domain name=RRM_1; Domain location=9-81; Score=48.8; E_value=2.1e-11; Accession=PF00076.14; Description=RNA recognition motif. (a.k.a. RRM, RBD, o
VLVVIRSSYCWNLDFRISESDVIKMFAPFGKIAAEDFLWHTRGPKQGEPRGYAFVQYTTKEEAQLAKEKMNGKLVCGRPMVVHLASEKSSLDSGPSQRALKDKKLTGGSASRSVQTDRAAKVSAIKSKLKSLEEEGCSTKKPRLTPNDLTGTREHSHKKF

SEQ ID NO: 74213 - protein, 120 aa, Setaria italica
  Transcript Sequence Number=SeqID_8239
  Gene Ontology: Mol. function=nucleic acid binding; Cellular component= nucleus; Biological process=mRNA processing
  Homolog annotation: Hit_ID=B6U683; Match level="QueryCoverage=99%, HitCoverage=71%, E-value=5e-51, Identity=84%"; Hit description=ATP binding protein
  Pfam annotation: Domain name=RRM_1; Domain location=15-88; Score =68.4; E_value=2.6e-17; Accession=PF00076.14; Description=RNA recognition motif. (a.k.a. RRM, RBD, o
MDVKGLEGDKLENRLYVGNLDFRISESDVIKMFAPFGKIAAEDFLWHTRGPKQGEPRGYAFVQYTTKEEAQLAKEKMNGKLVCGRPMVVHLASEKSSLDSGPSQRALKDKKLTGGSASRF

SEQ ID NO: 74214 - protein, 102 aa, Setaria italica
  Transcript Sequence Number=SeqID_8240
  Homolog annotation: Hit_ID=B9SZ13; Match level="QueryCoverage=81%, HitCoverage=39%, E-value=7e-29, Identity=68%"; Hit description =Transcription factor, putative (Fragment)
NVISDLPGFTRSVFKRDHALITPESHVFGPLPDWINTLGAYLISPAIGAHFTMYLANMQDGSKSALPPKDVERLVFVLQGSILLSAGTETTHSLSNSLSIGG

SEQ ID NO: 74215 - protein, 163 aa, Setaria italica
  Transcript Sequence Number=SeqID_8241
  Homolog annotation: Hit_ID=B9SZ13; Match level="QueryCoverage=85%, HitCoverage=66%, E-value=2e-45, Identity=63%"; Hit description =Transcription factor, putative (Fragment)
  Pfam annotation: Domain name=Cupin_2; Domain location=41-109; Score =9.8; E_value=0.033; Accession=PF07883.3; Description=Cupin domain
FKRDHALITPESHVFGPLPDWINTLGAYLISPAIGAHFTMYLANMQDGSKSALPPKDVERLVFVLQGSILLSAGTETTHSLSVDSYAYLPANLEHSMISDESTTLVIFERRYSATEDSHPDLIVGSTDKQPLLETPGEVFQLRKLLPTSMPYDFNIHIMDFQP

SEQ ID NO: 74216 - protein, 308 aa, Setaria italica
  misc_feature (289)..(289): Xaa can be any naturally occurring amino acid
  Transcript Sequence Number=SeqID_8242
  Homolog annotation: Hit_ID=A8J2H3; Match level="QueryCoverage=89%, HitCoverage=89%, E-value=2e-70, Identity=51%"; Hit description =Glyoxylate induced protein
  Pfam annotation: Domain name=Cupin_2; Domain location=113-181; Score =9.8; E_value=0.033; Accession=PF07883.3; Description=Cupin domain
  Pfam annotation: Domain name=Cupin_2; Domain location=229-300; Score =23.9; E_value=0.00066; Accession=PF07883.3; Description=Cupin domain
  Pfam module annotation: Pfam domain module=Cupin_2::Cupin_2; Domain location=113-181::229-300
MASTPIRSLFLFVLAASLRCGAAAGYGDAGEGFCSAEPSSGCSGGPPLYWKATHPTLAPAHLQDLPGFTRSVFKRDHALITPESHVFGPLPDWINTLGAYLISPAIGAHFTMYLANMQDGSKSALPPKDVERLVFVLQGSILLSAGTETTHSLSVDSYAYLPANLEHSMISDESTTLVIFERRYSATEDSHPDLIVGSTDKQPLLETPGEVFQLRKLLPTSMPYDFNIHIMDFQPGEYLNVKEVHYNQHGLLLLEGQGIYRLGDSWYPVQAGDTIWMAPFVPQWYAALXGKTRTRYLLYKDVNRNPLI

SEQ ID NO: 74217 - protein, 73 aa, Setaria italica
  Transcript Sequence Number=SeqID_8243
YSPCRRTRIRLCGNCRWIIPLLVITDMRPHSLSHSHSRTLGNRHLYILDMKDLLVLGFLFPYRRAPAAAAAAA

SEQ ID NO: 74218 - protein, 153 aa, Setaria italica
  misc_feature (20)..(20): Xaa can be any naturally occurring amino acid
  misc_feature (42)..(42): Xaa can be any naturally occurring amino acid
  Transcript Sequence Number=SeqID_8244
EHDLKEPCSTSSEGDEQQKXRPGDVKLFGKILSHQSSLQKSXPPCNGNKSKPPSPKIDISSVRSLNNPRDRVVCSSRPGITHLGLEERTAKSYGHLDGSTTQPEPLLMMAKCQSLAGVPFCTSKDGTVGVFSDYQQPSIQPHQSDPKRLERFY

SEQ ID NO: 74219 - protein, 92 aa, Setaria italica
  Transcript Sequence Number=SeqID_8245
CKTIVPSSSSPRARTMAAHPEVQIQVYILSRYFINNKAPLGSGTDAFPDGLCLHSVEVLHQTNKAPLGSGTDAFLSLLSRAWFEHSSIWEAS

SEQ ID NO: 74220 - protein, 96 aa, Setaria italica
  Transcript Sequence Number=SeqID_8246
  Gene Ontology: Mol. function=metal ion binding; Biological process =metal ion transport
  Homolog annotation: Hit_ID=Q8LGG1; Match level="QueryCoverage=100%, HitCoverage=62%, E-value=5e-25, Identity=59%"; Hit description =Farnesylated protein (ATFP6)
  Pfam annotation: Domain name=HMA; Domain location=29-91; Score=46.4; E_value=1.1e-10; Accession=PF00403.18; Description=Heavy-metal -associated domain
MGIVDVVSEYCSLPRTRRHLKKRKQFQTVEMKVLIDCDGCERKVRKALEGMKGVSSVDVAARQHKVTVTGYVDAGKVMRRVAYKTGKRVEPWPYVP

SEQ ID NO: 74221 - protein, 46 aa, Setaria italica
  Transcript Sequence Number=SeqID_8247
  Gene Ontology: Mol. function=metal ion binding; Biological process =metal ion transport
  Homolog annotation: Hit_ID=Q67ZW1; Match level="QueryCoverage=100%, HitCoverage=32%, E-value=8e-12, Identity=70%"; Hit description=Atfp6- like protein
AYDKPPGYVRNVVADPTAAPLARASSTEVRYAAAFSDENPNTCAVM

SEQ ID NO: 74222 - protein, 830 aa, Setaria italica
  Transcript Sequence Number=SeqID_8248
  Gene Ontology: Mol. function=DNA binding; Cellular component=nucleus; Biological process=regulation of transcription
  Homolog annotation: Hit_ID=Q1W3Z6; Match level="QueryCoverage=15%, HitCoverage=5%, E-value=7e-16, Identity=35%"; Hit description =Silencing mediator for retinoid and thyroid hormone receptor
  Pfam annotation: Domain name=Myb_DNA-binding; Domain location=477 -522; Score=40.6; E_value=6.3e-09; Accession=PF00249.23; Description =Myb-like DNA-binding domain
  Pfam annotation: Domain name=Myb_DNA-binding; Domain location=687 -732; Score=28.2; E_value=3.5e-05; Accession=PF00249.23; Description =Myb-like DNA-binding domain
  Pfam module annotation: Pfam domain module=Myb_DNA-binding::Myb_DNA -binding; Domain location=477-522::687-732
PAPVPAPAFCTSPVDTPSSAPPYCTSAPEDKSCEQTGTVTNPTKDVPEAADKAVNNEFSINLDQLGDDPINSLANMLADLLQHDDSCSGDSKGPTSTSKLLLLKESISKEIEKTELEIDLLEGELKSVNTEAGTAVEGSPTGVTYAENLSPSSGTSKVPESAEISQASHVMKEPGELIPSPKPPVVQDADVKGADMMEIEPAPVRNAKTLSSEESAVSPGVAEGPVCAAADLSPLKASERAGSQNDMHNDRLETSSCHVNADSIKTEISDDIPVTQCSDHDHKYSLFGSVTSANNNIAKVMNESLFKSLPADTPHLDLLASSHLLSQRKNDHHIRERLGVCKNRLRLKEQILTLKFKAYRHLWKEDLRLLSAKKQRPKSNKRIDQSNRTSHIGSQRQRSSNRSRLAMPAGNLSTFSTPEMSDVASKLFSEFQIKRCRNYLKMPALIIDEREKERSRFVSKNGFVDDPVLVEKERVMINPWTQEEKEIFMEMFAKFGKDFSKISSFLMHKTTADCVEFYYKHHKSDSFREVKKLLDLRQQQPASNFLGAKSGKKWNPEANAASLDMLGVASVVAAHGLEYANRVEKISAKSLIRTAYGSNVSFAAKKSSDMECIDNVPLHERESVAADVLAGICSTLSPEGMGSCITSSADPGQKISMTRMEHGLAPEIDRSIDEEDTLSDQECEVDPVDWNDDEKSVFIEAMNNYGKDFARISSCVKSKSYEQCKVFFSKARKSLGLDLIHQGAADVSMPTSDTNGGRSDTDEACAAEMDSAICSTQSCSEIEKDVCPTEKAIGGIITKQPELNISNGFDVVDGKTEEDEKKADKKLQYC

SEQ ID NO: 74223 - protein, 592 aa, Setaria italica
  Transcript Sequence Number=SeqID_8249
  Gene Ontology: Mol. function=DNA binding
MPTSDTNGGRSDTDEACAAEMDSAICSTQSCSEIEKDVCPTEKAIGGIITKQPELNISNGFDVVDGKTEEDEKKADKNCSIVDHGRFNEDTHQVACGTIDINCPESTEKLQGKDDVVDQVNMQNNSAISSSPEQAMAAHPEVRSSLHSVEVLHQTNKAPLGSGTDASQMEECSNQALDNKLRKAGNSGASACIASDISTKDNVHFANMTGASTISPAFPPSYKHSVPADMPPTKPKPLVTPLTPKDLMPVQFSSAVPDPTVICFDGIASITMPNFDDSGNRVSSALGAKDMSKYPAFKDPTGNQHDALFRNVDGYTNHLTTKLPFFSERTASGTVSTSQTDRFTLTKFQNGRSSSLGLPNTSDGIQWARKHEEVLQGSLRSCSHNTSSEGDEQQKRPGDVKLFGKILSHQSSLQSPVPPCNGNKSKPPSPKIDISSVRSLNNPRDRVVCSSRPGITHLGLEERTAKSYGHLDGSTTQPEPLLMMAKCQSLAGVPFYSAKNGTVGVFSDYQQPSIQPHQSDPKRLERFSDPQKRNGVEFISGFQQPSKISRFGGAGILVSGVSDPVAALKAQYGPGSKVMGSDVDPWKDIGSR

SEQ ID NO: 74224 - protein, 155 aa, Setaria italica
  Transcript Sequence Number=SeqID_8250
  Gene Ontology: Mol. function=metal ion binding; Biological process =metal ion transport
  Homolog annotation: Hit_ID=Q67ZW1; Match level="QueryCoverage=89%, HitCoverage=94%, E-value=5e-52, Identity=68%"; Hit description=Atfp6- like protein
  Pfam annotation: Domain name=HMA; Domain location=29-91; Score=46.4; E_value=1.1e-10; Accession=PF00403.18; Description=Heavy-metal -associated domain
MGIVDVVSEYCSLPRTRRHLKKRKQFQTVEMKVLIDCDGCERKVRKALEGMKGVSSVDVAARQHKVTVTGYVDAGKVMRRVAYKTGKRVEPWPYVPYDVVAHPYAPGAYDKKAPPGYVRNVVSDPTAAPLARASSTEVRYTGAFSDENPNACAVM

SEQ ID NO: 74225 - protein, 814 aa, Setaria italica
  misc_feature (172)..(172): Xaa can be any naturally occurring amino acid
  misc_feature (180)..(180): Xaa can be any naturally occurring amino acid
  misc_feature (305)..(305): Xaa can be any naturally occurring amino acid
  Transcript Sequence Number=SeqID_8251
  Gene Ontology: Mol. function=protein kinase activity; Cellular component=plasma membrane; Biological process=protein amino acid phosphorylation
  Homolog annotation: Hit_ID=Q8RUT5; Match level="QueryCoverage=97%, HitCoverage=92%, E-value=0.0, Identity=48%"; Hit description =Putative receptor-like protein kinase
  Pfam annotation: Domain name=LRR_1; Domain location=10-32; Score =14.4; E_value=0.48; Accession=PF00560.25; Description=Leucine Rich Repeat
  Pfam annotation: Domain name=LRR_1; Domain location=106-128; Score =11.9; E_value=1.6; Accession=PF00560.25; Description=Leucine Rich Repeat
  Pfam annotation: Domain name=LRR_1; Domain location=130-152; Score =6.9; E_value=15; Accession=PF00560.25; Description=Leucine Rich Repeat
  Pfam annotation: Domain name=LRR_1; Domain location=154-176; Score =14.8; E_value=0.36; Accession=PF00560.25; Description=Leucine Rich Repeat
  Pfam annotation: Domain name=LRR_1; Domain location=178-200; Score =13.7; E_value=0.74; Accession=PF00560.25; Description=Leucine Rich Repeat
  Pfam annotation: Domain name=LRR_1; Domain location=225-247; Score =11.7; E_value=1.8; Accession=PF00560.25; Description=Leucine Rich Repeat
  Pfam annotation: Domain name=LRR_1; Domain location=249-271; Score =14.9; E_value=0.35; Accession=PF00560.25; Description=Leucine Rich Repeat
  Pfam annotation: Domain name=LRR_1; Domain location=273-295; Score =2.6; E_value=98; Accession=PF00560.25; Description=Leucine Rich Repeat
  Pfam annotation: Domain name=LRR_1; Domain location=297-319; Score =7.7; E_value=10; Accession=PF00560.25; Description=Leucine Rich Repeat
  Pfam annotation: Domain name=LRR_1; Domain location=321-343; Score =17.6; E_value=0.054; Accession=PF00560.25; Description=Leucine Rich Repeat
  Pfam annotation: Domain name=LRR_1; Domain location=34-56; Score =16.3; E_value=0.13; Accession=PF00560.25; Description=Leucine Rich Repeat
  Pfam annotation: Domain name=LRR_1; Domain location=345-367; Score =14.1; E_value=0.6; Accession=PF00560.25; Description=Leucine Rich Repeat
  Pfam annotation: Domain name=LRR_1; Domain location=369-392; Score =11.1; E_value=2.3; Accession=PF00560.25; Description=Leucine Rich Repeat
  Pfam annotation: Domain name=LRR_1; Domain location=58-80; Score =12.3; E_value=1.3; Accession=PF00560.25; Description=Leucine Rich Repeat
  Pfam annotation: Domain name=LRR_1; Domain location=82-104; Score =12.5; E_value=1.2; Accession=PF00560.25; Description=Leucine Rich Repeat
  Pfam annotation: Domain name=Pkinase; Domain location=530-799; Score =124.4; E_value=3.8e-34; Accession=PF00069.17; Description=Protein kinase domain
  Pfam annotation: Domain name=Pkinase_Tyr; Domain location=530-799; Score=87.4; E_value=4.9e-23; Accession=PF07714.9; Description =Protein tyrosine kinase
  Pfam module annotation: Pfam domain module=LRR_1::LRR_1::LRR_1::LRR _1::LRR_1::LRR_1::LRR_1::LRR_1::LRR_1::LRR_1::LRR_1::LRR_1::LRR _1::LRR_1::LRR_1::Pkinase::Pkinase_Tyr; Domain location=10-32::106 -128::130-152::154-176::...
  Pfam module annotation: Domain location=178-200::225-247::249 -271::273-295::297-319::321-343::34-56::345-367::369-392::58-80::82 -104::530-799::530-799
GALPDALPPRLRALDLSGNAISSGIPASLASCESLVSLNLSRNQLTGPVPDGIWSLPSLRSVDFSGNLLSGSVPGGFPRSSSLRVVDLSRNLLEGEIPADVGEAGLLKLLDFGHNSLTGGLPESLRGLSGLSSLGAGGNALSGELPAWIGEMAALERLDLSGNHFVGDIPDXISACRNLXNVDLSRNKLTGELPWWVFGLALQRASLAGNALSGWVKVPSDAAAALEGLDLSSNAFTGAIPPEIATLARLQHLNLSLNSLSGQLPASIGRMLLLEVLDVSANKLDGVVPLEIGGAVALRELLMGXNSLTGGIPVQIGTCNSLITLDLSHNKLTGPIPMSMGNLTSLQTVDLSENMLNGTLPTELSDLASLRLFNVSHNLLSGSLPISRFFDSIPYSFISDNAGLCSSQKNSSCNGVMPKPIVFNPNSSSDPLSDVAPSYPNNQHQKKMILSISTLIAIVGGAVIVIGVVTITVLNRRARATAPRSALPTALSDDYHSQSAESTNNETKSSKLVMFGRGSSDFSTDGHALLNKDCELGRGGFGTVYKAVLRDGQPVAIKKLTVSSLVKSEDDFKQHVKLLGKVRHHNIVTLRGFYWTSSLQLLIYEFMPAGSLHQHLHECSEESSLSWMERFDIIIGVARALVYLHRHGIIHFNLKSSNVLLDTNGEPRVGDYGLVNLLPMLDRYVLSSKIQSALGYMAPEFTCRTANVTEKCDVYSFGVLILEILTGRRPIEYLEDDIIVLSDLVRGAVEEDRLEDCMDPRLSGEFSMDEATLIIKLGLVCTSQVPSQRPDMSEVVSMLEMVRSPQGTPEDDLV

SEQ ID NO: 74226 - protein, 102 aa, Setaria italica
  Transcript Sequence Number=SeqID_8252
  Gene Ontology: Cellular component=cytoplasm
  Homolog annotation: Hit_ID=Q2QV94; Match level="QueryCoverage=100%, HitCoverage=12%, E-value=1e-25, Identity=61%"; Hit description =Exocyst complex component 5
MPTAADPASALPLTLDLEDFKGDFSFDALFGGLVDELLPEYRGEDDAAPAPPPPPLVLGAAPPVFPAVDELLGLFKHSCKELVDLRKQARRVLPDMKKEVAV

SEQ ID NO: 74227 - protein, 86 aa, Setaria italica
  misc_feature (85)..(86): Xaa can be any naturally occurring amino acid
  Transcript Sequence Number=SeqID_8253
SVRCLRRQQATCRDSLSLMRSAPACFCLFCGAVLVYVPTGFVAFASPHHVLTTCQFVSVTHHLVYASVFKFANKKSVNLSPKKKXX

SEQ ID NO: 74228 - protein, 48 aa, Setaria italica
  Transcript Sequence Number=SeqID_8254
LQSRLYNNNFNHIISCPRYLKSVAFVKIIEDGNGIIFATYPFPLFSFW

SEQ ID NO: 74229 - protein, 152 aa, Setaria italica
  Transcript Sequence Number=SeqID_8255
  Pfam annotation: Domain name=DUF1218; Domain location=1-101; Score =24.5; E_value=0.00027; Accession=PF06749.4; Description=Protein of unknown function (DUF1218)
  Subcellular localization annotation: CTP_CleavageSite=40; ConfidenceScore=5.20e-01
ALVTAASGCFGRFGAAALPPERRRGCARNACAAVSWLWVLSAAVSFLYGASRNAGGTGGFTAVRRQPGQNGGGGGLDFVCNELRDGVFASASIQAVIAIACAITAYVDALQQRNRTPTLGVAMGQPNQAPVAYPAQPPYDAYGANKQPAGTA

SEQ ID NO: 74230 - protein, 342 aa, Setaria italica
  misc_feature (270)..(270): Xaa can be any naturally occurring amino acid
  Transcript Sequence Number=SeqID_8256
  Homolog annotation: Hit_ID=B9V0G4; Match level="QueryCoverage=97%, HitCoverage=80%, E-value=7e-62, Identity=42%"; Hit description =Mitochondrial transcription termination factor-like family-1
  Pfam annotation: Domain name=mTERF; Domain location=1-309; Score=4.4; E_value=2.4e-08; Accession=PF02536.6; Description=mTERF
YLVTTCGLTREEAAKAAKCFSHWKSPATPAASLAFLTGPALGLSKADIALLVAKDPRILNSSVDKNLRARLDGFRSHGFSTAQIRSFVRAAPCFFRIFNIDEKLGFWMPLFSPDKFLRIVKRNYYLVSSDLDKVVKTNIRLLQERGLSVQDIDRMCVANPRLLTCNPDVTRAVLVRADELGVPRNSLMFRQAVNSVAGLGPETMASKLKMIGKTLGCSDAEVARMVRMSPQLLRCSREKVQRVYEFLTKMVGVDAKYIQGRPTILIVTSXERRLAPRNYVMKVLQEKGLMRKDLSFYSIITISDKLFYSRYIQAHKDVLPGLANAYASACKGKCPPDACYQG

SEQ ID NO: 74231 - protein, 65 aa, Setaria italica
  misc_feature (59)..(59): Xaa can be any naturally occurring amino acid
  Transcript Sequence Number=SeqID_8257
HADLDMTCGPHVRSTNLLLTHFSPRSLAGSVSAHISAGHSVPCVDAECELAAATATRGXIHGNVA

SEQ ID NO: 74232 - protein, 90 aa, Setaria italica
  Transcript Sequence Number=SeqID_8258
QDLFVSLESGGIGISFHGRPVWLHLELETVFPQVSSVRIISPRHILTLKVEIVSPLTPTRLLPHAAAPRLLPSLPPPPPDSSAAPLPPAP

SEQ ID NO: 74233 - protein, 101 aa, Setaria italica
  Transcript Sequence Number=SeqID_8259
  Gene Ontology: Mol. function=catalytic activity
  Homolog annotation: Hit_ID=B9SK72; Match level="QueryCoverage=93%, HitCoverage=12%, E-value=1e-34, Identity=67%"; Hit description =Nucleic acid binding protein, putative
  Pfam annotation: Domain name=CwfJ_C_1; Domain location=1-73; Score =28.7; E_value=9.4e-07; Accession=PF04677.7; Description=Protein similar to CwfJ C-terminus 1
WLQHESATRTVDQNVCGEIRNFKKCLLKMFAQQDKDVVFMETVISLARQRRHCMIECIPVPCDVSSNAPMYFKKAIDEAEEEWTQHEMKKVIPTSASRNLR

SEQ ID NO: 74234 - protein, 120 aa, Setaria italica
  Transcript Sequence Number=SeqID_8260
VFARGVGGGGEGIFFDPDGGGEGGPDLRGRSVVGHHGGHAHAHLRPVRQGHRRTVLIFECLLALLGRDCCASIMDEFCISDAQSCTARLLAAGLEMDVCPFFSLIRALDPICSALPSVVL

SEQ ID NO: 74235 - protein, 88 aa, Setaria italica
  Transcript Sequence Number=SeqID_8261
  Gene Ontology: Mol. function=nucleic acid binding; Cellular component= nucleus; Biological process=response to stress
  Homolog annotation: Hit_ID=B6U3A0; Match level="QueryCoverage=100%, HitCoverage=30%, E-value=1e-40, Identity=92%"; Hit description =Glycine-rich RNA-binding protein 7
  Pfam annotation: Domain name=RRM_1; Domain location=9-79; Score=96.2; E_value=1.2e-25; Accession=PF00076.14; Description=RNA recognition motif. (a.k.a. RRM, RBD, o
MAEEKVGRIFVGGLSWDTTEGTLTRTFGQYGKVIDAQVVVERDTGRSRGFGFVTFSEPRAVDAAIRGMHNGELDGRNISVNKAQPRNA

SEQ ID NO: 74236 - protein, 74 aa, Setaria italica
  misc_feature (36)..(36): Xaa can be any naturally occurring amino acid
  Transcript Sequence Number=SeqID_8262
  Homolog annotation: Hit_ID=B6U3A0; Match level="QueryCoverage=47%, HitCoverage=11%, E-value=2e-10, Identity=88%"; Hit description =Glycine-rich RNA-binding protein 7
EKVGRIFVGGLSWDTTEGTLTRTFGQYGKVIDAQVXRRLRPAVMLVICGDWRLFSWDPLFWCGLMDKLLGCICR

SEQ ID NO: 74237 - protein, 219 aa, Setaria italica
  Transcript Sequence Number=SeqID_8263
  Homolog annotation: Hit_ID=B6TRJ5; Match level="QueryCoverage=85%, HitCoverage=58%, E-value=2e-27, Identity=46%"; Hit description =Glycine-rich RNA-binding protein 7
  Pfam annotation: Domain name=zf-CCHC; Domain location=40-57; Score =31.5; E_value=3e-06; Accession=PF00098.15; Description=Zinc knuckle
DDGYGYGGGGGGGGGGGGGYSSGARGGYRSGGDVVPAASDDCFKCGRPGHWARECPYSDGGGRTGRYSPASRYGGGTGGRGDRFGGSDRFARYDDDRYDGGRYMDSRDTYYGAGRDRYASDRYAPAADRYSGDRYGGGADRYASSGFARERSYERDGGRSSGGYYRDDSRSSGGYGRGGSRVGGGAAGPARFGGSYRDRPAPYDRPSRGAGARAYDDRY

SEQ ID NO: 74238 - protein, 154 aa, Setaria italica
  Transcript Sequence Number=SeqID_8264
  Subcellular localization annotation: CTP_CleavageSite=46; ConfidenceScore=5.85e-01
REARRAASSAAWVRSTAFSASTARSPCAVRPSAVATCAFSRRRCAACAVRSSRWRCLRIRDRRADSRLESIRLARRCSMSARSSSPVPAAAASAAVAAESEPELPLPLEEAIVAGPCFLISSSSSLLHNTTPAELAEESELFFLLASIFLLTLL

SEQ ID NO: 74239 - protein, 50 aa, Setaria italica
  Transcript Sequence Number=SeqID_8265
  Homolog annotation: Hit_ID=B6TI26; Match level="QueryCoverage=100%, HitCoverage=15%, E-value=2e-20, Identity=94%"; Hit description=Cell division cycle 2-related protein kinase 7
MAGEEAPLGALNLSEYASAGARTVDCYRRIRKIGEGTYGEVFEAVDIITG

SEQ ID NO: 74240 - protein, 106 aa, Setaria italica
  Transcript Sequence Number=SeqID_8266
  Homolog annotation: Hit_ID=B6TGN3; Match level="QueryCoverage=87%, HitCoverage=18%, E-value=7e-41, Identity=89%"; Hit description=Low temperature viability protein
MGGRGGGGGRKPRNFATFRLFPRAGAADPNDRVFVRVDNNDYTVPGFADEDPFDPSLSDPTADAGHLHSSASGPLPEHVRREILELGLPDDGYNYLSHLRELRPSA

SEQ ID NO: 74241 - protein, 92 aa, Setaria italica
  Transcript Sequence Number=SeqID_8267
  Homolog annotation: Hit_ID=A5GXS3; Match level="QueryCoverage=100%, HitCoverage=26%, E-value=7e-43, Identity=90%"; Hit description =Faciata 1-like protein (Fragment)
QLNRKVREISDFVDNHWKVKKEILDKLGLDSSPVKSKKNKNISMYFSKRCLPPEEVVSALAASPELRLKSKTIQNGKGGTEAPQINLFPSPQ

SEQ ID NO: 74242 - protein, 290 aa, Setaria italica
  Transcript Sequence Number=SeqID_8268
  Homolog annotation: Hit_ID=B9SNA2; Match level="QueryCoverage=90%, HitCoverage=90%, E-value=2e-94, Identity=61%"; Hit description=Type 2A phosphatase activator TIP41, putative
  Pfam annotation: Domain name=TIP41; Domain location=62-256; Score =341.5; E_value=1.6e-99; Accession=PF04176.5; Description=TIP41-like family
MASAAAWEGPTAAELKAAGAEAIPGGVRVKGWVIQSHKGPILNAASLQRFEDELQTTHLPEMVFGESFLSLEHNQTGIKLHFNALDALKAWKKEALPPVEVPAAAKWKFRSKPSDQVILDYDYTFTTPYCGSDAVVLNSGTTQAGLDGCSTLCWEDTDDRIDLVALSAKEPILFYDEVILYEDELADNGISFLTVRVRVMPTGWFLLLRFWLRVDGVLMRLRDTRLHCSFGNGDGAKPVVLRECCWREATCASLSAKGYPSDSAAYADPNLIAQKLPVVMQKTQKLKIPS

SEQ ID NO: 74243 - protein, 84 aa, Setaria italica
  Transcript Sequence Number=SeqID_8269
  Gene Ontology: Mol. function=hydrolase activity, hydrolyzing O -glycosyl compounds; Cellular component=extracellular region; Biological process=cell wall organization and biogenesis
  Homolog annotation: Hit_ID=Q69SG5; Match level="QueryCoverage=100%, HitCoverage=15%, E-value=8e-12, Identity=49%"; Hit description =Endoglucanase 24
MGSKYTRGCCGWLIVALIAALVATAAMFAIMKRKPGGGGKHLKPLPVPGPPGAIDSKYGDALGVALQFFQVQKSGKLENNQIPW

SEQ ID NO: 74244 - protein, 90 aa, Setaria italica
  Transcript Sequence Number=SeqID_8270
  Gene Ontology: Mol. function=hydrolase activity, hydrolyzing O -glycosyl compounds; Cellular component=extracellular region; Biological process=cell wall organization and biogenesis
  Homolog annotation: Hit_ID=Q69SG5; Match level="QueryCoverage=92%, HitCoverage=15%, E-value=7e-40, Identity=91%"; Hit description =Endoglucanase 24
VSNLCCHVVCQANYILGDNPMKLSYLVGYGSVYPQQVHHRGASIPADAKTGCKGFQYLHSPDPNPNVAMGALVGGPFQNDTFVDSRDNAL

SEQ ID NO: 74245 - protein, 545 aa, Setaria italica
  Transcript Sequence Number=SeqID_8271
  Gene Ontology: Mol. function=hydrolase activity, hydrolyzing O -glycosyl compounds; Cellular component=extracellular region; Biological process=cell wall organization and biogenesis
  Homolog annotation: Hit_ID=Q69SG5; Match level="QueryCoverage=97%, HitCoverage=99%, E-value=0.0, Identity=78%"; Hit description =Endoglucanase 24
  Pfam annotation: Domain name=Glyco_hydro_9; Domain location=74-532; Score=676.8; E_value=1.9e-200; Accession=PF00759.11; Description =Glycosyl hydrolase family 9
MGSKYTPGNQIPSRITTRGCLGWLILYSLVVLYLSVALVATAAMFAIMKRKPGGGGKHLKPLPVPGPPGAIDSKYGDALGVALQFFQVQKSGKLENNQIPWRGDSALTDGKEAGLDLSKGMYDAGDHMKFTFPMAFTATVLAWSVLEYGDQMSAAKQLDPALDALKWITDFLIAAHPSDNVLYIQVGDPDLDHNCWERPETMTEKRPLTQINKKSPGSDVAAEAAAAMAAASMVFKSSDTTYSDVLLQHAQKLFTFADTYRGLSSDSYPKLQDFYNSTSYVDELLWAASWLYHATGDQTYLSYVTVQNGKTYADWGRPTWFSWDDKNPGTQVLLSRLNFFGSKQISNAENEGLKSYRDTAESVICGLIPDSPQATASRTGGGLIWISGWNSLQHATNAAFLAIVYSDYMLSTQTAAVQCSGKYYSPTDIRNFAASQANYILGDNPMKLSYLVGYGSVYPQQVHHRGASIPADAKTGCKGFQYLHSPDPNPNVAMGALVGGPFQNDTFVDSRDNALQTESSTYNSGTLVGLLSGLVTTSSVAQSFT

SEQ ID NO: 74246 - protein, 56 aa, Setaria italica
  Transcript Sequence Number=SeqID_8272
AFLHLQSDGTINLEMGSKNETKFLNSCNWRNSGKAGGIATKMKSSMDGSHQVLEIT

SEQ ID NO: 74247 - protein, 393 aa, Setaria italica
  Transcript Sequence Number=SeqID_8273
  Gene Ontology: Mol. function=electron carrier activity; Cellular component=integral to membrane; Biological process=oxidation reduction
  Homolog annotation: Hit_ID=Q05JG2; Match level="QueryCoverage=100%, HitCoverage=83%, E-value=0.0, Identity=92%"; Hit description =Abscisic acid 8'-hydroxylase 1
  Pfam annotation: Domain name=p450; Domain location=1-389; Score=97.6; E_value=4.3e-26; Accession=PF00067.14; Description=Cytochrome P450
FKTHILGCPCVMVSSPEAARFVLVTQAHLFKPTFPASKERMLGPQAIFFQQGDYHAHLRRLVSRAFSPEAIRASVPAIEAIALRSLRSWDGQLVNTFQEMKLYALNVALLSIFGEEEMRYIEELKQCYLTLEKGYNSMPVNLPGTLFHKAMKARKRLGDIVAHIISARRQRQRGSSDLLASFLDDREALTDAQIADNVIGVIFAARDTTASVLTWMVKFLGDHPSVLRAVIEEQEEIARSKGSADAALTWADTRRMRMTSRVIQETMRVASILSFTFREAVEDVEYQGYLIPKGWKVLPLFRNIHHSPDHFTCPEKFDPSRFEVAPKPNTFMPFGNGTHSCPGNELAKLEMLVLFHHLATKYRWSTSKSESGVQFGPFALPLNGLPMTFTRKD

SEQ ID NO: 74248 - protein, 165 aa, Setaria italica
  Transcript Sequence Number=SeqID_8274
  Subcellular localization annotation: CTP_CleavageSite=35; ConfidenceScore=5.16e-01
TNVVRDREGVYASAVSTRTVNLPLPYHTGALLSTAAAAAFSVRALPLSLPPLRRFVLVQLWWVVLVGRRRATVRSSLARTYSSGAAAPCRRCRLWRRTPRRYRSWGGSSGSPRYTFGTIRMPPEPAMARSTGARRRLLPRTSMQINHAIKRPKTLTKVRCFFLVF

SEQ ID NO: 74249 - protein, 103 aa, Setaria italica
  Transcript Sequence Number=SeqID_8275
  Gene Ontology: Mol. function=structural constituent of ribosome; Cellular component=ribonucleoprotein complex; Biological process =translation
  Homolog annotation: Hit_ID=B6TNB0; Match level="QueryCoverage=99%, HitCoverage=98%, E-value=2e-48, Identity=92%"; Hit description =Mitochondrial 60S ribosomal protein L6
  Pfam annotation: Domain name=Ribosomal_L6; Domain location=12-89; Score=77.8; E_value=4e-20; Accession=PF00347.15; Description =Ribosomal protein L6
MEAKFFRFLKLVGVGFKARSESQGRELFLKLGYSHEVQFTTPPAVRVFCFKPNIICCTGIDKDRVHQFAGAVRNCKPPEVYKGKGILYFDEVIKLKPGKKQKK

SEQ ID NO: 74250 - protein, 85 aa, Setaria italica
  Transcript Sequence Number=SeqID_8276
GGGAKSVRQLARSSGWRSEMVALPTGAGAAHARPWLTCVKPQLAGERKQWYTASDGSTYPPGSLRDLVRSTGPNLTRTDPTCDLA

SEQ ID NO: 74251 - protein, 60 aa, Setaria italica
  Transcript Sequence Number=SeqID_8277
NEHAIIAFKGIWAYAEDQLAPLSPYDYCSLMKCTDNVIRAFKGIWAYAASPEFLHVISRP

SEQ ID NO: 74252 - protein, 101 aa, Setaria italica
  Transcript Sequence Number=SeqID_8278
  Gene Ontology: Mol. function=protein serine/threonine kinase activity; Biological process=protein amino acid phosphorylation
  Homolog annotation: Hit_ID=B9RQE1; Match level="QueryCoverage=73%, HitCoverage=11%, E-value=3e-23, Identity=64%"; Hit description =Serine/threonine-protein kinase PBS1, putative
  Pfam annotation: Domain name=LysM; Domain location=29-72; Score=19.3; E_value=0.0056; Accession=PF01476.12; Description=LysM domain
QRPPRPGAVVALHLLCGCSSGTWNYLLSYVGVEGDTVESLSSRFGASMDAIEAANAMAGPDPITAGKVYYIPLNSVPGQAYVALPPPPAPAPAPTDNTLPE

SEQ ID NO: 74253 - protein, 185 aa, Setaria italica
  misc_feature (170)..(170): Xaa can be any naturally occurring amino acid
  Transcript Sequence Number=SeqID_8279
  Gene Ontology: Mol. function=heat shock protein binding; Cellular component=chloroplast envelope
  Homolog annotation: Hit_ID=B6TCK1; Match level="QueryCoverage=75%, HitCoverage=53%, E-value=3e-60, Identity=83%"; Hit description=DnaJ domain containing protein
  Subcellular localization annotation: CTP_CleavageSite=28; ConfidenceScore=5.03e-01
MQAAAAFNRAAFTARPLHRRSRPPLHITGAEDGPAGRRGALLTRLRCSGSLSVGAGGYGRERVPVFPRQQSWDPYKLLGVDHDASEEEVRSARNFLLKQYAGYEESEEAIEGAYDKIIMNSYSHRKHSKINLKSKLKKQVEESPSWVKALLGYFEVPSLEIISRRFVFFXFIAGWSIATSAETGP

SEQ ID NO: 74254 - protein, 108 aa, Setaria italica
  misc_feature (99)..(99): Xaa can be any naturally occurring amino acid
  Transcript Sequence Number=SeqID_8280
  Gene Ontology: Cellular component=cell wall
  Homolog annotation: Hit_ID=B6TWE7; Match level="QueryCoverage=100%, HitCoverage=31%, E-value=6e-45, Identity=84%"; Hit description=PHI-1
  Pfam annotation: Domain name=Phi_1; Domain location=1-105; Score= -68.6; E_value=3.7e-06; Accession=PF04674.4; Description=Phosphate -induced protein 1 conserved region
QAVLRPPNGDAGVDGMVIVLGHELAEMSTNPLVNAWYAGDTPTAPTEIADLCLGVYGDGGGAGGMVGNVSRAPDGSAYNVNGVNGRRFLVQWLWNPVRXACYGPNSSN

SEQ ID NO: 74255 - protein, 177 aa, Setaria italica
  Transcript Sequence Number=SeqID_8281
  Gene Ontology: Mol. function=N-acetyltransferase activity; Cellular component=cytoplasm; Biological process=metabolic process
  Homolog annotation: Hit_ID=B6T7X0; Match level="QueryCoverage=100%, HitCoverage=100%, E-value=4e-87, Identity=89%"; Hit description=Pre -mRNA-splicing factor cwc24
  Pfam annotation: Domain name=Acetyltransf_1; Domain location=65-146; Score=84.9; E_value=2.8e-22; Accession=PF00583.16; Description =Acetyltransferase (GNAT) family
  Pfam annotation: Domain name=FR47; Domain location=71-156; Score=4.6; E_value=0.0056; Accession=PF08445.2; Description=FR47-like protein
  Pfam module annotation: Pfam domain module=Acetyltransf_1::FR47; Domain location=65-146::71-156
MGAGDGEVAASKEKGGGGAERTSLDGVRDKNVMQLKKLNTALFPVRYNDKYYQDAIASKDFSKLAYYSDICVGAIACRLEKKEGGAVRVYIMTLGVLAPYRGLGIGTKLLNHVFDLSAKQNISEIYLHVQTNNDDAIAFYKKFGFEITQTIHNYYMNITPPDCYVLTKFIGQAATKK

SEQ ID NO: 74256 - protein, 118 aa, Setaria italica
  Transcript Sequence Number=SeqID_8282
  Gene Ontology: Cellular component=membrane
  Homolog annotation: Hit_ID=B9RSR7; Match level="QueryCoverage=88%, HitCoverage=26%, E-value=1e-09, Identity=29%"; Hit description =Membrane protein PB1A10.07c, putative
MWLNDCCRSETTRKRCHLQIQVVSIVTYVGSLLGIVLMYVWYAPSPACKLNILFITVTLVLVQLMTFVSMSSKVKAGYLAPGLMGIYVVFLCWSAIRSEPHTEICNKKAEVATSADWV

SEQ ID NO: 74257 - protein, 82 aa, Setaria italica
  Transcript Sequence Number=SeqID_8283
  Gene Ontology: Mol. function=lipid binding; Cellular component=plasma membrane; Biological process=endocytosis
  Homolog annotation: Hit_ID=B9T362; Match level="QueryCoverage=74%, HitCoverage=6%, E-value=6e-24, Identity=88%"; Hit description=Epsin -2, putative
  Pfam annotation: Domain name=ENTH; Domain location=3-72; Score=8.9; E_ value=4.8e-06; Accession=PF01417.12; Description=ENTH domain
VQDNDRYEGSYGSRYDNRNGNERVIDDIREHSYQISTLADFQYIDSSGRDQGSNVRRKSQSLVSLVNDKERIQEVRQKALTP

SEQ ID NO: 74258 - protein, 55 aa, Setaria italica
  misc_feature (39)..(39): Xaa can be any naturally occurring amino acid
  Transcript Sequence Number=SeqID_8284
  Homolog annotation: Hit_ID=B9T362; Match level="QueryCoverage=100%, HitCoverage=5%, E-value=5e-14, Identity=70%"; Hit description=Epsin -2, putative
GLIVLDYLVAHGTERVIDDIREHSYQISTLADTYQVTIXNSSGRDQGSNVRRKSQ

SEQ ID NO: 74259 - protein, 153 aa, Setaria italica
  misc_feature (31)..(31): Xaa can be any naturally occurring amino acid
  misc_feature (61)..(61): Xaa can be any naturally occurring amino acid
  Transcript Sequence Number=SeqID_8285
LLKVSSISLTYCNYCLEGSGRRSYGRERDSXYGDDEAYSSRGRGSNADGPTQDERPIERKXSNQQIASPPPNYEDVTRDGQDNLPNDRNGGSVPAAVPKVSSPPVPATGFLLLEWSSILHSFTDFSVHCPRQTNNHLSQASSHKLGHQLRSQL

SEQ ID NO: 74260 - protein, 135 aa, Setaria italica
  Transcript Sequence Number=SeqID_8286
  Gene Ontology: Mol. function=lipid binding; Cellular component =cytoplasmic vesicle; Biological process=endocytosis
  Homolog annotation: Hit_ID=B5RHS9; Match level="QueryCoverage=86%, HitCoverage=13%, E-value=4e-58, Identity=85%"; Hit description=Epsin N-terminal homology (ENTH) domain-containing protein
  Pfam annotation: Domain name=ENTH; Domain location=23-130; Score =136.6; E_value=8e-38; Accession=PF01417.12; Description=ENTH domain
MKKVFDQTVRDLKREVNKKVLKVPGIEQKILDATSNEPWGPHGSLLADIAQATNNYHEYQMIMNIVWKRINDTGKNWRHVYKGLIVLDYLVAHGTERVIDDIREHSYQISVMLSTQFSALYVHYNHKVRLWHRRN

SEQ ID NO: 74261 - protein, 886 aa, Setaria italica
  Transcript Sequence Number=SeqID_8287
  Gene Ontology: Mol. function=lipid binding; Cellular component =cytoplasmic vesicle; Biological process=endocytosis
  Homolog annotation: Hit_ID=Q6K8F0; Match level="QueryCoverage=45%, HitCoverage=75%, E-value=1e-123, Identity=59%"; Hit description =Epsin-like
  Pfam annotation: Domain name=ENTH; Domain location=14-124; Score =158.7; E_value=1.8e-44; Accession=PF01417.12; Description=ENTH domain
MIMIVIRCLSNVCQEGSMRAPWLIADIAQATNNYHEYQMIMNIVWKRINDTGKNWRHVYKGLIVLDYLVAHGTERVIDDIREHSYQISTLADFQYIDSSGRDQGSNVRRKSQSLVSLVNDKERIQEVRQKALTTRDKYRSAFATSGTHRSPGGYGGGYDNDRYEGSYGSRYDNRNGNGREREYGYRDEDRYGGPGDTPNREGDRYSRDSNERYGRDYREDEYKGSHSNHEYAEGSGRRSYGRERDSYGDDEAYSSRGRGSNADGPTQDERPIERKLSNQQIASPPPNYEDVTRDGQDNLPNDRNGGSVPAAVPKVSSPPVPATSVPAEQVNGVHDSTVEDVPAPPTAHAEPNGFDEFDPRGSVLDSSPPVNPAPVVNSLEMDLFGSDPISSLALVSVPQPTTTSNVEPPANSGFETNDFMGMPPTSSGFGEIDASNPFGDPTPFKAVHDESPAVPQTNAAPAGSIQSTGPGADANPFQAASAASFGFGDTLGDLTFASNTASEQQDIFANTASFPSQVSAANPSVVLQQPVSTNFPSQAPQPAVAGPPPVTHAAPTAFAPSQAPQAAPAFAYSQAPYPAAANQSQVPQAASTSFAPSQAPQPVAPNVPSGQSNFFMQTASGAGFDSQSGVPLQNGAPSYIPSQTSQFTAPANQQPSQPSFLPQTGTSAPQPALISRGASQPLGVPNSVPSATSFPLQSSSSAPPETLISALQVSQTEPVKKFEPKSKLWSDTLSRGLVNLDISGPKANPHADIGVDFDSINRKEKRQEKKINQAPVVSTVTMGKAMGAGSGIGRSGAGSMAPPPNPMGAGRPMGMGMGTGAGYGGGMGMNRPMGMGMGMGMGMGMNQQQMGMGMNQQPMWRQPGEPETGWQQQDKVLVNKQNAGAA

SEQ ID NO: 74262 - protein, 92 aa, Setaria italica
  misc_feature (53)..(53): Xaa can be any naturally occurring amino acid
  misc_feature (67)..(67): Xaa can be any naturally occurring amino acid
  misc_feature (79)..(79): Xaa can be any naturally occurring amino acid
  Transcript Sequence Number=SeqID_8288
MYNVFLLQWMLFLMFLFISWLSCYFLYKISACMFLMFLLWQLAPKLKEVTVGXICPYTAQVVAIQEXGKMKFDPVQVKXSVDGFQGGEEDII

SEQ ID NO: 74263 - protein, 191 aa, Setaria italica
  Transcript Sequence Number=SeqID_8289
  Gene Ontology: Mol. function=helicase activity
  Homolog annotation: Hit_ID=Q7XUD5; Match level="QueryCoverage=74%, HitCoverage=16%, E-value=6e-42, Identity=56%"; Hit description =OSJNBa0088A01.10 protein
EFDELGHSRRNLVEVVVIEEILCSLQRACSKTKKKVTVGVICPYTAQVVAIQEKLGKMKFDPVQVKINSVDGFQGGEEDIIILSAVRSNSDGLVGFLSNRQRTNVSLTRARYCLWIIGNATTLSSSGSIWADLVRNAKDRRCFFDGSCNKAISRVIAKQKSDLTRVNVKRIDTSQVPETVAFGLRCHLQVS

SEQ ID NO: 74264 - protein, 49 aa, Setaria italica
  misc_feature (29)..(49): Xaa can be any naturally occurring amino acid
  Transcript Sequence Number=SeqID_8290
HSTVVYSVPPSQQSLYLSKIVSMAKKKKXXXXXXXXXXXXXXXXXXXXX

SEQ ID NO: 74265 - protein, 156 aa, Setaria italica
  Transcript Sequence Number=SeqID_8291
  Gene Ontology: Mol. function=transcription regulator activity; Cellular component=nucleus; Biological process=regulation of transcription
  Homolog annotation: Hit_ID=B6TJH4; Match level="QueryCoverage=100%, HitCoverage=100%, E-value=2e-74, Identity=85%"; Hit description=ER33 protein
  Subcellular localization annotation: CTP_CleavageSite=46; ConfidenceScore=5.49e-01
MMMAEVANHSKRNHTDSYFSGKAVVTTSSVEFGSMTSKKPRNTSPRTSPVSPKEKKDRIGERVAALQQLVSPFGKTDTASVLQEASGYIKFLHQQLEVLSSPYMRAPPAAGAAPEDPEHYSLRNRGLCLVPVDLTLQLTQSNGADLWAPANTTRRR

SEQ ID NO: 74266 - protein, 62 aa, Setaria italica
  Transcript Sequence Number=SeqID_8292
LQSHYFVNFLVCLKPCLNLLNTEHLKSGLPSEKQPHLWKRKAVHFRHGTFAWLALHFSLEIN

SEQ ID NO: 74267 - protein, 223 aa, Setaria italica
  Transcript Sequence Number=SeqID_8293
  Gene Ontology: Mol. function=zinc ion binding; Cellular component =nucleus; Biological process=regulation of transcription, DNA -dependent
  Homolog annotation: Hit_ID=Q7XTS2; Match level="QueryCoverage=98%, HitCoverage=19%, E-value=1e-18, Identity=28%"; Hit description =OSJNBa0008M17.13 protein
  Pfam annotation: Domain name=FAR1; Domain location=18-106; Score =107.5; E_value=4.5e-29; Accession=PF03101.7; Description=FAR1 family
GTEELLRKVVYSEEAAYKLYCDYGHRMGFSIRKGKQSYFTGTKRIRTKDYFCSKEGLKEGEKLTDANFNDPHTRTNCRAMVRFRVNDHGEWKVIRLVSDHNHNLARPEERHLLRSARSLIAGRSSSVEAMLYAGYQVQGGAPQLPAGSTSATNNVDNSKQHLLLGYGAAVKTLAVGTGDLQSLVSYLKTRANEDAMFYWDVQLDQSGRMTNFFWRDGRSKESN

SEQ ID NO: 74268 - protein, 59 aa, Setaria italica
  Transcript Sequence Number=SeqID_8294
  Gene Ontology: Mol. function=calcium ion binding; Cellular component =oxygen evolving complex; Biological process=photosynthesis
LGYEIVSVVIKPSNQLKITFLEAKDITDLGTLKEASKIFVPGTLSHLRVGCCAVFFSSK

SEQ ID NO: 74269 - protein, 191 aa, Setaria italica
  misc_feature (144)..(144): Xaa can be any naturally occurring amino acid
  Transcript Sequence Number=SeqID_8295
  Gene Ontology: Mol. function=calcium ion binding; Cellular component =oxygen evolving complex; Biological process=photosynthesis
  Subcellular localization annotation: CTP_CleavageSite=35; ConfidenceScore=5.42e-01
VHTAIAIASASAAASAAEAPPSPSPPPSPQTQAPPSKQGSPVLGGIANTRSWSQYYGSGFSIRVPPSFDDILEPEDYNAGMTYYGDKAKPRAYAARFASPDRDEIVSVVIKPSNQLKITFLEAKDITDLGTLKEASKIFVPAGXGAKVFSARTIKVKDKEDIRTYYFYEFGLDKQHVALMATVNSGKTYIA

SEQ ID NO: 74270 - protein, 105 aa, Setaria italica
  Transcript Sequence Number=SeqID_8296
  Gene Ontology: Mol. function=ATPase activity, coupled to transmembrane movement of substances; Cellular component=integral to membrane; Biological process=transport
  Homolog annotation: Hit_ID=B9RKV1; Match level="QueryCoverage=99%, HitCoverage=14%, E-value=8e-48, Identity=84%"; Hit description =Peroxisomal membrane protein, putative
TLATRFWKVAAPYWWSEDKTQARLRLAAVFALTLGTTGISVGFNFLGRDFYNALADKDQEKFTQQLLYYLGAFAGGIPFFVLRDYAKETLSLRWRSWMTSYYMKS

SEQ ID NO: 74271 - protein, 151 aa, Setaria italica
  misc_feature (120)..(120): Xaa can be any naturally occurring amino acid
  Transcript Sequence Number=SeqID_8297
  Gene Ontology: Mol. function=cysteine protease inhibitor activity; Cellular component=extracellular region; Biological process=defense response
  Homolog annotation: Hit_ID=B6U3E9; Match level="QueryCoverage=66%, HitCoverage=57%, E-value=1e-34, Identity=74%"; Hit description =Multicystatin
  Pfam annotation: Domain name=Cystatin; Domain location=39-125; Score =43.5; E_value=8.1e-10; Accession=PF00031.13; Description=Cystatin domain
SSFVRRPSLLPSVRCFLLASAAAVSGFHLGGDESGLVQGVLAALRERAEAEEAARFAVAHHNKNQGSALEFTRVLKSKRQVVTGTLHDLVLEAADAGKKSLYRAKVWVKPWEDFKSVVEXFRLVGDSDAESESSVASDESSRQGIGSWVFG

SEQ ID NO: 74272 - protein, 370 aa, Setaria italica
  Transcript Sequence Number=SeqID_8298
  Gene Ontology: Mol. function=2 iron, 2 sulfur cluster binding; Biological process=oxidation reduction
  Homolog annotation: Hit_ID=O23888; Match level="QueryCoverage=96%, HitCoverage=26%, E-value=0.0, Identity=87%"; Hit description =Aldehyde oxidase-2
  Pfam annotation: Domain name=DHODB_Fe-S_bind; Domain location=42-70; Score=-3.5; E_value=0.035; Accession=PF10418.1; Description=Iron -sulfur cluster binding domain of
  Pfam annotation: Domain name=FAD_binding_5; Domain location=241-370; Score=75.5; E_value=1.9e-19; Accession=PF00941.13; Description=FAD binding domain in molybdopterin dehydrogenase
  Pfam annotation: Domain name=Fer2; Domain location=12-82; Score=36.7; E_value=9e-08; Accession=PF00111.19; Description=2Fe-2S iron-sulfur cluster binding domain
  Pfam annotation: Domain name=Fer2_2; Domain location=91-179; Score =111.3; E_value=3.3e-30; Accession=PF01799.12; Description=[2Fe-2S] binding domain
  Pfam module annotation: Pfam domain module=DHODB_Fe-S_bind::FAD _binding_5::Fer2::Fer2_2; Domain location=42-70::241-370::12-82::91 -179
GEAAAAAGTVVVAVNGQRYEAAGVDPSTTLLEFLRTHTPVRGPKLGCGEGGCGACVVLVSKYDPATDEVTEFSASSCLTLLRSVDRCSVTTSEGIGNTKDGYHPVQQRLSGFHASQCGFCTPGMCMSIFSALVKADKESGRPAPPAGFSKLTTSEAEKAVSGNLCRCTGYRPIVDACKSFAADVDLEDLGLNCFWKKGSEPAEVSKLPSYSSGAVCTFPEFLKSEIRASVDQVNRAEVPVSDDGWYRPKSIDELHRLFESDSFDENSVKIVASNTGSGVYKDEDLHDKYIDIKGVPELSVINKTSKGVELGSVVSISKAIDVLSDGNLVFRKIANHLNKVASPFVRNTATIGGNIIMAQRLQFPSDIATV

SEQ ID NO: 74273 - protein, 300 aa, Setaria italica
  Transcript Sequence Number=SeqID_8299
  Gene Ontology: Mol. function=nucleic acid binding
  Homolog annotation: Hit_ID=B9SN50; Match level="QueryCoverage=70%, HitCoverage=99%, E-value=4e-40, Identity=46%"; Hit description=RNA binding protein, putative
  Pfam annotation: Domain name=RRM_1; Domain location=220-286; Score =30.0; E_value=9.5e-06; Accession=PF00076.14; Description=RNA recognition motif. (a.k.a. RRM, RBD, o
  Pfam annotation: Domain name=RRM_1; Domain location=34-102; Score =30.9; E_value=5.1e-06; Accession=PF00076.14; Description=RNA recognition motif. (a.k.a. RRM, RBD, o
  Pfam module annotation: Pfam domain module=RRM_1::RRM_1; Domain location=220-286::34-102
MSLSHRLPPGAPAVDPYYVYAPRPDPQRHGVLTLFVAGLPDDVKPREIHNLFSHRPGFDHCLLEYTGRGNQAVAFVTFFTHEAALSAMTSLNGTIFDPETGDRLHIELAKSTSRRPRGGGEVYRVIDKRANKTEGNADHENVGDEGDEAAWGEDEDGGSDDNGDGGSDEPSGTENENSSDKNELSADQSDQPAHKQQNGQSPSNDGRDKSSSDIPPCSTLFIANLGHTCTEDELKEVLSKEPGFHVLKMRRRGGMPVAFADFTDIESSTAAMNSLQGTLLASSDNDGLHIEYARSKMRKS

SEQ ID NO: 74274 - protein, 63 aa, Setaria italica
  Transcript Sequence Number=SeqID_8300
  Subcellular localization annotation: CTP_CleavageSite=30; ConfidenceScore=5.39e-01
RSARLCFDPAGRLCCPGPPPPPPPPPPPSPAAAPSKSRTAAMGHTPVPMESAAHAAPALHTVA

SEQ ID NO: 74275 - protein, 58 aa, Setaria italica
  Transcript Sequence Number=SeqID_8301
LQVNRLNPLAWVTLIYFCKSRPQCCSYWLETICYGHALLYNIGCLHHDLQIISYCKYC

SEQ ID NO: 74276 - protein, 239 aa, Setaria italica
  Transcript Sequence Number=SeqID_8302
  Gene Ontology: Mol. function=protein serine/threonine kinase activity; Biological process=protein amino acid phosphorylation
  Homolog annotation: Hit_ID=Q7XPC8; Match level="QueryCoverage=97%, HitCoverage=57%, E-value=5e-59, Identity=52%"; Hit description =OSJNBa0042N22.11 protein
  Pfam annotation: Domain name=Pkinase; Domain location=1-193; Score= -20.0; E_value=2.7e-07; Accession=PF00069.17; Description=Protein kinase domain
  Pfam annotation: Domain name=Pkinase_Tyr; Domain location=1-193; Score=-97.8; E_value=3.2e-07; Accession=PF07714.9; Description =Protein tyrosine kinase
  Pfam module annotation: Pfam domain module=Pkinase::Pkinase_Tyr; Domain location=1-193::1-193
LFLVYELVPKGSLQDHLDNKEETLPWRTRYKIVKDIASALLYLHHECVPVILHRDIKPSNILLDNNFNAKLADFGLSRITDPGCSKVLTRAVGTEGYIDPQCRKDGVVEFSRNSDVYSFGIVLLEIACKQGMVRERVLQQYINRSLLQQAADDKLKDEFNRSEMENVIILGLWCSYPDDSKKRPSMQQVVAVLEHGRTFPDDLNSLLDTTSASTQQETYMVLQAPSSAGSTSYDSMMHA

SEQ ID NO: 74277 - protein, 91 aa, Setaria italica
  Transcript Sequence Number=SeqID_8303
  Subcellular localization annotation: CTP_CleavageSite=33; ConfidenceScore=5.09e-01
MGDVPVPAQSPAPFLLPDSDMTSRRRREPSEPRSDSDWDAGSSREGSPDFLRRAPAAQISRASTSSSSSSWLREIERDRVRLVREWVHMAA

SEQ ID NO: 74278 - protein, 239 aa, Setaria italica
  misc_feature (208)..(208): Xaa can be any naturally occurring amino acid
  Transcript Sequence Number=SeqID_8304
  Gene Ontology: Mol. function=triacylglycerol lipase activity; Biological process=lipid metabolic process
  Homolog annotation: Hit_ID=B9SC74; Match level="QueryCoverage=99%, HitCoverage=49%, E-value=1e-55, Identity=44%"; Hit description =Triacylglycerol lipase, putative
EIDDWRRRWAVFVSLAAQVLLLWAKKPVALLGRVTEYWMNLLDENGGGLLVLVVRALQGKLKFPDRSSPNYRSCVGLLDTRIELDKEIKHGDSNYHAALSIMAAKLAYESEVVIKNVVEKHWKMKFSAFYNCWNDFRGDYTTQAFVFADRAADASLAVVAFSGTRPFDTEQWCADVDFSWYEIPGVGKVHGGFMKALGLQRHGGWPEXPRHRAGQKPFAYYAIRETLRSFLSENAGARF

SEQ ID NO: 74279 - protein, 65 aa, Setaria italica
  Transcript Sequence Number=SeqID_8305
  Subcellular localization annotation: CTP_CleavageSite=39; ConfidenceScore=5.05e-01
AAPARSASSSAATTRVSSTTTAAGGFDLNLPALPEIPERCAAAPEEEEEVLSPIAFKKPRFMIPA

SEQ ID NO: 74280 - protein, 59 aa, Setaria italica
  Transcript Sequence Number=SeqID_8306
RGARWRMRALEGITAVLALTQLLYVAMLHAAVAGDRCEPGCPTEDDQEHHRGGPTCSVM

SEQ ID NO: 74281 - protein, 118 aa, Setaria italica
  misc_feature (79)..(79): Xaa can be any naturally occurring amino acid
  Transcript Sequence Number=SeqID_8307
  Subcellular localization annotation: CTP_CleavageSite=30; ConfidenceScore=5.26e-01
TGFMLKLLESCPNLQKFSLSAAKTYKALPSSTNLKERLASISCLTSLVQFKFCGFKPQEFQNELMVFLLTRGKKLKKVXVEFDKSQVDAVKMILSVRRAHIERISTKYASHHMEMEFF

SEQ ID NO: 74282 - protein, 138 aa, Setaria italica
  Transcript Sequence Number=SeqID_8308
  Gene Ontology: Mol. function=DNA binding; Cellular component=nucleus; Biological process=regulation of transcription
  Homolog annotation: Hit_ID=B6U8A6; Match level="QueryCoverage=97%, HitCoverage=54%, E-value=1e-19, Identity=46%"; Hit description=Myb -related protein Myb4
  Subcellular localization annotation: CTP_CleavageSite=64; ConfidenceScore=5.32e-01
TRTSRKRLEPKPATQQAPRRKSKKQQQQQPAEIVMLDGPASTVPVSSPEQSLSTSTTSSTDYSAASSVENNADSSFTSEEDYQIEDSFWSETLAMTVDSSDSFGMEREDACVEAAPSANDDMDFWLKLFMQASDMQNL

SEQ ID NO: 74283 - protein, 86 aa, Setaria italica
  Transcript Sequence Number=SeqID_8309
  Subcellular localization annotation: CTP_CleavageSite=72; ConfidenceScore=5.02e-01
NFKSSLIQVASKSCMQKILKPIFVLQYSHESTNICNFLAKASNLTYDGVVGFFCTRGVDGQPRRVRLCWTSRASTPTPATRCTGPT

SEQ ID NO: 74284 - protein, 67 aa, Setaria italica
  Transcript Sequence Number=SeqID_8310
  Gene Ontology: Mol. function=sequence-specific DNA binding; Cellular component=cytoplasm; Biological process=regulation of transcription, DNA-dependent
  Homolog annotation: Hit_ID=Q94J16; Match level="QueryCoverage=98%, HitCoverage=15%, E-value=3e-28, Identity=86%"; Hit description=Heat stress transcription factor A-4b
GFRKVDPEQWEFANEDFIRGQRHRLKNIHRRKPIFSHSSHPQGSGPLADNERREYEDEIEKLKRDND

SEQ ID NO: 74285 - protein, 382 aa, Setaria italica
  Transcript Sequence Number=SeqID_8311
  Gene Ontology: Mol. function=sequence-specific DNA binding; Cellular component=cytoplasm; Biological process=regulation of transcription, DNA-dependent
  Homolog annotation: Hit_ID=B1PT17; Match level="QueryCoverage=97%, HitCoverage=82%, E-value=0.0, Identity=90%"; Hit description=Heat shock transcription factor
  Pfam annotation: Domain name=HSF_DNA-bind; Domain location=12-176; Score=186.2; E_value=9.1e-53; Accession=PF00447.9; Description=HSF -type DNA-binding
MEAGGGSASSLPPFLSKTYEMVDDPATDAVVAWTPPGTSFVVANQAEFCRDLLPKYFKHNNFSSFVRQLNTYGFRKVDPEQWEFANEDFIRGQRHRLKNIHRRKPIFSHSSHPQGSGPLADNERREYEDEIEKLKRDNDALTLELEKNAQKKIDMERRMQELEDKLIYLEDRQKNLIAYVRDIVQAPGFRSSFVQQPDHHGKKRRLPVPISLHQDANAEGNQIVHGGLTNPPVCIESFDKMESSLNSLENFFREASEAFDISYDGVPGPSSAVVITELHSSGESDPHVPSPPSRMHTSSAGAGDSPSRMHTSSAGAGDSLSSHDVTESTSCAESPPLPQMMSFTDSRAKVSEIDVNLEPAITETGPSRDQVLSVGTSSFLFP

SEQ ID NO: 74286 - protein, 236 aa, Setaria italica
  misc_feature (2)..(2): Xaa can be any naturally occurring amino acid
  Transcript Sequence Number=SeqID_8312
  Gene Ontology: Cellular component=intracellular; Biological process =signal transduction
  Homolog annotation: Hit_ID=B9S3Y4; Match level="QueryCoverage=77%, HitCoverage=38%, E-value=5e-48, Identity=60%"; Hit description =Gtpase activating protein, putative
EXVLDGLSPEQVLQCNSEGEFLQLVTLLRPTQAALLNWAVELMSDVVEEEELNKMNARNIAMVFAPNMTQMSDPLTALMHAVQVMNFLKTLILRTLRERDDAATGGEYTPYSSPASSIQQDAAECCYSSERDMDRSCELSDMHSQISKSGRHADYLVRYNTCFDSEQEIDDHLSEVEEGFLRRLERDIEADRPKESAREQCEMNLEVMAMEDVELKDEDKAVEKGLQKEEGLESMA

SEQ ID NO: 74287 - protein, 182 aa, Setaria italica
  Transcript Sequence Number=SeqID_8313
  Gene Ontology: Mol. function=malonyl-CoA decarboxylase activity; Biological process=fatty acid biosynthetic process
  Homolog annotation: Hit_ID=B9RXF9; Match level="QueryCoverage=90%, HitCoverage=30%, E-value=4e-38, Identity=50%"; Hit description =Malonyl-CoA decarboxylase, putative
KVEGKAKQAAASSLPPPATLDNFSDGYRSLDRVGRREVLRSLATDYDVPRARVRDLMRQYMSVASAAAAGGDDATVEEGKEGSAAALYRMERGLRDALRPRYSGFLEAMNAQPGGLKLLAVLRADLLALLGEENAPALRALDSYLKEKLVTWLSPAALTLHQITWDDPASLLEKIVAYEAVH

SEQ ID NO: 74288 - protein, 68 aa, Setaria italica
  Transcript Sequence Number=SeqID_8314
  Subcellular localization annotation: CTP_CleavageSite=57; ConfidenceScore=5.24e-01
IEGHPQQAAAHPSGYKTIKIRKKGGVGANKSNPLSFRRHVSPRHATLISAWVLFCLRCGVQKSTQPSA

SEQ ID NO: 74289 - protein, 63 aa, Setaria italica
  Transcript Sequence Number=SeqID_8315
MVSAAAQEHLVAACVVLFVPMGLAGWHLSRNKVLFFSGALFVSLAVGVHLSPYLPSVPHLLAA

SEQ ID NO: 74290 - protein, 608 aa, Setaria italica
  Transcript Sequence Number=SeqID_8316
  Gene Ontology: Mol. function=CTP synthase activity; Cellular component=cellular_component; Biological process=pyrimidine nucleotide biosynthetic process
  Homolog annotation: Hit_ID=Q5ZDK0; Match level="QueryCoverage=98%, HitCoverage=97%, E-value=0.0, Identity=86%"; Hit description =Putative CTP synthetase
  Pfam annotation: Domain name=CTP_synth_N; Domain location=1-287; Score=674.4; E_value=1e-199; Accession=PF06418.6; Description=CTP synthase N-terminus
  Pfam annotation: Domain name=GATase; Domain location=311-548; Score =268.8; E_value=1.3e-77; Accession=PF00117.20; Description=Glutamine amidotransferase class-I
  Pfam module annotation: Pfam domain module=CTP_synth_N::GATase; Domain location=1-287::311-548
MKYVLVTGGVVSGLGKGVTASSIGVVLKACGLRITSIKIDPYLNTDAGTMSPFEHGEVFVLDDGGEVDLDLGNYERFLDLKLTRDNNITTGKIYQSVIDKERKGEYLGKTVQVVPHITNAIQEWIERVAMIPVDGKEGPADVCVIELGGTIGDIESMPFIEALGQFSYRVGPGNFCLVHVSLVPVMNVVGEQKTKPTQHSVRGLRGLGLTPNILACRSTKELEDNVKEKLSQFCHVPAANIVTLYDVSNIWRIPLLLRDQKAHEAILKVLNLDRVESISREPKLDEWVARATIFDALQDTVRIAMVGKYTGLSDSYLSVLKALLHASVDCRRKLVVDWVASTDLEDSTAIEAPDAYKSAWDLLKGADGILVPGGFGDRGVQGKILAAKYAREKNVPYLGICLGMQIAVVEFARHVMNLTDANSTEFDPNTKTPCVIFMPEGSKTHMGATMRLGSRRTFFKVADCKSAKLYRNVTYVDERHRHRYEVNPDMVPEFENAGLQFVGKDDTGKRMEIIEIPNHRYFVGAQFHPEFKSRPSKPSPLFVGLVAAASGQLDRVLQDCCNGHPVPAKHLLSNGSYTSAVHQNGHPKKLANGLSNGTYYANGNGVHA

SEQ ID NO: 74291 - protein, 251 aa, Setaria italica
  Transcript Sequence Number=SeqID_8317
  Gene Ontology: Mol. function=nucleotide binding; Cellular component =intracellular; Biological process=small GTPase mediated signal transduction
  Homolog annotation: Hit_ID=B6TE37; Match level="QueryCoverage=100%, HitCoverage=45%, E-value=1e-133, Identity=92%"; Hit description=tRNA modification GTPase trmE
  Pfam annotation: Domain name=ArgK; Domain location=3-208; Score= -191.4; E_value=0.055; Accession=PF03308.8; Description=ArgK protein
  Pfam annotation: Domain name=GTP_EFTU; Domain location=5-172; Score= -77.7; E_value=0.0027; Accession=PF00009.19; Description=Elongation factor Tu GTP binding domain
  Pfam annotation: Domain name=MMR_HSR1; Domain location=5-129; Score =152.3; E_value=1.5e-42; Accession=PF01926.15; Description=GTPase of unknown function
  Pfam annotation: Domain name=Miro; Domain location=6-129; Score=13.8; E_value=0.00056; Accession=PF08477.5; Description=Miro-like protein
  Pfam annotation: Domain name=Ras; Domain location=6-172; Score=-81.7; E_value=0.0037; Accession=PF00071.14; Description=Ras family
  Pfam module annotation: Pfam domain module=ArgK::GTP_EFTU::MMR _HSR1::Miro::Ras; Domain location=3-208::5-172::5-129::6-129::6-172
LQSGLQIAIIGRPNVGKSSLLNAWSKSERAIVTEIAGTTRDVVEANVSIHGIPVTLLDTAGIRETDDIVEKIGVERSEAAALGADLIIMAISAVDGWTDDDTMLVEHVLINKKSSGSAVPMVLVINKVDCAPFVSGEQFERYRGLFRKHVQTCAVTGKGISELESAVVEVRGIEHVPSGGRRWTVNQRQFEQLLRTKEAFTRLESSINEQLPMDFWTIDLREAALALATISGEDISEEVLSSIFSKFCIGK

SEQ ID NO: 74292 - protein, 121 aa, Setaria italica
  Transcript Sequence Number=SeqID_8318
  Homolog annotation: Hit_ID=B6TQV1; Match level="QueryCoverage=100%, HitCoverage=63%, E-value=4e-54, Identity=85%"; Hit description=Acid phosphatase/vanadium-dependent haloperoxidase related
  Pfam annotation: Domain name=DUF212; Domain location=1-114; Score =134.6; E_value=3.2e-37; Accession=PF02681.6; Description=Divergent PAP2 family
WLKEKRWDARKFLTSAGVMSSLSATVGSLAVAVGQQEGADSSAFALALVFAAVVMYDASGIRWHTGRQAALLNQIVCDFPPEHPIISTFRPLREPLGHSPLQVFAGAVVGCTVAYFVGKSV

SEQ ID NO: 74293 - protein, 100 aa, Setaria italica
  Transcript Sequence Number=SeqID_8319
  Subcellular localization annotation: CTP_CleavageSite=89; ConfidenceScore=5.44e-01
SSISRFITYTYPLVFSRESRLSSSPTFCFSSNPKTSEMCGMMQGWRLSSKHAGGWSIVTCISYPRPTPASSLITSTASRSPTRRPHPAPAPHAGSLVPHP

SEQ ID NO: 74294 - protein, 395 aa, Setaria italica
  Transcript Sequence Number=SeqID_8320
  Gene Ontology: Cellular component=plasma membrane
  Homolog annotation: Hit_ID=B9R6S0; Match level="QueryCoverage=99%, HitCoverage=81%, E-value=1e-159, Identity=66%"; Hit description =Amino acid transporter, putative
  Pfam annotation: Domain name=Aa_trans; Domain location=1-384; Score =372.2; E_value=9.1e-109; Accession=PF01490.10; Description =Transmembrane amino acid transporter protein
LLADCYRAPDPVHGKRNYTYGQAVRAYLGVSKYRLCSLAQYINLVGVTIGYTITTAISMGAIKRSNCFHRNGHSADCEASNTTNMIIFAGIQILLSQLPNFHKLWWLSIVAAVMSLAYSSIGLGLSIAKIAGGVHAKTTLTGATVGVDVSATEKIWKTFQSLGDIAFAYSYSNVLIEIQDTLRSSPPENVVMKKASFIGVSTTTMFYMLCGVLGYAAFGNQAPGNFLTGFGFYDPFWLIDVGNVCIAIHLIGAYQVFCQPIFAFVEAWARDRWPDSGFLNAERVVRVPLAGDFPLSPFRLVWRTAYVVITALVAMIFPFFNDFLGLIGAVSFWPLTVYFPVQMYMAQAKTRRFSPTWTWMNVLSFSCLVVSLLAAAGSVQGLITDLKGYKPFKVS

SEQ ID NO: 74295 - protein, 81 aa, Setaria italica
  Transcript Sequence Number=SeqID_8321
TSHSPHNRFVRSSHSGCVGDLYTKFQVLLLGGLLTSTACMDICGDEFAMCLVVIALDLNGYIFVLTWWSHLMPHPVFQPGL

SEQ ID NO: 74296 - protein, 72 aa, Setaria italica
  misc_feature (45)..(72): Xaa can be any naturally occurring amino acid
  Transcript Sequence Number=SeqID_8322
NHWSNFKGNKFWIAPRYHLQVVKFLGRSPSAVAALLKPLKKKKKXXXXXXXXXXXXXXXXXXXXXXXXXXXX

SEQ ID NO: 74297 - protein, 66 aa, Setaria italica
  Transcript Sequence Number=SeqID_8323
  Homolog annotation: Hit_ID=B9SSN6; Match level="QueryCoverage=98%, HitCoverage=18%, E-value=6e-21, Identity=73%"; Hit description=Non -imprinted in Prader-Willi/Angelman syndrome region protein, putative
QDPTLLLYAGIVLAAAFVLIFRFAPQYGQTYIMVYIGICSLVGSLSVMSVKALGIALKLTFSGMNQ

SEQ ID NO: 74298 - protein, 218 aa, Setaria italica
  Transcript Sequence Number=SeqID_8324
  Homolog annotation: Hit_ID=B9SSN6; Match level="QueryCoverage=97%, HitCoverage=61%, E-value=7e-90, Identity=77%"; Hit description=Non -imprinted in Prader-Willi/Angelman syndrome region protein, putative
  Pfam annotation: Domain name=DUF803; Domain location=1-212; Score =319.5; E_value=6.9e-93; Accession=PF05653.6; Description=Protein of unknown function (DUF803)
MITMIGRKIANFAAYAFAPAILVTPLGALSIIISAVLAHIMLREKLHIFGILGCILCVVGSTTIVLHAPPERQIESVAEVWDLATEPAFLLYAGIVLAAAFVLIFRFAPQYGQTYIMVYIGICSLVGSLSVMSVKALGIALKLTFSGMNQLVYPQTWVFSFVVVSCIVTQMNYLNKALDTFNTAVVSPIYYTMFTSLTILASVIMFKVTDSDLNIFFT

SEQ ID NO: 74299 - protein, 402 aa, Setaria italica
  Transcript Sequence Number=SeqID_8325
  Homolog annotation: Hit_ID=B9SSN6; Match level="QueryCoverage=91%, HitCoverage=95%, E-value=1e-141, Identity=70%"; Hit description=Non -imprinted in Prader-Willi/Angelman syndrome region protein, putative
  Pfam annotation: Domain name=DUF6; Domain location=40-145; Score=1.7; E_value=0.061; Accession=PF00892.12; Description=Integral membrane protein DUF6
  Pfam annotation: Domain name=DUF803; Domain location=24-357; Score =629.5; E_value=3.3e-186; Accession=PF05653.6; Description=Protein of unknown function (DUF803)
  Pfam module annotation: Pfam domain module=DUF6::DUF803; Domain location=40-145::24-357
MATEASTSAAGAGRGRWVESYTGMSADNIKGLLLALSSSLFIGASFIVKKKGLKKAGAAGVRAGVGGYSYLLEPLWWAGMITMIFGEIANFAAYAFAPAILVTPLGALSIIISAVLADIMLREKLHIFGILGCVLCVVGSTTIVLHAPQERAIESVAEVWDLATEPGALLSCPISCYQILVTPLRYIISVRTNVISLGLAAFLSYAAIVLAATFVLIYYFIPQYGQTHIMVYIGVCSLVGSLSVMSVKALGIALKLTFSGMNQLVYPQTWVFSFVVVSCIVTQMNYLNKALDTFNTAVVSPIYYTMFTSLTILASVIMFKDWDRQNPTQIVTEMCGFVTILSGTFLLHKTKDMVDGLPPNLPIRLPKHEDEDGYAAEGIPLRSAADGIPLRSPRATDSFRSS

SEQ ID NO: 74300 - protein, 63 aa, Setaria italica
  Transcript Sequence Number=SeqID_8326
NFCVMKRLHTYTEKKTANINYKLSLIGRVELYHHSINAQCKKMPASNPALDPFKVKSAIQRTY

SEQ ID NO: 74301 - protein, 88 aa, Setaria italica
  Transcript Sequence Number=SeqID_8327
  Homolog annotation: Hit_ID=B9SLG8; Match level="QueryCoverage=80%, HitCoverage=20%, E-value=1e-28, Identity=78%"; Hit description=Non -imprinted in Prader-Willi/Angelman syndrome region protein, putative
SVIMFKDWDRQNPTQIVTEMCFFVTILSGTFLLHKTKDMVDGLPPNLPIRLPKHEDEDGYAAEGIPLRSAADGIPLRSPRATDSFRSS

SEQ ID NO: 74302 - protein, 195 aa, Setaria italica
  Transcript Sequence Number=SeqID_8328
  Homolog annotation: Hit_ID=B9SSN6; Match level="QueryCoverage=84%, HitCoverage=47%, E-value=9e-81, Identity=85%"; Hit description=Non -imprinted in Prader-Willi/Angelman syndrome region protein, putative
  Pfam annotation: Domain name=DUF803; Domain location=1-148; Score =107.0; E_value=6.3e-29; Accession=PF05653.6; Description=Protein of unknown function (DUF803)
MNRNKLTKKYFIPQYGQTHIMVYIGVCSLVGSLSVMSVKALGIALKLTFSGMNQLIYPQTWLFTIVVVACIVTQMNYLNKALDTFNTAVVSPIYYTMFTSLTILASVIMFKDWDRQNPTQIVTEMCGFVTILSGTFLLHKTKDMADGLPPTLPVRIPKHTDEDDYATEGIPLRSAADGIPLRSPRAAESFRSTSL

SEQ ID NO: 74303 - protein, 88 aa, Setaria italica
  Transcript Sequence Number=SeqID_8329
  Homolog annotation: Hit_ID=B6T7R7; Match level="QueryCoverage=100%, HitCoverage=20%, E-value=6e-30, Identity=76%"; Hit description=AtGRF2
ENMESEKNKYSDSMLVSSTFYHSAEGPRTTCLTPNMTQVQADCISSSWEMPQGGPLGEILTNSKNSNDSNKKCDSRSYGWLLNLDHAP

SEQ ID NO: 74304 - protein, 179 aa, Setaria italica
  Transcript Sequence Number=SeqID_8330
  Gene Ontology: Mol. function=nucleotidyltransferase activity; Biological process=RNA processing
  Homolog annotation: Hit_ID=B9S6T6; Match level="QueryCoverage=83%, HitCoverage=22%, E-value=2e-36, Identity=51%"; Hit description =Poly(A) polymerase, putative
GGVEEWLFPCVGRGGERGREEGERGVEWGSGLRIAARLGFQFSSETSNAIHDLSSSIINIDKARLMMEMNYMLSYGAAEPSVRLLGIYGLLDILLPFQAAYLSDQMKDRARYKDLMLMKLLCNLDRLFSADRPCHCSLWLALLVFHTTLVISPQDTLVIKAFAALLYFGSWESAIEFLK

SEQ ID NO: 74305 - protein, 51 aa, Setaria italica
  Transcript Sequence Number=SeqID_8331
MHPKPEAGDADGGAAEVGSPRSGYFRQRSMHAAAAAADPEAARRALDVENP

SEQ ID NO: 74306 - protein, 185 aa, Setaria italica
  Transcript Sequence Number=SeqID_8332
  Gene Ontology: Mol. function=ubiquitin protein ligase binding; Cellular component=cullin-RING ubiquitin ligase complex; Biological process=ubiquitin-dependent protein catabolic process
  Subcellular localization annotation: CTP_CleavageSite=36; ConfidenceScore=5.30e-01
VTYLLTNFSADLPREQTPSLPPHNAFRSGRKMSFAYGMTESNQRHFGDRTYSTLTTDRARNMRFSMRVPDVNGSVINKKVDVQKEEVKEFDSQDVAIAHENTTSADDGLQVQEPIRISNNRNDSKVRELELKVELLEAELREVAAAEIGLYSIIAEHGSSVNKVHTPARRLLSRSILALKNFSRD

SEQ ID NO: 74307 - protein, 58 aa, Setaria italica
  misc_feature (50)..(50): Xaa can be any naturally occurring amino acid
  Transcript Sequence Number=SeqID_8333
SYKSCDLASNDPPLHEIRTQDKFDIMNEHRSYVTLPSYFFHKECWYQKNXQIYIKGFH

SEQ ID NO: 74308 - protein, 137 aa, Setaria italica
  Transcript Sequence Number=SeqID_8334
  Gene Ontology: Mol. function=zinc ion binding; Cellular component =intracellular
  Homolog annotation: Hit_ID=B6SS63; Match level="QueryCoverage=100%, HitCoverage=25%, E-value=1e-31, Identity=60%"; Hit description =Nucleic acid binding protein
  Subcellular localization annotation: CTP_CleavageSite=48; ConfidenceScore=5.81e-01
ADRQQFAPPPPPSPSPHMSATALLQKAAQMGATSSSSSFLRCLGLDVSSSPGASSSGQQHHHEAMQASLPDTSMQQWPQRMEPEPSPMLSPGLGLGLPYDSSGAPVCLPDLMMGQSSLFSGKPATLDFLGLGMSPTG

SEQ ID NO: 74309 - protein, 165 aa, Setaria italica
  Transcript Sequence Number=SeqID_8335
  Gene Ontology: Mol. function=sulfotransferase activity; Cellular component=cytoplasm
  Homolog annotation: Hit_ID=B6TRN9; Match level="QueryCoverage=100%, HitCoverage=49%, E-value=1e-46, Identity=51%"; Hit description =Flavonol 4-sulfotransferase
  Pfam annotation: Domain name=Sulfotransfer_1; Domain location=1-162; Score=59.1; E_value=1.7e-14; Accession=PF00685.19; Description =Sulfotransferase domain
PKDAFVSRWHFMSEFFGEKPDINVGFNLFCEGVLGYGPYWDHCLEYWRESVIKSDRILFLKYEEMMLEPVKFVKVLASFLGAPFTGEEEDAGVPEEVVRLCSFKTLSGANSSQTEVVQRGSVVVKKSAYFRRGKVGDWVNHISEEMARKLDDIVQEKLKGSGLVF

SEQ ID NO: 74310 - protein, 76 aa, Setaria italica
  Transcript Sequence Number=SeqID_8336
QASVHPQSCMFIYGVSVCKCAYFDILMHPSYSHQNGRIHQAEHNCLTECTWYQNGRIQQNACTWSLFSAMVPTTND

SEQ ID NO: 74311 - protein, 48 aa, Setaria italica
  Transcript Sequence Number=SeqID_8337
LDKLQFILKAGAYLVPWYQQQTINRMHMRRTYDLTKTFALSSKGNLGF

SEQ ID NO: 74312 - protein, 48 aa, Setaria italica
  Transcript Sequence Number=SeqID_8338
LDKLQFILKAACSYMVSWFLITLSLWLLSYTCLCRTLFHASKPTHPSI

SEQ ID NO: 74313 - protein, 62 aa, Setaria italica
  Transcript Sequence Number=SeqID_8339
LLLECKLLIPFKLFISIFVHDCNIILVFLVRLPFDDNANVFGQIICSSHVHSVNRLLLVPWH

SEQ ID NO: 74314 - protein, 110 aa, Setaria italica
  Transcript Sequence Number=SeqID_8340
  Gene Ontology: Cellular component=extracellular region; Biological process=xenobiotic metabolic process
  Homolog annotation: Hit_ID=B6SSJ6; Match level="QueryCoverage=100%, HitCoverage=47%, E-value=8e-40, Identity=76%"; Hit description =Protein P21
  Pfam annotation: Domain name=Thaumatin; Domain location=1-110; Score =91.1; E_value=3.9e-24; Accession=PF00314.9; Description=Thaumatin family
SLVDGFNVPMDFLPAGGGAGCPKGGPRCRADVTAQCPAQLRATGGCNNPCTVFKTDQYCCTGSEQDTCGPTDYSRFFKGQCPDAYSYPKDDATSTYTCPGGTNYNVVFCP

SEQ ID NO: 74315 - protein, 387 aa, Setaria italica
  Transcript Sequence Number=SeqID_8341
  Gene Ontology: Mol. function=transporter activity; Cellular component= integral to membrane; Biological process=transport
  Homolog annotation: Hit_ID=O64909; Match level="QueryCoverage=100%, HitCoverage=100%, E-value=0.0, Identity=82%"; Hit description =Glucose-6-phosphate/phosphate translocator 2
  Pfam annotation: Domain name=DUF6; Domain location=105-230; Score =32.8; E_value=1.4e-06; Accession=PF00892.12; Description=Integral membrane protein DUF6
  Pfam annotation: Domain name=DUF6; Domain location=248-384; Score =14.8; E_value=0.011; Accession=PF00892.12; Description=Integral membrane protein DUF6
  Pfam annotation: Domain name=TPT; Domain location=239-384; Score =188.3; E_value=2.1e-53; Accession=PF03151.8; Description=Triose -phosphate Transporter family
  Pfam annotation: Domain name=UAA; Domain location=96-387; Score= -132.4; E_value=0.00098; Accession=PF08449.3; Description=UAA transporter family
  Pfam module annotation: Pfam domain module=DUF6::DUF6::TPT::UAA; Domain location=105-230::248-384::239-384::96-387
  Subcellular localization annotation: CTP_CleavageSite=68; ConfidenceScore=5.67e-01
MLPSVRLSPAPAAFSGSSLRSKSASIPSISSLKPSKYVVSSLRPLYLAPLDGPRTAELKAQRQPLEFRCAASAADDKESKAEVVPVQSEGAQKLKISIYFATWWALNVIFNIYNKKVLNAFPYPWLTSTLSLACGSAMMIFSWATRLVEAPKTDLDFWKVLFPVAVAHTIGHVAATVSMSKVAVSFTHIIKSAEPAFSVLVSRFILGETFPVPVYLSLLPIIGGCALAAVTELNFNMVGFMGAMISNLAFVFRNIFSKKGMKGKSVSGMNYYACLSIMSLVILTPFAIAMEGPQMWAAGWQKALAEVGPNVIWWIAAQSVFYHLYNQVSYMSLDQISPLTFSIGNTMKRISVIVSSIIIFHTPVRPVNALGAAIAILGTFLYSQAKA

SEQ ID NO: 74316 - protein, 89 aa, Setaria italica
  Transcript Sequence Number=SeqID_8342
  Gene Ontology: Mol. function=ATPase activity, coupled to transmembrane movement of ions, phosphorylative mechanism; Cellular component=membrane; Biological process=metabolic process
  Homolog annotation: Hit_ID=Q5JNL2; Match level="QueryCoverage=93%, HitCoverage=13%, E-value=7e-37, Identity=83%"; Hit description =Haloacid dehalogenase-like hydrolase-like
ALSPLSSSPYIHLQGLLVYGLEGRQIYKRNLDQDVCREALLYSLEHKIPLVAFSQDHCYSMFDHPLVDSLHYIYHEPKAKIVSSVDQLL

SEQ ID NO: 74317 - protein, 464 aa, Setaria italica
  Transcript Sequence Number=SeqID_8343
  Gene Ontology: Mol. function=ATPase activity, coupled to transmembrane movement of ions, phosphorylative mechanism; Cellular component=membrane; Biological process=metabolic process
  Homolog annotation: Hit_ID=Q5JNL2; Match level="QueryCoverage=100%, HitCoverage=78%, E-value=0.0, Identity=86%"; Hit description =Haloacid dehalogenase-like hydrolase-like
  Pfam annotation: Domain name=Hydrolase; Domain location=192-436; Score=37.6; E_value=5e-08; Accession=PF00702.18; Description =haloacid dehalogenase-like hydrolase
  Pfam annotation: Domain name=Hydrolase_3; Domain location=195-459; Score=210.9; E_value=3.3e-60; Accession=PF08282.4; Description =haloacid dehalogenase-like hydrolase
  Pfam annotation: Domain name=S6PP; Domain location=191-464; Score= -91.4; E_value=0.00025; Accession=PF05116.5; Description=Sucrose-6F -phosphate phosphohydrolase
  Pfam annotation: Domain name=UPF0054; Domain location=2-150; Score =74.2; E_value=4.9e-19; Accession=PF02130.9; Description =Uncharacterized protein family UPF0054
  Pfam module annotation: Pfam domain module=Hydrolase::Hydrolase _3::S6PP::UPF0054; Domain location=192-436::195-459::191-464::2-150
NIVELLKLNVPMAMKIALDGLVDSNYSTRDTSISDVGKYDKVEVSVLLCNDNFIQNLNKEWRGEDCTTDMLSMSQYIPDLDVPILMLGDIVISVETAARQAEEKGVTLLDEVRVLVVRGILHLLGFHHESSNEAAMELEKEEQLILKSLRWKGKSLAKGAQDSSKPQTVSLDGKVTSSQKRAVTLRFYRPKFKYIFCDMDGTLLNSKSQITARNAEALREARSRGVNIVIATGKARPAVIDALSMADLSGRNGIVSESSPGVFLQGLLVYGLEGRQIYKRNLDQDVCREALLYSLEHKIPLVAFSQDHCYSMFDHPLVDSLHYIYHEPKAKIVSSVDQLLGTAEIQKVLFLETPEGISSALRPYWAKAIEGRAHVVQAQPDMLELVPPATSKGNGVEILLNHLSISPDEVMAIGDGENDIEMLQLASFGVALANGSEKTKAVANVIGATNDEDGVAQAIYEYVF

SEQ ID NO: 74318 - protein, 180 aa, Setaria italica
  Transcript Sequence Number=SeqID_8344
  Gene Ontology: Mol. function=zinc ion binding; Cellular component =nucleus; Biological process=regulation of transcription
  Homolog annotation: Hit_ID=Q5NBA7; Match level="QueryCoverage=97%, HitCoverage=38%, E-value=9e-69, Identity=69%"; Hit description =Putative ascorbate oxidase promoter-binding protein AOBP
  Pfam annotation: Domain name=zf-Dof; Domain location=85-147; Score =138.9; E_value=1.6e-38; Accession=PF02701.7; Description=Dof domain, zinc finger
KFDASKKEQDGEMKVDAQQEKKDEQMKVDAPPRAENIQPGTSPRSDHKKEDQGQMNSTEDKAASDPKGESEKANDESGQDKTLKKPDKILPCPRCNSMDTKFCYYNNYNVNQPRHFCKNCQRYWTAGGTMRNVPVGAGRRKSKNAPLHYRQLLMAPDCMLGSRSGYIKVSAPEALVFPPS

SEQ ID NO: 74319 - protein, 43 aa, Setaria italica
  Transcript Sequence Number=SeqID_8345
CPGVMFCCSMPMKTSSFSFRSFGLPTYYPCAKMYVSSHLRFFI

SEQ ID NO: 74320 - protein, 64 aa, Setaria italica
  misc_feature (23)..(23): Xaa can be any naturally occurring amino acid
  Transcript Sequence Number=SeqID_8346
  Gene Ontology: Mol. function=alpha-1,4-glucan-protein synthase (UDP -forming) activity; Cellular component=plant-type cell wall; Biological process=cellulose biosynthetic process
  Homolog annotation: Hit_ID=O24548; Match level="QueryCoverage=92%, HitCoverage=17%, E-value=2e-28, Identity=93%"; Hit description=Type IIIa membrane protein cp-wap13
VIGPAMYFGLMGDGQPIGRYDDXWAGWCTKVITDHLGLGVKTGLPYIWHSKASNPFVNLIVSKV

SEQ ID NO: 74321 - protein, 277 aa, Setaria italica
  misc_feature (145)..(145): Xaa can be any naturally occurring amino acid
  Transcript Sequence Number=SeqID_8347
  Gene Ontology: Mol. function=alpha-1,4-glucan-protein synthase (UDP -forming) activity; Cellular component=plant-type cell wall; Biological process=cellulose biosynthetic process
  Homolog annotation: Hit_ID=O24548; Match level="QueryCoverage=94%, HitCoverage=75%, E-value=1e-136, Identity=88%"; Hit description=Type IIIa membrane protein cp-wap13
  Pfam annotation: Domain name=RGP; Domain location=1-266; Score=559.0; E_value=5.7e-165; Accession=PF03214.5; Description=Reversibly glycosylated polypeptide
ACRCFGYMVSKKKYIYTIDDDCFVAKDPSGKDINALEQHIKNLLSPSTPFFFNTLYDPYRDGADFVRGYPFSLREGVPTAVSHGLWLNIPDYDAPTQLVKPLERNTRYVDAILTIPKGTLFPMCGMNLAFGSDCSLLSMYFGLMXGDGQPIGRYDDMWAGWCTKVITDHLGLGVKTGLPYIWHSKASNPFVNLKKEYNGIFWQEELIPFFQSVSLPKEATTVQKCYLELAKQVRAKLGKVDGYFNKLADAMVTWIEAWDELNPPKGGVATANGPPKK

SEQ ID NO: 74322 - protein, 54 aa, Setaria italica
  Transcript Sequence Number=SeqID_8348
  Subcellular localization annotation: CTP_CleavageSite=21; ConfidenceScore=5.33e-01
MAPSSSSASAGSHAGLAIAATAMALSGTLVLFSICHVQTTSSNQRPTNLLPRPP

SEQ ID NO: 74323 - protein, 574 aa, Setaria italica
  Transcript Sequence Number=SeqID_8349
  Gene Ontology: Mol. function=hydrolase activity; Cellular component =nucleoplasm; Biological process=nuclear mRNA splicing, via spliceosome
  Homolog annotation: Hit_ID=Q9UKF6; Match level="QueryCoverage=98%, HitCoverage=84%, E-value=1e-163, Identity=49%"; Hit description =Cleavage and polyadenylation specificity factor subunit 3
  Pfam annotation: Domain name=RMMBL; Domain location=273-315; Score =63.3; E_value=9e-16; Accession=PF07521.4; Description=RNA -metabolising metallo-beta-lactamase
MDYVKVSKVSVEDMLYNESDIGRSMEKIEVIDFHQTLEVNGIRFWCYTAGHVLGAAMFMVDIAGVRILYTGDYSREEDRHLRAAELPQFSPDICIIESTYGIQQHQPRIVREKRFTEVIHNTVSQGGRVLIPAFALGRAQELLLILDEYWSKHPELHKIPIYYASPLAKRCMSVYQTYINSMNDRIRNQFAQSNPFIFKHIESLNSIENFHDVGPSVVMASPGGLQSGLSRQLFDKWCTDKKNACVIPGYVVEGTLAKTIINEPREVTLANGLTAPLHMQVHYISFSAHADFPQTSNFLDELRPPNIILVHGEANEMSRLKQKLISQFDGTNTKIVSPKNCQSVEMYFTCEKMAKTIGRLAENVPGGGESSGGLLVKKGFTYQIMAPEDLRVFTQLSTANITQRIAVPYSGSFEVIKYRLNQIYESVESATEESDVPALIVHERVTVRLDSESYVTLQWSSDPISDMVSDSVVSMILNIGREGPKVVPVEEAAKTKEDTERVALKVVYSLMASLFGDVKVGDEGKFVISVDGDVAHLDGRSGDVECVNGTLKERIKTAFRRIQGAVRPIPLSAS

SEQ ID NO: 74324 - protein, 218 aa, Setaria italica
  Transcript Sequence Number=SeqID_8350
  Gene Ontology: Mol. function=methyltransferase activity; Biological process=response to cadmium ion
  Homolog annotation: Hit_ID=B6TX72; Match level="QueryCoverage=100%, HitCoverage=83%, E-value=1e-106, Identity=85%"; Hit description =Embryonic abundant protein-like
  Pfam annotation: Domain name=Methyltransf_11; Domain location=38-135; Score=34.4; E_value=4.7e-07; Accession=PF08241.4; Description =Methyltransferase domain
  Pfam annotation: Domain name=Methyltransf_12; Domain location=38-133; Score=48.0; E_value=3.6e-11; Accession=PF08242.4; Description =Methyltransferase domain
  Pfam module annotation: Pfam domain module=Methyltransf _11::Methyltransf_12; Domain location=38-135::38-133
MANLFLKQAKQYVATRPSYPPELFDFIASKTPRRDLAWDVGTGNGQAAASLAKLYKAVVGTDTSAQQLAFAAPLPNVRYVHTAPDLPLDGIHAAVAGPGTADLITVAQAFHWLDLPRFYAQARSVLRPAQGVLAAWCYTEPRVSAAVDAVFWRLYRGSQPYWAPNRRMVDDEYRGADFPFDPVDGEAHTGPFEFSTERAMDLNGYLTYITSWSAYQTA

SEQ ID NO: 74325 - protein, 336 aa, Setaria italica
  Transcript Sequence Number=SeqID_8351
  Gene Ontology: Mol. function=sequence-specific DNA binding; Cellular component=nucleus; Biological process=regulation of transcription, DNA-dependent
  Homolog annotation: Hit_ID=Q76DY1; Match level="QueryCoverage=23%, HitCoverage=30%, E-value=1e-21, Identity=58%"; Hit description=AG -motif binding protein-3
  Pfam annotation: Domain name=GATA; Domain location=155-190; Score =60.9; E_value=4.7e-15; Accession=PF00320.19; Description=GATA zinc finger
  Pfam annotation: Domain name=GATA; Domain location=19-54; Score=52.3; E_value=1.9e-12; Accession=PF00320.19; Description=GATA zinc finger
  Pfam module annotation: Pfam domain module=GATA::GATA; Domain location=155-190::19-54
RPHTPSPAMERPASRARRCLQCGAVETPQWRSGPMGSGTLCNACGVRLKAAGALREQVHRPPPASARTVAEPPPESPVSDSSPDGPIWEPGSVPDVYLLRKKPPKQGKDLPPPRMEPESPPAPAPAVYLLKKKKKKPPKASKKKPWRPRKSSKRCLHCGSSSTPQWREGPMGRSTLCNACGVRYRQGRLLPEYRPLASPSFEPSAHANRHSQVLQLHRQRKGQKNQPPLPTEQPRLMDDLTGALACSGDGDDPMNVLLPRRWHDKDEYPRTPLHQPLPQPADSLPGDPRVGGIDATAQGRGGRGNDPNGAPSSLDSLLLEGPSAPLIDDGDESLIE

SEQ ID NO: 74326 - protein, 41 aa, Setaria italica
  Transcript Sequence Number=SeqID_8352
  Gene Ontology: Mol. function=structural constituent of ribosome; Cellular component=intracellular; Biological process=translation
  Homolog annotation: Hit_ID=B9S1T8; Match level="QueryCoverage=80%, HitCoverage=13%, E-value=6e-09, Identity=84%"; Hit description=50S ribosomal protein L19, putative
CNFSFSFSYSPNIKEIKILDRKNVRRAKLYYLRDRMNALRK

SEQ ID NO: 74327 - protein, 217 aa, Setaria italica
  Transcript Sequence Number=SeqID_8353
  Gene Ontology: Mol. function=structural constituent of ribosome; Cellular component=intracellular; Biological process=translation
  Homolog annotation: Hit_ID=B9S1T8; Match level="QueryCoverage=57%, HitCoverage=50%, E-value=1e-52, Identity=78%"; Hit description=50S ribosomal protein L19, putative
  Pfam annotation: Domain name=Ribosomal_L19; Domain location=109-215; Score=76.1; E_value=1.2e-19; Accession=PF01245.12; Description =Ribosomal protein L19
RRPKNRGAAARLLEFAAPVATQPAAAQSSSAIQYLRPYGFSRLTVSQIILRDGIPAASAFCTRALTMRGFSMVGNAEVASDEDDSSSPAVEHPPRIKFKRLDKTARHIMNILNKEAVEKVRSEREVPDVQPGCIIQMRLQVPENKRRESTLKGIVIGRRNAGIHTTFRLRRLVAGVGVESVFPLYSPNIKEIKVLDRKKVRRAKLYYLRDRMNALRK

SEQ ID NO: 74328 - protein, 109 aa, Setaria italica
  Transcript Sequence Number=SeqID_8354
  Gene Ontology: Mol. function=glutathione transferase activity
  Homolog annotation: Hit_ID=B6TXQ4; Match level="QueryCoverage=98%, HitCoverage=44%, E-value=1e-25, Identity=51%"; Hit description =Glutathione S-transferase, C-terminal domain containing protein
GQANKYTNRGQKDLFGPGALERASIEQWLQTEAHSFDIPSADMVYSLAYLPPDMPLDGRGAAAGMHPSHRQKVEEMAQLFEKSRKDLGKLLDIYEQRLGEEEFLAGSKF

SEQ ID NO: 74329 - protein, 279 aa, Setaria italica
  Transcript Sequence Number=SeqID_8355
  Gene Ontology: Mol. function=DNA binding
  Homolog annotation: Hit_ID=B9RZ85; Match level="QueryCoverage=90%, HitCoverage=52%, E-value=3e-73, Identity=54%"; Hit description =Pentatricopeptide repeat-containing protein, putative
  Pfam annotation: Domain name=PPR; Domain location=108-142; Score =15.5; E_value=0.13; Accession=PF01535.12; Description=PPR repeat
  Pfam annotation: Domain name=PPR; Domain location=143-177; Score =15.2; E_value=0.14; Accession=PF01535.12; Description=PPR repeat
  Pfam module annotation: Pfam domain module=PPR::PPR; Domain location =108-142::143-177
NFSYRICINSYGARADIFGLENTLEEMECEPQIVVDWNTYAVVANNYIKGNLREKAYSALQKAESKLDKRNSESYNHLTSLYCHLGDKSEVKRLWALQMSNCKRHINKDYMTMLAVLVKLDEIEEAESVLKEWESSGNAFDFHVPNILLTGYRQKDLLDKAEMLLDDFLKRGKVPPPSSWAIVAIGYAEKGNVVKTYELTKNALRVYTPNSGWIPSSSMIEMILQYLRDEGELKDVETFVDLLKVAVPVNSDMAEEALSRARAREEKRLKRQMLEAVVA

SEQ ID NO: 74330 - protein, 43 aa, Setaria italica
  misc_feature (15)..(15): Xaa can be any naturally occurring amino acid
  misc_feature (25)..(25): Xaa can be any naturally occurring amino acid
  Transcript Sequence Number=SeqID_8356
  Gene Ontology: Mol. function=structural constituent of ribosome; Cellular component=ribonucleoprotein complex; Biological process =translation
  Homolog annotation: Hit_ID=P49397; Match level="QueryCoverage=97%, HitCoverage=15%, E-value=2e-13, Identity=90%"; Hit description=40S ribosomal protein S3a
GIEKATSSIFPLQNXVFIRKVKILXAPKFDLGKLMEVHGDYTK

SEQ ID NO: 74331 - protein, 69 aa, Setaria italica
  Transcript Sequence Number=SeqID_8357
  Gene Ontology: Mol. function=structural constituent of ribosome; Cellular component=ribonucleoprotein complex; Biological process =translation
  Homolog annotation: Hit_ID=P49397; Match level="QueryCoverage=69%, HitCoverage=18%, E-value=2e-19, Identity=93%"; Hit description=40S ribosomal protein S3a
MAVGKNKRISKGKKGGKKKTVDPFAKKDWYDIKAPSVFSVRNIGKTLVSRTQGTKIASEGLKHTVLETL

SEQ ID NO: 74332 - protein, 158 aa, Setaria italica
  misc_feature (10)..(10): Xaa can be any naturally occurring amino acid
  misc_feature (86)..(86): Xaa can be any naturally occurring amino acid
  Transcript Sequence Number=SeqID_8358
  Gene Ontology: Mol. function=structural constituent of ribosome; Cellular component=ribonucleoprotein complex; Biological process =translation
  Homolog annotation: Hit_ID=P49397; Match level="QueryCoverage=98%, HitCoverage=59%, E-value=2e-82, Identity=92%"; Hit description=40S ribosomal protein S3a
  Pfam annotation: Domain name=Ribosomal_S3Ae; Domain location=1-158; Score=261.3; E_value=2.3e-75; Accession=PF01015.10; Description =Ribosomal S3Ae family
QGTKIASEGXKHRVFEVSLADLQSDEDQAYRKIRLRAEDIQGRNVLTNFWGMDFTTDKLRSLVRKWQTLIEAHVDVKTTDNYMLRXFCIGFTKRRPNQVKRTCYAQASQIRQIRRKMVEIMANQASTCDLKELVSKFIPEVIGKEIEKATSSILSLLV

SEQ ID NO: 74333 - protein, 163 aa, Setaria italica
  misc_feature (22)..(22): Xaa can be any naturally occurring amino acid
  misc_feature (126)..(126): Xaa can be any naturally occurring amino acid
  Transcript Sequence Number=SeqID_8359
  Gene Ontology: Mol. function=structural constituent of ribosome; Cellular component=ribonucleoprotein complex; Biological process =translation
  Homolog annotation: Hit_ID=P49397; Match level="QueryCoverage=82%, HitCoverage=51%, E-value=7e-69, Identity=91%"; Hit description=40S ribosomal protein S3a
  Pfam annotation: Domain name=Ribosomal_S3Ae; Domain location=1-138; Score=195.1; E_value=1.9e-55; Accession=PF01015.10; Description =Ribosomal S3Ae family
LRAEDIQGRNVLTNFWGMDFTXTDKLRSLVRKWQTLIEAHVDVKTTDNYMLRLFCIGFTKRRPNQVKRTCYAQASQIRQIRRKMVEIMANQASTCDLKELVSKFIPEVIGKEIEKATSSIFPLQNXFIRKVKMLEVAFSISLPMTSGINLDTNSFRSQVEACA

SEQ ID NO: 74334 - protein, 95 aa, Setaria italica
  Transcript Sequence Number=SeqID_8360
  Subcellular localization annotation: CTP_CleavageSite=84; ConfidenceScore=5.14e-01
GGQSGGKQNKYGSSRWKGKTTKALNQNRGLLVLLTFVLSYHLKGATLPNFPLPTLYPLHCHPSHHPHGILTCTPDTPTMNGECNARYSMSCNCIT

SEQ ID NO: 74335 - protein, 179 aa, Setaria italica
  misc_feature (127)..(127): Xaa can be any naturally occurring amino acid
  Transcript Sequence Number=SeqID_8361
  Gene Ontology: Mol. function=protein binding; Cellular component =clathrin adaptor complex; Biological process=intracellular protein transport
  Homolog annotation: Hit_ID=Q9SB50; Match level="QueryCoverage=89%, HitCoverage=25%, E-value=9e-37, Identity=52%"; Hit description =Clathrin coat assembly like protein
  Pfam annotation: Domain name=Adap_comp_sub; Domain location=16-176; Score=17.4; E_value=7.7e-07; Accession=PF00928.13; Description =Adaptor complexes medium subunit family
ERISVVLFLVFLVGLIILTSEIDGTIQMKSYLTGNPEIRLALNEDLSIGRTGSSSYDYRSSSGGAVILDDCNFHESVHLDSFDIDRTLTLVSTLIRLLFLVISFVFWAEHQALYLRITMYYFSKVRXFLFTIAQIPPDGEFAVMNYRMTQEFKPPFRVTALIEEAGPSRAEVLLKIRAD

SEQ ID NO: 74336 - protein, 269 aa, Setaria italica
  Transcript Sequence Number=SeqID_8362
  Gene Ontology: Mol. function=protein binding; Cellular component =clathrin adaptor complex; Biological process=intracellular protein transport
  Homolog annotation: Hit_ID=Q9SB50; Match level="QueryCoverage=97%, HitCoverage=58%, E-value=1e-118, Identity=77%"; Hit description =Clathrin coat assembly like protein
  Pfam annotation: Domain name=Adap_comp_sub; Domain location=6-269; Score=368.9; E_value=9.1e-108; Accession=PF00928.13; Description =Adaptor complexes medium subunit family
KENFQLDDIIERISVTFSSSGYILTSEIDGTIQMKSYLTGNPEIRLALNEDLSIGRTGSSSYDYRSSSGGAVILDDCNFHESVHLDSFDIDRTLTLIPPDGEFAVMNYRMTQEFKPPFRVTALIEEAGPSRAEVLLKIRADFSANVTANTITVQMPVPSYTMRASFELEAGAVGQTTDFKEGSRRLEWNLKKIVGGSEHTLRAKLTFSQESHGNITKEAGPVNMNFTIPMYNASKLQVRYLQIAKKSKTYNPYRWVRYVTQANSYVARL

SEQ ID NO: 74337 - protein, 113 aa, Setaria italica
  Transcript Sequence Number=SeqID_8363
PISYGCVGNQGSPTQQPNRIDQLRERMEDFDLVARAVETPISYLESNEARKRVRVPYQQEESVPSADYSLHQSDSRRGDAEGNEEEDGRRRRIPSSSEVARLLAWRMDDVAKL

SEQ ID NO: 74338 - protein, 58 aa, Setaria italica
  Transcript Sequence Number=SeqID_8364
  Gene Ontology: Mol. function=signal transducer activity
  Homolog annotation: Hit_ID=Q84YF6; Match level="QueryCoverage=93%, HitCoverage=8%, E-value=3e-09, Identity=66%"; Hit description=RPT2 -like protein
  Subcellular localization annotation: CTP_CleavageSite=35; ConfidenceScore=5.05e-01
PSPAAKKTSFLGSVSRTLSRLNPFKGGWAKDTASVADGRDGRKDMHVVRPKRRRSSIS

SEQ ID NO: 74339 - protein, 327 aa, Setaria italica
  Transcript Sequence Number=SeqID_8365
  Gene Ontology: Mol. function=signal transducer activity; Cellular component=plasma membrane; Biological process=response to light stimulus
  Homolog annotation: Hit_ID=Q84YF6; Match level="QueryCoverage=99%, HitCoverage=59%, E-value=2e-95, Identity=54%"; Hit description=RPT2 -like protein
  Pfam annotation: Domain name=NPH3; Domain location=1-186; Score=62.1; E_value=2.1e-15; Accession=PF03000.6; Description=NPH3 family
DVLPSAADAPIPAAFLCRLLHTAVTTEASAKTCRDLELRVAAVLDQATVGDLLGVALDGAGEHVRNTDTVRRVIAAFVERQAAASEGGRSRRASLSGGAELDSGAAMEKVAKTVDELAAEIATEESLAISKFVGVAGAVPKEARASHDCLYRAVDIYLKTHPELDEIEREKVCSVMDPLKLSYQARLHASQNKRLPLQAVLSALYYDQLKLRSAAGAGDDDTQSAAGKARAQARADASLARENEALRSELARMRAYLSGVQPSKGSGSSPSPAAKKTSFLGSVSRTLSRLNPFKGGWAKDTASVADGRDGRKEMHVVRPKRRRFSIS

SEQ ID NO: 74340 - protein, 118 aa, Setaria italica
  misc_feature (87)..(87): Xaa can be any naturally occurring amino acid
  Transcript Sequence Number=SeqID_8366
  Gene Ontology: Mol. function=ARF GTPase activator activity; Cellular component=plasma membrane; Biological process=regulation of ARF GTPase activity
  Homolog annotation: Hit_ID=Q8L7A4; Match level="QueryCoverage=69%, HitCoverage=20%, E-value=3e-24, Identity=64%"; Hit description =Probable ADP-ribosylation factor GTPase-activating protein AGD11
  Pfam annotation: Domain name=ArfGap; Domain location=48-118; Score =39.0; E_value=1.3e-08; Accession=PF01412.10; Description=Putative GTPase activating protein for Arf
MERERMEGNNLLHFLDTPSAHYRRTCDGFEAENGGDDHSDASDPATAREMLECLLNQPANKFCADCGIPDPKWAALPFGAFICIKCXSGTHRSLGVHISKVISVNLDEWTDEEVNCLA

SEQ ID NO: 74341 - protein, 232 aa, Setaria italica
  Transcript Sequence Number=SeqID_8367
  Gene Ontology: Mol. function=hydrolase activity, hydrolyzing O -glycosyl compounds; Cellular component=extracellular region; Biological process=carbohydrate metabolic process
  Homolog annotation: Hit_ID=B6TU78; Match level="QueryCoverage=92%, HitCoverage=48%, E-value=7e-86, Identity=80%"; Hit description =Glucan endo-1,3-beta-glucosidase 7
  Pfam annotation: Domain name=Glyco_hydro_17; Domain location=29-232; Score=28.9; E_value=1.7e-12; Accession=PF00332.10; Description =Glycosyl hydrolases family 17
MAERRWIMLALLGVIQLLRLPSVAPQSFIGINYGDVADNLPPPSSTARLLQSTTISKVRLYGTDPAVVSAFAGTGISLLLGATNGDIANLASSPAAASAWVAAHIPSSSPAVSTVSVGNEVLFADASLASQLVPAMQNLYDALPPNSSVKVSTVNAMDVLASSDPPSSGAFKPELSATLDPLLAFLSKTGSPFLINPYPYFAYLSDPRPETLAFCLFQPNAGRPDAGSGLTY

SEQ ID NO: 74342 - protein, 248 aa, Setaria italica
  Transcript Sequence Number=SeqID_8368
  Gene Ontology: Mol. function=electron carrier activity; Cellular component=integral to membrane; Biological process=oxidation reduction
  Homolog annotation: Hit_ID=Q9LDC7; Match level="QueryCoverage=100%, HitCoverage=48%, E-value=1e-112, Identity=80%"; Hit description =Sterol C-22 desaturase-like
GVEPECLVDFWMQDTLREMEEAASAGRPPPAHTDDEEIGGFMFDFLFAAQDASTSSLCWAVSALDSHPDVLARVRTEVAAAWSPESGEPITAEKIQEMRYTQAVAREVVRHRPPATLVPHIAGEPFQLTEWYTVPKGAIVFPSVYESSFQGFPEPDAFDPERFFSESRREDVVFKRNFLAFGAGPHQCVGQRYALNHLVLFMALFVSVVDFRRERTPGCDDPVYMPTIVPKDGCAVYLKQRCAKFPSF

SEQ ID NO: 74343 - protein, 28 aa, Setaria italica
  Transcript Sequence Number=SeqID_8369
IESGCWYNSCKNTNSAQVTYFSQSGIET

SEQ ID NO: 74344 - protein, 194 aa, Setaria italica
  Transcript Sequence Number=SeqID_8370
  Gene Ontology: Mol. function=nucleoside-triphosphatase activity; Cellular component=membrane; Biological process=transport
  Homolog annotation: Hit_ID=Q8GU82; Match level="QueryCoverage=100%, HitCoverage=14%, E-value=1e-77, Identity=68%"; Hit description=PDR -like ABC transporter
  Pfam annotation: Domain name=ABC2_membrane; Domain location=1-132; Score=39.2; E_value=1.6e-08; Accession=PF01061.16; Description=ABC-2 type transporter
VFYREKASGMYSSLPYVIAQIAVEIPYIFIQVFIFSATVYPMAGFELTVTKFLWFVIYMILSFIDFTLFGMMVVALTPNEEIAAVLSFFIFMIWNSFSGFILPRKMIPTWWRWMYWADPAAWTVYGLMLSQLGDRMEFISVPGQPDQSVSEFVKDYLGLQDDHFALITTLHIALSTLFGVVFCLAIKYLKFQRR

SEQ ID NO: 74345 - protein, 179 aa, Setaria italica
  Transcript Sequence Number=SeqID_8371
  Gene Ontology: Mol. function=beta-N-acetylhexosaminidase activity; Cellular component=lysosome; Biological process=carbohydrate metabolic process
  Homolog annotation: Hit_ID=B4FYZ2; Match level="QueryCoverage=100%, HitCoverage=29%, E-value=3e-98, Identity=96%"; Hit description=Beta -hexosaminidase beta chain
  Pfam annotation: Domain name=Glyco_hydro_20; Domain location=1-179; Score=-60.1; E_value=1.2e-08; Accession=PF00728.14; Description =Glycosyl hydrolase family 20, catalytic domain
GHAGSWAGAYPEIVTCANKFWAPTAKPALAAEPGTGQLNPLNPKTYRVAQDVLRDLAALFPDPYLHAGADEVNTACWEDDPTVRRFLADGGTHDRLLELFVNATRPFLVHELNRTAVYWEDVLLGPKVSVGQTVLPHDTTVLQTWNNGAENTKRIVAAGYRAIVSSASYYYLDCGHGGW

SEQ ID NO: 74346 - protein, 73 aa, Setaria italica
  Transcript Sequence Number=SeqID_8372
  Homolog annotation: Hit_ID=B6THH6; Match level="QueryCoverage=63%, HitCoverage=8%, E-value=4e-10, Identity=65%"; Hit description=Prolyl carboxypeptidase like protein
MGSGSARVATAAARLFAATAAFLLMLARGGESVSFWLPPPSAGGGGQGFLGGADRYLTRDERWMDQTLDHFNP

SEQ ID NO: 74347 - protein, 180 aa, Setaria italica
  Transcript Sequence Number=SeqID_8373
  Gene Ontology: Mol. function=serine-type peptidase activity; Biological process=proteolysis
  Homolog annotation: Hit_ID=Q9FW17; Match level="QueryCoverage=88%, HitCoverage=25%, E-value=9e-86, Identity=91%"; Hit description =Putative serine peptidase
  Subcellular localization annotation: CTP_CleavageSite=25; ConfidenceScore=5.35e-01
FFVFLFFVFIFSFNSSYFVSNTTPPAAESSSRLWWYQVCSEVAFFQVAPKNDSVRSQKIDTRYHLDLCRNVFGEGVYPDVFMTNLYYGGTKIAGSKIVFANGSQDPWRHASKQKSSEELPSYLIECKNCGHCSDLSGCPQAPSNIEGDSSKCSSPEALNKVRKQIVDQIDLWLSECQERG

SEQ ID NO: 74348 - protein, 147 aa, Setaria italica
  misc_feature (73)..(73): Xaa can be any naturally occurring amino acid
  Transcript Sequence Number=SeqID_8374
  Gene Ontology: Mol. function=serine-type peptidase activity; Biological process=proteolysis
  Homolog annotation: Hit_ID=B6THH6; Match level="QueryCoverage=86%, HitCoverage=24%, E-value=1e-66, Identity=92%"; Hit description =Prolyl carboxypeptidase like protein
IDHAFDYWFSLASRLWWYQVCSEVAFFQVAPKNDSVRSQKIDTRYHLDLCRNVFGEGVYPDVFMTNLYYGGTXLQVLKIVFANGSQDPWRHASKQKSSEELPSYLIECKNCGHCSDLSGCPQAPSNIEGDSSKCSSPEALIDNLFSY

SEQ ID NO: 74349 - protein, 484 aa, Setaria italica
  Transcript Sequence Number=SeqID_8375
  Gene Ontology: Mol. function=serine-type peptidase activity; Biological process=proteolysis
  Homolog annotation: Hit_ID=B6THH6; Match level="QueryCoverage=95%, HitCoverage=90%, E-value=0.0, Identity=91%"; Hit description=Prolyl carboxypeptidase like protein
  Pfam annotation: Domain name=Abhydrolase_1; Domain location=94-345; Score=-4.1; E_value=0.012; Accession=PF00561.12; Description =alphabeta hydrolase fold
  Pfam annotation: Domain name=Peptidase_S28; Domain location=36-453; Score=225.7; E_value=1.2e-64; Accession=PF05577.4; Description =Serine carboxypeptidase S28
  Pfam module annotation: Pfam domain module=Abhydrolase_1::Peptidase _S28; Domain location=94-345::36-453
GEVAVVGGAAEDSGGEVAVVGGADRYLTRDERWMDQTLDHFNPTDHRQFKQRYYEFLDYYRAPNGPIFLNICGEASCNGISNDYLAVMAKKFGAALVSPEHRYYGKSSPFDSLTTENLRFLSSKQALFDLAVFRQYYQETLNAKYNRSGADSSWFVFGGSYAGALSAWFRLKFPHLTCGSLASSGVVLAVYNFTDFDKQIGESAGPECKEALQEVTRLVDGQLQSGRNSVKQLFGAAKLENDGDFLYLLADAAAIAFQYGNPDVLCSPLVEAKKNGTDLVETFASYVKDYYIGKFKASVASYDQQYLKNTTPPAAESSSRLWWYQVCSEVAFFQVAPKNDSVRSQKIDTRYHLDLCRNVFGEGVYPDVFMTNLYYGGTKIAGSKIVFANGSQDPWRHASKQKSSEELPSYLIECKNCGHCSDLSGCPQAPSNIEGDSSKCSSPEALNKVRKQIVDQIDLWLSECQERGHDKGPLLGSRWNLATI

SEQ ID NO: 74350 - protein, 121 aa, Setaria italica
  Transcript Sequence Number=SeqID_8376
  Homolog annotation: Hit_ID=B9RFF4; Match level="QueryCoverage=99%, HitCoverage=10%, E-value=2e-26, Identity=53%"; Hit description=WD -repeat protein, putative
YLVIFTSSQEVILSSIKLHYTSNTNMLTCTEADGGLPALPRLRFNKEGNLLAVTTVDNGFKILANADGLRTLRAFGSRPFEAFRPQYEASSMKVSGAPVVTGISPNIGRMDHLDRNSPAKP

SEQ ID NO: 74351 - protein, 73 aa, Setaria italica
  Transcript Sequence Number=SeqID_8377
  Subcellular localization annotation: CTP_CleavageSite=43; ConfidenceScore=5.72e-01
FTDHTCSPPNGARASPVSVPLAAVPKPFQPPPPGPSLAGWMANAAASSSVQSAVVAAASIPVAPNQAVSMLKR

SEQ ID NO: 74352 - protein, 79 aa, Setaria italica
  Transcript Sequence Number=SeqID_8378
  Homolog annotation: Hit_ID=B9RFF4; Match level="QueryCoverage=79%, HitCoverage=5%, E-value=3e-12, Identity=58%"; Hit description=WD -repeat protein, putative
SVQSAVVAAASIPVAPNQESEQLMKRLRPSGHGVDEATYPAPIPQPAWSVDDLPRTVACSLSHGSNVTSMDFHTELRTI

SEQ ID NO: 74353 - protein, 86 aa, Setaria italica
  Transcript Sequence Number=SeqID_8379
  Gene Ontology: Mol. function=nucleotide binding; Biological process =defense response
  Homolog annotation: Hit_ID=B9RFF4; Match level="QueryCoverage=88%, HitCoverage=6%, E-value=2e-30, Identity=73%"; Hit description=WD -repeat protein, putative
HETQLAIYDASKMERVYQWIPQDTLSAPISHASYSCNSQLVFAAFADGNVGVFDAENLRLRCRIAPSVYMSSTAINRYPICTLIAY

SEQ ID NO: 74354 - protein, 77 aa, Setaria italica
  Transcript Sequence Number=SeqID_8380
  Pfam annotation: Domain name=Dehydrin; Domain location=2-77; Score =6.7; E_value=6.7e-05; Accession=PF00257.11; Description=Dehydrin
MSGIIHKIEETLHMGGDHKEGIVDKIKDKITGEHGDKSGEHKDHKDHKEKKDKKKKKEKKHGEGHHDGHSSSSSDSD

SEQ ID NO: 74355 - protein, 102 aa, Setaria italica
  Transcript Sequence Number=SeqID_8381
  Pfam annotation: Domain name=Dehydrin; Domain location=2-102; Score =27.4; E_value=1.4e-06; Accession=PF00257.11; Description=Dehydrin
MSGIIHKIEETLHMGGDHKKEEEHKKAEAHKKAEEHHKKDGEHKEGIVDKIKDKITGEHGDKSGEHKDHKDHKEKKDKKKKKEKKHGEGHHDGHSSSSSDSD

SEQ ID NO: 74356 - protein, 550 aa, Setaria italica
  misc_feature (500)..(500): Xaa can be any naturally occurring amino acid
  Transcript Sequence Number=SeqID_8382
  Homolog annotation: Hit_ID=Q2HW32; Match level="QueryCoverage=99%, HitCoverage=49%, E-value=0.0, Identity=72%"; Hit description =Lissencephaly type-1-like homology motif; CTLH, C-terminal to LisH motif; Nitrous oxide ...
  Homolog annotation: Hit description=reductase, N-terminal; WD40-like; Quinonprotein alcohol dehydrogenase-like
  Pfam annotation: Domain name=LisH; Domain location=6-32; Score=18.9; E_value=0.0098; Accession=PF08513.3; Description=LisH
  Pfam annotation: Domain name=WD40; Domain location=328-367; Score =11.8; E_value=1.6; Accession=PF00400.24; Description=WD domain, G -beta repeat
  Pfam annotation: Domain name=WD40; Domain location=390-428; Score =1.1; E_value=29; Accession=PF00400.24; Description=WD domain, G-beta repeat
  Pfam annotation: Domain name=WD40; Domain location=435-475; Score =35.4; E_value=2.3e-07; Accession=PF00400.24; Description=WD domain, G-beta repeat
  Pfam annotation: Domain name=WD40; Domain location=478-518; Score =31.7; E_value=3e-06; Accession=PF00400.24; Description=WD domain, G -beta repeat
  Pfam module annotation: Pfam domain module=LisH::WD40::WD40::WD40::WD4 0; Domain location=6-32::328-367::390-428::435-475::478-518
MSSLSRELVFLILQFLDEEKFKETVHKLEQESGFFFNMKYFEEKVHAGEWDEVEKYLSGFTKVDDNRYSMKIFFEIRKQKYLEALDRHDRAKAVDILVKDLKVFSTFNEELYKEITQLLTLENFRENEQLSKYGDTKSARSIMLIELKKLIEANPLFREKLVFPTLKASRLRTLINQSLNWQHQLCKNPRPNPDIKTLFTDHTCSPPNGARASPVSVPLAAVPKAGAAYPPLTAHTPFQPPPPGPSLAGWMANAAASSSVQSAVVAAASIPVAPNQAVSMLKRPTITDYQSAESEQLMKRLRPSGHGVDEATYPAPIPQPAWSVDDLPRTVACSLSHGSNVTSMDFHPTRHTLLLVGSANGEFTLYEIGLRETLLSRPFKIRDINACSPQFQNAVVKDSSISINRVTWSPDGELIGVAFTKHLIHLHAYQQPNETRHVLEIEAHSGGVNDIAFSRPNKQLCVVTCGDDKLIKVWDMHGQKLFTFEGHEAPVYSICPHHKXSIQFIFSTSLDGKIKAWLYDNVGSRVDYDAPGKWCTTMLYSADGTRLFSW

SEQ ID NO: 74357 - protein, 102 aa, Setaria italica; identical to SEQ ID NO: 74355
  Transcript Sequence Number=SeqID_8383
  Pfam annotation: Domain name=Dehydrin; Domain location=2-102; Score =27.4; E_value=1.4e-06; Accession=PF00257.11; Description=Dehydrin

SEQ ID NO: 74358 - protein, 789 aa, Setaria italica
  misc_feature (632)..(632): Xaa can be any naturally occurring amino acid
  misc_feature (762)..(762): Xaa can be any naturally occurring amino acid
  Transcript Sequence Number=SeqID_8384
  Gene Ontology: Mol. function=nucleotide binding; Biological process =defense response
  Homolog annotation: Hit_ID=B9RFF4; Match level="QueryCoverage=100%, HitCoverage=69%, E-value=0.0, Identity=71%"; Hit description=WD -repeat protein, putative
  Pfam annotation: Domain name=WD40; Domain location=137-177; Score =31.9; E_value=2.6e-06; Accession=PF00400.24; Description=WD domain, G-beta repeat
  Pfam annotation: Domain name=WD40; Domain location=233-269; Score =8.5; E_value=3.9; Accession=PF00400.24; Description=WD domain, G -beta repeat
  Pfam annotation: Domain name=WD40; Domain location=481-518; Score =6.2; E_value=7.2; Accession=PF00400.24; Description=WD domain, G -beta repeat
  Pfam annotation: Domain name=WD40; Domain location=49-87; Score=1.1; E_value=29; Accession=PF00400.24; Description=WD domain, G-beta repeat
  Pfam annotation: Domain name=WD40; Domain location=522-561; Score =13.1; E_value=1.1; Accession=PF00400.24; Description=WD domain, G -beta repeat
  Pfam annotation: Domain name=WD40; Domain location=565-603; Score =28.1; E_value=3.5e-05; Accession=PF00400.24; Description=WD domain, G-beta repeat
  Pfam annotation: Domain name=WD40; Domain location=660-695; Score =7.9; E_value=4.6; Accession=PF00400.24; Description=WD domain, G -beta repeat
  Pfam annotation: Domain name=WD40; Domain location=711-750; Score =2.3; E_value=21; Accession=PF00400.24; Description=WD domain, G-beta repeat
  Pfam annotation: Domain name=WD40; Domain location=94-134; Score =35.4; E_value=2.3e-07; Accession=PF00400.24; Description=WD domain, G-beta repeat
  Pfam module annotation: Pfam domain module=WD40::WD40::WD40::WD40::WD4 0::WD40::WD40::WD40::WD40; Domain location=137-177::233-269::481 -518::49-87::522-561::565-603::660-695::711-750::94-134
TSMDFHPTRHTLLLVGSANGEFTLYEIGLRETLLSRPFKIRDINACSPQFQNAVVKDSSISINRVTWSPDGELIGVAFTKHLIHLHAYQQPNETRHVLEIEAHSGGVNDIAFSRPNKQLCVVTCGDDKLIKVWDMHGQKLFTFEGHEAPVYSICPHHKESIQFIFSTSLDGKIKAWLYDNVGSRVDYDAPGKWCTTMLYSADGTRLFSCGTGKEGDSYLVEWNESEGSIKRTYSGFRKRSAGVAGVVQFDTAQNHFLAAGEDNQIKFWDVDNTNMLTCTEADGGLPALPRLRFNKEGNLLAVTTVDNGFKILANADGLRTLRAFGSRPFEAFRPQYEASSMKVSGAPVVTGISPNIGRMDHLDRNSPAKPSPILNGGDTASRSIDIKPRISEEKPDKAKPWELMEVLNPQQCRVATMPETPDQPRKVVRLLYTNSGVGLLALGSNAIQRLWKWSRNEQNPSGKATAGVVPHHWQPNSGLVMTNDTADTNPEEAVPCIALSKNDSYVMSACGGKVSLFNMMTFKVMTTFMPPPPASTFLAFHPQDNNIIAIGMEDSTIHIYNVRVDEVKTRLKGHQKRITGLAFSTNLGVLVSSGADAQLCVWANDTWEKKRTISIQMPAGKTASGDTRVQFXSDQSHLLVVHETQLAIYDASKMERVYQWIPQDTLSAPISHASYSCNSQLVFAAFADGNVGVFDAENLRLRCRIAPSVYMSSTAINSNPPVHPLVVAAHPNEPNQFAVGLSDGSVKVLEPLESEGKWGNTXPADNGIPNGKTPASSATSNPAADQIQR

SEQ ID NO: 74359 - protein, 102 aa, Setaria italica
  misc_feature (60)..(60): Xaa can be any naturally occurring amino acid
  Transcript Sequence Number=SeqID_8385
  Gene Ontology: Mol. function=structural constituent of ribosome; Cellular component=ribonucleoprotein complex; Biological process =translation
  Homolog annotation: Hit_ID=O23290; Match level="QueryCoverage=93%, HitCoverage=89%, E-value=1e-39, Identity=88%"; Hit description=60S ribosomal protein L36a
  Pfam annotation: Domain name=Ribosomal_L44; Domain location=15-92; Score=160.5; E_value=5e-45; Accession=PF00935.11; Description =Ribosomal protein L44
PCAGCASCIPCSCSRHTLHKVTQYKKGKDSLSAQGKRRYDRKQSGYGGQTKPVFHKKAKXTTKKIVLKLQCQSCKHYSQHPIKRCKHFEIGGDKKGKGTSLF

SEQ ID NO: 74360 - protein, 141 aa, Setaria italica
  Transcript Sequence Number=SeqID_8386
  Gene Ontology: Mol. function=structural constituent of ribosome; Cellular component=ribonucleoprotein complex; Biological process =translation
  Homolog annotation: Hit_ID=Q94ER6; Match level="QueryCoverage=78%, HitCoverage=92%, E-value=1e-47, Identity=82%"; Hit description=60S ribosomal protein L144 (Fragment)
  Pfam annotation: Domain name=Ribosomal_L44; Domain location=55-131; Score=170.6; E_value=4.7e-48; Accession=PF00935.11; Description =Ribosomal protein L44
VLLVGSSTKDLGFSVPTSRRRQDTRTDGGGSYSSAAMVNVPKTKKTYCKNKECRKHTLHKVTQYKKGKDSLSAQGKRRYDRKQSGYGGQTKPVFHKKAKTTKKIVLKLQCQSCKHYSQHPIKRCKHFEIGGDKKGKGTSLF

SEQ ID NO: 74361 - protein, 66 aa, Setaria italica
  Transcript Sequence Number=SeqID_8387
  Gene Ontology: Mol. function=structural constituent of ribosome; Cellular component=ribonucleoprotein complex; Biological process =translation
  Homolog annotation: Hit_ID=O23290; Match level="QueryCoverage=100%, HitCoverage=62%, E-value=1e-24, Identity=83%"; Hit description=60S ribosomal protein L36a
  Pfam annotation: Domain name=Ribosomal_L44; Domain location=1-56; Score=90.5; E_value=5.8e-24; Accession=PF00935.11; Description =Ribosomal protein L44
KRRYDRKQSGYGGQTKPVFHKKAKTTKKIVLKLQCQSCKHYSQHPIKRCKHFEIGGDKKGKGTSLF

SEQ ID NO: 74362 - protein, 55 aa, Setaria italica
  Transcript Sequence Number=SeqID_8388
  Gene Ontology: Mol. function=sequence-specific DNA binding; Cellular component=nucleus; Biological process=regulation of transcription, DNA-dependent
HQPPHQAHVIAGGGPGGLMHMQSSLLFDGPAAAPIVAGDDFLIHHHLGADYRQLI

SEQ ID NO: 74363 - protein, 298 aa, Setaria italica
  Transcript Sequence Number=SeqID_8389
  Gene Ontology: Mol. function=protein serine/threonine kinase activity; Biological process=protein amino acid phosphorylation
  Homolog annotation: Hit_ID=B6SPS6; Match level="QueryCoverage=87%, HitCoverage=74%, E-value=1e-145, Identity=95%"; Hit description=MKK4- putative MAPKK
  Pfam annotation: Domain name=APH; Domain location=27-216; Score= -16.7; E_value=0.036; Accession=PF01636.15; Description =Phosphotransferase enzyme family
  Pfam annotation: Domain name=Pkinase; Domain location=25-282; Score =244.5; E_value=2.5e-70; Accession=PF00069.17; Description=Protein kinase domain
  Pfam annotation: Domain name=Pkinase_Tyr; Domain location=25-282; Score=39.2; E_value=2.5e-16; Accession=PF07714.9; Description =Protein tyrosine kinase
  Pfam annotation: Domain name=YrbL-PhoP_reg; Domain location=23-186; Score=-77.9; E_value=0.075; Accession=PF10707.1; Description=PhoP regulatory network protein YrbL
  Pfam module annotation: Pfam domain module=APH::Pkinase::Pkinase _Tyr::YrbL-PhoP_reg; Domain location=27-216::25-282::25-282::23-186
  Subcellular localization annotation: CTP_CleavageSite=11; ConfidenceScore=5.06e-01
ASLGAPTPPTSAGSAPPNPPPLCELERVRRIGSGAGGTVWMVRHRPTGRAYALKVLYGNHDDAVRRQITREIAILRTAEHPAVVRCHGMYEQAGELQILLEYMDGGSLEGRRIADEGFLAHVARQVLSGIAYLHRRHIVHRDIKPSNLLIDSGRRVKIADFGVGRILNQTMDPCNSSVGTIAYMSPERINTDLNDGAYDGYAGDIWSFGLSILEFYMGRFPFGENLGKQGDWAALMCAICYSDSPQAPRTASPDFKNFISLCLQKNPANRPSAMRLLQHPFVAQPQPQPQPLAAPPPS

SEQ ID NO: 74364 - protein, 114 aa, Setaria italica
  Transcript Sequence Number=SeqID_8390
  Gene Ontology: Mol. function=lipid binding; Biological process=lipid transport
  Homolog annotation: Hit_ID=B6TEW0; Match level="QueryCoverage=75%, HitCoverage=74%, E-value=1e-22, Identity=62%"; Hit description=Lipid binding protein
  Pfam annotation: Domain name=Tryp_alpha_amyl; Domain location=26-108; Score=40.2; E_value=8e-09; Accession=PF00234.14; Description=Protease inhibitorseed storageLTP f
MMKGGLLVLAVLLVAAACVAEGAGECGATPPDRMALRLAPCASAAQNPSSAPSAGCCSAVRTIGKQSRECLCAVMLSSTARSAGIKPEVAITIPKRCNIADRPVGYKCGAYTLP

SEQ ID NO: 74365 - protein, 61 aa, Setaria italica
  Transcript Sequence Number=SeqID_8391
EWIRHASPAPRCCSSSETNECSHAQPSISIASGGVNIGCCAALRSAERSWSPTLVAAAAAA

SEQ ID NO: 74366 - protein, 113 aa, Setaria italica
  misc_feature (45)..(45): Xaa can be any naturally occurring amino acid
  Transcript Sequence Number=SeqID_8392
  Gene Ontology: Mol. function=glutamate decarboxylase activity; Biological process=carboxylic acid metabolic process
  Homolog annotation: Hit_ID=B6TV07; Match level="QueryCoverage=100%, HitCoverage=23%, E-value=3e-59, Identity=95%"; Hit description =Glutamate decarboxylase
  Pfam annotation: Domain name=Pyridoxal_deC; Domain location=1-113; Score=-179.6; E_value=0.00048; Accession=PF00282.11; Description =Pyridoxal-dependent decarboxylase con
WQNKMKAAGKPYDKPNIVTGANVQVCWEKFARYFEVELKEVKLRXGYYVMDPEKAAEMVDENTICVAAILGSTLNGEFEDVKMLNDLLAAKNAETGWDTPIHVDAASGGFIAP

SEQ ID NO: 74367 - protein, 45 aa, Setaria italica
  Transcript Sequence Number=SeqID_8393
  Gene Ontology: Mol. function=glutamate decarboxylase activity; Biological process=carboxylic acid metabolic process
  Homolog annotation: Hit_ID=Q684J8; Match level="QueryCoverage=88%, HitCoverage=9%, E-value=3e-13, Identity=87%"; Hit description =Glutamate decarboxylase 1
WPPINKNYVDMDEYPVTTELQNRCVNMIAHLFNAPLAASTWMGVS

SEQ ID NO: 74368 - protein, 92 aa, Setaria italica
  Transcript Sequence Number=SeqID_8394
  Gene Ontology: Mol. function=glutamate decarboxylase activity; Biological process=carboxylic acid metabolic process
  Homolog annotation: Hit_ID=Q1I1D8; Match level="QueryCoverage=100%, HitCoverage=18%, E-value=2e-44, Identity=89%"; Hit description =Glutamate decarboxylase
EGYRNIMENCHENAMVLKEGLEKTGRFNIVSKDEGVPLVAFSLKDRSRHDEFEISDMLRRFGWIVPAYTMPPDAQHVTVLRVVIREEFSRTL

SEQ ID NO: 74369 - protein, 55 aa, Setaria italica
  Transcript Sequence Number=SeqID_8395
RPPVISLCSRHCLALYWGSFVLTDSKIIVHWELLIKSQTMSTAKGNYRRSASKYH

SEQ ID NO: 74370 - protein, 53 aa, Setaria italica
  Transcript Sequence Number=SeqID_8396
  Gene Ontology: Mol. function=translation elongation factor activity; Cellular component=cytoplasm; Biological process=translation
  Homolog annotation: Hit_ID=O23755; Match level="QueryCoverage=94%, HitCoverage=5%, E-value=5e-19, Identity=94%"; Hit description =Elongation factor 2
EVKMVKFTAEELRAIMDKKNNIRNMSVIAHVDHGKSTLTDSLVAAAGIIAQEV

SEQ ID NO: 74371 - protein, 198 aa, Setaria italica
  misc_feature (161)..(161): Xaa can be any naturally occurring amino acid
  Transcript Sequence Number=SeqID_8397
  Subcellular localization annotation: CTP_CleavageSite=69; ConfidenceScore=5.63e-01
MIRSPRPTLPPNPTFSGPITLQILPFSSLHPVLNPFLSPTPKVLLFPLRPCRNRRDSSFLATLFAHSFVCSLRESSLAHQIPCKTPVFGDSFLGKIRFSAQFCSGFRGDPPFLLEPGRELGNAAPMSDSDQGTLVFGLHLWELVGIGVGAAFVLLLVLLSXVCLLASRRRRRRRAVPATPVLHLPVVVPQCPVQAPRQ

SEQ ID NO: 74372 - protein, 193 aa, Setaria italica
  misc_feature (114)..(114): Xaa can be any naturally occurring amino acid
  misc_feature (176)..(176): Xaa can be any naturally occurring amino acid
  Transcript Sequence Number=SeqID_8398
  Gene Ontology: Mol. function=translation elongation factor activity; Cellular component=cytoplasm; Biological process=translation
  Homolog annotation: Hit_ID=Q8RVT3; Match level="QueryCoverage=99%, HitCoverage=38%, E-value=6e-93, Identity=84%"; Hit description =Elongation factor EF-2 (Fragment)
SFELQVEGEEAYQPFSCVIENANVIMATYEDKLFGDIQVYPEKGTVAFSAGLHGWAFTLTSFAKMYASKFGVDETKMMERLWGENFFDPATKKWTTKNTGSPTCKRGFVQLISXCYEPIKQIINTCMNDQKDKLWPMLQKLNVTMKADEKELIGKALMKRVMQTWLPASTALLEIXLIFHLPSPAKAQKYGVE

SEQ ID NO: 74373 - protein, 245 aa, Setaria italica
  misc_feature (16)..(16): Xaa can be any naturally occurring amino acid
  misc_feature (31)..(31): Xaa can be any naturally occurring amino acid
  misc_feature (41)..(41): Xaa can be any naturally occurring amino acid
  misc_feature (48)..(48): Xaa can be any naturally occurring amino acid
  Transcript Sequence Number=SeqID_8399
  Gene Ontology: Mol. function=DNA binding; Cellular component=nucleus
  Homolog annotation: Hit_ID=B6U631; Match level="QueryCoverage=93%, HitCoverage=57%, E-value=7e-85, Identity=72%"; Hit description=DNA binding protein
  Pfam annotation: Domain name=DUF296; Domain location=73-192; Score =168.3; E_value=2.2e-47; Accession=PF03479.7; Description=Domain of unknown function (DUF296)
  Subcellular localization annotation: CTP_CleavageSite=50; ConfidenceScore=5.74e-01
LSPISSSTLRLSNSGXGTMVSTPSSGFGSGXSGGSGSGAPXEKRGRGXPPGSGKMQQLASLGKWFLGSVGTGFTPHVIIIQPGEDVAARIMAFSQQGPRAVCIISATGAVSTATLHQDSDSGGVVTYEGRFEILCLSGSYLVLDDGGTRTRSGGLCIALCGPDHRVMGGSVGGVLTAGTVQVIVGSLMYGGSKKNKAKAELDMEHEEVNAGEAAMALPEHNIAPSRDERMGLRGMMRQMDLRTSN

SEQ ID NO: 74374 - protein, 263 aa, Setaria italica
  misc_feature (46)..(46): Xaa can be any naturally occurring amino acid
  misc_feature (114)..(114): Xaa can be any naturally occurring amino acid
  misc_feature (137)..(137): Xaa can be any naturally occurring amino acid
  Transcript Sequence Number=SeqID_8400
  Gene Ontology: Mol. function=transferase activity, transferring nitrogenous groups; Cellular component=cytoplasm; Biological process= amino acid metabolic process
  Homolog annotation: Hit_ID=B4FUH2; Match level="QueryCoverage=99%, HitCoverage=56%, E-value=1e-142, Identity=92%"; Hit description =Aspartate aminotransferase
  Pfam annotation: Domain name=Aminotran_1_2; Domain location=1-263; Score=187.6; E_value=3.6e-53; Accession=PF00155.13; Description =Aminotransferase class I and II
ISARHYHERTIYIPQPTWGNHPKVFTLSGLTVRSYRYYDPATRGLXFKGLLEDLSSAPLGSIVLLHACAHNPTGVDPTIDQWEQIRQLMRSKSLLPFFDSAYQGFASGSLRTKXLQSVRMFVADGGELLMAQSYAKXMGLYGERVGALSIVCGSADVAVRVESQLKLVIRPMYSNPPLHGPSIVATILKDSEMFNEWTLELKAMADRIISMRQQLFDALKSRGTPGDWSHIIKQIGMFTFTGLNSDQVAFMRQEYHIYMTSDG

SEQ ID NO: 74375 - protein, 162 aa, Setaria italica
  misc_feature (47)..(47): Xaa can be any naturally occurring amino acid
  Transcript Sequence Number=SeqID_8401
  Gene Ontology: Mol. function=translation elongation factor activity; Cellular component=cytoplasm; Biological process=translation
  Homolog annotation: Hit_ID=O23755; Match level="QueryCoverage=100%, HitCoverage=19%, E-value=7e-82, Identity=90%"; Hit description =Elongation factor 2
  Pfam annotation: Domain name=EFG_C; Domain location=48-132; Score =72.9; E_value=1.2e-18; Accession=PF00679.16; Description=Elongation factor G C-terminus
RGICFEVCDVVLHADAIHRGGGQVIPTARRVIYASQLTAKPRLLGAXVYLVEIQAPENALGGIYGVLNQKRGHVFEEMQRPGTPLYNIKAYLPVIESFGFSSQLRAATSGQAFPQCVFDHWDMMGSDPLEAGSQAAQLVLDIRKRKGLKEQMTPLSEFEDKL

SEQ ID NO: 74376 - protein, 146 aa, Setaria italica
  misc_feature (37)..(37): Xaa can be any naturally occurring amino acid
  Transcript Sequence Number=SeqID_8402
  Gene Ontology: Mol. function=translation elongation factor activity; Cellular component=cytoplasm; Biological process=translation
  Homolog annotation: Hit_ID=Q8RVT3; Match level="QueryCoverage=92%, HitCoverage=28%, E-value=3e-63, Identity=82%"; Hit description =Elongation factor EF-2 (Fragment)
NKSSLAGSRACVLGGPIKQIINTCMNDQKDKLWPMLXKLNVTMKSDEKELVGKALMKRVMQTWLPASTALLEMMIFHLPSPSKAQKYRVENLYEGPLDDIYATAIRNCDPEGPLMLYVSKMIPASDKGRFFAFGRVFSGQGHSWDP

SEQ ID NO: 74377 - protein, 189 aa, Setaria italica
  misc_feature (81)..(81): Xaa can be any naturally occurring amino acid
  Transcript Sequence Number=SeqID_8403
  Gene Ontology: Mol. function=transferase activity, transferring nitrogenous groups; Cellular component=cytoplasm; Biological process= amino acid metabolic process
  Homolog annotation: Hit_ID=B4FUH2; Match level="QueryCoverage=97%, HitCoverage=39%, E-value=2e-97, Identity=93%"; Hit description =Aspartate aminotransferase
  Pfam annotation: Domain name=Aminotran_1_2; Domain location=1-181; Score=-29.6; E_value=1.1e-05; Accession=PF00155.13; Description =Aminotransferase class I and II
ALSKNGSLDKDAQSVRMFVADGGELLMAQSYAKNMGLYGERVGALSIVCGSADVAVRVESQLKLVIRPMYSNPPLHGPSIXVGRTILKDSEMFNEWTLELKAMADRIISMRQQLFDALKSRGTPGDWSHIIKQIGMFTFTGLNSDQVAFMRQEYHIYMTSDGRISMAGLSTRTVPHLADAIHAAVTQLK

SEQ ID NO: 74378 - protein, 337 aa, Setaria italica
  misc_feature (150)..(150): Xaa can be any naturally occurring amino acid
  misc_feature (258)..(258): Xaa can be any naturally occurring amino acid
  Transcript Sequence Number=SeqID_8404
  Gene Ontology: Mol. function=glutamate decarboxylase activity; Biological process=carboxylic acid metabolic process
  Homolog annotation: Hit_ID=A0EJ89; Match level="QueryCoverage=89%, HitCoverage=59%, E-value=1e-148, Identity=82%"; Hit description =Glutamate decarboxylase
  Pfam annotation: Domain name=Pyridoxal_deC; Domain location=38-335; Score=318.6; E_value=1.3e-92; Accession=PF00282.11; Description =Pyridoxal-dependent decarboxylase con
MVLTHVQELDDAAAASAVVFASRYVQEPLPRFELGKKSISKDAAYQIIHDELLLDSSPRLNLASFVTTWMEPECDRLILEGINKNYADMDEYPVTTEIQNRCVNIIARLFNAPVGAGEKAVGVGTVGSSEAIMLAGLAFKRRWQNRRKAXAGKPYDKPNIVTGANVQVCWEKFARYFEVELKEVKLREGCYVMDPDEAVQMVDENTICVAAILGSTLTGEFEDVKRLNNLLLAKNKRTGWDTPIHVDAASGGFIAPFXYPELEWDFRLPLVKSINVSGHKYGLVYAGVGWVIWRNKEDLPEELIFHINYLGADQPTFTLNFSKGLLFFAHFLVSCPI

SEQ ID NO: 74379 - protein, 403 aa, Setaria italica
  misc_feature (24)..(24): Xaa can be any naturally occurring amino acid
  misc_feature (276)..(276): Xaa can be any naturally occurring amino acid
  Transcript Sequence Number=SeqID_8405
  Gene Ontology: Mol. function=DNA binding; Cellular component=nucleus
  Homolog annotation: Hit_ID=B6U631; Match level="QueryCoverage=99%, HitCoverage=99%, E-value=1e-122, Identity=63%"; Hit description=DNA binding protein
  Pfam annotation: Domain name=AT_hook; Domain location=125-137; Score =17.5; E_value=0.025; Accession=PF02178.11; Description=AT hook motif
  Pfam annotation: Domain name=AT_hook; Domain location=186-198; Score =12.6; E_value=0.17; Accession=PF02178.11; Description=AT hook motif
  Pfam annotation: Domain name=DUF296; Domain location=216-336; Score =173.1; E_value=8.1e-49; Accession=PF03479.7; Description=Domain of unknown function (DUF296)
  Pfam module annotation: Pfam domain module=AT_hook::AT_hook::DUF296; Domain location=125-137::186-198::216-336
MDGRESTVASGPNFSSFYAQHRGXIGAPGVPGHSPGLHGPPPGGYRQHLDAVSAGYAFQNPHVGGPHIGQGYHHVEASPPVVQHSAGGGASSGGAMDIGMGVAVGADAKGDQGSGAGGGQDEQVKKKRGRPRKYKPDGAVTLGLSPTSSSTPHSSNSGMGTMVSTPGSGFGSGGSGGSGSGAPSEKRGRGRPPGSGKMQQLASLGKWFLGSVGTGFTPHVIIIQPGEDVAARIMAFSQQGPRAVCIISATGAVSTATLHQDSDSGGVVTYEGRFEXLCLSGSYLVLDDGGTRTRSGGLCIALCGPDHRVIGGSVGGVLTAAGTVQVIVGSFMYGGSKKNKAKAEADMEHEEVNNAGEEEAAPAMVVPEHNMPPHAMGGWPPGMMRQMDSRTSNIDINSIRDRE

SEQ ID NO: 74380 - protein, 493 aa, Setaria italica
  Transcript Sequence Number=SeqID_8406
  Gene Ontology: Mol. function=glutamate decarboxylase activity; Biological process=carboxylic acid metabolic process
  Homolog annotation: Hit_ID=Q42521; Match level="QueryCoverage=100%, HitCoverage=100%, E-value=0.0, Identity=83%"; Hit description =Glutamate decarboxylase 1
  Pfam annotation: Domain name=Pyridoxal_deC; Domain location=33-381; Score=563.9; E_value=1.8e-166; Accession=PF00282.11; Description =Pyridoxal-dependent decarboxylase con
MVLSHGVGGSDESVHSTFASRYVRASLPRFRMPEQSIPKEAAYQIINDELMLDGNPRLNLASFVTTWMEPECDKLIQASVNKNYVDMDEYPVTTELQNRCVNMIAHLFNAPLGESETAVGVGTVGSSEAIMLAGLAFKRRWQNKMKAAGKPCDKPNIVTGANVQVCWEKFARYFEVELKEVKLSDGYYVMDPHKAVEMVDENTICVAAILGSTLNGEFEDVKLLNDLLTKKNAETGWDTPIHVDAASGGFIAPFLYPELEWDFRLPLVKSINVSGHKYGLVYAGIGWCIWRTKEDLPEELIFHINYLGADQPTFTLNFSKGSSQVIAQYYQLIRLGFEGYKNIMENCQENAMVLKQGLEKMGRFNIVSKDNGVPLVAFSLKDSSRHNEFEISDFLRRFGWIVPAYTMPPDAQHVTVLRVVIREDFSRTLAERLVLDIEKVLHELDTLPARVPSGDLAALAAAEASQREMDKQREVISLWKRAVLAKKKTNGVC

SEQ ID NO: 74381 - protein, 495 aa, Setaria italica
  Transcript Sequence Number=SeqID_8407
  Gene Ontology: Mol. function=glutamate decarboxylase activity; Biological process=carboxylic acid metabolic process
  Homolog annotation: Hit_ID=B6TT27; Match level="QueryCoverage=100%, HitCoverage=100%, E-value=0.0, Identity=87%"; Hit description =Glutamate decarboxylase
  Pfam annotation: Domain name=Aminotran_5; Domain location=88-415; Score=-189.0; E_value=0.029; Accession=PF00266.11; Description =Aminotransferase class-V
  Pfam annotation: Domain name=Pyridoxal_deC; Domain location=34-382; Score=541.4; E_value=1.1e-159; Accession=PF00282.11; Description =Pyridoxal-dependent decarboxylase con
  Pfam module annotation: Pfam domain module=Aminotran_5::Pyridoxal _deC; Domain location=88-415::34-382
MVLSHANSIGRDDAVASTFASRYVRELLPRYRMPDRSIPREAAFQIINDELMLDGNPRLNLASFVTTWMEPECDKLIMGSINKNYVDMDEYPVTTELQNRCVNMIAHLFNAPIKEDETAVGVGTVGSSEAIMLAGLAFKRKWQNRRKEQGKSYDKPNIVTGANVQVCWEKFARYFEVELKEVKLSEGYYVMDPVKAVEMVDENTICVAAILGSTLTGEFEDVKLLNDLLTKKNKETGLDVPIHVDAASGGFIAPFLYPELEWDFRLPLVKSINVSGHKYGLVYAGVGWVIWRSKEDLPEELIFHINYLGTDQPTFTLNFSKGSSQIIAQYYQLIRLGFEGYKNIMQNCKANAAVLREGVAATGRFDILSKETGVPLVAFSLKDSNHFSVFDISENLRRFGWIVPAYTMPADAEHVAVLRVVIREDFSRSLSERLVNDIQKILRELDARATHAVRVSSATAAQSDDGVVAKKSVLEIEREVAARWRNAVNKKTGPC

SEQ ID NO: 74382 - protein, 296 aa, Setaria italica
  misc_feature (69)..(69): Xaa can be any naturally occurring amino acid
  misc_feature (245)..(245): Xaa can be any naturally occurring amino acid
  misc_feature (266)..(266): Xaa can be any naturally occurring amino acid
  Transcript Sequence Number=SeqID_8408
  Gene Ontology: Mol. function=translation elongation factor activity; Cellular component=cytoplasm; Biological process=translation
  Homolog annotation: Hit_ID=O23755; Match level="QueryCoverage=89%, HitCoverage=31%, E-value=1e-142, Identity=92%"; Hit description =Elongation factor 2
  Pfam annotation: Domain name=EFG_C; Domain location=175-265; Score =92.1; E_value=2e-24; Accession=PF00679.16; Description=Elongation factor G C-terminus
  Pfam annotation: Domain name=EFG_IV; Domain location=55-173; Score =173.0; E_value=8.8e-49; Accession=PF03764.10; Description=Elongation factor G, domain IV
  Pfam module annotation: Pfam domain module=EFG_C::EFG_IV; Domain location=175-265::55-173
GTALPYTYQQPCSGQWSQVQSTKSSWQDPCPNKHNRLYMEARPLEEGLPEAIDEGRIGPRDDPKVRSKXILSEEFGWDKDLAKKIWCFGPETTGPNMVVDMCKGVQYLNEIKDSVVAGFQWASKEGALAEENMRGICFEVCDVVLHADAIHRGGGQVIPTARRVIYASQLTAKPRLLEPVYLVEIQAPENALGGIYGVLNQKRGHVFEEMQRPGTPLYNIKAYLPVIESFGFSSQLRAATSGQAXFPQCVFDHWDMMGSDPLEAGXSQAAQLVLDIRKRKGLKEQMTPLSEFEDKL

SEQ ID NO: 74383 - protein, 133 aa, Setaria italica
  misc_feature (42)..(42): Xaa can be any naturally occurring amino acid
  Transcript Sequence Number=SeqID_8409
  Homolog annotation: Hit_ID=B4FM28; Match level="QueryCoverage=72%, HitCoverage=47%, E-value=4e-10, Identity=38%"; Hit description =UPF0737 protein 2
LLNIADTLVRSTSLPASIDAAGTEEWRKRKAAQSLKRLELKXKRVERRNTCNTLKEAGGQIVEDVMRAPNDKLHQAISTSHDSLSAGRRKPNSASKGILLFVCLFHRLGFLNIHFPCFQEHESYLPPQYQPQY

SEQ ID NO: 74384 - protein, 130 aa, Setaria italica
  Transcript Sequence Number=SeqID_8410
  Homolog annotation: Hit_ID=B4FAF3; Match level="QueryCoverage=76%, HitCoverage=26%, E-value=1e-19, Identity=58%"; Hit description =UPF0737 protein 1
  Pfam annotation: Domain name=DUF1675; Domain location=1-114; Score= -72.0; E_value=0.011; Accession=PF07897.3; Description=Protein of unknown function (DUF1675)
LSLGLSLGGRFVRNRKGEKLARSSSMAAVMTAPVEAPALGRTSSLPVDTEASEVGRKQGLDGWGSSRETGGPAEEPAARLRPSLSPSSGSSDGEGQRLQGACGFSVFSRGRFILSISLPIGGNLAFRFHA

SEQ ID NO: 74385 - protein, 298 aa, Setaria italica
  Transcript Sequence Number=SeqID_8411
  Gene Ontology: Mol. function=protein binding; Cellular component =intracellular; Biological process=transport
  Homolog annotation: Hit_ID=B4FAF3; Match level="QueryCoverage=96%, HitCoverage=79%, E-value=7e-63, Identity=48%"; Hit description =UPF0737 protein 1
  Pfam annotation: Domain name=DUF1675; Domain location=39-291; Score =89.8; E_value=9.6e-24; Accession=PF07897.3; Description=Protein of unknown function (DUF1675)
EGRPDDYGKERSSLPVDTEASEVGRKQGLDGWGSSRETGGPAEEPAARLRPSLSPSSGSSDGEGQRLQDTLVRSTSLPASIDAAGTEEWRKRKAAQSLKRLELKRKRVERRNTCNTLKEAGGQIVEEVMRAPNDKLHQAISTSHDSLSAGRRKPNSASKGTATAEAHSPSSVGPPAGEVASCATVASPPPSSLAGRAAALGSRGYQQSTSGTYAARARSMGDVERTMMQEMPSVFTKGLPNGNRLEGFLYKYRKGEQVRIVCICHGTFHTPAGFVEHAGGGNVSNPLRHIVVTPLENL

SEQ ID NO: 74386 - protein, 51 aa, Setaria italica
  Transcript Sequence Number=SeqID_8412
QTCHSYICKMTTSTVLLHLITEPEINYITTPYSYVSIHKLHLTFPKATGTA

SEQ ID NO: 74387 - protein, 44 aa, Setaria italica
  Transcript Sequence Number=SeqID_8413
MSRLIKKRSQLWYAATVRCGGGHSAPPPLATCLKQTGQDVMSIG

SEQ ID NO: 74388 - protein, 139 aa, Setaria italica
  Transcript Sequence Number=SeqID_8414
  Subcellular localization annotation: CTP_CleavageSite=71; ConfidenceScore=5.60e-01
QITSSTRKVQTPGVTTTHLSVHWLTPRPPPLSLEISPPSSTPAAASSPFRLPRWRGCTGWRPSCRSASSAACSASWATPSTSSTRPRTAGRSTSGTTCGTSPWSAATRSSSSSPPATRVLVSLKLFRMLTNLFRKHRTL

SEQ ID NO: 74389 - protein, 113 aa, Setaria italica
  misc_feature (1)..(18): Xaa can be any naturally occurring amino acid
  Transcript Sequence Number=SeqID_8415
XXXXXXXXXXXXXXXXXXGLITLYISYRSYYTVVRLYPSESTMFYQNILAKSHNNCEHCYLLHESAPEEERNGGTEMTKESNFVQLNRFQIHIILPIVLRFQAKPIVPIIQGN

SEQ ID NO: 74390 - protein, 67 aa, Setaria italica
  Transcript Sequence Number=SeqID_8416
HDLSTHTSCTTTLNLPCIKHSSYLPCFILCRHHFHALFKSIITTPYLWYRETYVVAPLNSIHHDVHH

SEQ ID NO: 74391 - protein, 243 aa, Setaria italica
  Transcript Sequence Number=SeqID_8417
  Subcellular localization annotation: CTP_CleavageSite=99; ConfidenceScore=5.35e-01
MAPPTRRERAAAAAARPSSSSPSAAPAGPRAVEVQRRRVGGGWTSRRISIYASRAYFLLLILQIPLFRVPCRAGTCTTPIQVTSSQLVSNEIFPPAVVKAMLYPGAIVSSLTKRIAFPRWSDLFDIYNLTEAKNASAVVDLQRLEILAGSYFCVAGALVGIINPGRMTLFGTLLVIWGLVKEALFGKPVNSDPTQSAYVYPTILIALICAFMSITYNVKKTAKSSPPVSIAKPLKSSAKSKLK

SEQ ID NO: 74392 - protein, 77 aa, Setaria italica
  Transcript Sequence Number=SeqID_8418
  Subcellular localization annotation: CTP_CleavageSite=26; ConfidenceScore=5.42e-01
SQPSRRPAAHIAGESSHVVGSGKGASSSSAGESLRNSCNDFARTLARLPASIMEGLSRSIPRRRSHHYPAAPHRLQP

SEQ ID NO: 74393 - protein, 169 aa, Setaria italica
  Transcript Sequence Number=SeqID_8419
  Gene Ontology: Mol. function=oxidoreductase activity; Cellular component=cytoplasm; Biological process=oxidation reduction
  Homolog annotation: Hit_ID=B6U5T2; Match level="QueryCoverage=94%, HitCoverage=43%, E-value=7e-71, Identity=82%"; Hit description =Mannitol dehydrogenase
  Pfam annotation: Domain name=2-Hacid_dh_C; Domain location=3-133; Score=-103.2; E_value=0.08; Accession=PF02826.11; Description=D -isomer specific 2-hydroxyacid dehydr
  Pfam annotation: Domain name=ADH_zinc_N; Domain location=47-169; Score=80.3; E_value=7e-21; Accession=PF00107.18; Description=Zinc -binding dehydrogenase
  Pfam module annotation: Pfam domain module=2-Hacid_dh_C::ADH_zinc_N; Domain location=3-133::47-169
RTIRYVRRTKRFVIRFPDGMPLDKGAPLLCAGITVYTPMKYHGLNEPGKHIGVIGLGGLGHVAVKFAKAFGMRVTVVSTSPEKREEALEKLGADAFVVSSDASQMKAAKGTMHGIINTASASMSMYPYFALLKPQGKMILLGLPEKPLQISAFSLVAGGKTLAGSCMGS

SEQ ID NO: 74394 - protein, 185 aa, Setaria italica
  Transcript Sequence Number=SeqID_8420
  Gene Ontology: Mol. function=oxidoreductase activity; Cellular component=cytoplasm; Biological process=oxidation reduction
  Homolog annotation: Hit_ID=B6U5T2; Match level="QueryCoverage=87%, HitCoverage=43%, E-value=6e-76, Identity=85%"; Hit description =Mannitol dehydrogenase
  Pfam annotation: Domain name=ADH_zinc_N; Domain location=8-143; Score= 116.8; E_value=7.3e-32; Accession=PF00107.18; Description=Zinc -binding dehydrogenase
PTGLETKPGKHIGVIGLGGLGHVAVKFAKAFGMRVTVVSTSPEKREEALEKLGADAFVVSSDASQMKAAKGTMHGIINTASASMSMYPYFALLKPQGKMILLGLPEKPLQISAFSLVAGGKTLAGSCMGSIKDTQEMMDFAAKHELTADIEVVGAEDVNDALERLDKGDVRYRFVIDVGNTLVAA

SEQ ID NO: 74395 - protein, 53 aa, Setaria italica
  misc_feature (1)..(6): Xaa can be any naturally occurring amino acid
  Transcript Sequence Number=SeqID_8421
XXXXXXFFFFFLVEERWNLHENQVKIFVQQEHLLHRGEVASRKTQLTDILLPN

SEQ ID NO: 74396 - protein, 79 aa, Setaria italica
  Transcript Sequence Number=SeqID_8422
  Gene Ontology: Mol. function=transcription regulator activity; Cellular component=nucleus; Biological process=regulation of transcription
  Homolog annotation: Hit_ID=B9RQ93; Match level="QueryCoverage=75%, HitCoverage=23%, E-value=1e-15, Identity=71%"; Hit description=RNA polymerase II mediator complex subunit, putative
  Pfam annotation: Domain name=MED6; Domain location=1-57; Score=15.4; E_value=1.6e-05; Accession=PF04934.6; Description=MED6 mediator sub complex component
CSPTTILDGSIYQAPQLCNVFASRISRAMHHISKAFTVACSKLEKIRNVETESDAAASESKTQKEDKYEPRKGNLKTKI

SEQ ID NO: 74397 - protein, 240 aa, Setaria italica
  misc_feature (9)..(9): Xaa can be any naturally occurring amino acid
  misc_feature (234)..(234): Xaa can be any naturally occurring amino acid
  Transcript Sequence Number=SeqID_8423
  Gene Ontology: Mol. function=transcription regulator activity; Cellular component=nucleus; Biological process=regulation of transcription
  Homolog annotation: Hit_ID=B9RQ93; Match level="QueryCoverage=94%, HitCoverage=90%, E-value=2e-81, Identity=64%"; Hit description=RNA polymerase II mediator complex subunit, putative
  Pfam annotation: Domain name=MED6; Domain location=72-160; Score =152.3; E_value=1.4e-42; Accession=PF04934.6; Description=MED6 mediator sub complex component
GADGAGALXAPPGTDMTGICFRDQLWLNSYPLDRNLVFDYFALSPFYDITCNNESLRSRQIHPLDMSQLTKMTGIEYVLSDVMEPHLFVIRKQKRESPEKSSAMLAYYILDGSIYQAPQLCNVFASRISRAMHHISKAFTVACSKLEKIRNVETESDAAASESKTQKEAIDLKELKRIDHILSSLKRKIGAAPPPPPYPEGYVPPSAEQEKAPDDVLASEAPPQLDPIIDQGPXKKPRFQ

SEQ ID NO: 74398 - protein, 79 aa, Setaria italica
  Transcript Sequence Number=SeqID_8424
SHKLQHRGSRSNLTPQLPRFIKGMSLKRADHHCHSSATHFVYTGSIYRWHSQILKGMHVSEIDTLRKESTLRKRETFFS

SEQ ID NO: 74399 - protein, 116 aa, Setaria italica
  Transcript Sequence Number=SeqID_8425
  Gene Ontology: Mol. function=transferase activity, transferring glycosyl groups; Cellular component=integral to membrane; Biological process=metabolic process
  Homolog annotation: Hit_ID=Q9SCP6; Match level="QueryCoverage=99%, HitCoverage=22%, E-value=1e-19, Identity=40%"; Hit description =Glucosyltransferase-like protein
AVPRLSFFSMCAFCLLCQHNVERFNAYDGVADDNEPVVVPGLEKRVEVSRAQAPGFFRGTPGFEMFADDVEQALVEADGIVTNSFLEMEPEYVAGYAEARSMKVWTVGPVSSFHQR

SEQ ID NO: 74400 - protein, 155 aa, Setaria italica
  misc_feature (31)..(31): Xaa can be any naturally occurring amino acid
  Transcript Sequence Number=SeqID_8426
  Homolog annotation: Hit_ID=Q942E9; Match level="QueryCoverage=99%, HitCoverage=40%, E-value=1e-25, Identity=45%"; Hit description=6b -interacting protein 1-like
  Subcellular localization annotation: CTP_CleavageSite=34; ConfidenceScore=5.35e-01
VKWVYYDKMVSILRPSPPASSTAPAPAPVPXPPVVKRRRDTQPSPRLGWGMKAPECLLGGGGEPRPGLSGPGAELGEPEPQKVCAVEGDRNGFMALTESIQKFGEVFARMESSKRRHMAEVEQMRRDLQKDLDAKWREILEKAKAEIACLSDEDG

SEQ ID NO: 74401 - protein, 95 aa, Setaria italica
  misc_feature (12)..(12): Xaa can be any naturally occurring amino acid
  Transcript Sequence Number=SeqID_8427
  Homolog annotation: Hit_ID=Q942E9; Match level="QueryCoverage=58%, HitCoverage=15%, E-value=6e-13, Identity=67%"; Hit description=6b -interacting protein 1-like
ALTESIQKFGEXFARMESSKRRHMAEVELMRRDLQRDLDAKWREILEKAKAEIACLSDEDGDGSDVEEDEDGGDDKRLEDGGGEVQNNGAMDASP

SEQ ID NO: 74402 - protein, 75 aa, Setaria italica
  Transcript Sequence Number=SeqID_8428
TLSRNWYKRFMLHMTVLGTAAMESGQLHRGLSSLYCLDLVLEFDKCSVAFKLCNAYRLMNGDALIRLVDDKCDEL

SEQ ID NO: 74403 - protein, 145 aa, Setaria italica
  Transcript Sequence Number=SeqID_8429
QESMAKIGFGDLSARKTSLIEDLPRPKQQSLHDCEEVPLQLANYGAGAVAPAAAMSWLAPSTSGVAVAAEVGSTKVSRISPTPPPASSAPDSPASNPNKQNRHKRKILLSWQQHAAAVHGHRRNSESRPTSRAFATGNATVSDSA

SEQ ID NO: 74404 - protein, 465 aa, Setaria italica
  Transcript Sequence Number=SeqID_8430
  Gene Ontology: Mol. function=serine-type peptidase activity; Cellular component=extracellular region; Biological process=proteolysis
  Homolog annotation: Hit_ID=B6T6L2; Match level="QueryCoverage=94%, HitCoverage=84%, E-value=0.0, Identity=93%"; Hit description =Carboxyl-terminal-processing protease
  Pfam annotation: Domain name=PDZ; Domain location=133-213; Score =39.8; E_value=1.1e-08; Accession=PF00595.16; Description=PDZ domain (Also known as DHR or GLGF)
  Pfam annotation: Domain name=Peptidase_S41; Domain location=257-420; Score=224.3; E_value=3.2e-64; Accession=PF03572.10; Description =Peptidase family S41B
  Pfam module annotation: Pfam domain module=PDZ::Peptidase_S41; Domain location=133-213::257-420
  Subcellular localization annotation: CTP_CleavageSite=53; ConfidenceScore=5.09e-01
PLGTEHGGRALGQAAAGFAAAAVVSLTGFAGDMSPLPTPPPARAESLTVAFPVAKAREVNRVQKTLVEAWGLIRETFVDPTFNHQDWDQKLQQTMVEMFPLKSADAAYGKISGMLSTLGDPFTRIISPTEYQSFRIGSDGNVQGVGVFINREPSSGRLLVMDCIQGGPADRAGIHEGDELVEIDGKSVSGLDGEAAAQRLRGRVGTTVKVKLLDGADNDRGGRIRQKEVQLSREIINLSPLSTTIISHRSDDGHECKTGYVRLAAFSQTAAAEMENAVKRMEDEGVESYILDLRNNPGGLVKAGLDVAQIWLDGDETLVNTIDREGNVLPINMIQGHSLTHDPLVVLVNEGSASASEILAGALHDNGRAILVGHRTFGKGKIQSVTELDDGSALFITVAKYLSPALHEIDQVGIQPDIQCSPDILSLPRAPQLRENSEATSLEMDSCIMVAEQALGIEQTKGSAS

SEQ ID NO: 74405 - protein, 58 aa, Setaria italica
  Transcript Sequence Number=SeqID_8431
AAAGHGGPRQRQRKLGGEKTTTSAVQGAAAAGDGDVGRCGGAMSDTTLYLLLDRFSPS

SEQ ID NO: 74406 - protein, 351 aa, Setaria italica
  Transcript Sequence Number=SeqID_8432
  Gene Ontology: Mol. function=metal ion binding; Cellular component =nucleus
  Homolog annotation: Hit_ID=B9RB10; Match level="QueryCoverage=88%, HitCoverage=99%, E-value=2e-49, Identity=38%"; Hit description=ATP binding protein, putative
  Subcellular localization annotation: CTP_CleavageSite=70; ConfidenceScore=5.06e-01
MDGEAFRVGGHFGSSHPSGAMEDPMQSQNQFLFNARPAPLQLQLFGSPAVPAVGPSGYINYTGNNHLSVMSQARNTNIDTGNEKQLKLQMSLNNYHQQDADQLAHVGNPSAVSTGLRLSYEDDEHNSSITSGSGSMSSLPTTLPLLDDLMAEIDKENEEISYYLRLQAEQIGKQMKEVNQRRMISFLANLERAVGKKLREKELEAEAMNRKSKELNEQIRQVALEVQSWQSAALHNQSVANNLKSRLMQVVAQSTNLTREGSGDSEEDNAASSQNPNAGAPGCFFQSSLLGGRSTTATVGLGACRWCGGKEASVLVMPCRHLCLCADCERVSDVCPVCRFPKSGSVEINMS

SEQ ID NO: 74407 - protein, 54 aa, Setaria italica
  Transcript Sequence Number=SeqID_8433
IIRGHHIQRNHWWNNSRCLLASDRQFLSEKEERKPVCLLKTLASYPIIPCLMSA

SEQ ID NO: 74408 - protein, 680 aa, Setaria italica
  misc_feature (159)..(159): Xaa can be any naturally occurring amino acid
  Transcript Sequence Number=SeqID_8434
  Gene Ontology: Mol. function=endonuclease activity; Cellular component=nucleus; Biological process=termination of RNA polymerase II transcription
  Homolog annotation: Hit_ID=Q5Z4Y8; Match level="QueryCoverage=98%, HitCoverage=79%, E-value=0.0, Identity=77%"; Hit description =Regulator of nonsense transcripts 1-like
ASSSSSTAAMDRFQKIVLSWDYLRLVAESKGGKQAKGLQRVKDTYKSVADYLGVFEPLLFEEVKAQIVRGRSDEEEEDAGLDWQRVAVGLCAESEGFHKFSMAVENDFRENVGENDLVLLSKEKFEEGVTPTAYAFALVEQRGGSATISLRAFLAGEIXKILVIVSVNAPRLQRFASILAAESSTLWILKVCSLSTIMREFTAMHSVASLPFKDSILSAAEKHKDGDDQSRAWNVPQPLMDHLKANLNDSQLEAVNAGLSRRSFVLIQGPPGTGKTQTILGLLSAVLHSAPARMKTKGGFDVQRHGPELDIDGKYAHWVKASPWLLGANPRDLIMPVDGDDGFYPTGNELKPEVVSSSRKYRAHVLVCAPSNSALDEIVLRVLNTGIRDENNNTYNPKIVRIGVKAHHSVKAVSMDYLIQQKLSGVDRTLDGGRRGAGEYDRIRASILDEAAIVFSTLSFSGSSIFSRMSRAFDVVIIDEAAQAVEPATLIPLVHGCRQIFLVGDPVQLPATVISSTAQKLGYGTSLFKRFQGAGFPVQMLKIQYRMHPEISIFPSKEFYEGVLQDGEGLSKKRPWHSYTCFGPFCFFDVDGVESQPPGSGSWVNQDEVEFITLLYHQLAMRYPELKSSSEVAVISPYRQQMKLLRDNFRLTFGDQSKEVIDVNTVDGFRGREREGKYNF

SEQ ID NO: 74409 - protein, 244 aa, Setaria italica
  Transcript Sequence Number=SeqID_8435
  Homolog annotation: Hit_ID=Q7XKB6; Match level="QueryCoverage=66%, HitCoverage=22%, E-value=2e-35, Identity=48%"; Hit description =OSJNBa0064G10.15 protein
  Pfam annotation: Domain name=DUF639; Domain location=1-239; Score= -343.9; E_value=0.0029; Accession=PF04842.4; Description=Plant protein of unknown function (DUF639)
  Pfam annotation: Domain name=Reticulon; Domain location=63-222; Score= -39.6; E_value=0.055; Accession=PF02453.9; Description=Reticulon
  Pfam module annotation: Pfam domain module=DUF639::Reticulon; Domain location=1-239::63-222
AFVAVCFGVTKSLEAALEESICYSERIESARATVDRLSVSSIDANLALMQELLFPLIQVGKIVYSLSQWEDPLKSLLFLAFMLYVIQRGLVSYIVPFVFLTFAVVILWRKYIGGGKLLEVLEVKPPPSKNAVEQILILQEAISKLEDSLQAVNIALLKFRSVLFASVPKATEVVAAVLIAAATFLVFVPSRHLLLMFALELYTREMPLRKQNTEKFRRRIREWWARIPAAPVQMIRPNETKKKR

SEQ ID NO: 74410 - protein, 62 aa, Setaria italica
  Transcript Sequence Number=SeqID_8436
  Homolog annotation: Hit_ID=B9S1S6; Match level="QueryCoverage=95%, HitCoverage=8%, E-value=1e-10, Identity=55%"; Hit description =Component of oligomeric golgi complex, putative
PRPAVREGISLLLALIDTYNSMMVPASGKRPNFDPVISALLDPIIQVSFLCQLSGVPYKLPL

SEQ ID NO: 74411 - protein, 614 aa, Setaria italica
  Transcript Sequence Number=SeqID_8437
  Gene Ontology: Cellular component=Golgi transport complex; Biological process=protein transport
  Homolog annotation: Hit_ID=B9S1S6; Match level="QueryCoverage=99%, HitCoverage=89%, E-value=0.0, Identity=68%"; Hit description =Component of oligomeric golgi complex, putative
  Pfam annotation: Domain name=COG6; Domain location=2-612; Score =764.8; E_value=6.3e-227; Accession=PF06419.3; Description=Conserved oligomeric complex COG6
YLDRVEGEVHALNDSWKKIEEALNSCSASTGDIISTTERMQQELEVITQRQEIVSCFLRDYQLSNEEINALREEDIDEKFFKALLHVQEIHSNCKVLLRTHHQRAGLELMDMMSVYQEGAYERLCRWVQAECKKLGDTDNPEVSELLKKAVRCLKERPVLFKYCAEEVANMRHHALFRRFISALTRGGPGGLPRPIEVHAHDPLRYVGEMLGWLHQALASERELIVVLLDPDAMTDSGPASRRQSGRDGDSSRGESDVTFVLDRIFEGACRPFKVRVEQVLQSQPSLIVSFKLSNTLEFYGYTIAELLGEDTALCNTIWSLRDAAQQTFFSILKSRGEKLLRYPPLVAVDLSPPPAVREGISLLLALIDTYNSMMVPASGKRPNFDPVISALLDPIIQMCEQAAEAQKSKGSLARRGRTSSDPSGNSRDSISVDAILSKNLSTSVLSAESSSKVYLVNCLSAIQEPLKGQEVATSYVNNLSSMIEAHVRALVDKEVDSILRKCGLSNKMPYIKDYGNSDDAKALADVVETSPQMLLECLKAFYGIVTGTEGSLPEFEQLQVPRLRSDACYGLARALAETHELIYKAVMDPKNNYPDPRSLAKHSPEQIRTILEI

SEQ ID NO: 74412 - protein, 95 aa, Setaria italica
  Transcript Sequence Number=SeqID_8438
  Gene Ontology: Mol. function=catalytic activity; Biological process =spermidine biosynthetic process
  Homolog annotation: Hit_ID=Q70AG5; Match level="QueryCoverage=85%, HitCoverage=23%, E-value=2e-27, Identity=69%"; Hit description =Putative spermine synthase
GRVFSSIYNTLRHVFKYVKAYTAHVPSFADTWGWVMASDHPFVLTAQQIDERIRERVDGELAYLSGESLISSTTLNKSVYQSLVASISVNRVELH

SEQ ID NO: 74413 - protein, 60 aa, Setaria italica
  misc_feature (60)..(60): Xaa can be any naturally occurring amino acid
  Transcript Sequence Number=SeqID_8439
  Gene Ontology: Mol. function=zinc ion binding; Cellular component =intracellular
  Homolog annotation: Hit_ID=Q84U93; Match level="QueryCoverage=76%, HitCoverage=27%, E-value=2e-10, Identity=69%"; Hit description=Zinc finger protein SRZ1
  Pfam annotation: Domain name=zf-RanBP; Domain location=4-33; Score =21.6; E_value=0.0023; Accession=PF00641.10; Description=Zn-finger in Ran binding protein and others
MNRKPGDWDCRACQHLNFSRRDLCQRCGEPRGAADRGSGGGGDYANFGGRGGSSFGGGFX

SEQ ID NO: 74414 - protein, 46 aa, Setaria italica
  Transcript Sequence Number=SeqID_8440
  Homolog annotation: Hit_ID=B6T2W6; Match level="QueryCoverage=93%, HitCoverage=19%, E-value=2e-11, Identity=83%"; Hit description=RNA -binding protein cabeza
  Pfam annotation: Domain name=zf-RanBP; Domain location=8-34; Score =18.7; E_value=0.0056; Accession=PF00641.10; Description=Zn-finger in Ran binding protein and others
CICTSEYNAGRSGCNEHNFASRMECFRCNAPRDSGSAAMTYDNYNL

SEQ ID NO: 74415 - protein, 103 aa, Setaria italica
  Transcript Sequence Number=SeqID_8441
  Gene Ontology: Mol. function=zinc ion binding; Cellular component =intracellular
  Homolog annotation: Hit_ID=B6T2W6; Match level="QueryCoverage=95%, HitCoverage=57%, E-value=1e-39, Identity=80%"; Hit description=RNA -binding protein cabeza
  Pfam annotation: Domain name=zf-RanBP; Domain location=6-34; Score =28.0; E_value=3.9e-05; Accession=PF00641.10; Description=Zn-finger in Ran binding protein and others
  Pfam annotation: Domain name=zf-RanBP; Domain location=68-99; Score =40.4; E_value=7.1e-09; Accession=PF00641.10; Description=Zn-finger in Ran binding protein and others
  Pfam module annotation: Pfam domain module=zf-RanBP::zf-RanBP; Domain location=6-34::68-99
AGSDVRPGDWLCNCGAHNFASRSNCFKCSAFKEEAAVNSGAGGFDGDMSRSRYSFGGGAARTNRPGWKSGDWICTRSGCNEHNFASRMECFRCNAPRDSGTEV

SEQ ID NO: 74416 - protein, 109 aa, Setaria italica
  Transcript Sequence Number=SeqID_8442
AAIVALATLAVALLDYSLLLLFLDVLATWALAAAVSPVYTLALRWWPRSAVGGVAAGVAYVLLLGAVEVFSTAAVTAYYFECRESVEEEEEVRAGLRYIKLPNGDEANI

SEQ ID NO: 74417 - protein, 136 aa, Setaria italica
  Transcript Sequence Number=SeqID_8443
  Homolog annotation: Hit_ID=C3SA44; Match level="QueryCoverage=63%, HitCoverage=12%, E-value=1e-12, Identity=52%"; Hit description =Translation factor
KRRRRQEEVKKRGEREERRRMEDARRRLGIAVPDASSGDGGSGAQRRPVYESKKSKSQPKRHENVQSEANLGETQVFEQQLEDLQSNGSLEDTDGVMVDALELGEEQISKPSSEESNGIDDDDAWENKSFCIVILY

SEQ ID NO: 74418 - protein, 77 aa, Setaria italica
  Transcript Sequence Number=SeqID_8444
FGRPLAERFLSHVRMALEELDDEAKGGPVPRMRVTIELGPAAKGSGEEATARVVKRESVVAVQRSVSLAGGKTKGVC

SEQ ID NO: 74419 - protein, 39 aa, Setaria italica
  Transcript Sequence Number=SeqID_8445
SFREPMVLPGAPMWLLEASGFWKLDKLHSFKAQQAQFEI

SEQ ID NO: 74420 - protein, 77 aa, Setaria italica
  Transcript Sequence Number=SeqID_8446
  Subcellular localization annotation: CTP_CleavageSite=27; ConfidenceScore=5.02e-01
SGIYNCLHDLNLQHLTTNHHSSAPKPRAQTNPTDLRKNWVTTLAESSENYDEIVTRPFLSARQHSKKAPTSKNRGKE

SEQ ID NO: 74421 - protein, 82 aa, Setaria italica
  Transcript Sequence Number=SeqID_8447
  Gene Ontology: Mol. function=metal ion binding
  Homolog annotation: Hit_ID=B6TVZ8; Match level="QueryCoverage=74%, HitCoverage=26%, E-value=3e-12, Identity=63%"; Hit description =Protein binding protein
MTDSRRPDGSYGPEYGPLPPEHEYAMYRHLSSRRRAPWPLQHGDGDYPGRILEQRLRREPFGLSRYSSVDCYFSLLHFSFNS

SEQ ID NO: 74422 - protein, 68 aa, Setaria italica
  Transcript Sequence Number=SeqID_8448
  Gene Ontology: Mol. function=binding; Cellular component=integral to membrane; Biological process=transport
  Homolog annotation: Hit_ID=B6TE30; Match level="QueryCoverage=100%, HitCoverage=17%, E-value=1e-27, Identity=89%"; Hit description =Mitochondrial carrier protein
PLLSKLLPGYVPDMRVWSSTVSLLSDLSPKHPDMLGALKQHPWMLTGSGKPPLPSAVQLPSRVISLEG

SEQ ID NO: 74423 - protein, 143 aa, Setaria italica
  Transcript Sequence Number=SeqID_8449
  Pfam annotation: Domain name=VQ; Domain location=88-118; Score=27.3; E_value=6.1e-05; Accession=PF05678.6; Description=VQ motif
  Subcellular localization annotation: CTP_CleavageSite=79; ConfidenceScore=5.81e-01
MVMDKPNLPQPPPPSSASTAASSLKSLNKASYKISKQLSSTSASSAPASASASSMRAPSPPPPQPPRPSPPLPPPPPAQASSIPADHPPPQPPVYNIDKSDFRDVVQKLTASPYPHLPPIIPAAPAAAAAAMAPPPPIMATYP

SEQ ID NO: 74424 - protein, 235 aa, Setaria italica
  Transcript Sequence Number=SeqID_8450
  Gene Ontology: Mol. function=DNA binding; Biological process =regulation of transcription
  Homolog annotation: Hit_ID=B9RE35; Match level="QueryCoverage=90%, HitCoverage=74%, E-value=3e-40, Identity=47%"; Hit description=DNA binding protein, putative
  Pfam annotation: Domain name=Myb_DNA-binding; Domain location=79-126; Score=41.1; E_value=4.2e-09; Accession=PF00249.23; Description=Myb -like DNA-binding domain
RHYEALVEDVAAIEAGRVPLPSYAGEDPSAATPDSAAGAASAPKDGGGGGGGGHRREERKSGVDVGKSCSKAEQERRKGIPWTEEEHRLFLLGLDKFGKGDWRSISRNFVISRTPTQVASHAQKYFIRLNSMNRDRRRSSIHDITSVTAGEVAAAGAPITGGPAAAGAMPMGPAGMKHHHPGPPMGMYGHAPMGHPVAGHMVAPAAVGTPVMFPPGHSPYVVPVGYPAPPAKMHQ

SEQ ID NO: 74425 - protein, 43 aa, Setaria italica
  Transcript Sequence Number=SeqID_8451
SMLVSLDRRLPLPLPMFTAFNIYGGNLMQFAASETSQAILQEP

SEQ ID NO: 74426 - protein, 76 aa, Setaria italica
  Transcript Sequence Number=SeqID_8452
PSHTSRTITTKLLNIPKLPMTPQSGRGTIDDEEVGRCTYYCSSQKVIQWLMLPPTPPRCPWNGRLRPALSHHLSGV

SEQ ID NO: 74427 - protein, 297 aa, Setaria italica
  misc_feature (41)..(41): Xaa can be any naturally occurring amino acid
  Transcript Sequence Number=SeqID_8453
  Gene Ontology: Mol. function=carbohydrate binding; Biological process= carbohydrate metabolic process
  Homolog annotation: Hit_ID=B6TRY2; Match level="QueryCoverage=100%, HitCoverage=82%, E-value=2e-83, Identity=57%"; Hit description =Starch binding domain containing protein
  Pfam annotation: Domain name=CBM_20; Domain location=39-130; Score =77.6; E_value=4.5e-20; Accession=PF00686.11; Description=Starch binding domain
AQEGPVVVAPPQADEEEVHGNGAAAVETSSPPAVSGKTVRXVRFVLEKQCAVDQSVYLVGDDPALGLWDPANAIPLECAESHGWILEKDLPANKLIEFKFLLRDSSGKLHWQNGPNRIFQTGEAANTLVVYEDWCDVKNQRIAEEEVVASVVMEEAVVSDDSGSRQDTVIEDELQMDDNQEVKEDEPAVDEEEEKSAVNVSVQVDTLKINEGQPHESMLQKELEIIDELHETVDMEDVSALCADESSAEKTEEDNILPEHGVPVENGLASAYEHDLLWGWKVVQQLLMKLGIRMDTT

SEQ ID NO: 74428 - protein, 47 aa, Setaria italica
  Transcript Sequence Number=SeqID_8454
  Gene Ontology: Mol. function=DNA binding; Biological process =regulation of transcription
NEYRLPPDHTDRYQKTEISLCRVYKRTGIDDGHGHPSARSTPSRRAT

SEQ ID NO: 74429 - protein, 149 aa, Setaria italica
  Transcript Sequence Number=SeqID_8455
  Homolog annotation: Hit_ID=B6SK84; Match level="QueryCoverage=99%, HitCoverage=34%, E-value=6e-30, Identity=50%"; Hit description=F-box domain containing protein
MAGIRRRRGGREPSPQQGAQFSPLADATHSTREVTIVERPSKNACHASGSTSSTSSGPHVCADLLDSLLHEIIILINSFHDFLAFIGTCRSWRASVSSFPSVCTFSFPPLHFEPDGPYFRPHSRGIKPRLLSNCKWQLSDPSKKNLSLR

SEQ ID NO: 74430 - protein, 550 aa, Setaria italica
  Transcript Sequence Number=SeqID_8456
  Gene Ontology: Mol. function=glutathione-disulfide reductase activity; Cellular component=chloroplast; Biological process =glutathione metabolic process
  Homolog annotation: Hit_ID=A8CCK2; Match level="QueryCoverage=100%, HitCoverage=100%, E-value=0.0, Identity=80%"; Hit description =Chloroplastic glutathione reductase
  Pfam annotation: Domain name=Pyr_redox; Domain location=248-341; Score=107.0; E_value=6.5e-29; Accession=PF00070.19; Description =Pyridine nucleotide-disulphide oxidore
  Pfam annotation: Domain name=Pyr_redox_2; Domain location=74-387; Score=256.6; E_value=6.1e-74; Accession=PF07992.6; Description =Pyridine nucleotide-disulphide oxidore
  Pfam annotation: Domain name=Pyr_redox_dim; Domain location=417-526; Score=181.9; E_value=1.8e-51; Accession=PF02852.14; Description =Pyridine nucleotide-disulphide oxidored
  Pfam module annotation: Pfam domain module=Pyr_redox::Pyr_redox _2::Pyr_redox_dim; Domain location=248-341::74-387::417-526
  Subcellular localization annotation: CTP_CleavageSite=55; ConfidenceScore=5.76e-01
MAAHATLPFSCSSTLQTLTRSFSSRGALQLRRGFRRLPSLAALPRLSRPCRRHVSASAAASPNGASSEGEYDYDLFTIGAGSGGVRASRFASTLYGMRVAICEMPFATVATDELGGLGGTCVLRGCVPKKLLVYGSKYSHEFEESHGFGWTYETDPKHDWNTLIANKNTELQRLVCIYKNILNNAGVTLIEGRGKIVDPHTVSVNGKLYTAKNILIGVGGRPSMPDIPGIEYAIDSDAALDLPSKPEKIAIVGGGYIALEFAGIFNGLKSEVHVFIRQKKVLRGFDEEVRDFVAEQMSLRGITFHTEQTPQAVTKSNDGLLSLKTNKETFGGFSHVMFATGRRPNTKNLGLEEVGVEMDKNGAVVVDEYSRTSVDSIWAVGDVTNRINLTPVALMEGGAFVKTVFGNEPTKPDYRAVPSAVFSQPPIGQVGLSEEQAIEEYGDVDVFVANFRPLKATLSGLPDRVLMKIIVCATTDKVVGVHMCGDDAPEIIQGIAIAVKAGLTKQDFDATIGIHPTSAEEFVTMRNPTRKIRRSSADQVESKDEVATKQ

SEQ ID NO: 74431 - protein, 99 aa, Setaria italica
  Transcript Sequence Number=SeqID_8457
WTLLLLRPRLFERQQHCILLRRRNRRGGTASLWCPARCHGCGDGVASEDGAGERFRDPSRSLGRATGAARVLGARAAAPPRPGGEPHRPPPSSSSSTVS

SEQ ID NO: 74432 - protein, 782 aa, Setaria italica
  misc_feature (744)..(744): Xaa can be any naturally occurring amino acid
  misc_feature (772)..(772): Xaa can be any naturally occurring amino acid
  misc_feature (776)..(776): Xaa can be any naturally occurring amino acid
  Transcript Sequence Number=SeqID_8458
  Gene Ontology: Mol. function=ATPase activity, coupled to transmembrane movement of ions, phosphorylative mechanism; Cellular component=integral to membrane; Biological process=phospholipid transport
  Homolog annotation: Hit_ID=B9SF77; Match level="QueryCoverage=97%, HitCoverage=65%, E-value=0.0, Identity=62%"; Hit description =Phospholipid-transporting ATPase, putative
  Pfam annotation: Domain name=E1-E2_ATPase; Domain location=9-292; Score=17.8; E_value=1.2e-05; Accession=PF00122.12; Description=E1-E2 ATPase
  Pfam annotation: Domain name=Hydrolase; Domain location=319-777; Score=12.7; E_value=0.0036; Accession=PF00702.18; Description =haloacid dehalogenase-like hydrolase
  Pfam module annotation: Pfam domain module=E1-E2_ATPase::Hydrolase; Domain location=9-292::319-777
YRAVSVLLPLLVVVSAAMAKEAVEDWRRKQQDIEVNNRKVEVYDGTQSFHETEWKKLRVGDIVKVKKDEFFPADLLFLSSSYDDGICYVETMNLDGETNLKRKQALDVTMGLNDEQFFHSFKAFIRCEDPNEKLYSFLGTLYYNEQQYPLSPQQILLRDSKLRNTSYIYGTVIFTGHDTKVMQNAMEPPSKRSSVERRMDKIIYLLFAILFAIATFGSIVFGMKTKHEISPGNYAWYLRPDQANIFFDPNRASFAAFCHFLTSLMLYVTLVPISLYISIEIVKVLQSTFINQDQNMYCAESDKPARARTSNLNEELGQVHTILSDKTGTLTCNSMEFLKCSIAGVAYGNSPTEMETSYGEIAETTANYGHKNTTEFKRLVKGFNFTDGRLMNGRWAKECSRDAIEMFFRVLAVCHTAIPVADRNSAGMPYEAESPDEGALVTAAREFGFEFYHRTQTTISVHEYDPVFGGKVDRTYKLLNILEFSSARKRMSVIVRTEVGRLFLFCKGADSVIFERLSKDNGKACLSKTKCHINEYSEAGLRTLVLAYRELTEEQYVLWNQKYSAAKNSVHTDHDEAVEKASEDIEKDLVLLGATAVEDRLQSGVPECIHKLAQAGIKIWILTGDKLETAVNIGYSCNLLRKEMEEIFITLDNSSTSASEGCSGEGNRMAPYEEIDRKLLDARTKVFMRGTSTLFALIIDGNALTHALTSSLKNSFLDLAVNCASVLCCRISPKQKALVTRLVXNWTGKTTLAIGDGANDVGMLQEADIGVXISGXEMQAVM

SEQ ID NO: 74433 - protein, 100 aa, Setaria italica
  Transcript Sequence Number=SeqID_8459
  Subcellular localization annotation: CTP_CleavageSite=59; ConfidenceScore=5.19e-01
FSGTNTSFELATAVAIASVMFSNTTSLILKCCILGASRTNQATACVNIEFSDIASSLIQESEGWHMIDHGGYTRYHHVKHTLFQGLMHTVNSQLWVGKCK

SEQ ID NO: 74434 - protein, 186 aa, Setaria italica
  Transcript Sequence Number=SeqID_8460
  Gene Ontology: Mol. function=transferase activity, transferring phosphorus-containing groups; Cellular component=membrane; Biological process=two-component signal transduction system (phosphorelay)
  Homolog annotation: Hit_ID=Q76GZ9; Match level="QueryCoverage=98%, HitCoverage=15%, E-value=6e-94, Identity=87%"; Hit description =Histidine kinase 3
  Pfam annotation: Domain name=Response_reg; Domain location=41-174; Score=103.7; E_value=6.3e-28; Accession=PF00072.16; Description =Response regulator receiver domain
EPYRLSTIAASFRKTLGIGVTRQHNRDQSSVLQSVLTGKQILVVDDNAVNRKVAAGSLKKYGAIVTCVDSGNDAIDMLKPPHTFDACFMDVQMPEMDGFEATRLIRSVEKKINDVIQMGEVSADNYGNKPHWHVPILAMTADVIQATFEKCMECGMDGYVSKPFEEQQLYSAVAHFLETGETDPTS

SEQ ID NO: 74435 - protein, 843 aa, Setaria italica
  misc_feature (12)..(12): Xaa can be any naturally occurring amino acid
  Transcript Sequence Number=SeqID_8461
  Gene Ontology: Mol. function=transferase activity, transferring phosphorus-containing groups; Cellular component=membrane; Biological process=two-component signal transduction system (phosphorelay)
  Homolog annotation: Hit_ID=Q76GZ9; Match level="QueryCoverage=99%, HitCoverage=69%, E-value=0.0, Identity=88%"; Hit description =Histidine kinase 3
  Pfam annotation: Domain name=CHASE; Domain location=81-306; Score =299.5; E_value=7.4e-87; Accession=PF03924.5; Description=CHASE domain
  Pfam annotation: Domain name=HATPase_c; Domain location=479-648; Score=128.1; E_value=2.8e-35; Accession=PF02518.18; Description =Histidine kinase-, DNA gyrase B-, and HSP90-like ATPase
  Pfam annotation: Domain name=HisKA; Domain location=367-432; Score =91.9; E_value=2.2e-24; Accession=PF00512.17; Description=His Kinase A (phosphoacceptor) domain
  Pfam module annotation: Pfam domain module=CHASE::HATPase_c::HisKA; Domain location=81-306::479-648::367-432
SAKISRKWSKRXALLIGVSIGLCSSGCIFLCMYADVVARRIENLANMCDERARMLQDQFNVSMNHVQALAILVSTFHHGKNPSAIDQKTFEDFTARTTFERPLMSGVAYALKVLHSEREQFEQQHGWKIKKMEAGDQSLVHDYNPEKLEPSPVQDEYAPVIFSQETVKHIISVDMMSGKEDHDNILRSRATGKGALTSPFKLLKSNHLGVVLTFTVYKYDLPPNATPEERIHATLGYLGASFDVPSLVDKLLEQLASKQKIVVRLYDTTNHTSPIKMYGSDFTVSGDLQHISSIDFGDPTRKHEMHCRFKHEPPLPWSAIIISAAVAIIVLLVGHIIYATLNSLEKAEQDYIVMRELKGQAEAADVAKSQFLATVSHEIRTPMNGVLGMLQMLMDTELDTTQQDFVVTAQESGKALINLINEVLDLAKIESGRIELEAVPFDVRDILDNVVSLFYEKSQAKGIELAVLVSDQVPDVLIGDPWRFRQIITNLVGNSMKFTERGHIFVQVHLVEELKRAGNIFYDVSAQNREVLDDPDNMKLWNTLSGLEVADSWKSLENFRMFKTSTGETDTINLVVRVEDTGIGITKNAQLRIFTPFMQADSSTSRTYGGTGIGLSITKRLVELMGGEIGFTSKSGVGSTFSFTAIFKENRKGPGDIKRYYFEPTPSDFQGMRALIIDGRNARAEITMYHLQRLGIHCNLVATTESAFSALLEACTSSKSNPNMVLVDTEAWGKGSGFAFYRRLVDLQLKGTHKSSEPMPKIFLLGTSISPAESDYLRLTGYGDCIRKPLRLSTIAASFRKTLGIGVTRQHNRDQSSVLQSVLTGKQILVVDDNSKLSILVCR

SEQ ID NO: 74436 - protein, 143 aa, Setaria italica
  Transcript Sequence Number=SeqID_8462
  Homolog annotation: Hit_ID=Q7XGU7; Match level="QueryCoverage=97%, HitCoverage=44%, E-value=5e-53, Identity=71%"; Hit description =Thaumatin-like protein 1, putative, expressed
  Pfam annotation: Domain name=Thaumatin; Domain location=1-143; Score =98.1; E_value=3e-26; Accession=PF00314.9; Description=Thaumatin family
GVRCATGDCGSGEVECHGEGAAPPATLAEFTLGGSGGKDYYDVSLVDGYNLPMVVEAAAPGCPVTGCLVDLNEQCPAELRAGQGQARACRSACEAFGSPEYCCSGQFGNPDTCRPSVYSQVFKAACPRSYSYAYDDATSTFTC

SEQ ID NO: 74437 - protein, 121 aa, Setaria italica
  Transcript Sequence Number=SeqID_8463
  Gene Ontology: Mol. function=unfolded protein binding; Cellular component=mitochondrion; Biological process=response to stress
  Homolog annotation: Hit_ID=Q08276; Match level="QueryCoverage=72%, HitCoverage=12%, E-value=4e-36, Identity=81%"; Hit description=Heat shock 70 kDa protein, mitochondrial
MAASLLLRAARRRELASPLGSLGASLQSTYAANICSKWGSFARPFSAKAAGSEVIGIDLGTTNSCVAVMEGKNPKVIENAEGARTTPSVVAFTQKGERLVGTPAKRQAVTNPQNTFFGTKR

SEQ ID NO: 74438 - protein, 89 aa, Setaria italica
  Transcript Sequence Number=SeqID_8464
  Gene Ontology: Mol. function=oxidoreductase activity; Cellular component=extracellular region; Biological process=oxidation reduction
  Homolog annotation: Hit_ID=Q339K6; Match level="QueryCoverage=60%, HitCoverage=8%, E-value=8e-15, Identity=64%"; Hit description =Laccase-15
FPKPHQEIPIIIGEWWDLEDLGQVDRHLRHYVADDYFKASTINAKLGDLYNCSGNQTSIRLIHVHVEILCFISLKFHDSTLKASSKKPT

SEQ ID NO: 74439 - protein, 306 aa, Setaria italica
  Transcript Sequence Number=SeqID_8465
  Gene Ontology: Mol. function=oxidoreductase activity; Cellular component=extracellular region; Biological process=oxidation reduction
  Homolog annotation: Hit_ID=Q339K6; Match level="QueryCoverage=94%, HitCoverage=49%, E-value=1e-123, Identity=70%"; Hit description =Laccase-15
  Pfam annotation: Domain name=Cu-oxidase; Domain location=161-304; Score=111.0; E_value=3.9e-30; Accession=PF00394.14; Description =Multicopper oxidase
  Pfam annotation: Domain name=Cu-oxidase_3; Domain location=34-150; Score=198.9; E_value=1.4e-56; Accession=PF07732.7; Description =Multicopper oxidase
  Pfam module annotation: Pfam domain module=Cu-oxidase::Cu-oxidase_3; Domain location=161-304::34-150
MDSRSLPVAATAALIFFSVIALSAGTAIVEHTFVVTQVTMTHLCKDTLVTVVNGQLPGPAIEVTEGDSIAVHVVNKSPFNLTIHWHGVRQLLNCWADGVPMITQRPILPDHNFTYRFDASGQEGTLWWHAHVPCLRATIHGILIIRPRHGAISYPFPKPHKEIPIIIGEWWDLEDLGQVDRHLRHYVADDYFKASTINGKLGDLYNCSGVVEEAYKLDLEPGKTYLLRVLNAALFSEYYLKIAGHKFIVVAGDANYVSPYTTDTIAIAPGQTFDALVVADASPGRYYMVAMPNQPPKPDLSEPSLA

SEQ ID NO: 74440 - protein, 374 aa, Setaria italica
  Transcript Sequence Number=SeqID_8466
  Gene Ontology: Mol. function=oxidoreductase activity; Cellular component=extracellular region; Biological process=lignin catabolic process
  Homolog annotation: Hit_ID=Q339K6; Match level="QueryCoverage=91%, HitCoverage=57%, E-value=1e-100, Identity=55%"; Hit description =Laccase-15
  Pfam annotation: Domain name=Cu-oxidase; Domain location=3-92; Score=- 14.4; E_value=0.0061; Accession=PF00394.14; Description=Multicopper oxidase
  Pfam annotation: Domain name=Cu-oxidase_2; Domain location=203-345; Score=141.8; E_value=2.2e-39; Accession=PF07731.6; Description =Multicopper oxidase
  Pfam module annotation: Pfam domain module=Cu-oxidase::Cu-oxidase_2; Domain location=3-92::203-345
LQEERRRQAIEYSEQVGLAGLQFIVVAGDANYVSPYTTDTIAIAPGQTFDALVVADASPGRYYMVAMPNQPPKPDYQSPVLPTRGVLQYSNGAGGNQPGDVPMSPEMPDNHNHMLSFYFHGNLTSLHHPRHLPVPKRIDERLFITLGLGSVCRQGQSCERGAESDEVIVVATMNNISYELPTVSRPLLEAHYQNPSNIDWLQELPDVPPRVFNFTDNSLIPTGPKEEQLEPTSKAALARRFRYGAVVDVVFQSTSMLQSESNPMHLHGHDMFVLAQGSGNYDMERDVAKYNLVNPPLVNTVLVPRLGWVAVRFIADNPGVWYMHCHFEFHQSMGMIALFIVEDGPTANTSLPSPPVDFLTYGDDNNLMPDEYYL

SEQ ID NO: 74441 - protein, 170 aa, Setaria italica
  Transcript Sequence Number=SeqID_8467
  Gene Ontology: Mol. function=P-P-bond-hydrolysis-driven protein transmembrane transporter activity; Cellular component=integral to membrane; Biological process=protein transport
  Homolog annotation: Hit_ID=B6TQH7; Match level="QueryCoverage=48%, HitCoverage=47%, E-value=2e-31, Identity=91%"; Hit description=THA4
  Pfam annotation: Domain name=MttA_Hcf106; Domain location=86-138; Score=68.6; E_value=2.2e-17; Accession=PF02416.8; Description =mttAHcf106 family
  Subcellular localization annotation: CTP_CleavageSite=69; ConfidenceScore=5.62e-01
MGIAVVATVAAASSSSYLGVPPRATAAARAPARAHIAAAGMSSRASSFVGGGGGGLAVAAASIAARPRRAGSGGGGALGCKCLFGLGVPELVVIAGVAALVFGPKQLPEIGRNIGKTVKSFQQAAKEFETELKKEPGEGGDQPPPATPTAVGDGEEKKGLEASSSSKEST

SEQ ID NO: 74442 - protein, 52 aa, Setaria italica
  Transcript Sequence Number=SeqID_8468
HQSIPLFLAISQPVIYTKNGREGSREDDAAFLTVTVFDLLLIPYCTNPPTNC

SEQ ID NO: 74443 - protein, 95 aa, Setaria italica
  misc_feature (42)..(42): Xaa can be any naturally occurring amino acid
  Transcript Sequence Number=SeqID_8469
  Gene Ontology: Mol. function=protein binding; Cellular component =signalosome; Biological process=red or far red light signaling pathway
  Homolog annotation: Hit_ID=Q7XYD6; Match level="QueryCoverage=97%, HitCoverage=60%, E-value=2e-30, Identity=74%"; Hit description=Cop8 (Fragment)
VPSKLYTNISFDELGTLLGIDPRKTTELLGTDGYFTCATAYXAEKIASRMIYEDRMRGSIDQVEAVIHFDDDTEELQQWDQQISGLCQALNDILD

SEQ ID NO: 74444 - protein, 44 aa, Setaria italica
  Transcript Sequence Number=SeqID_8470
IHMVSPSGLNRTLGLKQDLFSPLGETIWIRHNNLDLEASAVPPS

SEQ ID NO: 74445 - protein, 41 aa, Setaria italica
  Transcript Sequence Number=SeqID_8471
PRQGKEVGLGVACGHTKPYVRAKGRKFEKARGRRNSRGFKV

SEQ ID NO: 74446 - protein, 83 aa, Setaria italica
  Transcript Sequence Number=SeqID_8472
  Gene Ontology: Mol. function=structural constituent of ribosome; Cellular component=ribonucleoprotein complex; Biological process =translation
  Homolog annotation: Hit_ID=Q5WMY3; Match level="QueryCoverage=75%, HitCoverage=33%, E-value=2e-27, Identity=96%"; Hit description =Ribosomal protein L18
  Pfam annotation: Domain name=Ribosomal_L18e; Domain location=19-82; Score=-32.6; E_value=2.9e-06; Accession=PF00828.11; Description =Eukaryotic ribosomal protein L18
HIAPISSQGIDLVAGGRNKKTKRTAPKSDDVYLKLLVKLYRFLVRRTKSDFNAVILKRLFMSKTNRPPLSLMKSRFRITALKS

SEQ ID NO: 74447 - protein, 54 aa, Setaria italica
  misc_feature (12)..(12): Xaa can be any naturally occurring amino acid
  Transcript Sequence Number=SeqID_8473
  Gene Ontology: Mol. function=structural constituent of ribosome; Cellular component=intracellular; Biological process=translation
  Homolog annotation: Hit_ID=Q5WMY3; Match level="QueryCoverage=83%, HitCoverage=23%, E-value=2e-14, Identity=86%"; Hit description =Ribosomal protein L18
ILKRLFMSKANXPPISLRRLANFMKGKEEKNIAVIVGTVTDDKRILALAVSVNL

SEQ ID NO: 74448 - protein, 79 aa, Setaria italica
  misc_feature (1)..(1): Xaa can be any naturally occurring amino acid
  Transcript Sequence Number=SeqID_8474
  Gene Ontology: Mol. function=structural constituent of ribosome; Cellular component=ribonucleoprotein complex; Biological process =translation
  Homolog annotation: Hit_ID=Q5WMY3; Match level="QueryCoverage=74%, HitCoverage=31%, E-value=4e-25, Identity=93%"; Hit description =Ribosomal protein L18
  Pfam annotation: Domain name=Ribosomal_L18e; Domain location=1-78; Score=-18.8; E_value=2.4e-07; Accession=PF00828.11; Description =Eukaryotic ribosomal protein L18
XVIVGTVTDDKRIQEIPAMKVTALRFTETARARIINAGGECLTFDQLALRAPLGENTVCFSSMRQHVSETIIVCACLKL

SEQ ID NO: 74449 - protein, 66 aa, Setaria italica
  Transcript Sequence Number=SeqID_8475
NSSMLCTDAITDQRSACQPMLSLPCDLTDRINSISMYCYEYRICCYLSYIMLLKIIKFLTKLVERS

SEQ ID NO: 74450 - protein, 64 aa, Setaria italica
  Transcript Sequence Number=SeqID_8476
  Gene Ontology: Mol. function=protein binding; Cellular component =signalosome; Biological process=red or far red light signaling pathway
  Homolog annotation: Hit_ID=Q7XYD6; Match level="QueryCoverage=100%, HitCoverage=51%, E-value=2e-26, Identity=90%"; Hit description=Cop8 (Fragment)
AEKIASRMIYEDRMRGSIDQVEAVIHFDDDTEELQQWDQQISGLCQALNDILDNMSSKGIAIPV

SEQ ID NO: 74451 - protein, 52 aa, Setaria italica
  Transcript Sequence Number=SeqID_8477
  Gene Ontology: Mol. function=structural constituent of ribosome; Cellular component=ribonucleoprotein complex; Biological process =translation
  Homolog annotation: Hit_ID=Q5WMY3; Match level="QueryCoverage=100%, HitCoverage=27%, E-value=5e-21, Identity=98%"; Hit description =Ribosomal protein L18
  Pfam annotation: Domain name=Ribosomal_L18e; Domain location=1-50; Score=-66.2; E_value=0.0012; Accession=PF00828.11; Description =Eukaryotic ribosomal protein L18
VLLRGPKNAREAVRHFGKAPGVPHSLTKPYVRSKGRKFEKARGRRNSRGFKV

SEQ ID NO: 74452 - protein, 153 aa, Setaria italica
  misc_feature (27)..(27): Xaa can be any naturally occurring amino acid
  Transcript Sequence Number=SeqID_8478
  Gene Ontology: Mol. function=structural constituent of ribosome; Cellular component=ribonucleoprotein complex; Biological process =translation
  Homolog annotation: Hit_ID=Q5WMY3; Match level="QueryCoverage=100%, HitCoverage=81%, E-value=7e-79, Identity=94%"; Hit description =Ribosomal protein L18
  Pfam annotation: Domain name=Ribosomal_L18e; Domain location=1-151; Score=324.9; E_value=1.6e-94; Accession=PF00828.11; Description =Eukaryotic ribosomal protein L18
  Subcellular localization annotation: CTP_CleavageSite=37; ConfidenceScore=5.08e-01
LVRRTKSSFNAVILKRLFMSKANRPPXSLRRLANFMKGKEEKNIAVIVGTVTDDKRIQEIPAMKVTALRFTETARARIINAGGECLTFDQLALRAPLGENTVLLRGPKNAREAVRHFGKAPGVPHSHTKPYVRSKGRKFEKARGRRNSRGFKV

SEQ ID NO: 74453 - protein, 180 aa, Setaria italica
  misc_feature (133)..(133): Xaa can be any naturally occurring amino acid
  misc_feature (166)..(166): Xaa can be any naturally occurring amino acid
  Transcript Sequence Number=SeqID_8479
  Gene Ontology: Mol. function=structural constituent of ribosome; Cellular component=ribonucleoprotein complex; Biological process =translation
  Homolog annotation: Hit_ID=Q6ZDW5; Match level="QueryCoverage=91%, HitCoverage=87%, E-value=7e-79, Identity=87%"; Hit description =Ribosomal protein L18
  Pfam annotation: Domain name=Ribosomal_L18e; Domain location=19-180; Score=341.9; E_value=1.2e-99; Accession=PF00828.11; Description =Eukaryotic ribosomal protein L18
YIAPISSQGIDLVAGGRNKKTKRTAPKSDDVYLKLLVKLYRFLVRRTKSDFNAVILKRLFMSKTNRPPLSLRRLVNFMKGKENQIAVIVGTVTDDKRVYEVPAMKVAALRFTETARARIVNAGGECLTFDQLXALRAPLGQNTVLLRGPKNAREAVKHFGPAPGVXPHSHTKPSNVLKLR

SEQ ID NO: 74454 - protein, 187 aa, Setaria italica
  Transcript Sequence Number=SeqID_8480
  Gene Ontology: Mol. function=structural constituent of ribosome; Cellular component=ribonucleoprotein complex; Biological process =translation
  Homolog annotation: Hit_ID=Q6ZDW5; Match level="QueryCoverage=100%, HitCoverage=100%, E-value=1e-94, Identity=89%"; Hit description =Ribosomal protein L18
  Pfam annotation: Domain name=Ribosomal_L18e; Domain location=12-185; Score=430.8; E_value=2.1e-126; Accession=PF00828.11; Description =Eukaryotic ribosomal protein L18
  Subcellular localization annotation: CTP_CleavageSite=69; ConfidenceScore=5.01e-01
MGIDLVAGGRNKKTKRTAPKSDDVYLKLLVKLYRFLVRRTKSPFNAVILKRLFMSKANRSPLSMRRLVKFMEGKGDQIAVIVGTVTDDKRITEVPAMKVCALRFTETARARIINAGGECLTFDQLALRAPLGQNTVILRGPKNAREAVKHFGPAPGVPHSHTKPYVRSKGRKFEKARGRRNSRGFKV

SEQ ID NO: 74455 - protein, 399 aa, Setaria italica
  Transcript Sequence Number=SeqID_8481
  Gene Ontology: Mol. function=protein binding; Cellular component =signalosome; Biological process=red or far red light signaling pathway
  Homolog annotation: Hit_ID=Q8L5U0; Match level="QueryCoverage=100%, HitCoverage=100%, E-value=0.0, Identity=82%"; Hit description=COP9 signalosome complex subunit 4
  Pfam annotation: Domain name=PCI; Domain location=265-364; Score =97.5; E_value=4.7e-26; Accession=PF01399.19; Description=PCI domain
MDSALASAAAIADQRQKIEQYRHILASVLSSSPPDISQAKRFLDHMVSDEVPLVVSRQLLQTFAQDLGKLESDALKEVAHYALTQIQPRVVSFEEQVVVIREKLAELYESEQQWSKAAQMLSGIDLDSGIRMLDDTNKLSKCVQIARLYLEDDDAVNAEAFINKASFLVTNSQQEVLNLQYKVCYARILDLKRRFLEAALRYYDISQIEQRKIGDEEIDENALEQALSAAVTCTILAGAGPQRSRVLATLYKDERCSKLKIYPILQKVYLERILRKPEIDAFAEELRPHQKALLPDKSTVLDRAMIEHNLLSASKLYTNISFDELGTLLGIDPRKAEKIASRMIYEDRMRGSIDQVEAVIHFDDDTEELQQWDQQISGLCQALNDILDNMSSKGIAIPV

SEQ ID NO: 74456 - protein, 206 aa, Setaria italica
  misc_feature (44)..(44): Xaa can be any naturally occurring amino acid
  misc_feature (176)..(176): Xaa can be any naturally occurring amino acid
  Transcript Sequence Number=SeqID_8482
  Gene Ontology: Mol. function=structural constituent of ribosome; Cellular component=ribonucleoprotein complex; Biological process =translation
  Homolog annotation: Hit_ID=Q6ZDW5; Match level="QueryCoverage=92%, HitCoverage=100%, E-value=1e-89, Identity=85%"; Hit description =Ribosomal protein L18
  Pfam annotation: Domain name=Ribosomal_L18e; Domain location=28-204; Score=405.5; E_value=9e-119; Accession=PF00828.11; Description =Eukaryotic ribosomal protein L18
  Subcellular localization annotation: CTP_CleavageSite=2; ConfidenceScore=5.09e-01
PSAAAAAGRHCSPRSAMGIDLVAGGRNKKTKRTAPKSDDVLTYXTTYVKLYRFLVRRTKSDFNAVILKRLFMSKTNRPPLSLRRLVNFMKGKENQIAVIVGTVTDDKRVYEVPAMKVAALRFTETARARIVNAGGECLTFDQLALRAPLGQNTVLLRGPKNAREAVKHFGPAPGVXPHSHTKPYVRAKGRKFEKARGRRNSRGFKV

SEQ ID NO: 74457 - protein, 189 aa, Setaria italica
  misc_feature (60)..(60): Xaa can be any naturally occurring amino acid
  Transcript Sequence Number=SeqID_8483
  Gene Ontology: Mol. function=structural constituent of ribosome; Cellular component=ribonucleoprotein complex; Biological process =translation
  Homolog annotation: Hit_ID=Q5WMY3; Match level="QueryCoverage=100%, HitCoverage=100%, E-value=3e-98, Identity=94%"; Hit description =Ribosomal protein L18
  Pfam annotation: Domain name=Ribosomal_L18e; Domain location=12-187; Score=423.1; E_value=4.6e-124; Accession=PF00828.11; Description =Eukaryotic ribosomal protein L18
  Subcellular localization annotation: CTP_CleavageSite=73; ConfidenceScore=5.02e-01
MGIDLVAGGRNKKTKRTAPKSDDVYLKLLVKLYRFLVRRTKSSFNAVILKRLFMSKANRXPPISLRRLANFMKGKEEKNIAVIVGTVTDDKRIQEIPAMKVTALRFTETARARIINAGGECLTFDQLALRAPLGENTVLLRGPKNAREAVRHFGKAPGVPHSHTKPYVRSKGRKFEKARGRRNSRGFKV

SEQ ID NO: 74458 - protein, 45 aa, Setaria italica
  Transcript Sequence Number=SeqID_8484
MATLEDLGVSAFINILSAFVFLLLFAVLRIQPINDRVYFPSSTSP

SEQ ID NO: 74459 - protein, 805 aa, Setaria italica
  misc_feature (130)..(130): Xaa can be any naturally occurring amino acid
  misc_feature (451)..(451): Xaa can be any naturally occurring amino acid
  Transcript Sequence Number=SeqID_8485
  Gene Ontology: Cellular component=plasma membrane
  Homolog annotation: Hit_ID=B9S1E8; Match level="QueryCoverage=98%, HitCoverage=97%, E-value=0.0, Identity=61%"; Hit description =Extensin-3, putative
  Pfam annotation: Domain name=DUF221; Domain location=317-640; Score =457.2; E_value=2.5e-134; Accession=PF02714.7; Description=Domain of unknown function DUF221
LQKANLLFINILSAFVFLLLFAVLRIQPINDRVYFPKLYLAHKRTHDHSSRSAVRRFVNLNICTYITFLSWVPGALRVTEPELIAHAGLDSAVYLRIYTLGLKMFLPIAALALLVLVPVNVSGGTLLNLXKEVVFSDIDKLSISNVNPGSNRFFVHLLMAYVFTFWVCFMLYKEYSNVAFMRLHFLASQKRCADQFTVIVRNIPRISSHSTSETVDEFFRRNHPDHYLGQQPVYNANRYAKLVKKRDRLQNWLDYYQLKFERHPEKRPTRRTGCLGFCGREVDQIDYYQARISELERKMASERQKVLNDPKAIMPVSFVTFDSRWGAAVCAQTQQSKNPTQWLTDWAPEPRDVYWQNLAIPFFSLSIRRFLISVAVFALVFFYMIPITFVQSLANLEGLEKVAPFLKPVIEVKVVKSFLQGFVPGLALKIFLYILPTVLLIMSKVEGYISXSSLERRTASKYYYFMLVNVFLGSIIAGTAFEQLYTFLHKPATQIPMTIGVAIPMKATFFMTYIMVDGWAGIANEILRVKPLVIYHLKNMFIVKTERDRERAMDPGSIGLGENLPTLQLYFLLGLVYAVVTPILLPFIIIFFAFAFLVYRHQIINVYNQEYESAAAFWPQVHSRIIASLLISHLTLFGLMSTKEAAFSTPLLIFLPLLTIWFHKYCKSRFEPAFRKYPLEEAMEKDNMEHASEPNLNLKSFLANAYLHPIFHLFEEAAKEEETVEVRIDKAQKQQHHHRQEEETHVRSSSQYHEESHLRSTHEMHYHHEESQYSRSTQYHEGIHVRSDMDSPSPPHFVYHYDIQP

SEQ ID NO: 74460 - protein, 104 aa, Setaria italica
  Transcript Sequence Number=SeqID_8486
  Subcellular localization annotation: CTP_CleavageSite=25; ConfidenceScore=5.31e-01
SPPPSSSLQSILHVLPCSSKRLEFRSSKRGGMGFVLVISLPFIFFSILLGFGCYFLGKHRGREEMRAGVGAQIYGTPLPPPGVVGGSSPAHEPFHMKKEGAENV

SEQ ID NO: 74461 - protein, 121 aa, Setaria italica
  Transcript Sequence Number=SeqID_8487
  Homolog annotation: Hit_ID=B9T3Y0; Match level="QueryCoverage=93%, HitCoverage=22%, E-value=2e-26, Identity=52%"; Hit description=DNA binding protein, putative
  Pfam annotation: Domain name=Remorin_C; Domain location=1-102; Score =73.0; E_value=1.1e-18; Accession=PF03763.5; Description=Remorin, C -terminal region
KRGGGDCRWEDDDRAKSCIRYQREEAKIQAWVNLESAKAEAQSRKLEVKIQKMRSSLEEKLMRRMTTVHRRAEEWRATAQAQHLQQLRRAAADNTRRLKATSHHRHLPGSDAASCGCFPCS

SEQ ID NO: 74462 - protein, 116 aa, Setaria italica
  Transcript Sequence Number=SeqID_8488
  Gene Ontology: Mol. function=aspartic-type endopeptidase activity; Biological process=proteolysis
  Homolog annotation: Hit_ID=B6UHL4; Match level="QueryCoverage=98%, HitCoverage=28%, E-value=2e-13, Identity=42%"; Hit description =Xylanase inhibitor TAXI-IV
PAVKPFQLCYNGAFPLLKRPISYDVPRIDLELAGARSNWTVFNNNDLVQVDGAMCVGILEMGPGAMPVDGELAMVIGGKTMENNLLVFDLEKGVLGFSMLLDFQLTSCYSSNLSRL

SEQ ID NO: 74463 - protein, 113 aa, Setaria italica
  misc_feature (21)..(21): Xaa can be any naturally occurring amino acid
  misc_feature (74)..(74): Xaa can be any naturally occurring amino acid
  Transcript Sequence Number=SeqID_8489
  Gene Ontology: Mol. function=aspartic-type endopeptidase activity; Biological process=proteolysis
  Homolog annotation: Hit_ID=B6UHL4; Match level="QueryCoverage=98%, HitCoverage=29%, E-value=1e-11, Identity=40%"; Hit description =Xylanase inhibitor TAXI-IV
MTDVKRVPAVKPFQLCYNGAXKRPISYDVPRIDMELAGARSNWTVFNNNYLVQVDGAMCVGILEMGPGAMPVDXGGKTIENNLLVFDLEKGVLGFSLLDFQSTSCYSSNLSRL

SEQ ID NO: 74464 - protein, 73 aa, Setaria italica
  Transcript Sequence Number=SeqID_8490
ARRSSTGISLLITAAAAVISREMPVELLRASLPHTNADQRKQLLSFAQRTVPVGTHSSHGSGSGPMTSDSVPS

SEQ ID NO: 74465 - protein, 215 aa, Setaria italica
  Transcript Sequence Number=SeqID_8491
  Homolog annotation: Hit_ID=O64542; Match level="QueryCoverage=89%, HitCoverage=23%, E-value=2e-49, Identity=48%"; Hit description =YUP8H12R.29 protein
GRKLLSRYLELVTSGSVLARIACMAVFRHLRTIFGNMPSEISAAETMTRLARAISTCVFRMELSDLSACLAAIVCSSLQPPLRPLGSPAGDWASVIIKSVLDRATVLLTDQHVASAYSVQNRALWQASFDAFFGLLTQYCMTKFDSVVHTAQLQPAAAAVISREMPVELLRASLPHTNADQRKQLLSFAQRTVPVGTHSSHGSGSGPMTSDSVPS

SEQ ID NO: 74466 - protein, 803 aa, Setaria italica
  misc_feature (663)..(663): Xaa can be any naturally occurring amino acid
  Transcript Sequence Number=SeqID_8492
  Homolog annotation: Hit_ID=O64542; Match level="QueryCoverage=60%, HitCoverage=58%, E-value=1e-112, Identity=47%"; Hit description =YUP8H12R.29 protein
  Pfam annotation: Domain name=PAT1; Domain location=8-778; Score= -316.9; E_value=0.022; Accession=PF09770.1; Description=Topoisomerase II-associated protein PA
NWNDDDGDTAFVEHGDEEYPLYGRDNILEDEGVGSFTDVDDLAGTFSKLTRIVNEPKQPGIVGHRGSVSRQSSNADWVQETGSSYWPAQPVLDTDHGLDKKNWWSQPPHSVDFMDSRLHRTSSSPHQDAQYNHAEPILGAKPSPLHRTSSYPQQDPQYNNTEPIPVPKSSFISYPPSGAASHSSPSQPHHMNMPSPPTAFQMPMSAQNDLPLPQFHHGGTPPGPPFGRELAHMGPMGVATKNVQQNHVLNSGQMHGNGARFMPGLMQHQLQRPNGLMPPQMQPPRQQHGMLPIQQSPPHFSQLHAQMLGPHHSPPQSMQMFGPQHPPSQVMGRFDGNFTMPDLSDPRARSMLQHGRLGQRYPHQGYEVNNMRMDNGWPRFRSKYMSTEEIENIARMQQAATHINDPYIDDYYHQACLAKKSAGAQLKHHFCPTLIRDPSSRARSKDEPHAYLQVDALGRLPFSSIRRPRPLLDVEQASAPSENTEKSASKPLDQEPMLAARITIEDGLCLLLDVDDIDRLLQFSQQQDGGLQLRNRRQALLEQLAESLQLVDPLAPNKNAPLSSYDDLVFLRIVTLPKGRKLLSRYLELVTSGSVLARIACMAVFRHLRTIFGNMPSEISAAETMTRLARAISTCVFRMELSDPHVLALQLLCVRTISFNVNXTSLQRLLRPLGSPAGDWASVIIKSVLDRATVLLTDQHVASAYSVQNRALWQASFDAFFGLLTQYCMTKFDSVVHTAQLQPAAAAVISREMPVELLRASLPHTNADQRKQLLSFAQRTVPVGTHSSHGSGSGPMTSDSVPS

SEQ ID NO: 74467 - protein, 72 aa, Setaria italica
  Transcript Sequence Number=SeqID_8493
  Gene Ontology: Mol. function=metal ion binding; Cellular component =mitochondrial intermembrane space protein transporter complex; Biological process=protein import into mitochondrial inner membrane
  Homolog annotation: Hit_ID=B6SQH6; Match level="QueryCoverage=100%, HitCoverage=100%, E-value=1e-32, Identity=91%"; Hit description =Mitochondrial import inner membrane translocase subunit Tim8
  Pfam annotation: Domain name=zf-Tim10_DDP; Domain location=7-72; Score=97.0; E_value=6.7e-26; Accession=PF02953.7; Description =Tim10DDP family zinc finger
MDNPEMQRFLQQEQQKAMMGEMVGKLTSVCWDKCITGTPGSKFSSGETTCLTNCAQRFLDMSVLIAKRFEMQ

SEQ ID NO: 74468 - protein, 91 aa, Setaria italica
  Transcript Sequence Number=SeqID_8494
  Gene Ontology: Mol. function=serine-type endopeptidase activity; Biological process=negative regulation of catalytic activity
  Pfam annotation: Domain name=Inhibitor_I9; Domain location=30-91; Score=4.1; E_value=0.076; Accession=PF05922.8; Description=Peptidase inhibitor I9
MELTLPLLLLFLASLSLANANANADGGNTTTYIVFMDPARMPAVHASPAHWHAAHLESLSIDPARHLLYSYSAAAHGFAAALLPDHLPLLR

SEQ ID NO: 74469 - protein, 233 aa, Setaria italica
  Transcript Sequence Number=SeqID_8495
  Gene Ontology: Mol. function=calcium-dependent phospholipid binding; Cellular component=plasma membrane; Biological process=signal transduction
  Homolog annotation: Hit_ID=B4FJC1; Match level="QueryCoverage=99%, HitCoverage=72%, E-value=1e-110, Identity=83%"; Hit description =Fiber annexin
  Pfam annotation: Domain name=Annexin; Domain location=1-64; Score =6.7; E_value=0.0037; Accession=PF00191.12; Description=Annexin
  Pfam annotation: Domain name=Annexin; Domain location=160-226; Score =13.8; E_value=0.00069; Accession=PF00191.12; Description=Annexin
  Pfam annotation: Domain name=Annexin; Domain location=82-150; Score =42.2; E_value=2e-09; Accession=PF00191.12; Description=Annexin
  Pfam module annotation: Pfam domain module=Annexin::Annexin::Annexin; Domain location=1-64::160-226::82-150
VAREAVEGGVTVAGYRALVEVFTRRKQDQLFFTKQAYLTRFRRNLDQDMVTEPSHPYQRLLVALAASRKSHHDEPSQHIAKCDARRLHDAKNGGAGSVVDEAVILEMFSKRSIPQLRLAFCSYKHIYGHDYTKALKKNGSGEFEEALRAVVKCIYSPSKYYSKLLQRSMLCAGTDKRLLTRAILGSDDVGIDEIRSAFKSCYGRNLADFIHESLPQSDYRDFLVAVARGSAAS

SEQ ID NO: 74470 - protein, 77 aa, Setaria italica
  Transcript Sequence Number=SeqID_8496
PPTVLHFVHHPRSSCRLVHLQRPAGGRRRRHDALGADLGVVVLRERREPALLVVDPGDHGGRRRDLQEHVVPGEEGP

SEQ ID NO: 74471 - protein, 57 aa, Setaria italica
  Transcript Sequence Number=SeqID_8497
WHGYNELSMFTTHFCKFYFCLIQLFGTIHLHNSQDNSYQDLTGPIDQGSIRKSIIQL

SEQ ID NO: 74472 - protein, 87 aa, Setaria italica
  misc_feature (21)..(21): Xaa can be any naturally occurring amino acid
  Transcript Sequence Number=SeqID_8498
  Gene Ontology: Mol. function=nucleotide binding; Cellular component =protein complex; Biological process=microtubule-based process
  Homolog annotation: Hit_ID=P38557; Match level="QueryCoverage=97%, HitCoverage=18%, E-value=9e-39, Identity=82%"; Hit description =Tubulin gamma-1 chain
HTSIRHLFSKCLGQYEKLRKXQAFLDNYRKFPMFADNDLSEFDESREIIESLVDEYKACESPDYIKWGMEDPGEANVAAALDSKLVV

SEQ ID NO: 74473 - protein, 469 aa, Setaria italica
  Transcript Sequence Number=SeqID_8499
  Gene Ontology: Mol. function=nucleotide binding; Cellular component =protein complex; Biological process=microtubule-based process
  Homolog annotation: Hit_ID=P38557; Match level="QueryCoverage=99%, HitCoverage=99%, E-value=0.0, Identity=91%"; Hit description=Tubulin gamma-1 chain
  Pfam annotation: Domain name=Tubulin; Domain location=4-246; Score =323.7; E_value=3.7e-94; Accession=PF00091.17; Description =TubulinFtsZ family, GTPase domain
  Pfam annotation: Domain name=Tubulin_C; Domain location=249-395; Score=208.0; E_value=2.6e-59; Accession=PF03953.9; Description =TubulinFtsZ family, C-terminal domai
  Pfam module annotation: Pfam domain module=Tubulin::Tubulin_C; Domain location=4-246::249-395
MPREIITIQVGQCGNQIGMEFWKQLCLEHGIGKDGLLEDFATQGGDRKDVFFYQADDQHFIPRSLLIDLEPRVINGIQNSEYRNLYNHENIFVAEHGGGAGNNWASGYHQGEQVVDDIMDMVDREADGSDSLEGFVLCHSIAGGTGSGMGSYLLETLNDRYSKKLVQTYSVFPNQMETSDVVVQPYNSLLTLKRLTLNADCVVVLDNTALNRIAVERLHLSNPTFAQTNSLVSTVMSASTTTLRYPGYMNNDLVGLLASLIPTPRCHFLMTGYTPLTVERQVNMIRKTTVLDVMRRLLQTKNIMVSSYARTKEASQAKYISILNIIQGEVDPTQVHESLQRIRERKLVNFIDWAPASIQVALSRKSPYVQTTHRVSGLMLANHTSIRHLFSKCLGQYEKLRKKQAFLDNYRKFPMFADNDLSEFDESREIIESLVDEYKACESPDYIKWGMEDPGEANVAAALDSKLVV

SEQ ID NO: 74474 - protein, 202 aa, Setaria italica
  Transcript Sequence Number=SeqID_8500
YYVPTDERASLEDSHFYLEQFLSNSSSEQFAWTYFFLDVPQGSAGALIHVQLKSDKELNYELYSKYGGLPSNDTWDYYASRTSSSNGSLFFSLQNSTSSDMDLSIFYAKEGTWCFGVKYPSGRANSQTYMSVSLQGCHRNCNQKGVCHSSVDESGLTFYSFCTCDRDHGGFDCSDELVSPNGHIWQSVFLIASNAAAIFTLS

SEQ ID NO: 74475 - protein, 442 aa, Setaria italica
  Transcript Sequence Number=SeqID_8501
  Gene Ontology: Mol. function=nucleotide binding; Cellular component =cytoplasm; Biological process=response to stress
  Homolog annotation: Hit_ID=B9SAC7; Match level="QueryCoverage=92%, HitCoverage=57%, E-value=1e-127, Identity=52%"; Hit description=Heat- shock protein 105 kDa, putative
  Pfam annotation: Domain name=HSP70; Domain location=2-336; Score= -316.1; E_value=0.0017; Accession=PF00012.12; Description=Hsp70 protein
LDWLERIVEPCKRAVAVSGIGLERLHSVELVGSGSRVPSIAKVLAGFFRRETSRTLNASECVARGCALQCAMLSPTFRVREYEVQDAIPASIGCCTSEGPISTLSSNALFRRGLPFPSVKTITLQKNSSFNLDAYYVDENELPPGTPTRIGSFQIGPFQADTEASKVKVKIRLNLHGLISVESAALIDDYERNATSADHMEVDSSGDDTGHKSRNERSIQRQDLPIAEYIYGAMSKQELLEAQEQEQQLAYQDKLMERTKDRKNALESYVYDTRNKLSERYRSFATDSEREEISVNLQQTEEWLYEEGDDETEAVYCSKLEELKKLVDPIENRCKDDEVRAEAMRELLKCIVDHRTAAKSLSTLERDAVDNECNKAEQWLREGLQLQETLPKNVDPVLWSYQIKRKEEELDMFCQNISRHKASPARTDGSRGSDHMATPDRD

SEQ ID NO: 74476 - protein, 137 aa, Setaria italica
  Transcript Sequence Number=SeqID_8502
  Gene Ontology: Mol. function=enzyme inhibitor activity
  Homolog annotation: Hit_ID=B6UDU5; Match level="QueryCoverage=84%, HitCoverage=56%, E-value=6e-20, Identity=50%"; Hit description =Ripening-related protein-like
  Pfam annotation: Domain name=PMEI; Domain location=4-128; Score=26.3; E_value=0.00011; Accession=PF04043.7; Description=Plant invertasepectin methylesterase inhibitor
GGARAATAAMKAMAGAGHLAPLGAEAARDCVSMLGDAEDLLEQAVDAMARLWKGRSGQQAGTGSTGSSSRDVRFQLDSVQTWASAALTNDDMCVEGFKAEAAGGGGVREAVRGHLVGVSHLTANALGIVNAMVKQIP

SEQ ID NO: 74477 - protein, 142 aa, Setaria italica
  misc_feature (10)..(10): Xaa can be any naturally occurring amino acid
  Transcript Sequence Number=SeqID_8503
VLRDSRRHAXCSENMPQTNKEAHKRSRSERSRGSSPNSEPSSHSHHDNVKGSHSNRTSSDSRSRSPRSQSRFRAHSPSYSAHSSSKSTQHEGSRSNINHPVPFSVSASPQHKSSPDVENKNLEGLMNSRLEDNLEFRTRSKV

SEQ ID NO: 74478 - protein, 54 aa, Setaria italica
  Transcript Sequence Number=SeqID_8504
CSYASARRRSCMHAKIVAAYMEVLCTCYVYVGMCACMNCVCVSSQSTTTISFLT

SEQ ID NO: 74479 - protein, 93 aa, Setaria italica
  Transcript Sequence Number=SeqID_8505
MEKCRSVPHDHSSAYYGCGGGYDYEDVGGGGGAGQGKSYSFNGPSAREDPEAKRRRRVAAYNVFATQGRIKTTVRSSVKWLKSKFSDIRYGGL

SEQ ID NO: 74480 - protein, 65 aa, Setaria italica
  Transcript Sequence Number=SeqID_8506
  Gene Ontology: Mol. function=aspartic-type endopeptidase activity; Cellular component=membrane; Biological process=RNA-dependent DNA replication
  Homolog annotation: Hit_ID=A3KDM4; Match level="QueryCoverage=98%, HitCoverage=13%, E-value=3e-21, Identity=76%"; Hit description=Multi antimicrobial extrusion family protein
VGIPLGCLLGFYFDLGAAGIWCGMIGGTLMQTLILVWVTFRTNWNKEVEEALKRLNKWEDKSPIL

SEQ ID NO: 74481 - protein, 56 aa, Setaria italica
  misc_feature (13)..(13): Xaa can be any naturally occurring amino acid
  misc_feature (19)..(19): Xaa can be any naturally occurring amino acid
  Transcript Sequence Number=SeqID_8507
  Gene Ontology: Mol. function=pyridoxal phosphate binding; Cellular component=mitochondrion; Biological process=cysteine biosynthetic process from serine
  Homolog annotation: Hit_ID=A3AQX8; Match level="QueryCoverage=100%, HitCoverage=14%, E-value=2e-20, Identity=89%"; Hit description =Cysteine synthase
SSGANTVAAIELXKKPENXGKLIVTVLPSLGERYLSSALFDELRKEAEAMEPVPVD

SEQ ID NO: 74482 - protein, 376 aa, Setaria italica
  Transcript Sequence Number=SeqID_8508
  Gene Ontology: Mol. function=pyridoxal phosphate binding; Cellular component=mitochondrion; Biological process=cysteine biosynthetic process from serine
  Homolog annotation: Hit_ID=Q7XS58; Match level="QueryCoverage=100%, HitCoverage=100%, E-value=1e-178, Identity=83%"; Hit description =Cysteine synthase
  Pfam annotation: Domain name=PALP; Domain location=61-349; Score =450.1; E_value=3.4e-132; Accession=PF00291.17; Description=Pyridoxal- phosphate dependent enzyme
MERMLARLVRRRSLLHQGAAAASMELASAGGSPSLFSTQQQQAAAADPGVLPAGLNIRDSASQLIGRTPMVYLNKVTEGCGARIAAKLEFLQPSFSVKDRPAISMLEDAEKKGLITPGKTTLIEPTSGNMGIGLAFMAALKGYELVLTMPSYTSLERRVTMRAFGANLVLTDPTKGMGGTVRKATELYEKHPSAYMLQQFQNPANVKIHYETTGPEIWEDTLGQVDIFVMGIGSGGTVTGVGKYLKEKNPNAKIYGVEPAEANVLNGGKPGPHLITGNGVGFKPDILDMDVMEKVLEVKSEDAVKMARELAVKEGLLVGISSGANTVAAIELAKKPENKGKLIVTVLPSLGERYLSSALFDELRKEAEAMEPVPVD

SEQ ID NO: 74483 - protein, 126 aa, Setaria italica
  misc_feature (115)..(115): Xaa can be any naturally occurring amino acid
  misc_feature (122)..(122): Xaa can be any naturally occurring amino acid
  Transcript Sequence Number=SeqID_8509
  Gene Ontology: Mol. function=nucleotide binding; Biological process =defense response
  Homolog annotation: Hit_ID=Q9SWT8; Match level="QueryCoverage=99%, HitCoverage=14%, E-value=6e-20, Identity=44%"; Hit description =HV1LRR1
  Pfam annotation: Domain name=LRR_1; Domain location=52-74; Score=7.9; E_value=9.5; Accession=PF00560.25; Description=Leucine Rich Repeat
  Pfam annotation: Domain name=LRR_1; Domain location=6-28; Score=0.3; E_value=2.7e+02; Accession=PF00560.25; Description=Leucine Rich Repeat
  Pfam annotation: Domain name=LRR_1; Domain location=75-96; Score =10.1; E_value=3.5; Accession=PF00560.25; Description=Leucine Rich Repeat
  Pfam annotation: Domain name=LRR_1; Domain location=98-119; Score =5.7; E_value=25; Accession=PF00560.25; Description=Leucine Rich Repeat
  Pfam module annotation: Pfam domain module=LRR_1::LRR_1::LRR_1::LRR _1; Domain location=52-74::6-28::75-96::98-119
TFSAEGTRCLSIQSANIEPLHRSVVANLRGLYVFERNINIDLLKTVLTTSNLLSSLDLQDARIKSLPNEVFGLFNLRFLGLRNTGIEYLPEAIGRLQNLIVLDCFNAKLSTLPRXIAKLKRXRYLY

SEQ ID NO: 74484 - protein, 286 aa, Setaria italica
  Transcript Sequence Number=SeqID_8510
GAHRKKAIKRRARSGIERRKRSSATHLPSQLTLQARTSSQIPICPQRARGPGEEEEESSDGDVRRGRCLAALLLPALLLSAASAADSTNNPADQLVSLVNSNRTASKASSLSDNQGLGCIALQYIKAYQGQCSDVRDKKPPESSFAEKFAPDCGVQVATLSKITGRLVACQSKYPSPPEALDILVNDAKDLQVLHSKNHTEIGVAVSGTDGGGPYFWCVLFSGGKPATSFKVDGEVPKTAMHPGCFSGNNDDCAGPSPTNGAVPTIAGASRLVAALLFVMACALAL

SEQ ID NO: 74485 - protein, 89 aa, Setaria italica
  Transcript Sequence Number=SeqID_8511
  Subcellular localization annotation: CTP_CleavageSite=35; ConfidenceScore=5.18e-01
PPARPGRWPLRRCPRSRSTTWCPGPPSTAWRVLHEAAAVAKETTSTRWRSSSSSSGRCGSIVQHELSIIYARLETRSCIHAVAHMEYVN

SEQ ID NO: 74486 - protein, 113 aa, Setaria italica
  Transcript Sequence Number=SeqID_8512
CIRHPYKFVHLADRMAILILFVDTRQHCSNYSGTTNTSCLHLQKQEIRLLSVLVEQPSIFRFPSPCISKSLRIHTLKSYRCLQFPFKKTNHCSMFGLNKGKKTTDNTKLHPAI

SEQ ID NO: 74487 - protein, 118 aa, Setaria italica
  Transcript Sequence Number=SeqID_8513
  Pfam annotation: Domain name=DnaJ_CXXCXGXG; Domain location=55-118; Score=-35.6; E_value=0.037; Accession=PF00684.11; Description=DnaJ central domain (4 repeats)
  Subcellular localization annotation: CTP_CleavageSite=48; ConfidenceScore=5.09e-01
MELGGGGRRGAGDRVRRQLQSVGRFAAYLGGSFLLLSAASSVAVRSLRAVSEANQRKFAMPCGACEGKGTYACRLCRGSATIEWSPMHDPVFVNPCLCPTCDGTKVQRCLNCLGKGYA

SEQ ID NO: 74488 - protein, 219 aa, Setaria italica
  Transcript Sequence Number=SeqID_8514
  Subcellular localization annotation: CTP_CleavageSite=60; ConfidenceScore=5.62e-01
ADVLSSASPRPASASPRPHAGPTSAPGPPSSSSLQPPPESGSGSEQEWPGSDNPSNRKTKIAEVQEQVNAADVLTSASSLPSACPTPALGEEDEDPFGSCLLGEETPPPSTDTYEAKEKNKKQRQNRKRKKEHQQKHVAEPMDPESPPEVELPQQWHRPLLNPSDELYRFFEKVMQEMPHADEKLRIDFPDFVYENAELACTICNAKEKDEVEWVKSLV

SEQ ID NO: 74489 - protein, 421 aa, Setaria italica
  Transcript Sequence Number=SeqID_8515
MDPESPPEVELPQQWHRPLLNPSDELYRFFEKVMQEMPHADEKLRIDFPDFVYENAELACTICNAKEKDEVEWVKSLVASTLKDLYEKNGLPTPDFKFLRKPDCCFPLKQILDSHHRLFKTIRLFKGADRITVKVATSRGKKIFRAVLIAILQVLRDGYTWDGKLCLDDIYWTEVRGFVQVMILRRPTKKNGKDEQLASDMKSIWNNLMGPYFDVGDGILPTYFSRLKTDLTKGVNSFVHLYWFFDYLIYHPAFASSSARRNLILELHLVSKSFRVKNNSFLKNLFTEVSEQPWREDARPYPILKRILNYRKNIQKNQTEYKNVHEVRIATKVGNEIKWESYSNPHKVIVHHVAVQVDQLKAAVGDEEAVGVRDELATGDDEVSVGEKDSQENDDDDKMGVGEKGIQENDDAGAADDAADA

SEQ ID NO: 74490 - protein, 63 aa, Setaria italica
  Transcript Sequence Number=SeqID_8516
  Gene Ontology: Mol. function=protein serine/threonine phosphatase activity; Cellular component=protein serine/threonine phosphatase complex; Biological process=protein amino acid dephosphorylation
  Homolog annotation: Hit_ID=Q5Z6F5; Match level="QueryCoverage=100%, HitCoverage=19%, E-value=3e-17, Identity=71%"; Hit description =Probable protein phosphatase 2C 59
MFCLLCLQEAVAMVKPILDSEQAAKRLLAEASQRGSADNITCVVVRFLEQNNGMGRVTNNQAS

SEQ ID NO: 74491 - protein, 641 aa, Setaria italica
  Transcript Sequence Number=SeqID_8517
  Gene Ontology: Mol. function=protein transporter activity; Cellular component=clathrin adaptor complex; Biological process=intracellular protein transport
  Homolog annotation: Hit_ID=Q10SS6; Match level="QueryCoverage=99%, HitCoverage=62%, E-value=0.0, Identity=92%"; Hit description=Adaptin N terminal region family protein, expressed
  Pfam annotation: Domain name=Adaptin_N; Domain location=25-584; Score= 426.5; E_value=4.1e-125; Accession=PF01602.12; Description=Adaptin N terminal region
  Pfam annotation: Domain name=HEAT; Domain location=137-175; Score =8.3; E_value=4.7; Accession=PF02985.14; Description=HEAT repeat
  Pfam annotation: Domain name=HEAT; Domain location=316-352; Score =0.2; E_value=47; Accession=PF02985.14; Description=HEAT repeat
  Pfam annotation: Domain name=HEAT; Domain location=355-391; Score =12.6; E_value=1.4; Accession=PF02985.14; Description=HEAT repeat
  Pfam module annotation: Pfam domain module=Adaptin_N::HEAT::HEAT::HEAT ; Domain location=25-584::137-175::316-352::355-391
MALSGMRGLSVFISDIRNCHNKEQERLRVDKELGNIRTRFKNEKGLSPYEKKKYVWKMLYIYMLGYDVDFGHMETVSLISAPKYPEKQVGYIVTSCLLNENNDFLRMVINTVRNDIIGRNETFQCLALTMVGNIGGKEFSESLAPDVQKLLISSSCRPVVRKKAALCLLRLYRKNPDVVNIDGWADRMAQLLDERDLGVLTSVMSLFVSLVSNNAEAYWNCLPKCVRILERLARNQDIPQEYTYYGIPSPWLQVKTMRALQYFPTIEDPNARRALFEVLQRILMGTDVVKNVNKNNASHAVLFEALALVMHLDAEKEMMSQCVALLGKFIAVREPNIRYLGLENMTRMLLVTDVQDIIKRHQAQIITSLKDPDISIRRRALDLLYGMCDVTNAKEIVEELLQYLNTAEFAMREELSLKAAILAEKFAPDLSWYVDVILQLIDKAGDFVSDDIWYRVVQFVTNNEDLQPYAAAKAREYLDKPAMHETMVKVSAYLLGEYGHLLARRPGCSPKELFAIINDKLPTVSTSTVAILLSTYAKILMHTQPPDVGLQQQILTIFKKYESYIDVEIQQRAVEYFELSRKGSALADVLAEMPKFPERESALLKKAEDAEVDTAEQSAIKLRSQQQTSSALVVVDPFAEG

SEQ ID NO: 74492 - protein, 503 aa, Setaria italica
  Transcript Sequence Number=SeqID_8518
  Gene Ontology: Mol. function=protein transporter activity; Cellular component=clathrin adaptor complex; Biological process=intracellular protein transport
  Homolog annotation: Hit_ID=Q10SS6; Match level="QueryCoverage=86%, HitCoverage=45%, E-value=0.0, Identity=84%"; Hit description=Adaptin N terminal region family protein, expressed
  Pfam annotation: Domain name=Alpha_adaptinC2; Domain location=235 -344; Score=76.7; E_value=8.2e-20; Accession=PF02883.12; Description =Adaptin C-terminal domain
  Pfam annotation: Domain name=Alpha_adaptin_C; Domain location=350 -460; Score=20.3; E_value=2.3e-09; Accession=PF02296.8; Description =Alpha adaptin AP2, C-terminal domain
  Pfam module annotation: Pfam domain module=Alpha_adaptinC2::Alpha _adaptin_C; Domain location=235-344::350-460
MHTQPPDVGLQQQILTIFKKYESYIDVEIQQRAVEYFELSRKGSALADVLAEMPKFPERESALLKKAEDAEVDTAEQSAIKLRSQQQTSSALVVADQPSANGSTPAANHLTLVKMPSQTVTDSQESSATYEEAPNPPVEAPKENGPVEVSEATNITETNHETKVEPPSTSRSTSPADLLADLLGPLAIEGPPAVEQYPAQGLDANQSPVGDLALATLEDQSNSVQPIVNVEEKFHILCTKDSGVLYEDPHIQIGLKAEWRAHHGRLVLFLGNKNTSPLMSVRALILPPSHLKMELSSVPDTIPPRAQVQVPLEVANLRASRDVAVLDFSYTFGTALVDAKLRLPVVLNKFLQPITLSPEEFFPQWKALTVHLLKVQEVVKGVKPLPLPEIANLFMSLHLAVAPGLDNNLNNLVACTTFFSEATRAMLCLIRVETDPQDRTQLRLTVASGDQYLTFELKEFIKEHLIDIPRTQAAPPPAPVQPQLPAAAPATYNDPGAMLAGLL

SEQ ID NO: 74493 - protein, 128 aa, Setaria italica
  Transcript Sequence Number=SeqID_8519
  Gene Ontology: Cellular component=integral to membrane
  Homolog annotation: Hit_ID=B9RBW3; Match level="QueryCoverage=99%, HitCoverage=22%, E-value=2e-38, Identity=55%"; Hit description =Tellurite resistance protein tehA, putative
PKDEVWPFLLRFPIGCFGVCLGLGSQTILWGALAASPAMRFLHVSPMINVALWLLAVAVLVATSVTYALKCIFYFEAIRREYFHPVRVNFFFAPWIAAMFVTLGLPRAYAPERPHPGVWCAFVLPLFA

SEQ ID NO: 74494 - protein, 91 aa, Setaria italica
  Transcript Sequence Number=SeqID_8520
  Gene Ontology: Mol. function=3-oxoacyl-[acyl-carrier-protein] reductase activity; Cellular component=chloroplast; Biological process=fatty acid biosynthetic process
  Homolog annotation: Hit_ID=B6T8T5; Match level="QueryCoverage=100%, HitCoverage=29%, E-value=2e-45, Identity=98%"; Hit description=3 -oxoacyl-reductase
AKAGVIGFTKTVAREYASRNINANVIAPGFIASDMTAELGEELEKKILSNIPLGRYGRPEDVAGLVEFLALSPAASYITGQVLTIDGGMVM

SEQ ID NO: 74495 - protein, 93 aa, Setaria italica
  misc_feature (68)..(68): Xaa can be any naturally occurring amino acid
  Transcript Sequence Number=SeqID_8521
  Homolog annotation: Hit_ID=Q65XS5; Match level="QueryCoverage=70%, HitCoverage=16%, E-value=8e-12, Identity=43%"; Hit description=BC10 protein
  Pfam annotation: Domain name=DUF266; Domain location=2-91; Score= -191.8; E_value=0.033; Accession=PF03267.6; Description=Arabidopsis protein of unknown function, DUF266
GFLFISFLSQTLCLRLTFQKGAVLQEHDCIPDEHYVQTLFSIKGLEDELERRTLTYTSWNQSSNPKDXMTWHPMKFEYDTSSPEHISAIKVSS

SEQ ID NO: 74496 - protein, 58 aa, Setaria italica
  Transcript Sequence Number=SeqID_8522
LLICGCFMRSIFWSSFPQTGILYVVYTSRTIFIQQLQECHLISVCFVSTMILVPFPYG

SEQ ID NO: 74497 - protein, 308 aa, Setaria italica
  misc_feature (201)..(201): Xaa can be any naturally occurring amino acid
  Transcript Sequence Number=SeqID_8523
  Homolog annotation: Hit_ID=O65385; Match level="QueryCoverage=96%, HitCoverage=72%, E-value=1e-79, Identity=48%"; Hit description =F12F1.19 protein
  Pfam annotation: Domain name=DUF266; Domain location=1-291; Score =431.3; E_value=1.5e-126; Accession=PF03267.6; Description =Arabidopsis protein of unknown function, DUF266
FFRNGEEGRFSVYVHSAPGFHLDRTTTGSPYFYGRQLARSVKVVWGEDTMVVAEKMLFAAALQDPANQRFVLLSDSCVPLYNFSYIYTYLMASPKSFVDSFVDKTEKRYNQNMSPAIPKDKWRKGSQWVVLTRKHVEVVVRDKNVLQVFRRHCKMVVTKRLLGRRPNARRLGFNLRRNQKGAVLQEHDCIPDEHYVQTLFXIKGLEDELERRTLTYTSWNQSSNPKDKMTWHPMKFEYDTSSPEHISAIKSINHVNYEMEHRTEWCQCNGTSVPCFLFARKFSYSAAMHLLEQGTIGPPKSAQLLVNF

SEQ ID NO: 74498 - protein, 58 aa, Setaria italica
  Transcript Sequence Number=SeqID_8524
GRMQVKCFAEIRKLISFNNFYCYFFWKSSICCCRGNLSRFMLTSKEKYHVVSFGKHEL

SEQ ID NO: 74499 - protein, 101 aa, Setaria italica
  Transcript Sequence Number=SeqID_8525
  Gene Ontology: Cellular component=plasma membrane
  Homolog annotation: Hit_ID=Q9S835; Match level="QueryCoverage=51%, HitCoverage=11%, E-value=2e-13, Identity=59%"; Hit description =T12J13.16 protein
TCNFEWVRHLEDGSVNFIEGARQPSYVVTADDVDTLLAIEVQPLDDRKRKVLFCHVVVFLFREYAGEVHIFVLGRGKQSFTTRVLLRSCRPLAAVTYMLRC

SEQ ID NO: 74500 - protein, 206 aa, Setaria italica
  misc_feature (175)..(175): Xaa can be any naturally occurring amino acid
  Transcript Sequence Number=SeqID_8526
  Gene Ontology: Cellular component=plasma membrane
  Homolog annotation: Hit_ID=Q9S835; Match level="QueryCoverage=59%, HitCoverage=27%, E-value=2e-13, Identity=34%"; Hit description =T12J13.16 protein
RLKKHLADYSVKEAQILSEKYTLEKRIAYMRMAFDQQQQDLVDAASKALLYRQDIIEENIRLTYALQAAQQERSTFISSLLPLLSEYDNLQPSVLDAQSIVGNLKVLFRHMQEQLIVIEETLRESRYQITPWHTELSNNTSHPVPTDPPAGKVLVTTSKSSFDIVPQTPYPHVQXSPMSSPVQVLVSCIWGCLFRLTKNHHVTPSE

SEQ ID NO: 74501 - protein, 578 aa, Setaria italica
  misc_feature (105)..(105): Xaa can be any naturally occurring amino acid
  misc_feature (189)..(189): Xaa can be any naturally occurring amino acid
  Transcript Sequence Number=SeqID_8527
  Gene Ontology: Cellular component=plasma membrane
  Homolog annotation: Hit_ID=B9S9G0; Match level="QueryCoverage=44%, HitCoverage=15%, E-value=3e-42, Identity=37%"; Hit description =Disease resistance protein RPS5, putative
STPSSRSLSPNRHRKDGDYDSRLLPVSDMNSNISWKQDLTVKVKEGEEEIARLKKHLADYSVKEAQILSEKYTLEKRIAYMRMAFDQQQQDLVDAASKALLYRQXQQERSTFISSLLPLLSEYDNLQPSVLDAQSIVGNLKVLFRHMQEQLIVIEEKLRESRYQITPWHTELSNNTSHPVPTDPPAGKXLVTTSKSSFDIVPQTPYPHVQSPMSSPVQARSDWGAFGNKNHHVTPSEVPTRNAEQDDMGGNSLSSRSQFRTDVSAQVSQGDSHAVRFHETPSQNPPFKGLSRNDVLDGSESAESQNTQEPSTRWGPGDSPNLASGLEDANPSYPYLPTVLEEPGSSFSEAADDDPLPGIEGLRITGEPFPGRELLASGYPINGTTTCNFEWVRHLEDGSVNFIEGARQPSYVVTADDVDTLLAIEVQPLDDRKRKGEFIKVYANEQGKISCDPETKELIKKTLEIGHVTYEVQVQQPQVRFLDMWEPAVLAIKREGYSIKCIGQRGVVITEKFQQATAIQIPHGRQTEFLIISADGVDYNLKPAENTLLRDTIVLVLRLFKNMAVERRRGRKKGLFFK

SEQ ID NO: 74502 - protein, 47 aa, Setaria italica
  Transcript Sequence Number=SeqID_8528
VHPSASSMKVDNMDLFDGVQHNSSDLARIKLYSSLLLDIISVGCYKK

SEQ ID NO: 74503 - protein, 121 aa, Setaria italica
  Transcript Sequence Number=SeqID_8529
  Homolog annotation: Hit_ID=B6SZV9; Match level="QueryCoverage=57%, HitCoverage=25%, E-value=2e-12, Identity=62%"; Hit description=PRLI -interacting factor A
LVSPCPVTPAVLPTPVLSPAREVLVEMAKEAWGVDGYGSMKGLIRLRADAGGAAGEEDSGSGESDVEEHVEVERRLDHDLSRFEMVQLPAPAGLDCEDDDEDEEAHAARLEEENLTLRERL

SEQ ID NO: 74504 - protein, 215 aa, Setaria italica
  misc_feature (121)..(121): Xaa can be any naturally occurring amino acid
  Transcript Sequence Number=SeqID_8530
LFSGRANGGYASRMKKLSEHHHQQQQQPQVSRGQGVRIDLASSQPFVMPFGTIGPPGSAPTGLDFSALAQNHAVFQSHQEAARHSYPQLNFAAAQSVQATQNKPQHQITGEPKSVAGDSSXHTDRWRTSRSSKVNSVFPTKYPGDSQQHSLSFTRTESKSYVPAFLSGSTNENSSRTLSLIGAESPNTFGMWSKSTSSSTAASAPAAASSTISQQ

SEQ ID NO: 74505 - protein, 1391 aa, Setaria italica
  misc_feature (774)..(774): Xaa can be any naturally occurring amino acid
  Transcript Sequence Number=SeqID_8531
  Homolog annotation: Hit_ID=B9RSQ0; Match level="QueryCoverage=51%, HitCoverage=43%, E-value=1e-39, Identity=32%"; Hit description=ATP binding protein, putative
  Subcellular localization annotation: CTP_CleavageSite=38; ConfidenceScore=5.06e-01
MQRKGGGSNPKSPIVAKAVDEMIGVPVPRKARSASTKRSSHEWPVPGGGTSGGNVGAGDASQIQRPSSRPISPASASTTAPARKKLKPLGGERGSAGSGPAPKQRPSPSPAPSTTPPQPLPPKISKSPSFIQEEIEVAEVLFGLTRQFTCPPKQESNHKLEPRDAPEAKSGNSSPAPSSSGVRPSDSASLSTIAPKRKRPRLVKYDEDSRPASPAKPELAEPSSRSEAPPASRSEGKTSTSAAAESGISAAAPAAAQLETSREPEKMEDRGRSRDPELRPSESDRRDHRSESRTEPPAAPSCKQDGEATPVGSEARNGEATATTKIELASDGARQEKFCIDLMAPPPGKLSPDRDGSSDPDADKKGLDSEMDMLGRGKYEKKDGERTRRGLDIDLEDQKVQRIPADEFAPKKLTLQLDLEKPSLDEKSPSERRQPQPPQSQQQKPSKSEVKHEKSAMPAVTPPMPIPVGGWLGSFPPFGYLGPVPGLSAAGLHPMDVKPGSSSGLQHAALLPPPTRSKRCATHCYIAQFIQHQQRVAKMNSFWPPAAAAAAAAAANRSGPFFGPRPFNMGVVPPTDAASLLVNPMQGNYPVRAHTPMQEAKAPSMATSPFQGNLSKDKALGNAAGAESSQRKQPPAHETQQSTPMPNMLQGPAFIFPFNQQHAAAVAAANAANRAGDGKSSGASNAMPPSASAHASAANPGAAAMNLSFANLQPDAQFLAILQNGAYPFQVAAHAGGPPSYRGMAPPGPAVPFFNGHVYSSHMMHPSQQQGAQXQSHQKTPMPSLSGSSQKHQPQQSQGLLGYAPNANAAAAASNSQNYSGSNQRPVLLSGLTHRQEGDKTGQDGPSSDDKSHPQKGGYEHNFAVPVHLPNFALMPAAQTAGSQSEKKLSEHHHQQQQQPQVSRGQGVRIDLASSQPFVMPFGTIGPPGSAPTGLDFSALAQNHAVFQSHQEAARHSYPQLNFAAAQSVQATQNKPQHQITGEPKSVAGDSSSTPTAGDSERKKSASTKYPGDSQQHSLSFTRTESKSYVPAFLSGSTNENSSRTLSLIGAESPNTFGMGSKSTSSSTAASAPAAASSTISQQQQQQHQQHQHFLQMHQKHQQMIQQQHHLNRPRSAAPSTPNNAGGYPDRLNMASFQNMMYPASATQGGVQSPQLKASSGRGTPSSAATTPPAAPPSNLIVMKNSGLHQQQAKVHMQALSTPGHQSQSSLSMSSSKMGPSLTNLSTGGGDLSRSSNAPVASGSPSRSNSVSKSTGGSPPATGSAKGVQQPVQLPSPQQSATNPASTSSSKSTPANHFSMAMPSILGQQPNVSPGSNAGRQAAVTHAPLIIETAAVPTRPFLHIQCVCATSTRSCWPCCPRPLPEAPRRQGAAAGAPSTECHARSLLLAIT

SEQ ID NO: 74506 - protein, 64 aa, Setaria italica
  Transcript Sequence Number=SeqID_8532
  Subcellular localization annotation: CTP_CleavageSite=58; ConfidenceScore=5.50e-01
MQAGLQQGHSRLAAAASCAHVLSRIGFRFPCCVSLFRMPASECMRVSMSLVCALLSIRAYIAVP

SEQ ID NO: 74507 - protein, 119 aa, Setaria italica
  Transcript Sequence Number=SeqID_8533
  Gene Ontology: Mol. function=nucleotidyltransferase activity
  Homolog annotation: Hit_ID=Q10Q39; Match level="QueryCoverage=100%, HitCoverage=9%, E-value=2e-63, Identity=92%"; Hit description =Nucleotidyltransferase domain containing protein, expressed
IQAEVKIIKCLVENIAVDISFNQVGGLCTLCFLEEVDNLISRNHLFKRSIILIKAWCYYESRILGAHHGLISTYALETLVLYIFHIFNNSFTGPLEVMYRFLEFFSNFDWEKFCLSLWG

SEQ ID NO: 74508 - protein, 165 aa, Setaria italica
  misc_feature (12)..(12): Xaa can be any naturally occurring amino acid
  Transcript Sequence Number=SeqID_8534
  Gene Ontology: Mol. function=nucleotidyltransferase activity
  Homolog annotation: Hit_ID=Q10Q39; Match level="QueryCoverage=98%, HitCoverage=12%, E-value=1e-44, Identity=59%"; Hit description =Nucleotidyltransferase domain containing protein, expressed
NPSAPHAQHQKXYAAQGNAMVSEQLERNNLAGLMQGERDKRVPNGLFINDRNGQNRSRFARTRSSPELTDSSVEGFRGRRTNVVGMEKSLRVDYSSRRNILVPEVSSNHSTKSSQDESMSSLNSSSHPSAKAVSDSNSVSSSYREDNGCVMNEELPSVSQSSDMH

SEQ ID NO: 74509 - protein, 63 aa, Setaria italica
  Transcript Sequence Number=SeqID_8535
LLLLAADGLNRLNSCRTWSRVSEQNIAISGLQCQNQVTMPSFNYPIKSAHSSTFISCAGFLNS

SEQ ID NO: 74510 - protein, 171 aa, Setaria italica
  Transcript Sequence Number=SeqID_8536
  Gene Ontology: Mol. function=nucleotidyltransferase activity
  Homolog annotation: Hit_ID=Q10Q39; Match level="QueryCoverage=67%, HitCoverage=8%, E-value=4e-36, Identity=64%"; Hit description =Nucleotidyltransferase domain containing protein, expressed
MLMIGSISLRRFKYMDWMTTTVLVMFSEKFDLYKNNKNTSPVELIFFIFCINNNLGRSVSKGNFFRIRSAFAYGAKRLGKLLECPKEDLITELNQFFTNTWMRHGSGSRPDVPTPSLVDVQPQKVVPSVVSNSHRSVTALRKKVENPKLLANQDNLRVNQDNSTEVGHSYS

SEQ ID NO: 74511 - protein, 200 aa, Setaria italica
  Transcript Sequence Number=SeqID_8537
  Gene Ontology: Mol. function=nucleotidyltransferase activity
  Homolog annotation: Hit_ID=Q10Q39; Match level="QueryCoverage=100%, HitCoverage=15%, E-value=4e-51, Identity=60%"; Hit description =Nucleotidyltransferase domain containing protein, expressed
  Subcellular localization annotation: CTP_CleavageSite=37; ConfidenceScore=5.06e-01
KALDASSWNEVTVNTTRSSRDKWGKRPAFAAPGTTTRSKTGWQMGNANDHLLTEVDDGPRNGTVVPIINEASERVAGSDSISTQSRTSVPNDFDSSQIGMPNPVFAPFLIGSPQQRQVDNSGLTFVPTGPPVPFVVLPFVPGNSDGSGPQFERSEGIDQLPANIAGQNFSLLNDVHQPDCGATSTASINTMTEPSEEHKP

SEQ ID NO: 74512 - protein, 105 aa, Setaria italica
  Transcript Sequence Number=SeqID_8538
  Gene Ontology: Mol. function=nucleotidyltransferase activity
  Homolog annotation: Hit_ID=Q10Q39; Match level="QueryCoverage=58%, HitCoverage=4%, E-value=7e-13, Identity=62%"; Hit description =Nucleotidyltransferase domain containing protein, expressed
YWGFYYYLLILTSLSNGAGALSGPPGPPFFMMYSYEPGANHGPSTSEPIEFGSLGPLPAENGDDIPRSTRQVMPNGFYGAKGRGPYRGGSSHSSPDQPSSPQPRR

SEQ ID NO: 74513 - protein, 734 aa, Setaria italica
  Transcript Sequence Number=SeqID_8539
  Gene Ontology: Mol. function=nucleotidyltransferase activity
  Homolog annotation: Hit_ID=Q10Q39; Match level="QueryCoverage=97%, HitCoverage=68%, E-value=1e-150, Identity=64%"; Hit description =Nucleotidyltransferase domain containing protein, expressed
NSVYTIRLSLYYLSLYYILIKAWCFYESRILGAHHGLISTYALETLVLYIFHIFNNSFTGPLEVMYRFLEFFSNFDWEKFCLSLRGPVPISSLPDMTAEPPLMDSGELLLDKSFLDNCSTAYGVVPRTQENQGRPFVSKHFNVIDPLRANNNLGRSVSKGNFFRIRSAFAYGAKRLGKLLECPKEDLITELNQFFTNTWIRHGSGNRPDVQPLKVVPSVASNSDSNHNTKSSQDESVSSLSSSSHPSAKAVSDSNSVSSSYREDNGCVMNEELPSVSESSDMRHDEQVLANLMDSVKLHGSNGQIQLPMQLPSHLSVAHSPLLAPIAFSQKHLAGVQPPNLVGAPWLPNMQFLHGLVTPTAQYIHNPNLAPSVEDGSENEKPITSDANHDTDKTWHQYGIGYSRQFDPEVRDPRIYDIDGKERPSFPNGVHGAPLERQMEFTLENNGADDETYTSMFQNQTSRERNVDYSKRSGFVNIPSSQGSSSRGKALDASSWNEVTVNTTRSSRDKWGKGPGFAAPATSTHSKTGGQMGNANDHLPTEVDDGPRNGTLVPIINETSEIVAGSDSFSTQTRTSAPFLFGSPHQRQADNSGLTFVPTGTPVPFAVLPFIPGNSNGSGPQFEKSDGIDQLSAKIAGQNFCLLSDVHQPDSGATSTASISTMTEPSGEHKPDILKGDLVNHWHNLQYARLCQNARSLGPVLYPFPVPPMYLQGHAPWDGPGGPVAPNVNWTQMI

SEQ ID NO: 74514 - protein, 346 aa, Setaria italica
  Transcript Sequence Number=SeqID_8540
  Gene Ontology: Mol. function=nucleotidyltransferase activity
  Homolog annotation: Hit_ID=Q10Q39; Match level="QueryCoverage=92%, HitCoverage=23%, E-value=1e-108, Identity=63%"; Hit description =Nucleotidyltransferase domain containing protein, expressed
FRRQREVSSQPDSGATSTASISTMTEPSGEHKPDILKGDLVNHRHNLQYARLCQNARSMGPVLYPFPVPPMYLQGHAPWDGPGGPVAPNVNWTQMIGPGQRVFPVMPLQPAAERGTGVFQHYGEDAPRYRGGTGTYLPNPKVPFRDRHSNSRNYRGGYNGDRSDYSDKEGSWINSTQRNPNRSYGRSQSERSGMRSDRQANDESQSDRQRRTYRNDSYRHEASSQYLVQGQSFGSASSMRKPGNIAHGVYTPQSTASNGAGALSGPPGPPFFMMYSYEPGANHGPSTSEPIEFGSLGPLPAENGDDIPRSTRQVMPNGFYGQRRGPYRGGSSHSSPDQPSSPQPRR

SEQ ID NO: 74515 - protein, 675 aa, Setaria italica
  Transcript Sequence Number=SeqID_8541
  Gene Ontology: Mol. function=catalytic activity; Biological process =polysaccharide catabolic process
  Homolog annotation: Hit_ID=C1F598; Match level="QueryCoverage=73%, HitCoverage=72%, E-value=1e-93, Identity=41%"; Hit description=Tat pathway signal sequence domain protein
  Pfam annotation: Domain name=DUF1680; Domain location=2-515; Score =639.4; E_value=3.6e-189; Accession=PF07944.4; Description=Putative glycosyl hydrolase of unknown f
AYGRAQRTNLEYLLLLDADRLVWSFRAQAGLPAPGEPYGGWEGPDVELRGHFVGHYLSAAAKMWASTHNATLAGRMSAVVDALHECQRAAGTGYLSAFPAEFFDRFEAIQPVWAPYYTIHKIMQGLLDQHAVAGNGKALGMVVAMADYFAGRVGSVIRSYSIERHWASLNEETGGMNDVLYQLYSITNDQRHLVLAHLFDKPCFLGLLAVQADSLSDFHANTHIPVVVGGQMRYEVTGDPLYKEIATFFMDTVNSSHAYATGGTSVSEFWSDPKRLAGALTTETEESCTTYNMLKVSRHLFRWTKEIAYADYYERALINGVLSIQRGRDPGVMIYMLPQGPGRSKARSYHGWGTQFNSFWCCYGTGIESFSKLGDSIYFEEKGERPALYIIQFIPSTFNWRTAGLTVTQKLEPLSSSDQYLQVSLSISAKTNGQFATLNVRMPSWTSLNGAKATLNDKVLELASPGTFLTISKEWNSGDHLSLQLPIHLRTEAIKDDRQEYASIQAVLFGPFLLAGLTTGDWDAKTGGATAAPSDWITPVPPESDSQLVTLVQESGGKAFVLSAVNGSLKMQERPKDSGGTDAAVHATFRLIPQGSGTSAATNSTATAMLEPFDMPGMVVTDKLTVSADKSSGALLDVVPGLDGSPGSVSLELGARPGCFLVGGGEKVQVGCGGT

SEQ ID NO: 74516 - protein, 292 aa, Setaria italica
  Transcript Sequence Number=SeqID_8542
  Gene Ontology: Mol. function=helicase activity
  Homolog annotation: Hit_ID=Q7X8U1; Match level="QueryCoverage=46%, HitCoverage=7%, E-value=2e-37, Identity=52%"; Hit description =OSJNBa0018J19.1 protein
  Subcellular localization annotation: CTP_CleavageSite=52; ConfidenceScore=5.42e-01
MEQSPGVITPQLVPANHTIHSKLVTPGIRNSRLNRRNQMFEATIGRNTKRPACEKFNYTSQPTQTSCVMDNGGTQTNARDSHPFTASNVFAAENTRPAPNDSTTGIQTQPSVVDEPYSVPPHGGQAETHASMEEDDCDENIIFEDDEEEDEGYLFGGQEPDDWEANEDVDLETANEDPNEPDVPDPYDAVYANVPNVTHMLKPEDNCEHCNAEKFESEPPGFCCHSGKIHLSTHETPPGLMRLWSSSDADARHFRANIRYFNGHFSFTSMYCKLDRVTTDIRNYGIYTFRRN

SEQ ID NO: 74517 - protein, 136 aa, Setaria italica
  Transcript Sequence Number=SeqID_8543
SKRDYRKRAKEQQANNLHPDSIAMPSPHFTPELVFPLPDKSPSRISDELEIPLVNGRPVYIQSAMEQSPGVITPQLVPANHTIHSKLVTPGIRNSRLNRRNQMFEATIGRNTKRPACEKFNYTSQPTQTSCVNRNK

SEQ ID NO: 74518 - protein, 161 aa, Setaria italica
  misc_feature (86)..(86): Xaa can be any naturally occurring amino acid
  misc_feature (113)..(113): Xaa can be any naturally occurring amino acid
  Transcript Sequence Number=SeqID_8544
  Gene Ontology: Cellular component=mitochondrion
  Homolog annotation: Hit_ID=B6TJS3; Match level="QueryCoverage=95%, HitCoverage=59%, E-value=2e-78, Identity=94%"; Hit description =Protein COQ10 A
  Pfam annotation: Domain name=Polyketide_cyc; Domain location=9-139; Score=79.7; E_value=1.1e-20; Accession=PF03364.12; Description =Streptomyces cyclasedehydrase
KVYEERRVMGYSPEQMFAVVAAVDLYEDFVPWCQRSRIIRRNDDGSFDAELEIGFKFLVESYVSHVEMEKPKFIKTTASESGLFDXHLINVWEFKPGPVPGTCDLYFLVDFKXFQSPLYRQVASMFFKEVVSRLVGSFSDRCFRIYGPPVPVLVKISLLGK

SEQ ID NO: 74519 - protein, 198 aa, Setaria italica
  Transcript Sequence Number=SeqID_8545
  Gene Ontology: Mol. function=ligase activity; Cellular component =nucleolus; Biological process=regulation of transcription
  Homolog annotation: Hit_ID=B9RVL0; Match level="QueryCoverage=98%, HitCoverage=53%, E-value=4e-72, Identity=49%"; Hit description =Pentatricopeptide repeat-containing protein, putative
  Pfam annotation: Domain name=PPR; Domain location=128-162; Score =36.6; E_value=9.7e-08; Accession=PF01535.12; Description=PPR repeat
  Pfam annotation: Domain name=PPR; Domain location=163-197; Score =16.6; E_value=0.098; Accession=PF01535.12; Description=PPR repeat
  Pfam annotation: Domain name=PPR; Domain location=22-56; Score=32.4; E_value=1.9e-06; Accession=PF01535.12; Description=PPR repeat
  Pfam annotation: Domain name=PPR; Domain location=58-92; Score=29.9; E_value=1e-05; Accession=PF01535.12; Description=PPR repeat
  Pfam annotation: Domain name=PPR; Domain location=93-127; Score=34.1; E_value=5.7e-07; Accession=PF01535.12; Description=PPR repeat
  Pfam module annotation: Pfam domain module=PPR::PPR::PPR::PPR::PPR; Domain location=128-162::163-197::22-56::58-92::93-127
FFDLIPAVLDEMSYLGLECNSVIHNAIINGYGKAGMLEEMESALSKMLECGNNVPDIYTMNSIIWAYGNYGRTDEMEKWYSEFELMGVEPDTKTFNIMIKSYGKAGMYDKMMSIFKYMKKRFFSLTAVTFNIVIECFGRAGNIEKMEYYFRLMKIQGVKPSPITYCSLVNGYSKGGLLDKIPGIIRQTENTDVVLDTP

SEQ ID NO: 74520 - protein, 115 aa, Setaria italica
  Transcript Sequence Number=SeqID_8546
  Gene Ontology: Mol. function=structural constituent of ribosome; Cellular component=intracellular; Biological process=translation
  Homolog annotation: Hit_ID=B6SHT7; Match level="QueryCoverage=100%, HitCoverage=68%, E-value=4e-35, Identity=73%"; Hit description=50S ribosomal protein L12-2
  Pfam annotation: Domain name=Ribosomal_L12; Domain location=48-115; Score=69.1; E_value=1.7e-17; Accession=PF00542.11; Description =Ribosomal protein L7L12 C-terminal domain
DALRGRLGVDELPPLAILTGGAVPLAGGAAGPGAAGEEAKAKEEKMAFDVKLEGFDAAAKLKIIKELRAFTNLGLKEAKELVEKAPAVLKAGVPKEEAESIAEKMRAVGAKIVLE

SEQ ID NO: 74521 - protein, 215 aa, Setaria italica
  Transcript Sequence Number=SeqID_8547
  Gene Ontology: Mol. function=calcium ion binding; Cellular component =oxygen evolving complex; Biological process=photosynthesis
  Homolog annotation: Hit_ID=B9SJK7; Match level="QueryCoverage=89%, HitCoverage=71%, E-value=6e-92, Identity=86%"; Hit description =Thylakoid lumenal 29.8 kDa protein, chloroplast, putative
  Pfam annotation: Domain name=PsbP; Domain location=7-215; Score= -26.7; E_value=0.0011; Accession=PF01789.8; Description=PsbP
MGRRRSLISAAAAACGASVLGFAGHGLAATQGLLAGRIPGLSEPDENGWRTYRRPDDKSGGHGVGWSPIIPYSFKVPEGWDEVPVSIADLGGTEIDLRFANPKEGRLFVVVAPVRRFADDLDDATIEKIGNPDKVISAFGPEVIGENVEGKVLSSATAEHSGRTYYQFELEPPHVFITATAAGNRLYLFSVTANGLQWKRHYKDLKQIAESFRVV

SEQ ID NO: 74522 - protein, 149 aa, Setaria italica
  Transcript Sequence Number=SeqID_8548
QAKKLVVASKHPNDEHIMLEQQVKDLKGNISLLKDMMTKAKQETLKGIEENTKLKDEIRDQKKMIDELSKQNESTQESLAQKYAEVNHLKEEAAQKCAEVNRLKEEAEGLKKDKEELQSRVSRANELLQLMTSALCQGKGADNRQLPDF

SEQ ID NO: 74523 - protein, 41 aa, Setaria italica
  Transcript Sequence Number=SeqID_8549
  Homolog annotation: Hit_ID=B6U900; Match level="QueryCoverage=100%, HitCoverage=10%, E-value=1e-09, Identity=82%"; Hit description =Glutathione transferase
TPAGIQPLRPASCDGESLLRPHGREALPSAAGTPLEAAAVS

SEQ ID NO: 74524 - protein, 57 aa, Setaria italica
  Transcript Sequence Number=SeqID_8550
YHYRHEIGCLTFILVHLECCIKSPRSLPPFVPISDGCNLFYFALQLADVMDYSLLVG

SEQ ID NO: 74525 - protein, 141 aa, Setaria italica
  misc_feature (133)..(133): Xaa can be any naturally occurring amino acid
  Transcript Sequence Number=SeqID_8551
  Gene Ontology: Mol. function=beta-amylase activity; Biological process=polysaccharide catabolic process
  Homolog annotation: Hit_ID=B9S1Q4; Match level="QueryCoverage=70%, HitCoverage=14%, E-value=3e-14, Identity=43%"; Hit description=Beta -amylase, putative
LLVETPAFISTLNSYAIGTPLDSQASALQTDDSLSPSSLDSVVAERSIKTENYGNSSSANSLNCMDNDQLLRSSAVLAGDYTKTPYIPVYASLPMGIINNHCQLVDPEGVRAELRHLKSLNVDGVVVDCWWGXVEAWIPRK

SEQ ID NO: 74526 - protein, 161 aa, Setaria italica
  Transcript Sequence Number=SeqID_8552
  Gene Ontology: Mol. function=protein serine/threonine kinase activity; Biological process=protein amino acid phosphorylation
  Homolog annotation: Hit_ID=B6TXW5; Match level="QueryCoverage=100%, HitCoverage=42%, E-value=1e-82, Identity=90%"; Hit description =Serine/threonine-protein kinase receptor
  Pfam annotation: Domain name=Pkinase_Tyr; Domain location=45-161; Score=-116.9; E_value=5.9e-06; Accession=PF07714.9; Description =Protein tyrosine kinase
MGCFSVFRRKKNSRSQIVQHDQDIPITGNVKIYSSKELRKATRNFCPGNKLGQGSFGRVYLGKLNNGEKVAIKVLSSESRQGTKEFLNELSVISNITHHNLVKLHGCCFDGGQKMLVYNYVENNSLAQTLFGKSRSGIILDWRTRMKICIGVADGLTYLHE

SEQ ID NO: 74527 - protein, 44 aa, Setaria italica
  Transcript Sequence Number=SeqID_8553
YLPQKKSVRAAAEEFLAKAAQEFIGNSDSRVKGPVRLVPDEDED

SEQ ID NO: 74528 - protein, 205 aa, Setaria italica
  Transcript Sequence Number=SeqID_8554
  Pfam annotation: Domain name=Sas10_Utp3; Domain location=19-100; Score=45.7; E_value=1.9e-10; Accession=PF04000.7; Description =Sas10Utp3 family
MAATSADAASAVPPSAISAAEDTLAAAESVGDHLSQLLAAAAADPDAVAELPPLLRARAFLAVAQAATSLFAVRLRCSGIDPDEHPIRKEFERLSLWQEKLNRFEDWDKAPLRPTTTLNTQAAARFIGHSLSHLTSDQKRSMQAISRGERRGWSGQKRKSEYLPQKKSVRAAAEEFLAKAAQEFIGNSDSRVKGPVRLVPDEDED

SEQ ID NO: 74529 - protein, 77 aa, Setaria italica
  Transcript Sequence Number=SeqID_8555
RPVGRYNFSCHQVYNHSFSINWIGPCIRIVVLWIKIFFNAIENAQVEIESIRACFVGVVYAVVQMCVRIHCCMTKVS

SEQ ID NO: 74530 - protein, 44 aa, Setaria italica
  misc_feature (17)..(17): Xaa can be any naturally occurring amino acid
  Transcript Sequence Number=SeqID_8556
NRCMGAACYRDTFLLWXATCALGTALCMVLYARSRGSAGRRLPR

SEQ ID NO: 74531 - protein, 80 aa, Setaria italica
  misc_feature (26)..(26): Xaa can be any naturally occurring amino acid
  Transcript Sequence Number=SeqID_8557
  Pfam annotation: Domain name=DUF581; Domain location=1-43; Score =21.8; E_value=4.8e-05; Accession=PF04570.6; Description=Protein of unknown function (DUF581)
LKCCFCCHKNLDATMDVFVYKGEQAXCSAECRCQHIAKEERREIEMLIRKRRDAFHRRHAAAAPKLQGANRLMRLQTAAR

SEQ ID NO: 74532 - protein, 56 aa, Setaria italica
  Transcript Sequence Number=SeqID_8558
EGKNKTRLTGCKVVNVLQSRKPINNQALFLCPGIMVSAVISSNVMRCLCWVWISCD

SEQ ID NO: 74533 - protein, 68 aa, Setaria italica
  Transcript Sequence Number=SeqID_8559
FNRAFLHLHSTPREHHAYRQQLSKYNQNLKLSHFLVNPKFTLDGMVASTKEAKIWNQTSMCFANCNVV

SEQ ID NO: 74534 - protein, 289 aa, Setaria italica
  misc_feature (26)..(26): Xaa can be any naturally occurring amino acid
  Transcript Sequence Number=SeqID_8560
  Gene Ontology: Mol. function=peptidase activity; Cellular component =plasma membrane
  Homolog annotation: Hit_ID=B9R9P0; Match level="QueryCoverage=100%, HitCoverage=98%, E-value=1e-127, Identity=74%"; Hit description =Protein PPLZ12, putative
  Pfam annotation: Domain name=Band_7; Domain location=10-185; Score =164.2; E_value=3.8e-46; Accession=PF01145.17; Description=SPFH domain  Band 7 family
MVSTFFVFCGCVDQASVAVVEKWGRXFVRLAEPGLHFFNPFAGECVAGSLTTRVQSLDVRVETKTKDNVFVQLICTIQYRVVKENADDAFYELQNPQQQIQAYVFDVVRAIVPRMNLDDLFEQKNDVAKAVLEELEKVMADYGYSIEHILMVDIIPDAAVRKAMNDINAAQRLQLASVYKGEAEKILLVKKAEAEAEAKYLSGVGIAKQRQAITDGLRENILNFSHSVSGTSAKEVMDLIMVTQYFDTIKELGDGSKNTTVFIPHGPGHVKDISEQIRDGMMQASSSNV

SEQ ID NO: 74535 - protein, 294 aa, Setaria italica
  misc_feature (156)..(156): Xaa can be any naturally occurring amino acid
  Transcript Sequence Number=SeqID_8561
  Homolog annotation: Hit_ID=B6U4F6; Match level="QueryCoverage=98%, HitCoverage=40%, E-value=1e-110, Identity=72%"; Hit description =Mitotic checkpoint protein
  Pfam annotation: Domain name=Pox_A_type_inc; Domain location=175-197; Score=2.6; E_value=39; Accession=PF04508.4; Description=Viral A-type inclusion protein repeat
  Pfam annotation: Domain name=Pox_A_type_inc; Domain location=239-261; Score=8.5; E_value=5.4; Accession=PF04508.4; Description=Viral A-type inclusion protein repeat
  Pfam annotation: Domain name=Pox_A_type_inc; Domain location=88-110; Score=8.4; E_value=5.5; Accession=PF04508.4; Description=Viral A -type inclusion protein repeat
  Pfam module annotation: Pfam domain module=Pox_A_type_inc::Pox_A_type_ inc::Pox_A_type_inc; Domain location=175-197::239-261::88-110
MILRTPPQRKRRADTDNDADLVVVKSGGGASAAGRSPVSDRRMVLYDRPTALVPAGAPGEQFDDMVCTYHCRQMVKSEFVVALDTAEKQVQEYQTKIDALEEQLSKSEDERMQFLDKLNYVEQELAATKGRESALQERLLKELSGYQERYHDQVKXNELEVQLNKEIDSRISAESSASSAKESIKDLEGNLQRLLESSEREKKTLKKELSYMKEDLTLSASRLNVELEKTRLKAENYESEAELLNEQLVDLKKQLEECLRERNEMELKLLNSSALPGQHAPTDDQKLIKSFARR

SEQ ID NO: 74536 - protein, 84 aa, Setaria italica
  Transcript Sequence Number=SeqID_8562
  Homolog annotation: Hit_ID=Q5ZA32; Match level="QueryCoverage=80%, HitCoverage=5%, E-value=9e-27, Identity=80%"; Hit description=WD-40 repeat protein-like
LLLCGYFLSYTVATLFQVDLQALCGAVPIPLNQGVLLALFQQLACDIANDTSRKLQWMTNVAVAIQPTDPIIAMHVRPIFDQVY

SEQ ID NO: 74537 - protein, 507 aa, Setaria italica
  Transcript Sequence Number=SeqID_8563
  Gene Ontology: Mol. function=protein binding; Cellular component =cytoplasm; Biological process=biological_process
  Homolog annotation: Hit_ID=Q5ZA32; Match level="QueryCoverage=99%, HitCoverage=37%, E-value=0.0, Identity=76%"; Hit description=WD-40 repeat protein-like
QSSGAEDEDAVKRATGASDGTGTDGPCTSRDLPLTSAAKEGKVMHPQPQVAGQLSPSATTFNSTDSSHEPRSNENPPIDSSLQAAAIQGTLQQLIATYGNLQKQLSSIVSAPIAKEGKRIEASLSRNMEKSIKANIDAMWARFQEENVRHEKYERERMQQMATLIATSVNKDIPVMLEKSLKKEISSLGPAVARTTAPIIEKSLSSAVSDSLQKVLGDKVANQLDKSISTKLEASVARQIQTQFQTSTKQILQDAFRSSFETSVIPAFEQSCKTIFEQVDGSFQKGMSEHGAAIQQQVLTAHTPLAQTLKEAITSASSMNQGLNSELLDGQRKLLSLFASGSPTSQKTGALQPSNGPVANLPEVDAPLDPMKELGRLIAERKIDEAFTMALQRSDVSIVSWLCSQVDLQALCGAVPIPLNQGVLLALFQQLACDIANDTSRKLQWMTNVAVAIQPTDPIIAMHVRPIFDQVYGVLAHQRSLPTTNASDATNIRLIMHVITSVLISHK

SEQ ID NO: 74538 - protein, 603 aa, Setaria italica
  misc_feature (239)..(239): Xaa can be any naturally occurring amino acid
  Transcript Sequence Number=SeqID_8564
  Homolog annotation: Hit_ID=Q5ZA32; Match level="QueryCoverage=100%, HitCoverage=49%, E-value=0.0, Identity=65%"; Hit description=WD-40 repeat protein-like
  Pfam annotation: Domain name=WD40; Domain location=100-139; Score =36.4; E_value=1.1e-07; Accession=PF00400.24; Description=WD domain, G-beta repeat
AEDVHRLASASVDGRVYVWKIDEGPDEENKSQITGKIEIAIQIVGDAETYHPRICWHSHKQEILYVAIGNCILRIDTTKVGRGRDFHTEEPLRCPLDKLIDGVNIVGKHGGDITDLSISQWMTTRLASASKDGTVKVWDDRRVAPLSVLKPHDGQAVYSVSFLTAPERPNHINLVTAGPLNREVKIWASTNEDGWLSPSDPETWKCTQTLELVSSLENRSEEAFFNQVAVLPQASLILXLANAKKNAIYAVHLEYGQDPASTRLDYIADFTVAMPILSLTGTHENQPDGEQVVQVYCVQTMAIQQYGLELSLCLPPPADNIGSGRDPAISHLNERLPEMAALDSTATTPVDSSTAVSTKPSSDSQGTAPKSKMNQAGSPVVLSRDPSGSDRDVDQSSFGRKDSIGKEEPRGGHSDGGLTSAETVASGSSQNVEAEAKHVDERKSNQTVGFEAGKENQILPEKKGRPIKPSEQTVDTLSERTIVTAKYSVEDSQPMADRSVPTLLKQSSGAEDEDAVKRATGASDGTGTDGPCTSRDLPLTSAAKEGKVMHPQPQVAGQLSPSATTFNSTDSSHEPRSNENPPIDSSLQAAAIQGTLQQLIATY

SEQ ID NO: 74539 - protein, 106 aa, Setaria italica
  Transcript Sequence Number=SeqID_8565
  Gene Ontology: Mol. function=oxidoreductase activity; Biological process=oxidation reduction
  Homolog annotation: Hit_ID=Q2QUJ9; Match level="QueryCoverage=68%, HitCoverage=19%, E-value=2e-24, Identity=75%"; Hit description =Oxidoreductase, short chain dehydrogenase/reductase family protein, expressed
AAQLVFRRETGRAPGALRGLIGSFSTESNSQRLAGKVAIITGAASGIGKATATEFIRNGAKVILTDIQDDAGRAVAAGLGPDASYARCDVTNEAQIAAAVDLAVAR

SEQ ID NO: 74540 - protein, 337 aa, Setaria italica
  Transcript Sequence Number=SeqID_8566
  Gene Ontology: Mol. function=metal ion binding; Cellular component =cytoplasm; Biological process=ubiquitin-dependent protein catabolic process
  Homolog annotation: Hit_ID=Q84JU6; Match level="QueryCoverage=87%, HitCoverage=31%, E-value=3e-73, Identity=46%"; Hit description=E3 ubiquitin-protein ligase HOS1
KEYVNCPHGASDMVIAKQAILLYYLFDRHWTRPDSEWRYLVDDFAATFGITNRTLLECLVFCLLDDYSSEALEEACSLLPKISSKEAHPKIAQVLLERQRPDMALVVLKCTGRDNFSVTESIEKDGISSLSEAVTAVRVRIEHGHLTEAFVYHRSYCSRVKEQRAADMTHAGDALRSSWIYHVEGMMTEFCNICIERNLVDKMIDLPWDSEEEKHLHKSLFDYAHEMPTEPCGSLLVVYYLRRYRYLEAYEVDRSLQRFEQKKLESTTEEIASKIRKIAQWRENLVAKCLDMLPEVQRENMKAINSGEQSQFPRTAQRSSPVSQVVKSPSPAIELSS

SEQ ID NO: 74541 - protein, 118 aa, Setaria italica
  misc_feature (43)..(43): Xaa can be any naturally occurring amino acid
  Transcript Sequence Number=SeqID_8567
  Gene Ontology: Mol. function=nucleic acid binding; Cellular component= chromatin remodeling complex; Biological process=ATP-dependent chromatin remodeling
  Homolog annotation: Hit_ID=Q7G8Y3; Match level="QueryCoverage=67%, HitCoverage=7%, E-value=1e-23, Identity=66%"; Hit description =Probable chromatin-remodeling complex ATPase chain
VNLCFILCVVWHCTTLLHYAVVLQLSLLILVLNIRKFMQQANXKKDTIDGEDEDQLEPLTAEEQEEKEQLLEEGFASWTRRDFNTFIRACEKYGRNDIKSIASEMEGKTEEEVQRLLS

SEQ ID NO: 74542 - protein, 54 aa, Setaria italica
  Transcript Sequence Number=SeqID_8568
VVTLAQKVNHFKTTVILYIMYMLLGHLMAAWVSTQQSAHDVEYYCRSKGEPLQN

SEQ ID NO: 74543 - protein, 38 aa, Setaria italica
  Transcript Sequence Number=SeqID_8569
  Gene Ontology: Mol. function=nucleic acid binding; Cellular component= chromatin remodeling complex; Biological process=ATP-dependent chromatin remodeling
  Homolog annotation: Hit_ID=Q7G8Y3; Match level="QueryCoverage=100%, HitCoverage=3%, E-value=3e-12, Identity=94%"; Hit description =Probable chromatin-remodeling complex ATPase chain
KRAALRNSEGETTPSNSFKRRRQSLMDDYVGSGRRKRG

SEQ ID NO: 74544 - protein, 678 aa, Setaria italica
  Transcript Sequence Number=SeqID_8570
  Gene Ontology: Mol. function=nucleic acid binding; Cellular component= chromatin remodeling complex; Biological process=ATP-dependent chromatin remodeling
  Homolog annotation: Hit_ID=Q7G8Y3; Match level="QueryCoverage=91%, HitCoverage=56%, E-value=0.0, Identity=91%"; Hit description =Probable chromatin-remodeling complex ATPase chain
  Pfam annotation: Domain name=Helicase_C; Domain location=527-606; Score=101.8; E_value=2.4e-27; Accession=PF00271.23; Description =Helicase conserved C-terminal domain
  Pfam annotation: Domain name=ResIII; Domain location=188-352; Score= -2.4; E_value=8.6e-05; Accession=PF04851.7; Description=Type III restriction enzyme, res subunit
  Pfam annotation: Domain name=SNF2_N; Domain location=194-472; Score =479.3; E_value=5.4e-141; Accession=PF00176.15; Description=SNF2 family N-terminal domain
  Pfam module annotation: Pfam domain module=Helicase_C::ResIII::SNF2 _N; Domain location=527-606::188-352::194-472
MPRRAAGDVEEEEAEGEVQQQEEEEVDEEEIEAVTTGGGAEEEEDAGADAPAEGDDESQSTEDDEAVAGDDTDETDAVVGKREKARLKELQKRKKEKIQEILDTQNAAIDADMNNKGKGRLKYLLQQTEIFAHFAKGSQSKEKKPRGRGRHASKMTEEEEDEEYLKEEEDALAGAGGTRLLSQPSCIKGKMRDYQLAGLNWLIRLYENGINGILADEMGLGKTLQTISLLGYLHEFRGITGPHMVVAPKSTLGNWMKEIQRFCPVLRAVKFLGNPEERNHIRDNLLQPGKFDVCVTSFEMAIKEKTSLKRFSWRYIIIDEAHRIKNENSLLSKTMRIYNTNYRLLITGTPLQNNLHELWALLNFLLPEIFSSAETFDEWFQISGENDQQEVVQQLHKVLRPFLLRRLKSDVEKGLPPKKETILKVGMSQMQKQYYRALLQKDLEVINAGGERKRLLNIAMQLRKCCNHPYLFQGAEPGPPYTTGEHLIENAGKMVLLDKLLPKLKERDSRVLIFSQMTRLLDILEDYLMYRGYQYCRIDGNTGGEDRDASIEAFNKPGSEKFVFLLSTRAGGLGINLATADVVVLYDSDWNPQADLQAQDRAHRIGQKKEVQVFRFCTEYTIEEKVIERAYKKLALDALVIQQGRLAEQKTVNKDDLLQMVRFGAEMVFSSKDSTITD

SEQ ID NO: 74545 - protein, 496 aa, Setaria italica
  Transcript Sequence Number=SeqID_8571
  Gene Ontology: Mol. function=nucleic acid binding; Cellular component= chromatin remodeling complex; Biological process=ATP-dependent chromatin remodeling
  Homolog annotation: Hit_ID=Q7G8Y3; Match level="QueryCoverage=99%, HitCoverage=44%, E-value=0.0, Identity=93%"; Hit description =Probable chromatin-remodeling complex ATPase chain
  Pfam annotation: Domain name=HAND; Domain location=181-267; Score =32.1; E_value=3.3e-09; Accession=PF09110.3; Description=HAND
  Pfam annotation: Domain name=Myb_DNA-binding; Domain location=268 -314; Score=21.3; E_value=0.0041; Accession=PF00249.23; Description =Myb-like DNA-binding domain
  Pfam annotation: Domain name=SLIDE; Domain location=323-436; Score =244.0; E_value=3.8e-70; Accession=PF09111.2; Description=SLIDE
  Pfam module annotation: Pfam domain module=HAND::Myb_DNA -binding::SLIDE; Domain location=181-267::268-314::323-436
CEFQSLSYTDVVVLYDSDWNPQADLQAQDRAHRIGQKKEVQVFRFCTEYTIEEKVIERAYKKLALDALVIQQGRLAEQKTVNKDDLLQMVRFGAEMVFSSKDSTITDEDIDRIIAKGEETTAELDAKMKKFTEDAIKFKMDDNAELYDFDDEKDENKVDFKKLVSDNWIEPPRRERKRNYSESEYFKQALRQGAPAKPREPRIPRMPHLHDFQFFNNQRLNELYEKEVRYLMQANQKKDTIDGEDEDQLEPLTAEEQEEKEQLLEEGFASWTRRDFNTFIRACEKYGRNDIKSIASEMEGKTEEEVQRYAKVFKERYKELSDYDRIIKNIERGEARISRKDEIMRAIGKKLDRYKNPWLELKIQYGQNKGKFYNEECDRFMLCMVHKLGYGNWDELKAAFRMSPLFRFDWFVKSRTTQELARRCDTLIRLVEKENQEYDEQERQARKEKRLAKNMTPTKRAALRNSEGETTPSNSFKRRRQSLMDDYVGSGRRKRG

SEQ ID NO: 74546 - protein, 176 aa, Setaria italica
  Transcript Sequence Number=SeqID_8572
  Gene Ontology: Mol. function=nucleotide binding; Cellular component =nucleus; Biological process=regulation of transcription
  Homolog annotation: Hit_ID=Q2R8L1; Match level="QueryCoverage=99%, HitCoverage=13%, E-value=3e-54, Identity=61%"; Hit description=NB -ARC domain containing protein, expressed
QWAAEGFITTTKGNEGVAENYFNELVKRGMIQPEKINYNNEVLSCTVHHVVLDLITYKSREENFITAVDYSRTNAMFLMKARRLSLHYSCAQYATEPEGIRVSQVRSLAFFGLPRCMPSVIEFKLLRVLILEFWGNKDDCTSINLSRIRGLCLLRYLKISSQIYVELPSEIQGFKV

SEQ ID NO: 74547 - protein, 248 aa, Setaria italica
  Transcript Sequence Number=SeqID_8573
  Gene Ontology: Mol. function=catalytic activity; Cellular component =plasma membrane; Biological process=metabolic process
  Homolog annotation: Hit_ID=B6T3S1; Match level="QueryCoverage=98%, HitCoverage=97%, E-value=1e-122, Identity=86%"; Hit description =Catalytic/ hydrolase
  Pfam annotation: Domain name=Hydrolase; Domain location=17-206; Score= 122.4; E_value=1.5e-33; Accession=PF00702.18; Description=haloacid dehalogenase-like hydrolase
MADGNPTLGSLATTVPVQAVLFDIDGTLCDSDPLHHVAFQELLLEIGYNNGVPIDDEFFIKNIAGRSDVEAAQNLFPDWDLEKGLKFLEDKEAKYRSLAKERLEPVKGLGKVVQWVKDHGYKRAAVTNAPRINAELMISLLGLSDFFQAVIVGDECEQPKPAPYPYLKAIKELQVSAEHTFIFEDSPSGIRAGVAAGMPVVAVATRNPEKSLLEAGASLLIKDYEDPKLWAALEEIDREEAKLKKAGA

SEQ ID NO: 74548 - protein, 279 aa, Setaria italica
  Transcript Sequence Number=SeqID_8574
  Gene Ontology: Mol. function=nucleic acid binding; Cellular component= intracellular; Biological process=regulation of transcription, DNA -dependent
  Homolog annotation: Hit_ID=B9RAP0; Match level="QueryCoverage=65%, HitCoverage=10%, E-value=9e-66, Identity=63%"; Hit description =Nucleic acid binding protein, putative
  Pfam annotation: Domain name=JmjC; Domain location=1-88; Score=73.3; E_value=9e-19; Accession=PF02373.14; Description=JmjC domain
TWYGVPRDAMLAFEDAVRVHGYADDLNAIMAFQTLNEKTTVLSPEVLLSAGVPCCRLVQNPGEFIITFPGAYHSGFSHGFNCGEATNIATPRWLQVAKEAAIRRASTNCGPLVSHYQLLYELALSLRPRELKDSHGVPRSSRLRDKKKNEGEIMIKETFVGSVIENNNFLSILLDKSSCVIIPEIKFPLPSFPTSMAPEVTVKQGLIAGTCSISQKKAEDMLAYGNAIDEIKGFEKMSESQSSSATTSSACNGRKLYETKFGMVNSSALLLNSEIQSWS

SEQ ID NO: 74549 - protein, 89 aa, Setaria italica
  misc_feature (84)..(84): Xaa can be any naturally occurring amino acid
  Transcript Sequence Number=SeqID_8575
TLCDYDSYCGPYGLCTRSGSCICPVGFDPPYTQEWNIAGCSRKEPLNCEKSIVARPEVTFYPIHGIHRYPQHAFMLNVSDMSEXESSCL

SEQ ID NO: 74550 - protein, 169 aa, Setaria italica
  Transcript Sequence Number=SeqID_8576
  Homolog annotation: Hit_ID=Q9LDG2; Match level="QueryCoverage=92%, HitCoverage=36%, E-value=2e-24, Identity=37%"; Hit description =F28L1.1 protein
  Pfam annotation: Domain name=DUF231; Domain location=8-159; Score =205.7; E_value=1.2e-58; Accession=PF03005.7; Description=Arabidopsis proteins of unknown function
FTNYKGNWWTASKLFDMGCYFEAGGVLKLGTSINAAFKMALETWASWVKERVDLRRTRVFFRTYEPSHWSGLNQKVCEVTEQPTTEAKGNDRREFGDILADVVANTSVPVTVLNVTLMGAFRSDAHIGLWSHPNTILDCSHWCLPGVPDAWNELVFSHLLTNGWRGLVS

SEQ ID NO: 74551 - protein, 73 aa, Setaria italica
  Transcript Sequence Number=SeqID_8577
  Gene Ontology: Mol. function=transcription factor activity; Biological process=regulation of transcription, DNA-dependent
  Homolog annotation: Hit_ID=Q6L565; Match level="QueryCoverage=100%, HitCoverage=8%, E-value=1e-27, Identity=82%"; Hit description =Putative RNA polymerase sigma factor
  Pfam annotation: Domain name=Sigma70_r4; Domain location=7-60; Score =69.4; E_value=1.3e-17; Accession=PF04545.8; Description=Sigma-70, region 4
RERLLVVLDRLPAREGHVLKLRHGLEDGRCMSLEQIGRIYRVSKEWIRKIEKSAMAKLRNQDVRRDLDDFCRF

SEQ ID NO: 74552 - protein, 138 aa, Setaria italica
  Transcript Sequence Number=SeqID_8578
  Gene Ontology: Mol. function=transcription regulator activity; Cellular component=nucleus; Biological process=regulation of transcription
  Homolog annotation: Hit_ID=Q7XZF8; Match level="QueryCoverage=100%, HitCoverage=53%, E-value=1e-20, Identity=48%"; Hit description=Helix- loop-helix DNA-binding domain containing protein, expressed
APAHLFPTEHDEIVVLASGGAVFEASVCCDDRSDLLPELIETLRALRLRTLRAEMATLGGRVRNVLVLARDVDGSGVTGDDDGYGGRTDSAGSVEGNAGGGGDFLKEALRALVERPGAGGGDRPKRRRVSGTNMQAAA

SEQ ID NO: 74553 - protein, 51 aa, Setaria italica
  Transcript Sequence Number=SeqID_8579
  Subcellular localization annotation: CTP_CleavageSite=20; ConfidenceScore=5.42e-01
MAFTPATACCNPSLLLAPRRASSSRGSPARAQALLCTPSTSAFRGLRGATS

SEQ ID NO: 74554 - protein, 88 aa, Setaria italica
  misc_feature (61)..(61): Xaa can be any naturally occurring amino acid
  Transcript Sequence Number=SeqID_8580
  Subcellular localization annotation: CTP_CleavageSite=85; ConfidenceScore=5.26e-01
GYKKVSESSTGCPWLPLPCRPPPPLRFHLGLRRFPSLIKPEPPPPSPKPPCSPPLSPPTRXPRRPWPPPLNPSAPPPKPPPPSPTASH

SEQ ID NO: 74555 - protein, 136 aa, Setaria italica
  misc_feature (75)..(75): Xaa can be any naturally occurring amino acid
  Transcript Sequence Number=SeqID_8581
  Gene Ontology: Mol. function=pseudouridine synthase activity; Biological process=pseudouridine synthesis
  Homolog annotation: Hit_ID=B4FNC8; Match level="QueryCoverage=99%, HitCoverage=35%, E-value=1e-65, Identity=84%"; Hit description =Pseudouridylate synthase
  Pfam annotation: Domain name=PseudoU_synth_1; Domain location=14-115; Score=-2.9; E_value=0.015; Accession=PF01416.12; Description=tRNA pseudouridine synthase
IRGGRWERVTFKIVLSYHVGSFDGWQKQPGLNTVQGLVEKHLGQFVDERKAKQLEARSLPIEGGAIVAGRTDKGXTWRKDVKSEDIKDAIKEAAPDKLKPLHVSEVAREFHPNFAAKWRRYMYIFPLDEDAKSIIG

SEQ ID NO: 74556 - protein, 275 aa, Setaria italica
  misc_feature (20)..(20): Xaa can be any naturally occurring amino acid
  Transcript Sequence Number=SeqID_8582
  Gene Ontology: Mol. function=pseudouridine synthase activity; Biological process=pseudouridine synthesis
  Homolog annotation: Hit_ID=B4FNC8; Match level="QueryCoverage=100%, HitCoverage=66%, E-value=1e-115, Identity=76%"; Hit description =Pseudouridylate synthase
  Pfam annotation: Domain name=PseudoU_synth_1; Domain location=145 -264; Score=-0.7; E_value=0.0095; Accession=PF01416.12; Description =tRNA pseudouridine synthase
LNTVQGLVEKHSLVLILLYXRKAKQLEARSLPIEGGAIVAGRTDKGVTALQQVCSFYTWRKDVKSEDIKDAIKEAAPDKLKPLHVSEVAREFHPNFAAKWRRYMYIFPLDEDAKSIIGEGHSEVLKNSEHIIKPQSFDVAKVDEILRKLAGKTLSYKMFARDTQASRSVGPPTECFMFHSRAAAAKLYCANEDYKEGLSVMCVELVANRFLRKMVRVLVATAIREAAAGAGEDALLNLMEATDRRATAPPAPPEGLCLVDVGYKDFSKQRCFIVD

SEQ ID NO: 74557 - protein, 56 aa, Setaria italica
  Transcript Sequence Number=SeqID_8583
SLIYAVYGGEALHEHVEHLVPVQHVDPDAPRVSSELLPAASHDLVAGEELGAVLHV

SEQ ID NO: 74558 - protein, 405 aa, Setaria italica
  Transcript Sequence Number=SeqID_8584
  Gene Ontology: Mol. function=carbon-sulfur lyase activity; Cellular component=vacuole
  Homolog annotation: Hit_ID=B6TK37; Match level="QueryCoverage=98%, HitCoverage=90%, E-value=1e-162, Identity=73%"; Hit description =Alliin lyase
  Pfam annotation: Domain name=Alliinase_C; Domain location=40-405; Score=707.8; E_value=8.7e-210; Accession=PF04864.5; Description =Allinase, C-terminal domain
  Pfam annotation: Domain name=Aminotran_1_2; Domain location=37-401; Score=-79.2; E_value=0.0029; Accession=PF00155.13; Description =Aminotransferase class I and II
  Pfam module annotation: Pfam domain module=Alliinase_C::Aminotran_1 _2; Domain location=40-405::37-401
FPSSAKGCAARSGADDGALLADEETEAPDHAVALPPDAVLNLELGDPTMYEAFWREVGDRAATVIRGWQAMSYFSDPDALCWFLEPEFEREVRRLHRVVGNAVVDGYHLVVGTGATQLYQAAMYALSSPARGDKPVPVVSPAPYYSSYPPQTDLQLSGFYRWAGDASTFAGGECIELVCSPNNPDGAVRESVMSSAAGAKPIHDLVYYWPQYTPITGRAAHDIMLFTVSKITGHAGTRLGWALVKDREVAKKMVYFVDRSTIGVSKDSQLRATKILSVVSDAYEAPPAGDGGAAVPRLFDFARRRMEERWRTLRATVAASGAFSLPEEIAGYCDFNKQTVAACPAFAWLRCEKEDVEDCAEFLAGHKIVARGGKQFGGDARCVRINMLDRDQVFDMLVQRLSAIN

SEQ ID NO: 74559 - protein, 37 aa, Setaria italica
  Transcript Sequence Number=SeqID_8585
ACTNLMRSLDHACCVVKLCLVHVRTLFEFYPRDQEFL

SEQ ID NO: 74560 - protein, 90 aa, Setaria italica
  misc_feature (33)..(33): Xaa can be any naturally occurring amino acid
  misc_feature (56)..(56): Xaa can be any naturally occurring amino acid
  Transcript Sequence Number=SeqID_8586
  Gene Ontology: Mol. function=acireductone synthase activity; Biological process=methionine salvage
  Homolog annotation: Hit_ID=UPI0000163086; Match level="QueryCoverage =87%, HitCoverage=18%, E-value=5e-22, Identity=56%"; Hit description =lipoyltransferase, putative
EVSDGEDDENPAAGSLKHHSERLAVALGLLQTXPGATIRVTKNITMCRDCHSSIKXFSLLANREIVVRDSKRLHKFKDGQCSCGDFSALL

SEQ ID NO: 74561 - protein, 329 aa, Setaria italica
  Transcript Sequence Number=SeqID_8587
  Gene Ontology: Cellular component=cell wall
  Homolog annotation: Hit_ID=B6STQ1; Match level="QueryCoverage=87%, HitCoverage=88%, E-value=1e-134, Identity=83%"; Hit description=Phi -1-like phosphate-induced protein
  Pfam annotation: Domain name=Phi_1; Domain location=55-329; Score =505.9; E_value=5.3e-149; Accession=PF04674.4; Description=Phosphate -induced protein 1 conserved region
  Subcellular localization annotation: CTP_CleavageSite=34; ConfidenceScore=5.21e-01
MASPRSSSSSIRVRHGTSHVALALLSVLLLSSARLSVGASRMLLELYKPPASARLTYHDGAVLQGRIAVSIIWYGRFTPAQKAVVTGFLQSLTPTSQAPTPSVSQWWNAINQLYLSKARGGNGARPGTAQVALAGQVADKGCSLGKRLTLAQLPQLAARAGPKKGGIALVLTAQDVAVDGFCMSRCGLHGSDARAGTAYIWVGNAATQCPGQCAWPFHQPVYGPQTPALVPPSGDVGMDGMVINIASMVAGTVTNPFRNGFYQGDKDAPLEAATACTGVYGSGAYPGFAGNLAVDRTTGASYNANGAHGRKYLLPALFDPATSTCSTLV

SEQ ID NO: 74562 - protein, 162 aa, Setaria italica
  Transcript Sequence Number=SeqID_8588
MASFSGPLHRPLSAMAVAAFAAVSSLELPDKLSHHKLSDASSNADVLGSVPATRADAPAGPSASTLSGMQLLPCNLQNLHPLKAPFASLPVIQTAYQYAKIAKTSEQDEAIPAIPSSSSDVLYRWHLPDPRACADFPDKSQTVVVLLGWLGSRQKHLKRYVI

SEQ ID NO: 74563 - protein, 196 aa, Setaria italica
  misc_feature (15)..(15): Xaa can be any naturally occurring amino acid
  misc_feature (167)..(167): Xaa can be any naturally occurring amino acid
  misc_feature (184)..(184): Xaa can be any naturally occurring amino acid
  Transcript Sequence Number=SeqID_8589
  Gene Ontology: Mol. function=nucleotide binding; Biological process =defense response
  Homolog annotation: Hit_ID=Q7XX28; Match level="QueryCoverage=100%, HitCoverage=20%, E-value=4e-62, Identity=57%"; Hit description =OSJNBa0060B20.19 protein
  Pfam annotation: Domain name=NB-ARC; Domain location=1-195; Score =27.7; E_value=5.8e-11; Accession=PF00931.14; Description=NB-ARC domain
MGGLGKTTLVMNVFXREKTKFPVHAWVTVSQTYTIDGLLRDSYFRKIGYKDSMEKMDNHELRDKLKSHLGTRKCLVVLDDVWNKEVYHQMEDTFNSLQASRIIITTRRYDVASLASSEHHLQIQPLESSDAFNLFCRRAFNNTAERKCPPELEDVATSIVDRCKGLXPLAIISMGSLMSSKKPXKHAWNQVYNQFR

SEQ ID NO: 74564 - protein, 150 aa, Setaria italica
  Transcript Sequence Number=SeqID_8590
  Gene Ontology: Mol. function=protein dimerization activity; Cellular component=nucleus; Biological process=regulation of transcription, DNA-dependent
  Homolog annotation: Hit_ID=B6TRY4; Match level="QueryCoverage=90%, HitCoverage=48%, E-value=3e-25, Identity=50%"; Hit description=IAA2 -auxin-responsive Aux/IAA family member
  Pfam annotation: Domain name=AUX_IAA; Domain location=2-149; Score= -65.6; E_value=0.00011; Accession=PF02309.8; Description=AUXIAA family
MVSGGSPRRPLRPVVGWPPVRSIRRNLASTRQSPQSSSAHHQDGGVKGGRGAKGGGAGEGGHKGGGLFVKINMDGVPIGRKVDLTAYGGYAELSAAVGKLFRGLLAAQRDPAAAAVGRCCGEEAAGEEAEEPVISGEYTLVYEDEEGRTG

SEQ ID NO: 74565 - protein, 91 aa, Setaria italica
  Transcript Sequence Number=SeqID_8591
PSQEEKEESPKSFEFLPPRDPAAKSDGASASTPKMQRPPPPPTIKVAPVVSTCARSTLKTEARTPKTQALCKAGPVAGSMSIKRSMVKGDL

SEQ ID NO: 74566 - protein, 89 aa, Setaria italica
  Transcript Sequence Number=SeqID_8592
  Gene Ontology: Mol. function=protein phosphatase type 2A regulator activity; Cellular component=protein phosphatase type 2A complex; Biological process=signal transduction
  Homolog annotation: Hit_ID=B6V8S9; Match level="QueryCoverage=96%, HitCoverage=17%, E-value=3e-16, Identity=47%"; Hit description =Protein phosphatase 2a 55 kDa regulatory subunit b
  Subcellular localization annotation: CTP_CleavageSite=44; ConfidenceScore=5.38e-01
GGSQVITTAEFHPSSCSLLGYGSSSGLVRLVDLRRSALCDQSVRTFKDRQSRPQPSTFFTEIISCTTDLKFTGEGRCLLTRDYMNLKVL

SEQ ID NO: 74567 - protein, 234 aa, Setaria italica
  misc_feature (226)..(226): Xaa can be any naturally occurring amino acid
  Transcript Sequence Number=SeqID_8593
  Gene Ontology: Mol. function=protein phosphatase type 2A regulator activity; Cellular component=protein phosphatase type 2A complex; Biological process=signal transduction
  Homolog annotation: Hit_ID=B9RRU6; Match level="QueryCoverage=98%, HitCoverage=44%, E-value=2e-56, Identity=46%"; Hit description =Protein phosphatase pp2a regulatory subunit B, putative
  Subcellular localization annotation: CTP_CleavageSite=46; ConfidenceScore=5.30e-01
GHGGSQVITTAEFHPSSCSLLGYGSSSGLVRLVDLRRSALCDQSVRTFKDRQSRPQPSTFFTEIISCTTDLKFTGEGRCLLTRDYMNLKLWDLRVETSPIATYKVHEFLRPKLSELYTEDYIFDRFSCCASKDGSYFATGSYSNTFKVFSRTAAQTSGTTLEASTNPYRVQSHAPTKIPVLFSSFSLGVGRKGQDGPRSDGKEEMPCNMASRVTHIAWHPMENFIXCAANNSLY

SEQ ID NO: 74568 - protein, 536 aa, Setaria italica
  misc_feature (46)..(46): Xaa can be any naturally occurring amino acid
  Transcript Sequence Number=SeqID_8594
  Gene Ontology: Mol. function=metal ion binding
  Homolog annotation: Hit_ID=Q6A009; Match level="QueryCoverage=66%, HitCoverage=19%, E-value=4e-21, Identity=27%"; Hit description=RING finger protein 160
MGPWWFSQFDPAPEVAQAARRSFEAAFPQSERRLDALMLGKQFTFXYLSDNLKLTTQALSDKATPMDELEDMHQRVISSSLLAMATLVDILLGGKLQNCDVDSTSTENRSLSKVRSITLSSAQAAFCMHKCFLDALKSKSAVIRSATYSLLTSYIKHIPHVFDEETMKKLSPTILGAFHEKDASCHSSMWDAILVFSRKFPEAWSYCNIHKVVLSRFWNFLQNGCYGSKQVSYPLLVQFLDSIPPKAVMGQQFIFDFLHNLWAGRNQRQLSAGDSLAFCIAFKQCFLWLLENVSRYSGEDSSVDTPIKLITDILAKIVWRDYLLLSGDITGHSDQLSHKNSGSAAANTQYPMYYLQGLEKCIVEILDVIADTENHLLNISCELFVRDCLDIIQQGEKLSKFEDHVEQLVSFFLSLDQLVVHKGETWPLERLARPLVEQSLPAIKFVDTPSLVKLLSVLVEIFRPIPLFLKNNQNHDENSDVKSYLELFNDDLLPWCFNGKYSTCNSKIDLLLSLFQDESFFDQWCSIIKYTGAEQK

SEQ ID NO: 74569 - protein, 36 aa, Setaria italica
  Transcript Sequence Number=SeqID_8595
KCYNENQILVKACPEYKSYYPVITHNILFYYINNFN

SEQ ID NO: 74570 - protein, 179 aa, Setaria italica
  Transcript Sequence Number=SeqID_8596
APAQSDAPALDDNDFIEAKDKKNKKKGNKKQKASTVKAPSPVGSFDPSAISMPTEKGKAAKQAQQESEILPAPPSGPSFGDFVLWKSDQASSVPAPAWSNDSAKVQKPLSLRDIQREQERRSAAMQQQAPSPIPAKVAMNQKNHGNASSWQASGSSPSKAVAPVQMSSNTPGRSKSSAE

SEQ ID NO: 74571 - protein, 688 aa, Setaria italica
  misc_feature (394)..(394): Xaa can be any naturally occurring amino acid
  Transcript Sequence Number=SeqID_8597
MTEVAVRNKDVKSHEMGPGAAKTEMSEKVLDSGSTVVPGRASNEAKDSHAPKAENALSNISRQVQEMKLSSENTSSDIATAVATEVKVTDAQETKKSEKKKKQKKKQAAADANKGASKAVSSQQPRHEAEVDPSELGGNKHDLPDDTEELFWGAPASVQNEEYDTNKAESEFSSLSSDPHTAANQRAWKQPTQGLRPKSLLEIQAEEQQRAQKGLAMESAKPAASIPSIPWNGMATSSEQHYGGSSKSLGGMETAGERNKRSQLHDLLAEEVLARSSIADNENIGNANDAFFPPLSPAPAQSDAPALDDNDFIEAKDKKNKKKATKTKASTVKAPSPVGSFDPSAISMPTEKGKAAKQAQQESEILPAPPSGPSFGDFVLWKSDQASSVPNPDXIELLAKVQKPLSLRDIQREQERRSAAMQQQAPSPIPAKVAMNQKNHGNASSWQASGSSPSKAVAPVQMSSNTPGRSKSSAEDDLFWGPSEHSKQDKRQTEFPTLSSQSRSSVMKDQSPANRQKSQAGRLPVSSAAPANQSGKGKAEASNKQTEAMDFRDWCEGEWVRLTGTNDISLLEFCIKQSTVEAETLLREIIGSLDRNHQFIDKFLNYKAFLSSEVIDMAFQAPSTRGTRGDGAARANPATAARGGTGVDMELDGGGKKKGKKGKKVSAAVLGFNVVSNRIMMGEIQNVE

SEQ ID NO: 74572 - protein, 80 aa, Setaria italica
  Transcript Sequence Number=SeqID_8598
  Homolog annotation: Hit_ID=Q2L3E4; Match level="QueryCoverage=100%, HitCoverage=19%, E-value=1e-28, Identity=83%"; Hit description =Putative phospholipase
MERAVRELWAESRDLLGLGSPSPDDTAAKASAVPRADLPPTPLAFLRDHVSPGRPLIVSAAATRHWPAASLWPTASYLTD

SEQ ID NO: 74573 - protein, 84 aa, Setaria italica
  Transcript Sequence Number=SeqID_8599
  Gene Ontology: Mol. function=cysteine-type peptidase activity; Biological process=proteolysis
  Homolog annotation: Hit_ID=Q2R901; Match level="QueryCoverage=100%, HitCoverage=8%, E-value=3e-23, Identity=58%"; Hit description =Transposon protein, putative, CACTA, En/Spm sub-class
NLGRGGYGSAIPKWRKMEQDLIERGIIPATIEWPERSKNWYYAHGGSLSQEDGTLIFNDRIREKAEHLMKNIEDSKAGRLRMDR

SEQ ID NO: 74574 - protein, 158 aa, Setaria italica
  Transcript Sequence Number=SeqID_8600
  Gene Ontology: Mol. function=protein tyrosine kinase activity; Cellular component=plasma membrane; Biological process=protein amino acid phosphorylation
  Homolog annotation: Hit_ID=Q2R2M3; Match level="QueryCoverage=100%, HitCoverage=21%, E-value=6e-48, Identity=64%"; Hit description =Protein kinase domain containing protein, expressed
  Pfam annotation: Domain name=Pkinase; Domain location=2-154; Score= -99.2; E_value=0.014; Accession=PF00069.17; Description=Protein kinase domain
  Pfam annotation: Domain name=Pkinase_Tyr; Domain location=1-153; Score=-108.8; E_value=1.7e-06; Accession=PF07714.9; Description =Protein tyrosine kinase
  Pfam module annotation: Pfam domain module=Pkinase::Pkinase_Tyr; Domain location=2-154::1-153
DRNVSSEVEIMRKINHLNLIRLIGLCHHHGRWYLVTEYAEHGALRDRLLAAGAGAAPPLTWAQRVQVALDVAEGLRYLHEYARPACVHMDVSSGNVLLAGDGPRAKLRGFCAARAITGATAGAGGEEAALFTMTSRIAGTRGYIAPEYLEHGVVSPKA

SEQ ID NO: 74575 - protein, 155 aa, Setaria italica
  Transcript Sequence Number=SeqID_8601
  Gene Ontology: Mol. function=cysteine-type peptidase activity; Cellular component=cytoplasm; Biological process=ubiquitin-dependent protein catabolic process
  Homolog annotation: Hit_ID=Q84P80; Match level="QueryCoverage=95%, HitCoverage=17%, E-value=3e-68, Identity=80%"; Hit description =Ubiquitin carboxyl-terminal hydrolase (Fragment)
  Pfam annotation: Domain name=UCH; Domain location=5-152; Score=-74.5; E_value=0.019; Accession=PF00443.21; Description=Ubiquitin carboxyl -terminal hydrolase
  Subcellular localization annotation: CTP_CleavageSite=24; ConfidenceScore=5.14e-01
SSKHNSSCRAAGFCALCALQDHVTSALRSTGKILTPLLFVKNLRCISRSFRNTRQEDAHELMVSLLESMHKSCLPSGISSESPSAYERSLVHRIFGGRLRSQVRCTKCSHCSNKFDPFLDLSLEIGNAATLMKALYNFTEEELLDGGKALQLPAV

SEQ ID NO: 74576 - protein, 122 aa, Setaria italica
  Transcript Sequence Number=SeqID_8602
  Homolog annotation: Hit_ID=B6SSU7; Match level="QueryCoverage=58%, HitCoverage=32%, E-value=1e-16, Identity=69%"; Hit description =Ethylene-responsive transcription factor 2
MPKGHTDHPREQVVARHMSSTYMSLPLQRGSRDVATPAPPAGGDSAAHPYPRAVAGMDTSLSLAGAGHGQYLPLNENDSLDMVLFDVLREASGGGGGSAAPSVTTYQPLPASSLLPPPLMAI

SEQ ID NO: 74577 - protein, 132 aa, Setaria italica
  Transcript Sequence Number=SeqID_8603
  Gene Ontology: Mol. function=calcium ion binding; Cellular component =flagellin-based flagellum; Biological process=ciliary or flagellar motility
  Homolog annotation: Hit_ID=Q9LLM1; Match level="QueryCoverage=85%, HitCoverage=87%, E-value=3e-52, Identity=92%"; Hit description=EF -hand Ca2+-binding protein CCD1
  Pfam annotation: Domain name=efhand; Domain location=78-106; Score =23.9; E_value=0.00065; Accession=PF00036.24; Description=EF hand
MASQQRQMHQQQQAASAPAVGFEDYLPVMAERLGEDGLMRELASGFRLLMDPSRGLITFDSLRRNAPLLGLGPMSDDDLRGMLAEGDFDGDGALSEMEFCVLMVRLSPELMDEPRRWLDDAVAQASQFLFTS

SEQ ID NO: 74578 - protein, 283 aa, Setaria italica
  Transcript Sequence Number=SeqID_8604
  Gene Ontology: Mol. function=protein serine/threonine phosphatase activity; Cellular component=protein serine/threonine phosphatase complex; Biological process=protein amino acid dephosphorylation
  Homolog annotation: Hit_ID=B6TRT3; Match level="QueryCoverage=93%, HitCoverage=71%, E-value=1e-107, Identity=77%"; Hit description =Protein phosphatase 2C
  Pfam annotation: Domain name=PP2C; Domain location=47-283; Score =181.2; E_value=3e-51; Accession=PF00481.13; Description=Protein phosphatase 2C
AGSRAARRRRMEIRRLRVVAEEQAAKRRRLEGDDGEEEEDAVRDPAPRYGVTSVCGRRRDMEDAVTARPGFIHGHHFFGVFDGHGCSHVATSCGVRMHEIVAEEAAAAAAGSSASDEAARWRDVMEKSYARMDAEAVGSRDTTGPAPTCRCEMQMPKCDHVGSTAVVAVVGPRHLVVANCGDSRAVLCSGGAAIPLSADHKPDRPDELERIHAAGGRVIFWDGARVFGMLAMSRAIGDSYLKPFVISDPEVRVVERKDGEDEFLILASDGLWDVVSNEVACKV

SEQ ID NO: 74579 - protein, 83 aa, Setaria italica
  Transcript Sequence Number=SeqID_8605
  Gene Ontology: Mol. function=oxidoreductase activity; Cellular component=chloroplast envelope; Biological process=oxidation reduction
  Homolog annotation: Hit_ID=Q109P4; Match level="QueryCoverage=100%, HitCoverage=33%, E-value=1e-34, Identity=81%"; Hit description=Auxin- induced protein PCNT115, putative, expressed
MERSEMPRVKLGTQGLEVSKLGFGCMGLTGVYNAPVPEEAGIAIIMHAFEAGITFFDTADAYGPHTNEVLLGKALNQFPREKV

SEQ ID NO: 74580 - protein, 296 aa, Setaria italica
  Transcript Sequence Number=SeqID_8606
  Gene Ontology: Mol. function=oxidoreductase activity; Cellular component=chloroplast envelope
  Homolog annotation: Hit_ID=B9REP7; Match level="QueryCoverage=94%, HitCoverage=79%, E-value=1e-105, Identity=65%"; Hit description =Aldo/keto reductase, putative
  Pfam annotation: Domain name=Aldo_ket_red; Domain location=5-269; Score=154.3; E_value=3.8e-43; Accession=PF00248.13; Description =Aldoketo reductase family
YSTFLSYYLSSIVVTGLHTNEVLLGKALNQFPREKVQVATKFGIAGFDVSGMRVKGTPDYVRACCEASLQRLAVDYIDLYYQHRIDQSVPIEETMRELKKLVEEGKVKYVGLSEASADTIRRVRAHAVHPITAVQLEWSLWTRDIEEDIIPVCRELGIGIVPYSPLARGFFAGRAAVESIPSESLLSKHPRYTGENLEKNKVMYTRLEMLSKKYGCTPAQLALSWVLHQGEDVVPIPGTTKVKNLDDNMGAVKVKLSKEDLEEISAAVPAGEVAGSRLLGILEPYSWRLANTPLPK

SEQ ID NO: 74581 - protein, 73 aa, Setaria italica
  Transcript Sequence Number=SeqID_8607
  Pfam annotation: Domain name=TPR_1; Domain location=36-69; Score =15.9; E_value=0.073; Accession=PF00515.20; Description =Tetratricopeptide repeat
  Pfam annotation: Domain name=TPR_2; Domain location=36-69; Score =21.2; E_value=0.0044; Accession=PF07719.9; Description =Tetratricopeptide repeat
  Pfam module annotation: Pfam domain module=TPR_1::TPR_2; Domain location=36-69::36-69
MASPGAAFSAALAAEDFPWVESQEEMGMAPDKYREVFDLAQRGTQVFRDGHFDEAISFYSKALNLRPGDQIIL

SEQ ID NO: 74582 - protein, 103 aa, Setaria italica
  Transcript Sequence Number=SeqID_8608
  Gene Ontology: Mol. function=voltage-gated potassium channel activity; Cellular component=integral to membrane; Biological process=potassium ion transport
  Homolog annotation: Hit_ID=Q8VX27; Match level="QueryCoverage=74%, HitCoverage=10%, E-value=4e-28, Identity=75%"; Hit description =Inwardly rectifying potassium channel
QNSPELNQLDRIFMHKYEPFHVSQEAWLLPQPYLQYTEHKCEDISKKVPTFIGDNGSTKIVAETNQLRKPQHENSHDQSNCNRRGDRWDGKDKRKKEYNRIEG

SEQ ID NO: 74583 - protein, 57 aa, Setaria italica
  Transcript Sequence Number=SeqID_8609
FNHLQGLKLLQDKRTRILYSGERIMCRKTGRIQIAITSDLPHKIFGTFIFLGRNEII

SEQ ID NO: 74584 - protein, 120 aa, Setaria italica
  Transcript Sequence Number=SeqID_8610
KGWTLTLYLAGTDAGPFTIRGHEFQRLKSFRVGLPYQILFMPGAMPNLKHLKIGLTFTTNSYSDLGIQHLASLTRVDVDTHAWCRHRGAVKDLEARTRSLLGAHPNRPTLIFNTDFLLEK

SEQ ID NO: 74585 - protein, 88 aa, Setaria italica
  Transcript Sequence Number=SeqID_8611
LSLTKILFMPGAMPNLKHLKIGLTFTTNSYSDLGIQHLASLTRVDVDTHAWCRHRGAVKDLEARTRSLLGAHPNRPTLIFNTDFLLEK

SEQ ID NO: 74586 - protein, 280 aa, Setaria italica
  misc_feature (179)..(179): Xaa can be any naturally occurring amino acid
  Transcript Sequence Number=SeqID_8612
  Gene Ontology: Mol. function=nucleotide binding; Cellular component =membrane; Biological process=defense response
  Homolog annotation: Hit_ID=Q53JL2; Match level="QueryCoverage=97%, HitCoverage=30%, E-value=4e-37, Identity=38%"; Hit description=NB -ARC domain containing protein, expressed
  Pfam annotation: Domain name=LRR_1; Domain location=176-198; Score =7.8; E_value=9.8; Accession=PF00560.25; Description=Leucine Rich Repeat
  Pfam annotation: Domain name=LRR_1; Domain location=28-49; Score =10.1; E_value=3.6; Accession=PF00560.25; Description=Leucine Rich Repeat
  Pfam annotation: Domain name=LRR_1; Domain location=5-26; Score=6.9; E_value=15; Accession=PF00560.25; Description=Leucine Rich Repeat
  Pfam module annotation: Pfam domain module=LRR_1::LRR_1::LRR_1; Domain location=176-198::28-49::5-26
EVLLQLRYLNIKGTSVNELPAGIGQVKNLETLDIRFTQVEKLPSTIVLLEKLARLIVIPNVKFPAEGFSKMKGLEQLKCFSIHRQPLSFLKELGQLTNLRTLEADCDDVDYEGSGWGIFTSSLQALCGHKLLDVNISMADSPPVPMDSSFPALQSLRTFVISHISNLPIWMGLLVNLRXLELRTNRFTQEDLRVLGGMPALETLTLYLAGTDAGPFTIRGHEFQRLKSFRVGLPYQILFMPGAMPNLKHLKIGLTFTTNSYSDLGQYQDNLRPRPTNLRV

SEQ ID NO: 74587 - protein, 339 aa, Setaria italica
  misc_feature (21)..(21): Xaa can be any naturally occurring amino acid
  misc_feature (48)..(48): Xaa can be any naturally occurring amino acid
  misc_feature (81)..(81): Xaa can be any naturally occurring amino acid
  misc_feature (108)..(108): Xaa can be any naturally occurring amino acid
  Transcript Sequence Number=SeqID_8613
  Gene Ontology: Mol. function=nucleotide binding; Cellular component =membrane; Biological process=defense response
  Homolog annotation: Hit_ID=Q53JL2; Match level="QueryCoverage=95%, HitCoverage=35%, E-value=3e-58, Identity=45%"; Hit description=NB -ARC domain containing protein, expressed
  Pfam annotation: Domain name=LRR_1; Domain location=128-151; Score =3.4; E_value=69; Accession=PF00560.25; Description=Leucine Rich Repeat
  Pfam annotation: Domain name=LRR_1; Domain location=153-174; Score =8.0; E_value=8.9; Accession=PF00560.25; Description=Leucine Rich Repeat
  Pfam annotation: Domain name=LRR_1; Domain location=176-197; Score =11.3; E_value=2.1; Accession=PF00560.25; Description=Leucine Rich Repeat
  Pfam annotation: Domain name=LRR_1; Domain location=224-244; Score =2.4; E_value=1.1e+02; Accession=PF00560.25; Description=Leucine Rich Repeat
  Pfam module annotation: Pfam domain module=LRR_1::LRR_1::LRR_1::LRR _1; Domain location=128-151::153-174::176-197::224-244
IGKWIAEGFVNAELGESLYEXAGLRYFNDLVNRSLIQPWHQLIDVVLXCRVHDVILNFLVSKSVEENFLTLSDSSGIQLLXHSKVRRLSLQNSYQENVVSWIKSIKPXVRSLACFVDCKNCFLLRNEVVRVLDLEHCVPLTNEHLANIEVLLQLRYLNISKTDVSELPAGIGQVQNLETLDIRYTRVKKLPSTIVGLEKLARLFVDPYVKFPAEGFSKMKGLEQLTYLSIHEQPLNFLKELGQLTNLRTLEAVCDDYLDVNNLGSKWGIFISSLEALCSHKLLDVEIYTWDCPAIPMDSSFPALQSLRTFVLSAISSLPIWMGLLVNLELLELKLHDSI

SEQ ID NO: 74588 - protein, 909 aa, Setaria italica
  misc_feature (658)..(658): Xaa can be any naturally occurring amino acid
  misc_feature (672)..(672): Xaa can be any naturally occurring amino acid
  misc_feature (678)..(678): Xaa can be any naturally occurring amino acid
  Transcript Sequence Number=SeqID_8614
  Gene Ontology: Mol. function=nucleotide binding; Biological process =defense response
  Homolog annotation: Hit_ID=Q53JL2; Match level="QueryCoverage=100%, HitCoverage=98%, E-value=0.0, Identity=43%"; Hit description=NB-ARC domain containing protein, expressed
  Pfam annotation: Domain name=LRR_1; Domain location=562-585; Score =2.6; E_value=96; Accession=PF00560.25; Description=Leucine Rich Repeat
  Pfam annotation: Domain name=LRR_1; Domain location=587-608; Score =6.9; E_value=15; Accession=PF00560.25; Description=Leucine Rich Repeat
  Pfam annotation: Domain name=LRR_1; Domain location=610-631; Score =10.1; E_value=3.6; Accession=PF00560.25; Description=Leucine Rich Repeat
  Pfam annotation: Domain name=LRR_1; Domain location=773-795; Score =3.3; E_value=71; Accession=PF00560.25; Description=Leucine Rich Repeat
  Pfam annotation: Domain name=NACHT; Domain location=184-334; Score= -16.4; E_value=0.0015; Accession=PF05729.4; Description=NACHT domain
  Pfam annotation: Domain name=NB-ARC; Domain location=157-449; Score =191.5; E_value=2.3e-54; Accession=PF00931.14; Description=NB-ARC domain
  Pfam module annotation: Pfam domain module=LRR_1::LRR_1::LRR_1::LRR _1::NACHT::NB-ARC; Domain location=562-585::587-608::610-631::773 -795::184-334::157-449
MERAMVSAATGAMSSVLAKLAELLHEKYKLANRVRKDIEFLRSELSVMNDLLYVMADIEELNALNKGWRDRVRELAYDIEDCIDLSVARFHRAGGDASKGGSIKQLARKLKKIRVSLQIAYKIQELKARVIEECYRQKGYKLDGLIGSRFGASRNKVDLRMCALWEETKNLVGLDRPRDEIIRLTLSIIGCAGLGKTTLANQVYQKIQGHFECKAFVSVSQNPHIKDILMKICSQVGATPSMADDELLLVNKLRERLQYKRYIVVLDDIWHSDPWKIIGQALVRTSPGSIIIVTTRLKNVAESCCSSHGGRVYDMRPLDGNDSRRLFFKRIFDSEDKCPHELERASEDILKKCDGIPLAIISISSFLANDVPQSADHWNKVKESISSPLPGNKSVETMQSVLSLSYFNLPQHLRTCLLYLSGFPEDSEIRRDRLIGKWIAEGFVNAEPGESLYEAGLRHFNDLINRSLIQPWDELRGVVQSCRVHDVILNFLVSKSGEENFLTLSDSSGIPTFLHSKVRRLSLQNSYQENVVSWIKSIKPYVRSLACFVDCKELFPLTEFEVVRVLDLEHCVPLTNEYLANIEVLLQLRYLNIKGTSVNELPAGIGQVKNLETLDIRFTQVEKLPSTIVLLEKLARLIVIPNVKFPAEGFSKMKGIEXLKCFSIHRQPLSFXKELGQXKTLQQFTYNYEVTNLRTLEAVCDDYLDVNNLGSKWGIFISSLEALCSHKLLDVEIYTWDCPAIPMDSSFPALQSLRTFVLSAISSLPIWMGLLVNLELLELKTTRFTPENLRVLGGMPALETLILYLDDIYAGPFTIHGHEFQRLKSFRVRELHQILFMPGAMPNLKHLEIGLDFTPSSYSDLGIQHLASLTRVDVDIHAWYPHRGAVKDLEAKTRSLLDAHPNRPTIIFS

SEQ ID NO: 74589 - protein, 125 aa, Setaria italica
  misc_feature (85)..(85): Xaa can be any naturally occurring amino acid
  Transcript Sequence Number=SeqID_8615
  Homolog annotation: Hit_ID=Q7XGV1; Match level="QueryCoverage=70%, HitCoverage=22%, E-value=4e-13, Identity=50%"; Hit description=F-box domain containing protein
MTSPATLAPPLDNEDLLSLILIRLPPLPSSFSSASLVCKRWHRLVRGPDFLHRLRAFHRTPPVLGFFHNSPDSPRFVAIQGCPAXRIAAAVRDLRRDGAGGMWWFVDCRHGRALLRSRDWVDLLW

SEQ ID NO: 74590 - protein, 117 aa, Setaria italica
  Transcript Sequence Number=SeqID_8616
  Subcellular localization annotation: CTP_CleavageSite=32; ConfidenceScore=5.03e-01
LVVPTNAEHGQGHPHSRRRGPRRRVHDRCVACAVQLPGASVIATGSPTVRRRRWPSDKRFGSSLATARMGRFDARVHYSASSGCVWTSVTDWLIRWFTSPSIVTARLCVWVCGPCLA

SEQ ID NO: 74591 - protein, 309 aa, Setaria italica
  Transcript Sequence Number=SeqID_8617
  Homolog annotation: Hit_ID=Q2L8W8; Match level="QueryCoverage=78%, HitCoverage=80%, E-value=2e-83, Identity=60%"; Hit description=MTERF- like protein
  Pfam annotation: Domain name=mTERF; Domain location=28-306; Score =193.8; E_value=4.7e-55; Accession=PF02536.6; Description=mTERF
  Subcellular localization annotation: CTP_CleavageSite=41; ConfidenceScore=5.75e-01
MPLCSFYASTSLPVAKPHQSVASSKPHSTAAASVATTVPTRSAAAAVTTTVPTATAALLLHLPELPSQVKDKILSLELMGVDYGRALELNPALRDAAPESIHAVVSFLQSRGLQFKDLGRVFGMCPSVLTASVRAHLRPIFAFLSDDLGVPEAAHRRVVIKCPRVLACSVRDQLRPALIYLRRLGFRDGRALALQDPILLVSSVERTLAPKLEFLAGLGMSRDDAIAMVLRCPALFTFSIERNYKPKFEYLVDAMGGGVEDVKAFPQYFAFSLEKRIMPRHRAAEEAGVALPLPDMLKATDEEFAEMII

SEQ ID NO: 74592 - protein, 89 aa, Setaria italica
  Transcript Sequence Number=SeqID_8618
RDQKLQLKARLPTGILRFSSKRFLGQPMELFLEAAFGKAETLTFIIGNVPFFFVSQQLYIHRPQTKLSQLMQPTRTILDKNLEFTVMFA

SEQ ID NO: 74593 - protein, 48 aa, Setaria italica
  Transcript Sequence Number=SeqID_8619
GTQIHLKFLILSDIFVTHIFRLLVRWNQHFFTYCKLFYPFGTSRHIIL

SEQ ID NO: 74594 - protein, 56 aa, Setaria italica
  Transcript Sequence Number=SeqID_8620
  Homolog annotation: Hit_ID=B6TLH1; Match level="QueryCoverage=100%, HitCoverage=18%, E-value=5e-25, Identity=96%"; Hit description =Mitogen-activated protein kinase organizer 1
  Pfam annotation: Domain name=WD40; Domain location=18-56; Score=35.2; E_value=2.7e-07; Accession=PF00400.24; Description=WD domain, G-beta repeat
VVGGSEDGYVFFWELVDAPVVARFRAHSSVVTSISYHPTKACMLTSSVDGSIRVWT

SEQ ID NO: 74595 - protein, 96 aa, Setaria italica
  Transcript Sequence Number=SeqID_8621
  Gene Ontology: Mol. function=oxidoreductase activity, acting on the CH-OH group of donors, NAD or NADP as acceptor; Cellular component =chloroplast; Biological process=L-serine biosynthetic process
  Homolog annotation: Hit_ID=B6SYR1; Match level="QueryCoverage=95%, HitCoverage=15%, E-value=1e-42, Identity=95%"; Hit description=D-3 -phosphoglycerate dehydrogenase
LHYGVSQAALDVFTEEPPPRDSKLVQHEDVTVTPHLGASTTESQEGVALEIAEAVIGALRGDLAATAVNAPMVPAEVLSELSPYVVLAEKLGRLVV

SEQ ID NO: 74596 - protein, 315 aa, Setaria italica
  Transcript Sequence Number=SeqID_8622
  Gene Ontology: Mol. function=oxidoreductase activity, acting on the CH-OH group of donors, NAD or NADP as acceptor; Cellular component =chloroplast; Biological process=L-serine biosynthetic process
  Homolog annotation: Hit_ID=B6SYR1; Match level="QueryCoverage=100%, HitCoverage=53%, E-value=1e-147, Identity=85%"; Hit description=D-3 -phosphoglycerate dehydrogenase
  Pfam annotation: Domain name=2-Hacid_dh_C; Domain location=2-56; Score=-78.6; E_value=0.00098; Accession=PF02826.11; Description=D -isomer specific 2-hydroxyacid dehydr
  Pfam annotation: Domain name=ACT; Domain location=244-309; Score =38.1; E_value=3.4e-08; Accession=PF01842.17; Description=ACT domain
  Pfam module annotation: Pfam domain module=2-Hacid_dh_C::ACT; Domain location=2-56::244-309
INVGARGGVVDEEALLRALDNGTVAQAALDVFTEEPPPRDSKLVQHEDVTVTPHLGASTTESQEGVALEIAEAVIGALRGDLAATAVNAPMVPAEVLSELSPYVVLAEKLGRLVVQLVAGGSGVKVVKVVYSSARDPDDLDTRILRAMVTKGIVEPISSAFVNIVNADYVAKQRGLRIIEERILLDGSPEIPLDSIQVHLTNVESKFAGALSDAGDIRVEGKVKDGSPHLTLVGSFSVDVSLEGNLILCCQVDQPGIIGKVGSILGKMNVNVSFMSVGRTARGKQAVMAIGVDEEPEKEALKLIGDTPSVEDFVF

SEQ ID NO: 74597 - protein, 49 aa, Setaria italica
  Transcript Sequence Number=SeqID_8623
  Gene Ontology: Mol. function=hydrolase activity
  Homolog annotation: Hit_ID=B6SZX9; Match level="QueryCoverage=97%, HitCoverage=44%, E-value=3e-13, Identity=77%"; Hit description=Nudix hydrolase 13
MSSDAVAAARKGRLKQRYDNEFRLVAGCVPYRVKKGDEGNPCSSPGGDP

SEQ ID NO: 74598 - protein, 114 aa, Setaria italica
  misc_feature (41)..(41): Xaa can be any naturally occurring amino acid
  Transcript Sequence Number=SeqID_8624
  Gene Ontology: Mol. function=coproporphyrinogen oxidase activity; Cellular component=chloroplast; Biological process=porphyrin biosynthetic process
  Homolog annotation: Hit_ID=Q2F7H7; Match level="QueryCoverage=83%, HitCoverage=22%, E-value=3e-50, Identity=97%"; Hit description =Coproporphyrinogen III oxidase
  Pfam annotation: Domain name=Coprogen_oxidas; Domain location=2-113; Score=-37.8; E_value=1.5e-13; Accession=PF01218.10; Description =Coproporphyrinogen III oxidase
YPTADVPGAPRQWWFGGGTDLTPSYIIEEDVKHFHSVQKQXACDKFDPSFHPRFKKWCDDYFYIKHRNERRGLGGIFFDDLNDYDQEMLLNFATECADSVLPALLYLILLVVGR

SEQ ID NO: 74599 - protein, 112 aa, Setaria italica
  Transcript Sequence Number=SeqID_8625
  Gene Ontology: Mol. function=coproporphyrinogen oxidase activity; Cellular component=chloroplast; Biological process=porphyrin biosynthetic process
  Homolog annotation: Hit_ID=Q2F7H7; Match level="QueryCoverage=91%, HitCoverage=24%, E-value=9e-51, Identity=91%"; Hit description =Coproporphyrinogen III oxidase
  Pfam annotation: Domain name=Coprogen_oxidas; Domain location=1-112; Score=-40.0; E_value=2e-13; Accession=PF01218.10; Description =Coproporphyrinogen III oxidase
AQVLVVTTKVISFPTECADSVLPAYIPIIERRKDTPFNEEHKAWQQLRRGRYVEFNLVSGRRSTFGLKTGGRIESILVSLPLTARWQYDHKPEEGTEEWKLLDACINPKDWI

SEQ ID NO: 74600 - protein, 179 aa, Setaria italica
  misc_feature (169)..(169): Xaa can be any naturally occurring amino acid
  Transcript Sequence Number=SeqID_8626
  Homolog annotation: Hit_ID=B6U6Z6; Match level="QueryCoverage=95%, HitCoverage=21%, E-value=3e-69, Identity=77%"; Hit description =SCARECROW-like protein
  Subcellular localization annotation: CTP_CleavageSite=60; ConfidenceScore=5.61e-01
QTNPVPEALLSQSPSFASSNGSGVALSDGFGSLLSSSGVMPDVGLTDFVVQSQQAMQFCRGLEEASRFLPDESKLVIDLEKPASVTGLVANVKEEKRFAEVKTEKADVEAAIHRGKKHFYGDDLDAEEGRCSKHSASAIDTDHLVREMMDKVLLCNGETCSKGVKELRXSLQHDVARHS

SEQ ID NO: 74601 - protein, 38 aa, Setaria italica
  Transcript Sequence Number=SeqID_8627
IALHRFSVYVLLPPFQIVGRFDFSRFIDIVMHIDIHYI

SEQ ID NO: 74602 - protein, 219 aa, Setaria italica
  Transcript Sequence Number=SeqID_8628
  Gene Ontology: Mol. function=metal ion binding; Cellular component =intracellular; Biological process=mRNA processing
  Homolog annotation: Hit_ID=Q3KQ71; Match level="QueryCoverage=83%, HitCoverage=75%, E-value=4e-09, Identity=27%"; Hit description =Sodium channel modifier 1
LSFFLLFLVVCLVRHCSRGSSVIIAFLISTNLQIHNKGARHIAAESRLREKELSRKHEINKRLALSSDASHSNSGNPSTSIRPTNMKGKPLIEQTRRAILEAQSSRFNNFNGKKVSHDLKGTTNTSSWDPLVAPSDVPMEKLAGDTGSIQCNRRKGESFAGNQIQGNLVSDWQTEVQKRQEQELRFTASGWKRDGHGRWYRDENVEFDSDEDDPNICLC

SEQ ID NO: 74603 - protein, 91 aa, Setaria italica
  Transcript Sequence Number=SeqID_8629
LDLHFGRQVHKSVQILQDRQDLAETPNELSKLQIAHEAPSHKSEATGFSMLAPRESDHSTQVPKHEVALLPIHQVNGMQSPAVQVQSSNGF

SEQ ID NO: 74604 - protein, 136 aa, Setaria italica
  Transcript Sequence Number=SeqID_8630
  Homolog annotation: Hit_ID=B9RVZ9; Match level="QueryCoverage=69%, HitCoverage=17%, E-value=9e-21, Identity=47%"; Hit description =Structural constituent of cell wall, putative
LGTFRLVVLTSSSPSCLHQHHHQQLQQNQQQDGGFYPKDAVMAAVEECMRKQADALLHSLDGIGGRLSQLELYCYKLERSIGELRSDVMDYHGESTANFRCIDKNLRQVHKSVQILQDRQDLAETPNELSKLQIAH

SEQ ID NO: 74605 - protein, 431 aa, Setaria italica
  Transcript Sequence Number=SeqID_8631
  Pfam annotation: Domain name=DUF1421; Domain location=26-418; Score =438.9; E_value=8e-129; Accession=PF07223.3; Description=Protein of unknown function (DUF1421)
YSYYFWFVWTNHGESTANFRCIDKNLRQVHKSVQILQDRQDLAETPNELSKLQIAHEAPSHKSEATGFSMLAPRESDHSTQVPKHEVALLPIHQVNGMQSPAVQVQSSNGFVLQHLVPVSLSAQHDQQQLNQAPVYYVQSQDHAKSTESKTAEPLVQVVQPLVQNPEARVAVELPQKSSHATELYPQPQNHRPQMPTQQVDSHAWHSQQHMVQQQQYIIQHVSRQMAQQQSSSPQSQSAPQVTPLYPSYCSQKPANANSEPISRSVAVQPPYSSPQQKHHEVAHSFYGQGNTILLPVADHNIQQQQPQSLQPHSQGPCPQPSQPSHCSVASYAVQGNGQTYSSTYKNPSNCPATVVAILPQPQATAPMAFHHLGPQAVHNHQFGNMVETASVVGYPRDQVEILPVVTAAQPAMVDKLNAGSNVTSPREWSA

SEQ ID NO: 74606 - protein, 154 aa, Setaria italica
  misc_feature (11)..(11): Xaa can be any naturally occurring amino acid
  misc_feature (70)..(70): Xaa can be any naturally occurring amino acid
  misc_feature (136)..(136): Xaa can be any naturally occurring amino acid
  Transcript Sequence Number=SeqID_8632
  Gene Ontology: Mol. function=nucleotide binding; Cellular component =cytoskeleton; Biological process=cell division
  Homolog annotation: Hit_ID=B6SKP8; Match level="QueryCoverage=100%, HitCoverage=27%, E-value=3e-76, Identity=87%"; Hit description =Dynamin-related protein 1C
  Pfam annotation: Domain name=GED; Domain location=64-154; Score=90.5; E_value=5.8e-24; Accession=PF02212.10; Description=Dynamin GTPase effector domain
VRRSIAATDEXKRFPTLQSDIAAAANESLERFREDGRKTVLRLVEMEASYLTVEFFRKLPTEPEKAADKXHSRSNVSSYINMVCETLRNTIPKAIVHCQVKEAKRNLLNRFYAHVGSKEKKQLSAMLDEDPTLMEXRDALVKRLELYKSARNEI

SEQ ID NO: 74607 - protein, 221 aa, Setaria italica
  misc_feature (156)..(156): Xaa can be any naturally occurring amino acid
  Transcript Sequence Number=SeqID_8633
  Gene Ontology: Mol. function=hydrolase activity; Cellular component =cytoskeleton; Biological process=cell division
  Homolog annotation: Hit_ID=B6SKP8; Match level="QueryCoverage=90%, HitCoverage=32%, E-value=1e-90, Identity=84%"; Hit description =Dynamin-related protein 1C
  Pfam annotation: Domain name=Dynamin_N; Domain location=39-210; Score= 239.7; E_value=7.3e-69; Accession=PF00350.15; Description=Dynamin family
  Pfam annotation: Domain name=MMR_HSR1; Domain location=37-203; Score=- 8.3; E_value=0.0058; Accession=PF01926.15; Description=GTPase of unknown function
  Pfam module annotation: Pfam domain module=Dynamin_N::MMR_HSR1; Domain location=39-210::37-203
MATMESLIGLVNRIQRACTVLGDHGGGGEGSLWEALPSVAVVGGQSSGKSSVLESIVGRDFLPRGSGIVTRRPLVLQLHKTEGGQEYAEFLHAPRKRFTDFAAVRKEIADETDRITGKTKAISNVPIHLSIYSPHVVNLTLIDLPGLTKVAVEGRXESIVQDIENMVRSYVDKPNCIILAISPANQDIATSDAIKLARGVVSDTASLQVHQRHWYPCPSNQ

SEQ ID NO: 74608 - protein, 554 aa, Setaria italica
  Transcript Sequence Number=SeqID_8634
  Gene Ontology: Mol. function=nucleotide binding; Cellular component =cytoskeleton; Biological process=cell division
  Homolog annotation: Hit_ID=B6SKP8; Match level="QueryCoverage=100%, HitCoverage=90%, E-value=0.0, Identity=97%"; Hit description=Dynamin- related protein 1C
  Pfam annotation: Domain name=Dynamin_M; Domain location=167-453; Score=268.5; E_value=1.5e-77; Accession=PF01031.12; Description =Dynamin central region
  Pfam annotation: Domain name=Dynamin_N; Domain location=1-158; Score =224.1; E_value=3.6e-64; Accession=PF00350.15; Description=Dynamin family
  Pfam annotation: Domain name=GED; Domain location=458-551; Score =126.2; E_value=1.1e-34; Accession=PF02212.10; Description=Dynamin GTPase effector domain
  Pfam module annotation: Pfam domain module=Dynamin_M::Dynamin_N::GED; Domain location=167-453::1-158::458-551
LGRDFLPRGSGIVTRRPLVLQLHKTEGGQEYAEFLHAPRKRFTDFAAVRKEIADETDRITGKTKAISNVPIHLSIYSPHVVNLTLIDLPGLTKVAVEGQAESIVQDIENMVRSYVDKPNCIILAISPANQDIATSDAIKLARDVDPSGDRTFGVLTKLDLMDKGTNAVDVLEGRQYRLQHPWVGIVNRSQADINRNVDMLSARRKEKEYFESSPEYGHLAHKMGAEYLAKLLSQHLEAVIRAKIPSIIALINKTIDEIEAQLDKLGRPIGGDAGAQLYTILDMCRAFDRVFKEHLDGGRPGGDRIYGVFDNQLPAALKKLPFDRHLSMQNVRKVISEADGYQPHLIAPEQGYRRLIDSSLSYFKGPAEASVDAVHLVLKELVRRSIAATDELKRFPTLQSDIAAAANESLERFREDGRKTVLRLVEMEASYLTVEFFRKLPTEPEKAADKNTPVSDRYQDNHLRRIGSNVSSYINMVCETLRNTIPKAIVHCQVKEAKRNLLNRFYAHVGSKEKKQLSAMLDEDPTLMEKRDALVKRLELYKSARNEIDSVAWK

SEQ ID NO: 74609 - protein, 98 aa, Setaria italica
  Transcript Sequence Number=SeqID_8635
  Gene Ontology: Mol. function=metal ion binding
  Homolog annotation: Hit_ID=B6SWB7; Match level="QueryCoverage=96%, HitCoverage=13%, E-value=1e-33, Identity=73%"; Hit description =Ankyrin-like protein
PPARLGIVGEDGAMRDDFDVGSIGANDTDLATDEAAPQEPGEAGGGGGGPRVRIGRFPVCPESMREYIPCLDNQEEIKRLPSTERGERFERHCPAKDK

SEQ ID NO: 74610 - protein, 559 aa, Setaria italica
  Transcript Sequence Number=SeqID_8636
  Gene Ontology: Mol. function=calmodulin binding; Cellular component =integral to membrane; Biological process=response to biotic stimulus
  Homolog annotation: Hit_ID=B6SWK8; Match level="QueryCoverage=97%, HitCoverage=93%, E-value=0.0, Identity=77%"; Hit description=MLO -like protein 14
  Pfam annotation: Domain name=Mlo; Domain location=1-447; Score=500.5; E_value=2.2e-147; Accession=PF03094.7; Description=Mlo family
RLSNWLKKTHRNPLYKAMEKMKEEMMLLGFISLLLAATSRIISGICIDSKYYNSRFSPCTKEEVEESLNAEHAVAHARKRLIEVILHHSLRRNLKASYHNHQGCPEGHESFVSHEGLEQLHRFIFVMAVTHVTYSCLTMLLAILKIHKWRKWEDEAFRDNHESFSQIAYESATRRQPALTKSYSFRSWSQNNAVMWIVCFIAQFGQSVVRADYLILRKGFIMNHNLSPTYDFHNYMIRSMEEEFEKIVGVSGVLWGFVVAFMLFNVDGSNLYFWIAILPVALVLLVGAKLQHVIATLTAEGAKLTTYGPRIQPRDDLFWFKKPDFLLWLIHFVLFQNAFELASFFWFWWQFGYDSCFIKNHLLVYCRLILGFAGQFLCSYSTLPVYALVTQMGSKYKAALIPRRIRETIHGWGKATRKKRRRRRGAWDDSTVRTETSTVCSLTDEDEDDLDDHHHGPFEETPRASRAPPPYLKVELQQTQHGPFRAGTPCFHSVAVPGSSSTHGGGSSQPMLLRQSSSASAPSSPSYRGGNVTRSASMPGIASLRTGTGTPTRTSHDES

SEQ ID NO: 74611 - protein, 105 aa, Setaria italica
  misc_feature (23)..(23): Xaa can be any naturally occurring amino acid
  Transcript Sequence Number=SeqID_8637
  Gene Ontology: Mol. function=protein kinase activity; Cellular component=integral to membrane; Biological process=protein amino acid phosphorylation
  Homolog annotation: Hit_ID=B9RXF7; Match level="QueryCoverage=81%, HitCoverage=13%, E-value=2e-11, Identity=45%"; Hit description =Serine/threonine-protein kinase PBS1, putative
  Pfam annotation: Domain name=LRR_1; Domain location=34-55; Score =12.5; E_value=1.3; Accession=PF00560.25; Description=Leucine Rich Repeat
  Pfam annotation: Domain name=LRR_1; Domain location=58-80; Score =10.3; E_value=3.2; Accession=PF00560.25; Description=Leucine Rich Repeat
  Pfam module annotation: Pfam domain module=LRR_1::LRR_1; Domain location=34-55::58-80
  Subcellular localization annotation: CTP_CleavageSite=65; ConfidenceScore=5.47e-01
VPQSQPQLTLEPNGDVSFNKLTXDLPNSIGSLSNLSSLYMQNNQFTGSVNVLRGLSSALTTLNIANNNFSGWIPKEFSSIPDLKLGGNSFANGPAPPPPPFYCPL

SEQ ID NO: 74612 - protein, 111 aa, Setaria italica
  Transcript Sequence Number=SeqID_8638
  Gene Ontology: Mol. function=protein kinase activity; Cellular component=integral to membrane; Biological process=protein amino acid phosphorylation
QEGQRNRPKHPQGQGDAPKGSESPTIQSDKKQGLGTGPLVGIIAGSIVAVLCVLLLLVCCMRNARKRKDDASSESKDFVGPLTVNIERASSRETPEPNLEDTSISLTCETA

SEQ ID NO: 74613 - protein, 684 aa, Setaria italica
  Transcript Sequence Number=SeqID_8639
  Gene Ontology: Mol. function=protein kinase activity; Cellular component=integral to membrane; Biological process=protein amino acid phosphorylation
  Homolog annotation: Hit_ID=Q6R2J8; Match level="QueryCoverage=100%, HitCoverage=94%, E-value=0.0, Identity=60%"; Hit description=Protein STRUBBELIG-RECEPTOR FAMILY 8
  Pfam annotation: Domain name=LRR_1; Domain location=104-126; Score =9.7; E_value=4.3; Accession=PF00560.25; Description=Leucine Rich Repeat
  Pfam annotation: Domain name=LRR_1; Domain location=128-150; Score =17.0; E_value=0.08; Accession=PF00560.25; Description=Leucine Rich Repeat
  Pfam annotation: Domain name=LRR_1; Domain location=152-173; Score =12.5; E_value=1.3; Accession=PF00560.25; Description=Leucine Rich Repeat
  Pfam annotation: Domain name=LRR_1; Domain location=176-198; Score =10.3; E_value=3.2; Accession=PF00560.25; Description=Leucine Rich Repeat
  Pfam annotation: Domain name=LRR_1; Domain location=58-77; Score =14.1; E_value=0.59; Accession=PF00560.25; Description=Leucine Rich Repeat
  Pfam annotation: Domain name=LRR_1; Domain location=80-102; Score =14.4; E_value=0.46; Accession=PF00560.25; Description=Leucine Rich Repeat
  Pfam annotation: Domain name=Pkinase; Domain location=374-648; Score =127.7; E_value=3.7e-35; Accession=PF00069.17; Description=Protein kinase domain
  Pfam annotation: Domain name=Pkinase_Tyr; Domain location=374-648; Score=102.7; E_value=1.2e-27; Accession=PF07714.9; Description =Protein tyrosine kinase
  Pfam module annotation: Pfam domain module=LRR_1::LRR_1::LRR_1::LRR _1::LRR_1::LRR_1::Pkinase::Pkinase_Tyr; Domain location=104-126::128 -150::152-173::176-198::58-77::80-102::374-648::374-648
SWNGPSQLAGWSAGGGDPCGAAWSKVVLPCSGAGVTEIKLPGIGLNGSLGYELSNLFSLKTLDLSNNNLHGSIPYQLPPNLTYLNLASNDFSGNLPYSITNLASIEYLNLSHNSLLNQMGELFGNLSSLSELDVSFNKLTGDLPNSIGSLSNLSSLYMQNNQFTGSVNVLRGLSSALTTLNIANNNFSGWIPKEFSSIPDLKLGGNSFANGPAPPPPPFMPPPPQRPRNRPKHPQGQGDAPKGSESPTIQSDKKQGLGTGPLVGIIAGSIVAVLCVLLLLVCCMRNARKRKDDASSESKDFVGPLTVNIERASSRETPEPNLEDTSIATVKLPPPEKMTPERVYGKNGSMRKTKVPITATPYTVASLQVATNSFCQDSLLGEGSLGRVYKADFPNGKVLAVKKIDSAALSLQEEDNFLEAVSSMSRLRHPNIVPLTGYCVEHGQRLLVYEYIGNGTLHDILHFSDEMSRKLTWNIRVRIALGTARALEYLHEVCLPSVVHRNFKSSNILLDEEHNPHLSDCGLAALTPNTERQVSTEVFGSFGYSAPEFAMSGIYTVKSDVYSFGVVMLELLTGRKPLDSSRERSEQSLVRWATPQLHDIDALAKMVDPALNGMYPAKSLSRFADIIALCVQPEPEFRPPMSEVVQQLVRLMQRASIVRRQSGEELGFSYRAPEREGDMRDISF

SEQ ID NO: 74614 - protein, 357 aa, Setaria italica
  Transcript Sequence Number=SeqID_8640
KDNLQSLETLLDTSHNNHKGSAISDGDKFFDDVLEEGHVDTYGSCTSIKDQISEPINQTTDCGIVGTSSTRHHRSSKKKNISSFAQIPEESRMKDNNSLLKQYEGTIKLDGGVFRPTELEDSIRHATPEHEESSETISNHSNSEKGTTSLPYYVPLQVLPPLEPQPDLKPPRCPVTRPPTKRARADHRLYDVELTVRRSQRGHPVPLVSLMSKWTGKQIVGYPVTVEVLEDSRPAASRDEHCPAMSSLDSLLKSRVTEPRQARSSNASRSKSKSSCRKKASEHDLDKSWRPHAKKPASSPRKMRRLSSFAGSRRESGDRKPVVVKTGGPTVACVPLRLVFSRINEALSFSVRQENPT

SEQ ID NO: 74615 - protein, 60 aa, Setaria italica
  Transcript Sequence Number=SeqID_8641
  Pfam annotation: Domain name=Tryp_alpha_amyl; Domain location=1-58; Score=24.4; E_value=0.00047; Accession=PF00234.14; Description =Protease inhibitorseed storageLTP f
QQQPCCQLLGGLADLDAAVCLCTALRANVLGLVQLSIPVQLSVVVNSCGKNVPQGFQCPT

SEQ ID NO: 74616 - protein, 94 aa, Setaria italica
  Transcript Sequence Number=SeqID_8642
GDYLLVLRVVGAERGEVDARVARHQRHVLAQARRRDRAAHGEHRDADGGAGLDAQPGLHGRWLASPPRAFASLALVGNGRSEWLADGGQGGAGQ

SEQ ID NO: 74617 - protein, 386 aa, Setaria italica
  Transcript Sequence Number=SeqID_8643
  Gene Ontology: Mol. function=amino acid binding; Biological process =metabolic process
  Homolog annotation: Hit_ID=B6SV85; Match level="QueryCoverage=98%, HitCoverage=82%, E-value=1e-146, Identity=72%"; Hit description=ACR4
  Pfam annotation: Domain name=ACT; Domain location=196-264; Score =14.4; E_value=0.27; Accession=PF01842.17; Description=ACT domain
  Pfam annotation: Domain name=ACT; Domain location=276-342; Score =36.3; E_value=1.2e-07; Accession=PF01842.17; Description=ACT domain
  Pfam annotation: Domain name=ACT; Domain location=54-126; Score=44.7; E_value=3.5e-10; Accession=PF01842.17; Description=ACT domain
  Pfam module annotation: Pfam domain module=ACT::ACT::ACT; Domain location=196-264::276-342::54-126
MSRSVFNVTDQDGSKLQNREVIEHIQKCLESEDYLALPAIGLKDGAAPSEDQSTSIELTGTDRPGLLSEVCAVLASLSCNIVKAEVWTHERRAAAVIQITDEATGLAIRDAGRLSKVQELLRNVMQGDGTARRGGGSTCTGGVSVGAARAERRLHKLMLDDGAGGSAGEEAVDGEDRCGKARPKVAVMDCTERQYTVVILQCRDRPKLLFDTLCALTDLQYVVFHGTVDAERGSKEAYQEYYIRHVDGYPVRSDAERTRLVRCLEAAVERRASDGLELEVRTEDRVGLLSEITRVFRENSLSIIRAAIATRDGRAEDTFYVSDAYGNPVDGRTVDAVGEQLGHAVLRVKRGGGGRGPPVAEGGAVSVLGSLLKGSFQGLRLIRSYS

SEQ ID NO: 74618 - protein, 72 aa, Setaria italica
  misc_feature (39)..(72): Xaa can be any naturally occurring amino acid
  Transcript Sequence Number=SeqID_8644
CYCNCVCQQTRPALVYFRSLKQHMSPSSPFFVYIHCFSXXXXXXXXXXXXXXXXXXXXXXXXXXXXXXXXXX

SEQ ID NO: 74619 - protein, 56 aa, Setaria italica
  Transcript Sequence Number=SeqID_8645
QDSRNVQPTALKPTSITSDYGLHVFNVIISKTNIDVSLELITIYVFQCSLLANIDC

SEQ ID NO: 74620 - protein, 90 aa, Setaria italica
  Transcript Sequence Number=SeqID_8646
RPISVCDIDGPLVMGGHSWWQHFRRVASWTDVVEVMWRRSQVGRRSGVVVWLSVLAACSGPRRLAFLGNSQCDVGLRQRMALAVTASWDN

SEQ ID NO: 74621 - protein, 66 aa, Setaria italica
  Transcript Sequence Number=SeqID_8647
QHFPPPQKRGSPEFHYFTGAKMIDIAGIYTTRFVVHYVSDLWLSEDDSHILTFKNKAWYSSENTPS

SEQ ID NO: 74622 - protein, 571 aa, Setaria italica
  Transcript Sequence Number=SeqID_8648
  Gene Ontology: Mol. function=sequence-specific DNA binding; Cellular component=nucleus; Biological process=regulation of transcription, DNA-dependent
  Homolog annotation: Hit_ID=P48785; Match level="QueryCoverage=67%, HitCoverage=48%, E-value=1e-56, Identity=35%"; Hit description =Pathogenesis-related homeodomain protein
  Pfam annotation: Domain name=Homeobox; Domain location=282-340; Score= 12.0; E_value=0.0008; Accession=PF00046.21; Description=Homeobox domain
  Pfam annotation: Domain name=PHD; Domain location=36-91; Score=47.7; E_value=4.4e-11; Accession=PF00628.21; Description=PHD-finger
  Pfam module annotation: Pfam domain module=Homeobox::PHD; Domain location=282-340::36-91
IAIRDVIRQLDVCNSTGSVDDPVMPPAECTDPEHIMCSTCKSHESFPNNKIIFCEGACKRTYHEKCLEPPLEKSALPTSSHGWLCKFCLCKVKILEAINAHLGTNFTVKCPFEDVFKEATEQIDSEDALDEDWLSEYSGDEDYDPEENEASSSCMNSGEEIMSDDSNGSGSPLYSPNDDIPDFISADFNDVEGLCHANLDLGIDSGEDDGAQILTYQRPRRDVDYRRLNEEMFGKIIENEEQSEDEDWGHDIRKKRRTRAASVQDNSVDGFSNVISDEKTEKKGRKLFRIPPTAVEVLRKSFAENELPPRDVKENLSRELDISFEKIDKWFKNTRCAALRDRKAEGNSHNPAPSKSSRSKGKAGISGKTERNDRIATLSNNLRTNEEKADISGMVDSGDNSCFVPLSEIINVPTRLQRNLEKRKMESTSSPLRLHNKGACSPTGQVKESTSPTSKSCLQTDLSHPTNNEVSAEEQAASQMDTDACPEEQAASQMDTGARAEEQAAPLVDTGASDYQPFLDVIDEMCGLECRLQRLKKNMLSLGAEGCATGGSDMKNQAVVLVPSAELKEKA

SEQ ID NO: 74623 - protein, 173 aa, Setaria italica
  Transcript Sequence Number=SeqID_8649
  Gene Ontology: Mol. function=substrate-specific transmembrane transporter activity; Cellular component=integral to membrane; Biological process=transmembrane transport
  Homolog annotation: Hit_ID=B6U029; Match level="QueryCoverage=96%, HitCoverage=32%, E-value=8e-74, Identity=84%"; Hit description=Sugar transport protein 8
VSIVLVDKVGRRKLLLEACAQMLVAQTAVGGIMLAKVKADTSPSSGWAVAIVVLICIYVSSFAWSWGPLGWLIPSETFPLETRTAGFSFAVSSNMLFTFLIAQAFLSMMCTMRAYIFFFFAAWIVVMGTFVLVLLPETEGVPIDEMVERVWRRHWFWKRCFGDSANEARVNNC

SEQ ID NO: 74624 - protein, 83 aa, Setaria italica
  Transcript Sequence Number=SeqID_8650
  Gene Ontology: Mol. function=aminoacyl-tRNA ligase activity; Cellular component=cytoplasm
  Homolog annotation: Hit_ID=Q8SA98; Match level="QueryCoverage=71%, HitCoverage=29%, E-value=5e-22, Identity=89%"; Hit description =Glycyl-tRNA synthetase
  Subcellular localization annotation: CTP_CleavageSite=23; ConfidenceScore=5.53e-01
MAASRSRLHGSPASIAVLILSFLQGSVRGITFTFTNRCPDTVWPGLLSGSGTPPLETTGFAPEPQSPVAQEPLPEASKLQPER

SEQ ID NO: 74625 - protein, 235 aa, Setaria italica
  Transcript Sequence Number=SeqID_8651
  Homolog annotation: Hit_ID=B9SUI9; Match level="QueryCoverage=68%, HitCoverage=51%, E-value=1e-61, Identity=70%"; Hit description =Zeamatin, putative
  Pfam annotation: Domain name=Thaumatin; Domain location=1-163; Score =196.4; E_value=7.9e-56; Accession=PF00314.9; Description=Thaumatin family
GRSGCNFDASGKGSCATGDCGSGEVECRGAGASPPATLAEFTLDGASGKDFYDVSLVDGYNLPMLVQAAAPECPDTGCLVDLNERCPDELRADDGRACRSACEAFGSPEYCCNGAYGNPNTCHPSQYSQLFKSACPKSYSYAYDDATSTFTCNHTDYTITFCPKSTPSSDKSKHSSRRPSHEQLEDSVWLASLRKSDAGALKVELWSASIILQSALAIAVVIALVALEQPLFSLL

SEQ ID NO: 74626 - protein, 70 aa, Setaria italica
  Transcript Sequence Number=SeqID_8652
NFCSDKSKHSSRRPSHEQLEDSVWLASLRKSDAGALKVELWSASIILQSALAIAVVIALVALEQPLFSLL

SEQ ID NO: 74627 - protein, 114 aa, Setaria italica
  Transcript Sequence Number=SeqID_8653
  Gene Ontology: Cellular component=anchored to membrane
  Homolog annotation: Hit_ID=Q5YLM2; Match level="QueryCoverage=65%, HitCoverage=11%, E-value=7e-33, Identity=88%"; Hit description =Roothairless 3
MAGSAAPQAVVLGLLLLAGLAAAQRGTTPAAPAPAPDPGCNGIQLTYNFQGRTKIRPFVSDKNKQPYAFRANATVLNSGTRPLKSWAVLVEFAHGEILVGVDGAVLTGGGEMPY

SEQ ID NO: 74628 - protein, 618 aa, Setaria italica
  Transcript Sequence Number=SeqID_8654
  Gene Ontology: Mol. function=nucleic acid binding; Cellular component= nuclear speck; Biological process=ubiquitin-dependent protein catabolic process
  Homolog annotation: Hit_ID=B9SK46; Match level="QueryCoverage=84%, HitCoverage=61%, E-value=1e-140, Identity=48%"; Hit description=Sumo ligase, putative
  Pfam annotation: Domain name=zf-MIZ; Domain location=215-264; Score =91.0; E_value=4.2e-24; Accession=PF02891.12; Description=MIZ zinc finger
NEKSAGNISPDLPSCFYCEMCRISRADPFWVTINSLLLPVLIGPSTIAADGSYTAQYTAKSFPLSRANREMLQKAEYDIQVWCILLNDQVPFRMHWPLHSEMQVNGIHVRVVNRQPSQKLGANGRDDGPLLTDYLWEGLNKISLLRNDSRTFCLGIRLAKRRSLEQVLNLVPMEQDGEKFDDALARVRRCVGGGTEANNADSDSDIEVVADSVSVNLRCPMTASRIQIAGRFKPCAHMGCFDLEAFIEINQRSRKWQCPICLKNYSLENIIIDPYFNRIASLIKSCGDDTSEIDVKPDGSWRVKGRAELKDLTQWHLPDGTLCVSADTAAKPKMCIVKHEVKEEPSSEEVGWRLKLGIRKNSNGQWEISKRGDSDSVLSSDNYQARHMENKNCINLTCSTDDMDNGDEVYNSEPARTDYPMTHVHDLDSSPSDKNAPPPSMEQDVIVLSDSDDDAVTVLSPSTVKCGSAHDTGNLFAPNPPETSGACGEQLGGCPNETSFLALKEGFDDLGLSFWERPLSPRDDPTYQMFDPGTRVTDNPVEVDEPVHGGDLGVTAVAANPLEDGRDGALQACTSNERDGVISLANLGDPTQTWGDGHRENRTAGTDDCVTNDRNALR

SEQ ID NO: 74629 - protein, 163 aa, Setaria italica
  Transcript Sequence Number=SeqID_8655
  Gene Ontology: Mol. function=nucleic acid binding; Cellular component= nuclear speck; Biological process=ubiquitin-dependent protein catabolic process
  Homolog annotation: Hit_ID=B9SK46; Match level="QueryCoverage=81%, HitCoverage=15%, E-value=2e-48, Identity=66%"; Hit description=Sumo ligase, putative
  Pfam annotation: Domain name=zf-MIZ; Domain location=105-150; Score =42.3; E_value=1.9e-09; Accession=PF02891.12; Description=MIZ zinc finger
LGLTLPLVSLGANGRDDGPLLTDYLWEGLNKISLLRNDSRTFCLGIRLAKRRSLEQVLNLVPMEQDGEKFDDALARVRRCVGGGTEANNADSDSDIEVVADSVSVNLRCPMTASRIQIAGRFKPCAHMGCFDLEAFIEIKYKRYPESRTSSTKFRLRKKLTTT

SEQ ID NO: 74630 - protein, 83 aa, Setaria italica
  Transcript Sequence Number=SeqID_8656
VGKERRAKTIDLIDKLVLALTSTSAPKLFAVDNITSSCGGRRRSRSIVCDQAGSLCRQLRLASLPSLARWAFPPPPSTPGERR

SEQ ID NO: 74631 - protein, 228 aa, Setaria italica
  Transcript Sequence Number=SeqID_8657
  Gene Ontology: Mol. function=acyl carrier activity; Cellular component=chloroplast; Biological process=fatty acid biosynthetic process
  Pfam annotation: Domain name=Acyl-ACP_TE; Domain location=1-218; Score=240.5; E_value=4e-69; Accession=PF01643.9; Description=Acyl -ACP thioesterase
VTRINIQVNKYSRWGDVVEIDTWVASSGKNGMRRDWIIRDRNTKNMIARATSNWVMMNRETRRLSKIPEEVRQEVLPFYLDRSIITADADGGGRKIEKLTDSTAEHIRSGLAPRWSDMDVNQHVNNVKYIGWILESVPLDVLEDYHLTSITLDYRRECRQSQLLESLTSMTTTTSPATDEPPAVPVSSRCCSDLNSTHLIRQQDDGAEIVRARAEWRCKGRPGATKQP

SEQ ID NO: 74632 - protein, 79 aa, Setaria italica
  Transcript Sequence Number=SeqID_8658
  Homolog annotation: Hit_ID=B6UGL3; Match level="QueryCoverage=69%, HitCoverage=27%, E-value=5e-16, Identity=78%"; Hit description =Transcription initiation factor TFIID subunit 7
FRREPDLNAELVNQVEKHLINIMHGVSVNQNASVIGGEEGGERKKPPVARAPKQPDVQEPAANGEEAEPERSDSEESDN

SEQ ID NO: 74633 - protein, 93 aa, Setaria italica
  Transcript Sequence Number=SeqID_8659
  Gene Ontology: Mol. function=general RNA polymerase II transcription factor activity; Cellular component=transcription factor TFIID complex; Biological process=transcription initiation from RNA polymerase II promoter
  Homolog annotation: Hit_ID=B6UGL3; Match level="QueryCoverage=65%, HitCoverage=30%, E-value=3e-15, Identity=67%"; Hit description =Transcription initiation factor TFIID subunit 7
  Pfam annotation: Domain name=TAFII55_N; Domain location=15-92; Score=- 62.2; E_value=0.034; Accession=PF04658.5; Description=TAFII55 protein conserved region
MAHGGACFLGVRAAMEEQFILRVPPSVAERIERLMNESAASASNPDDASLDLSFSEDGRNGTFMIDNERFPASFFSYHNHLTNISSLISTESS

SEQ ID NO: 74634 - protein, 197 aa, Setaria italica
  Transcript Sequence Number=SeqID_8660
  Gene Ontology: Mol. function=general RNA polymerase II transcription factor activity; Cellular component=transcription factor TFIID complex; Biological process=transcription initiation from RNA polymerase II promoter
  Homolog annotation: Hit_ID=B6UGL3; Match level="QueryCoverage=89%, HitCoverage=89%, E-value=3e-70, Identity=76%"; Hit description =Transcription initiation factor TFIID subunit 7
  Pfam annotation: Domain name=TAFII55_N; Domain location=1-152; Score =203.4; E_value=6.1e-58; Accession=PF04658.5; Description=TAFII55 protein conserved region
MEEQFILRVPPSVAERIERLMNESAASASNPDDASLDLSFSEDGRNGTFMIDNERFPASLLDLPAVVESYKTYDDSVLIKTADIGQMIMVREENDPAPEGVEYKHGLTPPMRDARRRRFRREPDLNAELVNQVEKHLINIMHGVSVNQNASVIGGEEGGERKKPPVARAPKQPDVQEPAANGEEAEPERSDSEESDN

SEQ ID NO: 74635 - protein, 112 aa, Setaria italica
  Transcript Sequence Number=SeqID_8661
  Gene Ontology: Mol. function=catalytic activity; Biological process =metabolic process
  Homolog annotation: Hit_ID=B9SWD5; Match level="QueryCoverage=69%, HitCoverage=7%, E-value=3e-18, Identity=55%"; Hit description =Phosphatidylinositol glycan, putative
FYLTGHWCTFDGLRYGAAFIGFDHFHIIRQGLLLSIDTFGVSHILPILSLPFIGMVWYNTTSKDNKLNGVILNNITQVVNTATLAIKKKPIFWKRFDYTNSTNDNPLSGRAY

SEQ ID NO: 74636 - protein, 178 aa, Setaria italica
  Transcript Sequence Number=SeqID_8662
  Gene Ontology: Mol. function=catalytic activity; Biological process =metabolic process
  Homolog annotation: Hit_ID=B9SWD5; Match level="QueryCoverage=87%, HitCoverage=16%, E-value=1e-41, Identity=52%"; Hit description =Phosphatidylinositol glycan, putative
GIICMTGAWCIIKLQQKHQRESELCVADPVSVTQWSLLAVCLFYLTGHWCTFDGLRYGAAFIGFDHFHIIRQGLLLSIDTFGVSHILPILSLPFIGMVWYNTTSKDNKLNGVILNNITQVLLMYGLITAIPATLTIICVTIQRRHLMVWGLFAPKYVFDAIGLLLTDLLICLASLYYS

SEQ ID NO: 74637 - protein, 87 aa, Setaria italica
  Transcript Sequence Number=SeqID_8663
  Gene Ontology: Mol. function=binding
  Homolog annotation: Hit_ID=B9T7P5; Match level="QueryCoverage=82%, HitCoverage=3%, E-value=2e-31, Identity=87%"; Hit description =Microtubule associated protein xmap215, putative
MSTEDEKLLKEAKKLPWDERLQHKNWKVRNDANIDLAALCDSITDPKDARLREFGPLFKKTVADSNAPVQEKALDALLAFQRAADAD

SEQ ID NO: 74638 - protein, 306 aa, Setaria italica
  misc_feature (24)..(24): Xaa can be any naturally occurring amino acid
  misc_feature (293)..(293): Xaa can be any naturally occurring amino acid
  Transcript Sequence Number=SeqID_8664
  Gene Ontology: Mol. function=binding; Cellular component=spindle pole; Biological process=cytoplasmic microtubule organization and biogenesis
  Homolog annotation: Hit_ID=B9T7P5; Match level="QueryCoverage=92%, HitCoverage=14%, E-value=1e-123, Identity=77%"; Hit description =Microtubule associated protein xmap215, putative
MSTEDEKLLKEAKKLPWTKETRPXDERLQHKNWKVRNDANIDLAALCDSITDPKDARLREFGPLFKKTVADSNAPVQEKALDALLAFQRAADADASRYAKEVCDAIVAKCLTGRPKTVEKAQAAFLLWVELEAAEVFLESMEKAVKNKVAKAVVPAIDVMFQALSEFGTKVVPPKKILKMLPELFDHPDQNVRASSKGLTLELCRWIGKEPVKSILFEKMRDTMKKELEAELANVSGLAKPTRKIRSEQEKELEEEAVVETTGANTSEEAAADAPVEIDEYDLVDPVDYFNPXLEKSGFWDGVKAN

SEQ ID NO: 74639 - protein, 48 aa, Setaria italica
  Transcript Sequence Number=SeqID_8665
LGKLHYLTTRVDTLHSGRFYIFTNNYSTSHILMRYTLSVPVSTYTSGS

SEQ ID NO: 74640 - protein, 74 aa, Setaria italica
  Transcript Sequence Number=SeqID_8666
  Gene Ontology: Mol. function=tetracycline:hydrogen antiporter activity; Cellular component=integral to membrane; Biological process=response to antibiotic
  Homolog annotation: Hit_ID=B6TYM8; Match level="QueryCoverage=93%, HitCoverage=26%, E-value=8e-30, Identity=89%"; Hit description =Tetracycline transporter protein
FLLLFKGMVQGCITGISSIANVISPLVFTPLTAWCLSEATPFYLKGFSLACAGFATLVALATSISMRPAEVQPD

SEQ ID NO: 74641 - protein, 272 aa, Setaria italica
  Transcript Sequence Number=SeqID_8667
  Gene Ontology: Mol. function=transporter activity; Cellular component= integral to membrane; Biological process=RNA metabolic process
  Homolog annotation: Hit_ID=B6TYM8; Match level="QueryCoverage=92%, HitCoverage=100%, E-value=3e-96, Identity=73%"; Hit description =Tetracycline transporter protein
  Subcellular localization annotation: CTP_CleavageSite=36; ConfidenceScore=5.07e-01
LPVSTTCQVSAVAAVVTAAYMKAFLQETDGGASSCRSEEAASLPLCLPSSSSEESSPRLPPLRKAPSLSEIATLLTSSSTFSRATVVTFFHGLGETGLLNTLLYFLKAKFHYSKNQYANLLLIMGITGSFSQLAVMPLLVPKLGEQKLLIIALIASCGHAFLYSIAWSSWVPYLAASCVVLSTLVNPCIRSIISKKVGPFEQGMVQGCITGISSIANVISPLVFTPLTAWCLSEATPFYLKGFSLACAGFATLVALATSISMRPAEVQPDRK

SEQ ID NO: 74642 - protein, 286 aa, Setaria italica
  Transcript Sequence Number=SeqID_8668
  Gene Ontology: Mol. function=protein binding; Cellular component =cytoplasm; Biological process=ubiquitin-dependent protein catabolic process
  Homolog annotation: Hit_ID=Q6H5X5; Match level="QueryCoverage=100%, HitCoverage=90%, E-value=1e-110, Identity=74%"; Hit description =Putative F-box protein FBL2
  Pfam annotation: Domain name=LRR_1; Domain location=1-26; Score=4.3; E_value=47; Accession=PF00560.25; Description=Leucine Rich Repeat
  Pfam annotation: Domain name=LRR_1; Domain location=132-157; Score =8.2; E_value=8.1; Accession=PF00560.25; Description=Leucine Rich Repeat
  Pfam annotation: Domain name=LRR_1; Domain location=159-183; Score =6.0; E_value=22; Accession=PF00560.25; Description=Leucine Rich Repeat
  Pfam annotation: Domain name=LRR_1; Domain location=213-237; Score =2.2; E_value=1.2e+02; Accession=PF00560.25; Description=Leucine Rich Repeat
  Pfam annotation: Domain name=LRR_1; Domain location=239-270; Score =2.1; E_value=1.2e+02; Accession=PF00560.25; Description=Leucine Rich Repeat
  Pfam annotation: Domain name=LRR_1; Domain location=27-47; Score=4.0; E_value=53; Accession=PF00560.25; Description=Leucine Rich Repeat
  Pfam annotation: Domain name=LRR_1; Domain location=53-77; Score=0.1; E_value=2.9e+02; Accession=PF00560.25; Description=Leucine Rich Repeat
  Pfam annotation: Domain name=LRR_1; Domain location=79-107; Score =2.0; E_value=1.3e+02; Accession=PF00560.25; Description=Leucine Rich Repeat
  Pfam module annotation: Pfam domain module=LRR_1::LRR_1::LRR_1::LRR _1::LRR_1::LRR_1::LRR_1::LRR_1; Domain location=1-26::132-157::159 -183::213-237::239-270::27-47::53-77::79-107
SLQSLDVSRCIKLSDRGLKAVALGCQKLRQLHITGCKLITDNSLIVLSKSCLQLEDLGAAGCNSITDAGISALADGCHHIKLLDISKCNKVGDPGVCEIAEVSSSHLVSIKLLDCSKVGDKSIYSLAKFCHNLETLVIGGCRNISDSSIQALALACSSSLRSLRMDWCLKITDTSLRCLLSNCKLLVAIDVGCCDQITDVAFQDGEGSGFQSELRVLKISSCVQLTVAGVSSVIKSFKALEYLDVRSCPQVTRDSCEQAGVQFPSTCKVNFYGSLLESDPSAERFF

SEQ ID NO: 74643 - protein, 74 aa, Setaria italica
  Transcript Sequence Number=SeqID_8669
  Gene Ontology: Mol. function=RNA-directed DNA polymerase activity; Biological process=RNA-dependent DNA replication
  Homolog annotation: Hit_ID=Q8S463; Match level="QueryCoverage=77%, HitCoverage=3%, E-value=5e-21, Identity=77%"; Hit description =Putative prpol
FADLDNDSTAVLLADWRRTVYFISEVLSESKSRYPQIQKLVYAILITKRKLRHYFTSHPVTVVSSFPLGEVIRN

SEQ ID NO: 74644 - protein, 217 aa, Setaria italica
  misc_feature (119)..(119): Xaa can be any naturally occurring amino acid
  misc_feature (151)..(151): Xaa can be any naturally occurring amino acid
  Transcript Sequence Number=SeqID_8670
  Gene Ontology: Mol. function=Rab GTPase activator activity; Cellular component=intracellular; Biological process=regulation of Rab GTPase activity
QSAIDELHNTDVVPAKLINSVPHMPIEEQKDHVGQSTLEATGSNSKNACETGQHDGYCSTSGEIGDPLGASGYLSRSSSTSLSCGTEYDHDTHHVEEPCVPRDDNVVNDPDPLPLHGVXTDEVATTMDRTSGIADTHPVQHQNPTIAEGGXKETLAIGSISNVSDKELTRTLRSLGESMVENIQAIEFLVEILEKSMPRSTEQAKAVAALKELRKIS

SEQ ID NO: 74645 - protein, 441 aa, Setaria italica
  Transcript Sequence Number=SeqID_8671
  Gene Ontology: Mol. function=Rab GTPase activator activity; Cellular component=intracellular; Biological process=regulation of Rab GTPase activity
  Homolog annotation: Hit_ID=Q9XHE5; Match level="QueryCoverage=69%, HitCoverage=50%, E-value=2e-82, Identity=47%"; Hit description =Microtubule-associated protein
RLPLLYVLHADVQHFKQVRDLHEELLDDDFDGQTFPDRSKLNRSDRKNNVEGRTNKIRSLADLDPDTRDLFSINDAYGAEGELGIILSEKFMEHDAYSMFENLMNGAQGVVAITDFYSLSPSPESSSGLTPVREASSAIYHLLASVDSSLHSHLVELGVEPQYFALRWLRVLFGREFSLDNLLFIWDEIFSSPNHSYCTDIRSRADYQFKVLCSPRGALILSMAVSMMLHLRSSLLGSEHATSCLVRLLNFPEDIDIKSLIEKATLLQSFALEANLPSSPVRGKSLLTTPNYWEETWKILQSSIDQKGGGVFKMKGRGFLRRSWSNTESNVSRSKAANLQNKNLTSTRQSAIDELHNTDVVPAKLINSVPHMPIEEQKDHVGQSTLEATGSNSKNACETGQHDGYCSTSGYRVFGEILEKSMPRSTEQAKAVAALKAKEDQ

SEQ ID NO: 74646 - protein, 152 aa, Setaria italica
  Transcript Sequence Number=SeqID_8672
  Homolog annotation: Hit_ID=B6UBT3; Match level="QueryCoverage=88%, HitCoverage=44%, E-value=6e-56, Identity=77%"; Hit description=TMV response-related protein
  Pfam annotation: Domain name=DUF716; Domain location=1-84; Score =47.3; E_value=6e-11; Accession=PF04819.4; Description=Family of unknown function (DUF716)
GRAAPRLARAAGLALQGTWMVQMGFSFFTSAIAQGCALHAASRADYTIKCRTHEDYHRARSVATLQFNGHLALLVIAGAAAYAAVLSRANRPPSGYRILGKEVQMEGVPIMSQFTLDSDEEKEDEGITNTAAPAANGVESHDEIPLHAPGSK

SEQ ID NO: 74647 - protein, 124 aa, Setaria italica
  Transcript Sequence Number=SeqID_8673
  Subcellular localization annotation: CTP_CleavageSite=15; ConfidenceScore=5.51e-01
AATTTTTTTTACSTPASAKTAPAPDYGFDHRLPNGGSKKGTPQSASQRWMADKPRTPSSRRYSIGEPGKLNGGFSQSARMGNLNPKERVFASLSNIADLKSAADAAMDDFDDEFDHIDESHYAD

SEQ ID NO: 74648 - protein, 114 aa, Setaria italica
  Transcript Sequence Number=SeqID_8674
  Gene Ontology: Mol. function=ubiquitin-protein ligase activity; Cellular component=ubiquitin ligase complex; Biological process =ubiquitin-dependent protein catabolic process
  Homolog annotation: Hit_ID=Q84VE7; Match level="QueryCoverage=57%, HitCoverage=9%, E-value=5e-22, Identity=81%"; Hit description=Arm repeat protein
GGAEAIGGHRRPPWRRRGRPRWRRGTEWARENATAALVLLCRRLGARAVTQVMAVPGVEWAIWELMGTGTERARRKAASLGRICRRWAAASAADGERGNGCPAASVVPPAMMAS

SEQ ID NO: 74649 - protein, 146 aa, Setaria italica
  Transcript Sequence Number=SeqID_8675
  Gene Ontology: Mol. function=serine-type endopeptidase activity; Cellular component=extracellular region; Biological process=negative regulation of catalytic activity
  Homolog annotation: Hit_ID=B6SZ82; Match level="QueryCoverage=100%, HitCoverage=19%, E-value=4e-43, Identity=63%"; Hit description =Subtilisin-like protease
  Subcellular localization annotation: CTP_CleavageSite=35; ConfidenceScore=5.11e-01
DAGLGPVPARWRGSCETNATDFPSSMCNRKLIGARAFFRGYSSGGRNGSRVSSDLMSPRDDDGHGTHTATTAAGAVVADASLLGYASGTARGMAPGARVAAYKVCWRQGCFSSDILAGMEKAIDDGVDVLSLSLGGGAMPLSRDPI

SEQ ID NO: 74650 - protein, 105 aa, Setaria italica
  Transcript Sequence Number=SeqID_8676
  Gene Ontology: Cellular component=integral to membrane
  Homolog annotation: Hit_ID=B9SIR5; Match level="QueryCoverage=92%, HitCoverage=18%, E-value=5e-34, Identity=72%"; Hit description =Triose phosphate/phosphate translocator, non-green plastid, chloroplast, putative
  Pfam annotation: Domain name=TPT; Domain location=1-61; Score=-36.9; E_value=0.092; Accession=PF03151.8; Description=Triose-phosphate Transporter family
LQVLTEYILISATSAITVTIAGVVKEAVTILVAVFYFHDEFTWLKGVGLFTIMVGVSLFNWYRYDKFKRGQTSEDDINSPQFTGDAKYIILDDLEYQDEFGEEDT

SEQ ID NO: 74651 - protein, 80 aa, Setaria italica
  Transcript Sequence Number=SeqID_8677
  Gene Ontology: Cellular component=integral to membrane
  Homolog annotation: Hit_ID=B9SIR5; Match level="QueryCoverage=100%, HitCoverage=15%, E-value=1e-22, Identity=66%"; Hit description =Triose phosphate/phosphate translocator, non-green plastid, chloroplast, putative
MCKSAAPIFLLLFAFAFRLENPSIKLLGIIFVISIGVLMTVAKETEFDFWGFIFVTLAAVMSGFRWSMTQILLQKDAYGM

SEQ ID NO: 74652 - protein, 307 aa, Setaria italica
  Transcript Sequence Number=SeqID_8678
  Gene Ontology: Mol. function=sugar:hydrogen symporter activity; Cellular component=integral to membrane; Biological process =carbohydrate transport
  Homolog annotation: Hit_ID=B9SIR5; Match level="QueryCoverage=89%, HitCoverage=53%, E-value=1e-115, Identity=73%"; Hit description =Triose phosphate/phosphate translocator, non-green plastid, chloroplast, putative
  Pfam annotation: Domain name=DUF6; Domain location=124-263; Score =5.0; E_value=0.039; Accession=PF00892.12; Description=Integral membrane protein DUF6
  Pfam annotation: Domain name=DUF606; Domain location=148-260; Score= -55.3; E_value=0.018; Accession=PF04657.5; Description=Protein of unknown function, DUF606
  Pfam annotation: Domain name=TPT; Domain location=115-263; Score =144.9; E_value=2.4e-40; Accession=PF03151.8; Description=Triose -phosphate Transporter family
  Pfam annotation: Domain name=UAA; Domain location=14-269; Score= -132.0; E_value=0.00094; Accession=PF08449.3; Description=UAA transporter family
  Pfam module annotation: Pfam domain module=DUF6::DUF606::TPT::UAA; Domain location=124-263::148-260::115-263::14-269
KKKKSFKTKLRKEQRHYQPMGPDSGVEMGWKDYFMRVVPTALGTALDINLSNASLVFISVTFATMCKSAAPIFLLLFAFAFRLENPSIKLLGIIFVISIGVLMTVAKETEFDFWGFIFVTLAAVMSGFRWSMTQILLQKDAYGLKNPITLMSHVTPVMAIATMILSLLLDPWSDFQKNSYFDNPWHVMRSCLLMLIGGSLAFFMVLTEYILISATSAITVTIAGVVKEAVTILVAVFYFHDEFTWLKGVGLFTIMVGVSLFNWYRYDKFKRGQTSEDDINSPQFTGDAKYIILDDLEYQDEFGEEDT

SEQ ID NO: 74653 - protein, 61 aa, Setaria italica
  Transcript Sequence Number=SeqID_8679
ELDLEVSNLRYIQVHFNRSCLQVTLRFPLEPRVLGRGRRQRRRVLRDLISRAPVVTPILYS

SEQ ID NO: 74654 - protein, 31 aa, Setaria italica
  Transcript Sequence Number=SeqID_8680
KIILLYISYICNLLTEYSVSPFSFALLFIGT

SEQ ID NO: 74655 - protein, 243 aa, Setaria italica
  Transcript Sequence Number=SeqID_8681
  Homolog annotation: Hit_ID=B6TJB8; Match level="QueryCoverage=100%, HitCoverage=100%, E-value=1e-104, Identity=74%"; Hit description =Cupin, RmlC-type
  Pfam annotation: Domain name=DUF1637; Domain location=37-241; Score =318.7; E_value=1.2e-92; Accession=PF07847.4; Description=Protein of unknown function (DUF1637)
MPSTTMDAIQKLYEVCKVSLSEKGPLSSEAIDKVRVVLDKITPSDVGLECEAQAARVWRSPQALSKKRVFPSSPAIRYRHIYECKSFSIGIFCIPASSIIPLHNHPGMSVLSKVLYGTVHVKSYDWIDKAEPLNLLKVRPAKVVRDGEMSAPCGAMVLHPEEGGNIHAFKAITPCAILDILTPPYSSEAGRHCSYFRRCPKSDPSGVLLNRTKGSEFVWLEEYQPRDSFVIRRDLYTGPALEL

SEQ ID NO: 74656 - protein, 228 aa, Setaria italica
  Transcript Sequence Number=SeqID_8682
  Gene Ontology: Mol. function=peptidase activity
  Homolog annotation: Hit_ID=B6U3W2; Match level="QueryCoverage=86%, HitCoverage=87%, E-value=2e-67, Identity=60%"; Hit description =Cysteine-type peptidase
  Pfam annotation: Domain name=OTU; Domain location=93-205; Score =143.9; E_value=4.9e-40; Accession=PF02338.11; Description=OTU-like cysteine protease
MTHMFPRGGASSSSTSMSSQRSETDDDRMIAMVLSEEYAKLDGAMAKRLTNLTSIPHVPRINTFFPTYSDATMDHYRLLDRLNAYGLFEVRVAGDGNCQFRALSDQLYRSPDYHKHVRKEIVKQLKECNSLYEGYVPMKYKQYCKKMKKSGEWGDHVTLQAAADKFAAKICLLTSFRDTCFVEIVPQYQTPQREIWLSFWSEVHYNSLYDARDIPSKYKPRKKHWLLF

SEQ ID NO: 74657 - protein, 272 aa, Setaria italica
  Transcript Sequence Number=SeqID_8683
  Gene Ontology: Mol. function=kinase activity
  Homolog annotation: Hit_ID=B6TDQ7; Match level="QueryCoverage=100%, HitCoverage=71%, E-value=1e-119, Identity=77%"; Hit description =Carbohydrate kinase, PfkB
  Pfam annotation: Domain name=PfkB; Domain location=1-232; Score= -92.9; E_value=0.053; Accession=PF00294.16; Description=pfkB family carbohydrate kinase
  Subcellular localization annotation: CTP_CleavageSite=11; ConfidenceScore=5.21e-01
VVSKVGHDFAYASAPGPARRPPLLCASPTTSFHAQFSDAASSAHAPDRELRRVRACDPIYPADLPDRRFAYGLAVGVAGEVLPETLERMIRLCRAVLVDAQALIRAFDGDGAVGHVALEDTPYARLLPRVAFLKASSEEAPYVGLETARRRYCVIVTDGRDGCRLYWDGGEARVVPFPAVQVDPTGAGDSFLAGFAAGLLWGLSATDAALLGNFFGAAAVSQVGVPTFHPKMLQAVKEILEEKTTKRSSPCINGTTFTLERSNVHDELHAAL

SEQ ID NO: 74658 - protein, 274 aa, Setaria italica
  Transcript Sequence Number=SeqID_8684
  Gene Ontology: Mol. function=zinc ion binding; Cellular component =nucleus; Biological process=regulation of transcription
  Homolog annotation: Hit_ID=C1KLC0; Match level="QueryCoverage=100%, HitCoverage=61%, E-value=2e-52, Identity=47%"; Hit description=Dof -type zinc finger protein
FPARVRAALPAAGDPLKTNGTVLSFGGHGPPPALHDLTEQVNHLQEKLLIPARKTSNPSPAVGPCSEGSSSTDDMTHGGGIKEKSSTVDKPANGAQYPAGMNGAAVWPYSCAPPPAYFSSGIAIPIYPAAPGYWGCMVPGAWSLPWPVQPPSQGLSSPSSAPSVSSSGPDSLTLGKHPREVDEGRSSAHGSGKVWAPKTIRIDDADEVARSSIWSLIGIKGDKKRDDADHAVGHKHGTVFEPKLEVNKAAKPGMITRSPFLHTNPVALTRSVTF

SEQ ID NO: 74659 - protein, 101 aa, Setaria italica
  Transcript Sequence Number=SeqID_8685
  Gene Ontology: Mol. function=DNA binding; Cellular component=nucleus; Biological process=negative regulation of specific transcription from RNA polymerase II promoter
  Homolog annotation: Hit_ID=B9S7K7; Match level="QueryCoverage=99%, HitCoverage=8%, E-value=2e-33, Identity=76%"; Hit description =Transcription factor, putative
  Pfam annotation: Domain name=JmjN; Domain location=38-71; Score=74.4; E_value=4.3e-19; Accession=PF02375.9; Description=jmjN domain
QQFPKGVLRGCPDCANCQKVIARWNPSGARRPVLDEAPVFYPTEEEFQDTLKYIESIRPMAEPYGICRIVPPASWKPPCLLKEKNIWECSKFSTRVQKVDK

SEQ ID NO: 74660 - protein, 121 aa, Setaria italica
  Transcript Sequence Number=SeqID_8686
  Homolog annotation: Hit_ID=B6UA78; Match level="QueryCoverage=99%, HitCoverage=23%, E-value=1e-43, Identity=74%"; Hit description=F-box domain containing protein
  Pfam annotation: Domain name=F-box; Domain location=3-55; Score=21.0; E_value=0.0048; Accession=PF00646.25; Description=F-box domain
MEDRLSSLPDDLLHSILRGVPLKHAARTSALSRRWVAHWIRALAASPVLDFTDSNFAYGQPPARAAATVDRCLRLHAEHGTPLHVFRVALVSPSVPGDGAFGRDVVGWIAAAVTRGAREVE

SEQ ID NO: 74661 - protein, 50 aa, Setaria italica
  Transcript Sequence Number=SeqID_8687
SIMAEIQRMSYSQYNSDWHKLNTAGKEKQDTENGFWLVEEKNCYSCKMAE

SEQ ID NO: 74662 - protein, 57 aa, Setaria italica
  Transcript Sequence Number=SeqID_8688
EYSTYESNSCPFIHITPNNENSENLYYSYAYIRTLVHSSITPNNKNIRKTYIIRTHL

SEQ ID NO: 74663 - protein, 188 aa, Setaria italica
  misc_feature (15)..(15): Xaa can be any naturally occurring amino acid
  Transcript Sequence Number=SeqID_8689
DDRTLSGEHGTLSEXNRTPSGAYGTHVPSAIKSPQVRAWTFFGWQIMKPKRRQKNYSDKELQRSATVLGYAAHAVLLIASYLDVPLRYPLRFGGSRSYVSDRLPSAETSAASAENASTNNTGSELTEYPLFMECQEDDSTRASYAIYLLHKDTEQLLNYIGAESSGRHVFGNLRELLRIVLSDEYVYR

SEQ ID NO: 74664 - protein, 51 aa, Setaria italica
  Transcript Sequence Number=SeqID_8690
RDRSLLHYTCSDQKKVNSSSSRQHQHTKELGEALYDVSLESVDNFESGDLS

SEQ ID NO: 74665 - protein, 156 aa, Setaria italica
  Transcript Sequence Number=SeqID_8691
  Gene Ontology: Mol. function=metal ion binding
  Homolog annotation: Hit_ID=Q7XQ90; Match level="QueryCoverage=100%, HitCoverage=3%, E-value=3e-64, Identity=75%"; Hit description =OSJNBa0018M05.18 protein
LVIGNDLANRLGVRSLRGSSLLDDELMRNLPCMEYAKISELLALYGESDFLLFDLMELADYCNAKKVHLIYDKREHPKQSLLQQSLGDLQGSSLTVVFEGTIMNREEVCSLQLPPPWKLRGNMLNYGLGLLSSYFVCDTLTILSGGYFYIFDPLGL

SEQ ID NO: 74666 - protein, 34 aa, Setaria italica
  Transcript Sequence Number=SeqID_8692
ETLLHEVISICGRTFSTPIYLLLHVGEFLNCPYC

SEQ ID NO: 74667 - protein, 109 aa, Setaria italica
  Transcript Sequence Number=SeqID_8693
  Subcellular localization annotation: CTP_CleavageSite=16; ConfidenceScore=5.12e-01
PLVSSSSPSPPPPRPRGRQTTHDGAIPNSNLPRRIIKETQRLLSEPGAWLFASRDFPENFGAIRSLRYRSGLVTLRICCLIPLLFFFSCVQRQGLVPRRRRRTCGTSMS

SEQ ID NO: 74668 - protein, 87 aa, Setaria italica
  Transcript Sequence Number=SeqID_8694
INVHQTAGHIIKRIKFDTSLDPFSFKCNQPMVVQVELHHEDYYQASIASCKAHSPLAYRRVHSLVCHSRTPLSLIIRPNSEAKDERD

SEQ ID NO: 74669 - protein, 117 aa, Setaria italica
  Transcript Sequence Number=SeqID_8695
  Gene Ontology: Mol. function=small conjugating protein ligase activity; Cellular component=UBC13-MMS2 complex; Biological process =ubiquitin-dependent protein catabolic process
  Homolog annotation: Hit_ID=Q94A97; Match level="QueryCoverage=60%, HitCoverage=46%, E-value=7e-33, Identity=95%"; Hit description =Ubiquitin carrier protein E2 35
  Pfam annotation: Domain name=UQ_con; Domain location=9-117; Score =21.6; E_value=1e-06; Accession=PF00179.18; Description=Ubiquitin -conjugating enzyme
MANSNLPRRIIKETQRLLSEPAPGISASPSEENMRYFNVMILGPAQSPYEGGVFKLELLLPEEYPMAAPKVTTQFLNAYKIIVFYTLKLIMLVYNFILFIPLSFDMICGDRFNYKSD

SEQ ID NO: 74670 - protein, 83 aa, Setaria italica
  Transcript Sequence Number=SeqID_8696
  Gene Ontology: Mol. function=small conjugating protein ligase activity; Cellular component=UBC13-MMS2 complex; Biological process =ubiquitin-dependent protein catabolic process
  Homolog annotation: Hit_ID=C0P584; Match level="QueryCoverage=78%, HitCoverage=58%, E-value=4e-29, Identity=96%"; Hit description =Ubiquitin carrier protein
  Pfam annotation: Domain name=UQ_con; Domain location=1-68; Score =18.9; E_value=1.6e-06; Accession=PF00179.18; Description=Ubiquitin -conjugating enzyme
HPNIDKLGRICLDILKDKWSPALQIRTVLLSIQALLSAPNPDDPLSDNIAKHWKANEAEAVETGKLKLTNQPIVVFLLSLWLP

SEQ ID NO: 74671 - protein, 74 aa, Setaria italica
  misc_feature (12)..(13): Xaa can be any naturally occurring amino acid
  misc_feature (16)..(16): Xaa can be any naturally occurring amino acid
  Transcript Sequence Number=SeqID_8697
  Gene Ontology: Mol. function=small conjugating protein ligase activity; Cellular component=UBC13-MMS2 complex; Biological process =ubiquitin-dependent protein catabolic process
  Homolog annotation: Hit_ID=C0P584; Match level="QueryCoverage=98%, HitCoverage=65%, E-value=1e-27, Identity=83%"; Hit description =Ubiquitin carrier protein
  Pfam annotation: Domain name=UQ_con; Domain location=1-67; Score= -27.2; E_value=0.0036; Accession=PF00179.18; Description=Ubiquitin -conjugating enzyme
PNIDKLGRICLXXLKXGSSLPFQIRTVLLSIQALLSAPNPDDPLADNVAKHWKSNETEAVETAKEWTRLYASGE

SEQ ID NO: 74672 - protein, 153 aa, Setaria italica
  Transcript Sequence Number=SeqID_8698
  Gene Ontology: Mol. function=small conjugating protein ligase activity; Cellular component=UBC13-MMS2 complex; Biological process =embryonic development ending in birth or egg hatching
  Homolog annotation: Hit_ID=Q94A97; Match level="QueryCoverage=100%, HitCoverage=100%, E-value=3e-82, Identity=96%"; Hit description =Ubiquitin carrier protein E2 35
  Pfam annotation: Domain name=UQ_con; Domain location=9-146; Score =255.2; E_value=1.6e-73; Accession=PF00179.18; Description=Ubiquitin -conjugating enzyme
MAHSNLPRRIIKETQRLLSEPAPGISASPTEENMRYFNVMILGPSQSPYEGGVFKLELFLPEEYPMAAPKVRFLTKIYHPNIDKLGRICLDILKDKWSPALQIRTVLLSIQALLSAPNPDDPLSDNIAKHWKSNEAEAVETAKEWTRLYASGA

SEQ ID NO: 74673 - protein, 55 aa, Setaria italica
  Transcript Sequence Number=SeqID_8699
  Gene Ontology: Mol. function=small conjugating protein ligase activity; Biological process=regulation of protein metabolic process
  Homolog annotation: Hit_ID=Q94A97; Match level="QueryCoverage=69%, HitCoverage=24%, E-value=1e-09, Identity=78%"; Hit description =Ubiquitin carrier protein E2 35
RKGLGNNCLLNGLAWFGLFVRAAPGISASPSEENMRYFNVMILGPAQSPYEGASF

SEQ ID NO: 74674 - protein, 243 aa, Setaria italica
  Transcript Sequence Number=SeqID_8700
  Gene Ontology: Mol. function=binding
  Homolog annotation: Hit_ID=B6T3Y3; Match level="QueryCoverage=100%, HitCoverage=64%, E-value=6e-97, Identity=72%"; Hit description =Tetratricopeptide repeat domain 4
ASFCRRGLEQDPANEELKKLLSQVDAKLSEQERQRAKVAQAIAAAKDLAASVEKRGVKLGEPAYQELTGVKKPKLDEQGVLHWPVLLLYPEVMSSDFIEDFPETDTFSPHLDVMFSESSPPLPWDENHAYTRYTIELYYQGGFGKPLSKSERLRYLLEGTVDSKSLPDGLLDGEDEENDTSQSSTIVLSAEGSSKWIKVKEGKTLQEVLQDKDFIIPAIPVFFVVSRKTTFYRDFNAGNWSLP

SEQ ID NO: 74675 - protein, 75 aa, Setaria italica
  Transcript Sequence Number=SeqID_8701
RTLILKTLQNQCRPSGSEALPRGIVQDMSNFEMESLGGNPDRRKDRRLSKSLLAIPVGIKQKSVVDKLVSKFPAA

SEQ ID NO: 74676 - protein, 397 aa, Setaria italica
  Transcript Sequence Number=SeqID_8702
  Homolog annotation: Hit_ID=B4FAK0; Match level="QueryCoverage=81%, HitCoverage=88%, E-value=4e-86, Identity=48%"; Hit description =Lysine ketoglutarate reductase trans-splicing related 1
  Pfam annotation: Domain name=DUF707; Domain location=78-383; Score =702.0; E_value=5e-208; Accession=PF05212.4; Description=Protein of unknown function (DUF707)
MGPISNDTSHKRFFSIAPRAALIFFVLIFVAGAIFTLDHKENLSILQLQRKEVFATEEIRPPATSELHAEPTEEPNICENQCRPSGSEALPRGIVQDMSNFEMESLGGNPDRRKDRRLSKSLLAIPVGIKQKSVVDKLVSKFPAANFIVMLFHYDGMVDGWRDLKWSDRAIHVAVRDQTKWWFAKRFLHPDLVAEYEYIFLWDEDIEVDSFDPLKYLSIVRREGLEISQPALDRRSLIHHRLTARARKGDVHRRFYKTNGHGRCYGNSTGPPCTGWVEMMVPVFSRAAWRCAWQMIQNDLIYAWGMDYKLGYCAQGDRWRNVGVVDSQYVLHRGIPTLGDGGKATVTASTSTSSATDRLAVRQRSYTELQVFNRRWKEAVAEDGCWTDPYPNPATKG

SEQ ID NO: 74677 - protein, 251 aa, Setaria italica
  Transcript Sequence Number=SeqID_8703
  Gene Ontology: Mol. function=inositol or phosphatidylinositol phosphatase activity; Cellular component=ribosome; Biological process=abscisic acid mediated signaling
  Homolog annotation: Hit_ID=Q94G04; Match level="QueryCoverage=99%, HitCoverage=70%, E-value=1e-109, Identity=76%"; Hit description =Diphosphonucleotide phosphatase 1
  Pfam annotation: Domain name=Inositol_P; Domain location=1-248; Score= 145.2; E_value=2e-40; Accession=PF00459.17; Description=Inositol monophosphatase family
VNETIANDDSYNMSLSKEDVLAALDGGKSEGGLSGRHWILDPIDGTKGFIRGDQYAVALGLLDEGKVVLGVLGCPNLPLKSTNKHNGSSSGDQVGSLFFATIGCGAEVEALEGSEPQKITICSISNPVDASFFESLEHSKRDLTSTIAEKLGVQAPPVRMDSQAKYGALAQGDGAIYLRFSQKGYIETVWDHAAGSIIVTEAGGMVKDASGNDLDFSKGRYLDRDRGIIATNRYLMPMVLKAVQEAIKEEQ

SEQ ID NO: 74678 - protein, 144 aa, Setaria italica
  Transcript Sequence Number=SeqID_8704
  Gene Ontology: Mol. function=triacylglycerol lipase activity; Biological process=lipid metabolic process
  Homolog annotation: Hit_ID=B6SY41; Match level="QueryCoverage=99%, HitCoverage=26%, E-value=4e-72, Identity=91%"; Hit description =Triacylglycerol lipase like protein
  Pfam annotation: Domain name=Lipase_3; Domain location=57-143; Score=- 5.9; E_value=0.0017; Accession=PF01764.17; Description=Lipase (class 3)
SYRPTRSLFATSALSMPPWAKRPNTPEWLTQQSNWIGYVAVCESEREVARMGRRDIAIVLRGTATCLEWAENLRASLVPLDGESSDGADAGAEEPKVARGFLSLYKTAGEKVKSLSEEVMDEVRRLMDKYKGEELSITVIGHSP

SEQ ID NO: 74679 - protein, 312 aa, Setaria italica
  Transcript Sequence Number=SeqID_8705
  Gene Ontology: Mol. function=triacylglycerol lipase activity; Biological process=lipid metabolic process
  Homolog annotation: Hit_ID=B6SY41; Match level="QueryCoverage=98%, HitCoverage=64%, E-value=1e-159, Identity=81%"; Hit description =Triacylglycerol lipase like protein
  Pfam annotation: Domain name=Lipase_3; Domain location=90-223; Score =113.5; E_value=7.3e-31; Accession=PF01764.17; Description=Lipase (class 3)
GEGGWAGLLDPLDSDLRRELLRYGDFVQAAYQAFHSLPTASARHRGLMLPDRSYRPTRSLFATSALSMPPWAKRPNTPEWLTQQSNWIGYVAVCESSDGADAGAEEPKVARGFLSLYKTAGEKVKSLSEEVMDEVRRLMDKYKGEELSITVIGHSLGAALALLVADEVATSIPDAPPVAVVSFGGPKVGNAAFVDRLGSSGKVNVLRIVNAGDVVTKVPGVAPRLPHKKEQYHHVGAELRIDSKNSPCLRPDAGPACRHDLEAYLHLIDGFTGTGRPFRHDARRSVIRLLQLQRGNVKKEYVNRARETTDVR

SEQ ID NO: 74680 - protein, 130 aa, Setaria italica
  Transcript Sequence Number=SeqID_8706
  Gene Ontology: Mol. function=DNA binding; Cellular component=nucleus
  Homolog annotation: Hit_ID=Q7XWP5; Match level="QueryCoverage=98%, HitCoverage=25%, E-value=4e-50, Identity=75%"; Hit description =OSJNBa0072D08.3 protein
  Pfam annotation: Domain name=MBD; Domain location=38-107; Score=0.4; E_value=0.039; Accession=PF01429.11; Description=Methyl-CpG binding domain
CYTSPVSGCTFTSKMETLDYLFSGMEERMLESQESAEDNELLGSHTWLPGGWLIEVRAGGKKMNKMYKFYFHPPTGMRFLSKAEVLHYVNEGKISASDMDVLCDTRTDDNILAHVEFNPDGLPDGWVKET

SEQ ID NO: 74681 - protein, 197 aa, Setaria italica
  Transcript Sequence Number=SeqID_8707
  Gene Ontology: Mol. function=DNA binding; Cellular component=nucleus; Biological process=regulation of transcription, DNA-dependent
  Homolog annotation: Hit_ID=Q7XWP5; Match level="QueryCoverage=97%, HitCoverage=46%, E-value=7e-74, Identity=60%"; Hit description =OSJNBa0072D08.3 protein
VCRDDGGSIYRCYTSPVSGCTFTSKMETLDYLFSGMEERMLESQESAEDNELLGSHTWLPGGWLIEVRAGGKKMNKMYKILAHVEFNPDGLPDGWVKETIFRNCNDGIRKDPYYTDPISRRVFRTLKSVLSYLGTGEISKHAYLPRRNVIDMYSFDKCVDLPQSMLKRLRAEGQTKQKSRRALVLYKELPNNQTSNH

SEQ ID NO: 74682 - protein, 528 aa, Setaria italica
  Transcript Sequence Number=SeqID_8708
  Gene Ontology: Mol. function=DNA binding; Cellular component=nucleus; Biological process=regulation of transcription, DNA-dependent
  Homolog annotation: Hit_ID=Q7XWP5; Match level="QueryCoverage=85%, HitCoverage=100%, E-value=1e-127, Identity=49%"; Hit description =OSJNBa0072D08.3 protein
  Pfam annotation: Domain name=MBD; Domain location=171-240; Score=0.4; E_value=0.039; Accession=PF01429.11; Description=Methyl-CpG binding domain
  Subcellular localization annotation: CTP_CleavageSite=16; ConfidenceScore=5.44e-01
MSSAVGPAAHSMVVTRRSARRGGNGPLPAGGAPSEPAPDAPTPPSVPGRRSRDALPTGRPGCAREKGSSVISNGYTLKQPVEAHKQERQGKETLVEELDGIDEDLRSLEEPPGWLPDGWIMEVCRDDGGSIYRCYTSPVSGCTFTSKMETLDYLFSGMEERMLESQESAEDNELLGSHTWLPGGWLIEVRAGGKKMNKMYKFYFHPPTGMRFLSKAEVLHYVNEGKISASDMDVLCDTRTDDNILAHVEFNPDGLPDGWVKETIFRNCNDGIRKDPYYTDPISRRVFRTLKSVLSYLGTGEISKHAYLPRRNVIDMYSFDKCVDLPQSMLKRLRAEGQTKQKSRRALVLYKELPNNQTSNHSEGGTSAGLTPKSDLKRNKFGTEKATATNENGSETTKRRRGRPKKILKQTNESISDCDKRHKEAKHNEVKEEVDICDEEDMPNGKTKKHTEMQKRTPVIQEVGNNNNIAESNSLKRKENRSDLVASPGLQNQENGRSTEAGKKATCSSVHKFYKRRCSNQTVSSNKG

SEQ ID NO: 74683 - protein, 49 aa, Setaria italica
  Transcript Sequence Number=SeqID_8709
MMSKPQQSLIIRSMWKQKRRSWNPSLKEDTFQQCTHISVQVYIQLERNS

SEQ ID NO: 74684 - protein, 311 aa, Setaria italica
  misc_feature (30)..(30): Xaa can be any naturally occurring amino acid
  Transcript Sequence Number=SeqID_8710
  Gene Ontology: Mol. function=hydrolase activity, acting on ester bonds; Cellular component=intrinsic to endoplasmic reticulum membrane; Biological process=intracellular protein transport
  Homolog annotation: Hit_ID=Q7NLY3; Match level="QueryCoverage=73%, HitCoverage=81%, E-value=1e-17, Identity=29%"; Hit description =Glr0986 protein
  Pfam annotation: Domain name=PGAP1; Domain location=25-254; Score= -84.0; E_value=0.033; Accession=PF07819.5; Description=PGAP1-like protein
  Subcellular localization annotation: CTP_CleavageSite=33; ConfidenceScore=5.08e-01
MLPLLSPPRLGAAAANGNASVGGTATPRVXVVVAQGLGNNTGDYARLAAALRDDHGLPAAVVARVTRPDWLRNAAGLFDANYWRGTLRPRPVLDWYLKRVDESVSEARELCASDGKISLIGHSAGGWLARVYMEEFDASDISLLLTLGTPHLPPPKGVSGVIDQTRGLLNYVEKNCAPAVYTPELRYVCIAGRYIQGAPLLGNSAVASDEVLAVDTPSEGGEAVIISTKDKSTPSSATWRARFVGQGYKQVCGRADVWGDGVVPEMAAHLEGALNISFDGVYHSPVGADDEQRPWYGSPAILKQWVHHLLS

SEQ ID NO: 74685 - protein, 70 aa, Setaria italica
  misc_feature (7)..(7): Xaa can be any naturally occurring amino acid
  Transcript Sequence Number=SeqID_8711
AGVLLDXSVAGAEQRFAAASTDASVGEQQEEEDKGYWSSILNMVNSSMSSSLTSEAVTDPAMYLPAVPEF

SEQ ID NO: 74686 - protein, 84 aa, Setaria italica
  Transcript Sequence Number=SeqID_8712
LALKEGLLVGISSGAAAAAAITLAKRPENAGKLFVVSVTSPPHEFLALVGLQLFQLHGSVMEIYLIVNETQMNTSTLHLNIIAL

SEQ ID NO: 74687 - protein, 56 aa, Setaria italica
  Transcript Sequence Number=SeqID_8713
  Gene Ontology: Mol. function=pyridoxal phosphate binding; Cellular component=cytoplasm; Biological process=cysteine biosynthetic process from serine
  Homolog annotation: Hit_ID=P80608; Match level="QueryCoverage=73%, HitCoverage=12%, E-value=3e-10, Identity=75%"; Hit description =Cysteine synthase
MLLVLDSFRLNAHNAGPHKIQGIGAGFIPGVLDVDLIDETLQVCSPLLNWIVERTY

SEQ ID NO: 74688 - protein, 76 aa, Setaria italica
  Transcript Sequence Number=SeqID_8714
  Gene Ontology: Mol. function=pyridoxal phosphate binding; Cellular component=cytoplasm; Biological process=cysteine biosynthetic process from serine
  Homolog annotation: Hit_ID=P80608; Match level="QueryCoverage=68%, HitCoverage=15%, E-value=2e-19, Identity=92%"; Hit description =Cysteine synthase
MGEASSPSIAKDVTELIGNTPLVYLNKVTNGCVGRVAAKLESMEPCSSVKDRWALLFFYKAFSLLILFTVQRVMDY

SEQ ID NO: 74689 - protein, 119 aa, Setaria italica
  Transcript Sequence Number=SeqID_8715
  Gene Ontology: Mol. function=pyridoxal phosphate binding; Cellular component=cytoplasm; Biological process=cysteine biosynthetic process from serine
  Homolog annotation: Hit_ID=P80608; Match level="QueryCoverage=96%, HitCoverage=35%, E-value=5e-48, Identity=85%"; Hit description =Cysteine synthase
MLLVLDSFRLNAHNAGPHKIQGIGAGFIPGVLDVDLIDETLQVSSDEAIETAKALALKEGLLVGISSGAAAAAAITLAKRPENAGKLFVVVFPSFGERYLSSVLFQSIKKEAESMVVEP

SEQ ID NO: 74690 - protein, 738 aa, Setaria italica
  Transcript Sequence Number=SeqID_8716
  Gene Ontology: Mol. function=protein binding; Cellular component =Golgi apparatus
  Homolog annotation: Hit_ID=Q84VF9; Match level="QueryCoverage=66%, HitCoverage=98%, E-value=0.0, Identity=72%"; Hit description=Myosin heavy chain-like protein (Fragment)
  Pfam annotation: Domain name=Cast; Domain location=51-738; Score= -310.6; E_value=0.1; Accession=PF10174.1; Description=RIM-binding protein of the cytomatrix
  Pfam annotation: Domain name=Filament; Domain location=87-328; Score=- 177.3; E_value=0.014; Accession=PF00038.13; Description=Intermediate filament protein
  Pfam annotation: Domain name=GRIP; Domain location=665-707; Score =69.8; E_value=1e-17; Accession=PF01465.12; Description=GRIP domain
  Pfam annotation: Domain name=HrpB7; Domain location=287-440; Score= -36.2; E_value=0.096; Accession=PF09486.2; Description=Bacterial type III secretion protein
  Pfam annotation: Domain name=Pox_A_type_inc; Domain location=180-202; Score=8.9; E_value=4.8; Accession=PF04508.4; Description=Viral A-type inclusion protein repeat
  Pfam annotation: Domain name=Pox_A_type_inc; Domain location=265-287; Score=0.2; E_value=87; Accession=PF04508.4; Description=Viral A-type inclusion protein repeat
  Pfam annotation: Domain name=Pox_A_type_inc; Domain location=301-323; Score=2.1; E_value=46; Accession=PF04508.4; Description=Viral A-type inclusion protein repeat
  Pfam annotation: Domain name=Pox_A_type_inc; Domain location=379-401; Score=2.9; E_value=35; Accession=PF04508.4; Description=Viral A-type inclusion protein repeat
  Pfam annotation: Domain name=Pox_A_type_inc; Domain location=411-431; Score=3.2; E_value=32; Accession=PF04508.4; Description=Viral A-type inclusion protein repeat
  Pfam annotation: Domain name=Pox_A_type_inc; Domain location=618-640; Score=2.8; E_value=37; Accession=PF04508.4; Description=Viral A-type inclusion protein repeat
  Pfam module annotation: Pfam domain module=Cast::Filament::GRIP::HrpB7 ::Pox_A_type_inc::Pox_A_type_inc::Pox_A_type_inc::Pox_A_type_inc::Pox_ A_type_inc::Pox_A_type_inc; Domain location=51-738::87-328::665 -707::287-440::...
  Pfam module annotation: Domain location=180-202::265-287::301 -323::379-401::411-431::618-640
DDGTQPTKKEKEELAREVMELGLQNEYLKSQIAGARPAGGADEGSELVRGLKEQVEKLTREVQEQRLTREATEKALEHVNVAYAEADGKVQGLTAKLAQAEQKMEKELKERDDKYVELDTKFQRLHKRAKQRIQDIQKEKDDLEARFNEVNQKAEQAASLQLAAQQELERARQQASEALRSMDAERQQLRAVNSKLRANLDETRLTLEARNNSLEKLQQSVLEKEQLLEKVQGSLQSAEDKRMTIISELTAKHQKQLESLQAQLAEVSAERTKASETIKSLQAVLTEKDSEIAEIEAASTGEAARLRATLEEVKGELAHLKDEHEKERQSWEATCESLRSKLEASENARLKSEIESTKLKSQLELELSTQNQLLQTKDSDLMAAKHEISRLESEFSAYKVRAHALLQKKDAEINAAKSSDLVKEHEEAIREAEKEVAAALAERDKAIHDLQEAQSRHDEEIEARDMALADAEKKLKNVMKKLDSVTSNFIVEKESWEKNLANVEENWRLKCESLKAQTNGHVDDELQKNLGELTLRYEKLKEEHQSFRDIADRMIEDKEQEIAKLLEENRDLHLSLEAKPEVSNTDHQSQGPVKDTMSVELAEQQILLLARQQAQREEELAQSQRHILALQQEIEELERENRLHDQQEAMLKTELRNMERSQKREGIDMTYLKNVILKLLETGEVGALLPVVGTLLQFSPDELKKCQQGVLSSVASSQAAAVSDGATTPNSFFSRFSF

SEQ ID NO: 74691 - protein, 326 aa, Setaria italica
  Transcript Sequence Number=SeqID_8717
  Gene Ontology: Mol. function=pyridoxal phosphate binding; Cellular component=cytoplasm; Biological process=cysteine biosynthetic process from serine
  Homolog annotation: Hit_ID=P80608; Match level="QueryCoverage=100%, HitCoverage=100%, E-value=1e-167, Identity=91%"; Hit description =Cysteine synthase
  Pfam annotation: Domain name=ADH_zinc_N; Domain location=69-214; Score=-24.3; E_value=0.081; Accession=PF00107.18; Description=Zinc -binding dehydrogenase
  Pfam annotation: Domain name=PALP; Domain location=13-301; Score =463.6; E_value=3e-136; Accession=PF00291.17; Description=Pyridoxal -phosphate dependent enzyme
  Pfam module annotation: Pfam domain module=ADH_zinc_N::PALP; Domain location=69-214::13-301
MGEASSPSIAKDVTELIGNTPLVYLNKVTNGCVGRVAAKLESMEPCSSVKDRIGYSMITDAEEKGLITPGTSVLIEPTSGNTGIGLAFMAAAKGYKLILTMPASMSMERRIILKAFGAELVLTDPLLGMKGAVKKAEEIQAKTPNSYILQQFENPANPKIHYETTGPEIWKATAGKIDGLVSGIGTGGTITGTGRYLREQNPNVKLYGVEPVESAILNGGKPGPHKIQGIGAGFIPGVLDVDLIDETLQVSSDEAIETAKALALKEGLLVGISSGAAAAAAITLAKRPENAGKLFVVVFPSFGERYLSSVLFQSIKKEAESMVVEP

SEQ ID NO: 74692 - protein, 69 aa, Setaria italica
  Transcript Sequence Number=SeqID_8718
GSLSPAATGLLLQTLVTGLPLEKYGGKRETNRIICYSTFFFGFLPVLEREGIERMQCGGLLFGPPTDGR

SEQ ID NO: 74693 - protein, 59 aa, Setaria italica
  Transcript Sequence Number=SeqID_8719
KYQQYWLRDQLSVEIRPYIAGYQLSVQICNNVQIRQDIVISIFAFTNTGRHILGIPIIS

SEQ ID NO: 74694 - protein, 113 aa, Setaria italica
  Transcript Sequence Number=SeqID_8720
  Subcellular localization annotation: CTP_CleavageSite=55; ConfidenceScore=5.43e-01
QMVILRLWVLSSNNFSSSGSKPATESLQYSVKVGSLEGSKQGPSIAMLRKEVRRRAAAGRAAEGITSVCNLLSKDFNPFSPPTISVAPVHPAFMCPGASAPITHISLPAIVYQ

SEQ ID NO: 74695 - protein, 254 aa, Setaria italica
  Transcript Sequence Number=SeqID_8721
  Gene Ontology: Mol. function=nucleoside-triphosphatase activity; Cellular component=chloroplast; Biological process=transport
  Homolog annotation: Hit_ID=Q9AT00; Match level="QueryCoverage=99%, HitCoverage=73%, E-value=1e-125, Identity=86%"; Hit description =Protein TRIGALACTOSYLDIACYLGLYCEROL 3, chloroplastic
  Pfam annotation: Domain name=ABC_tran; Domain location=18-220; Score =138.6; E_value=2e-38; Accession=PF00005.19; Description=ABC transporter
SFGDKHVLRGVSFKIRHGEAVGIIGPSGTGKSTILKVMAGLLAPDKGDVIICGKKRHGLVSDEDIEGLRIGLVFQSAALFDSLTVRENVGFLLYENSSLPEDRIGKLVTETLAAVGLKGVEDRMPSELSGGMKKRVALARSIIFDDTKDVIEPEVLLYDEPTAGLDPIASTVVEDLIRSVHMTGRDAVGKPGKIASYVVVTHQHSTIRRAVDRLLFLHEGKVVWEGMTHEFTTSTNPIVQQFASGSLDGPIRYF

SEQ ID NO: 74696 - protein, 61 aa, Setaria italica
  Transcript Sequence Number=SeqID_8722
  Homolog annotation: Hit_ID=B6TEH4; Match level="QueryCoverage=95%, HitCoverage=19%, E-value=1e-16, Identity=81%"; Hit description =Gibberellin 20 oxidase 2
MAVEIPVVDLRLAGAAPEESARLRAACERLGCVRLTGHGVPLELLAEMKAAVRALFDLPDD

SEQ ID NO: 74697 - protein, 66 aa, Setaria italica
  Transcript Sequence Number=SeqID_8723
  Gene Ontology: Mol. function=transferase activity, transferring nitrogenous groups; Biological process=cellular amino acid and derivative metabolic process
  Homolog annotation: Hit_ID=A9CM06; Match level="QueryCoverage=60%, HitCoverage=8%, E-value=9e-17, Identity=92%"; Hit description =Nicotianamine aminotransferase
VSLVKVFLICFCLLLVVSLVILLFFLEGIHDDIDFCCKLAKEESVILCPGSVLGMENWVRITFAID

SEQ ID NO: 74698 - protein, 385 aa, Setaria italica
  misc_feature (10)..(10): Xaa can be any naturally occurring amino acid
  misc_feature (43)..(43): Xaa can be any naturally occurring amino acid
  Transcript Sequence Number=SeqID_8724
  Gene Ontology: Mol. function=transferase activity, transferring nitrogenous groups; Biological process=cellular amino acid and derivative metabolic process
  Homolog annotation: Hit_ID=A9CM06; Match level="QueryCoverage=99%, HitCoverage=77%, E-value=0.0, Identity=84%"; Hit description =Nicotianamine aminotransferase
  Pfam annotation: Domain name=Aminotran_1_2; Domain location=1-369; Score=148.0; E_value=2.8e-41; Accession=PF00155.13; Description =Aminotransferase class I and II
  Pfam annotation: Domain name=Beta_elim_lyase; Domain location=10-262; Score=-93.9; E_value=0.00048; Accession=PF01212.13; Description=Beta -eliminating lyase
  Pfam module annotation: Pfam domain module=Aminotran_1_2::Beta_elim _lyase; Domain location=1-369::10-262
RPVLPLAYGXTPSTFRAFRTAAEAEAAVAAALRTGKLNCYPAXGVGLPDARRALAKHLSSDLPYELSSDDIFLTAGGTQAIEVVISVLAQPGTNILLPRPGYPNYEARAALNNLEVRHFDLIPERGWEIDIDSLESIADKNTTAMVIINPNNPCGSVYTREHLAKVAEVARKLGILVIADEVYGNLVFGDSPFIPMGVFGHIAPVLTIGSLSKRWIVPGWRLGWVAACDPKKILQETKILTSITNFLNVSTDPATFIQGALPQILENTKEEFFKRIIGLLEETSEICYREIKDIKCITCPHKPEGSMFVMVKLNLYLLEGIHDDIDFCCKLAKEESVILCPGSVLGMENWVRITFAIDSSSLLDGLERIKSFCQRHKKKNLLSGF

SEQ ID NO: 74699 - protein, 429 aa, Setaria italica
  Transcript Sequence Number=SeqID_8725
  Gene Ontology: Mol. function=oxidoreductase activity, acting on sulfur group of donors, disulfide as acceptor; Cellular component =endoplasmic reticulum membrane; Biological process=protein thiol -disulfide exchange
  Homolog annotation: Hit_ID=B6T402; Match level="QueryCoverage=95%, HitCoverage=86%, E-value=0.0, Identity=93%"; Hit description =Endoplasmic oxidoreductin-1
  Pfam annotation: Domain name=ERO1; Domain location=46-397; Score =666.4; E_value=2.6e-197; Accession=PF04137.7; Description =Endoplasmic Reticulum Oxidoreductin 1 (ERO1)
AVSSRSFPGIPSSSQGGCGCPAARKYTGMVEDCCCEYETVDSINEEVLHPILQELVKLPFFRYFKVKLWCDCPFWPDDGMCQLRDCTVCECPDNEFPEPFKKPYSGLSPDNMICQEGKPQAAVDKTLDSKVFKGWVETDNPWTSDDETDFNEMTYVNLQLNPERYTGYTGDSARRIWDSIYKENCPKYPSEELCHEKKALYKLISGLHSSISVHIAYDYLVDKSTNSWGQNLPLLYDRVLKYPERVQNLYFTYLFVLRAVTKAADYLEQAEYNTGNPEDDLKTQSLVKQLLYHPKLRSACPKPFDEAKLWQGENGPELKQEIQKQFRNISAIMDCVGCEKCRLWGKLQVLGLGTALKILFSVDGDNHLNQPLQLQRNEVIALFNLLNRLSESVKFVHEKGSSIEEVIKEQRPPTVQKGASKPNLKLDFL

SEQ ID NO: 74700 - protein, 143 aa, Setaria italica
  Transcript Sequence Number=SeqID_8726
NNDIPGWNSPCFDPGNQEYFTSGWHGPPYCPARPEDVDYSRNVNNLPFRGYDERGNFMHGEYRAMGFDPSSIYPPFQVSNNGTYQPHPDVSVEGRGAAYGGRNREYGARSNYTFALGPQRPAAGSVMERYAPRLEETNNRPRG

SEQ ID NO: 74701 - protein, 73 aa, Setaria italica
  Transcript Sequence Number=SeqID_8727
  Subcellular localization annotation: CTP_CleavageSite=46; ConfidenceScore=5.41e-01
LMAQSITKGSAQRVFLLLNLIPNANNIRGPKNAARRGRGSQPSGKRETARGEPRFASPPSPLLPPKHELPPET

SEQ ID NO: 74702 - protein, 97 aa, Setaria italica
  Transcript Sequence Number=SeqID_8728
KRTNWRLSFRKPSAPALLDYVNISPFSLPARRTKELRALTGWRYYISLFLELSDIAMPFVRAAVSKVSAAVSYFWVSMIGRSLGLIFSGIRQSLGWI

SEQ ID NO: 74703 - protein, 468 aa, Setaria italica
  Transcript Sequence Number=SeqID_8729
MAECSLATLRGQCRGRWTQSNSKLYPSSVSIGMPKRNYDHKIHLPFQSNAAREPKSAASSHFGFHGRGHRVETSVECFRLQSLMDSESMVSPSLMLISDEALLTISMIFAYLAGVVPSGNTSPRARNQGVNQHITEPSSSDSGRNAGLDPRDMWSEVRAKLSEALQANVQDASLDSREDELMSDRKNYPLSMLAIHGGPRLRLLLITFQLLEMEVRNISGSSEIVDGIRWLQVSTALIDGLIEPAFVKWIEEEQALENGQINEKLMKMISSKIREDDRIFKRFNRFGKSELYLDLIFFLRFGSARSDSCFDAKFLAEHGARILEDLVISLADVIASIYLELMSVDGDMSTEVVSSSLALCSLSTRELQKLRNEVAINWWLHQYFESVVSMYEDRFELYVLCRKQGEKPADNQAKRTNWRLAFRKPSAPALLDYVNISPFSLPARRTKELRALTGWYARASSDLCYLFH

SEQ ID NO: 74704 - protein, 72 aa, Setaria italica
  misc_feature (60)..(60): Xaa can be any naturally occurring amino acid
  Transcript Sequence Number=SeqID_8730
SYAEVTEEEAEEKLQDTIKERFSSFGEDYHAVDILLAEIDVYELFAFKHCVGRRVQLSLXRLDERMRDLKNE

SEQ ID NO: 74705 - protein, 68 aa, Setaria italica
  Transcript Sequence Number=SeqID_8731
TPESARLSATNEQGRVLVNMHMDYRRCWSMTREFQGSKHRKQLQLQDMYCIRGSASYNIAALPRCSRA

SEQ ID NO: 74706 - protein, 114 aa, Setaria italica
  Transcript Sequence Number=SeqID_8732
  Gene Ontology: Mol. function=transcription factor activity; Cellular component=transcription factor complex; Biological process =regulation of transcription, DNA-dependent
  Homolog annotation: Hit_ID=Q27W79; Match level="QueryCoverage=99%, HitCoverage=26%, E-value=2e-32, Identity=70%"; Hit description =Transcription regulator of the cell cycle TaE2Fe
  Pfam annotation: Domain name=E2F_TDP; Domain location=1-43; Score =37.9; E_value=3.9e-08; Accession=PF02319.12; Description =Transcription factor E2Fdimerisation partner (TDP)
SIGLDEAAKSLGVERRRIYDIVNVLESVGILVRKAKNRYTWIGFDGVPMALRELKERALREKSGLAPLQTEQQSASTMSDDEDDDKLGNPDGDIENEKLSQTMDNPSDKPGAPR

SEQ ID NO: 74707 - protein, 262 aa, Setaria italica
  Transcript Sequence Number=SeqID_8733
  Gene Ontology: Mol. function=structural constituent of ribosome; Cellular component=ribonucleoprotein complex; Biological process =translation
  Homolog annotation: Hit_ID=Q6ASY6; Match level="QueryCoverage=68%, HitCoverage=47%, E-value=1e-49, Identity=61%"; Hit description=Small subunit ribosomal protein, putative
  Pfam annotation: Domain name=Ribosomal_S11; Domain location=143-261; Score=37.4; E_value=5.8e-08; Accession=PF00411.11; Description =Ribosomal protein S11
MAIFSSAHLALRRSLAAAPRAASLGEGLRQASDGYVTRRLLHGQLLPRCFTSDAFGPNKNFPPSGRDFAAEWKPHQNLNEFNFVRQNLRSNTQVNFNNADNGGTMSKTAGGEKPSNLGGRFQFPASRMFSEREQYSQKKRDFIHVLLKKNKTFVTVTDASGNKKTGASAGCLEDRKGRSRLSRYAAEATAEHVGRSARKMGLRSVVMKVKGISFFKKKKKVILGFREGFRGERVRDQSPIMYIHDVTQLPHNGCRLPKQRRV

SEQ ID NO: 74708 - protein, 49 aa, Setaria italica
  Transcript Sequence Number=SeqID_8734
  Subcellular localization annotation: CTP_CleavageSite=23; ConfidenceScore=5.09e-01
MAGVSSSSVVGLKPAAAVPQAASAAKRVQVAPKERAARPSSAALLGLAA

SEQ ID NO: 74709 - protein, 136 aa, Setaria italica
  Transcript Sequence Number=SeqID_8735
  Homolog annotation: Hit_ID=B9T1Q6; Match level="QueryCoverage=83%, HitCoverage=49%, E-value=7e-41, Identity=71%"; Hit description =Protein transport protein SFT2, putative
  Subcellular localization annotation: CTP_CleavageSite=49; ConfidenceScore=5.20e-01
MQWFSSGSGPSSAASSSSSSQPSLLADWNSYAAARSSEDAGDGFGIDIEAAVRSANDRVAGTFGVVSKGVKGLPGSFKSTTSSVPSGRSLMYFGLFLASGVFLVFIAFTIFLPVMVIMPQKFAICFTAGCAFIIGS

SEQ ID NO: 74710 - protein, 52 aa, Setaria italica
  Transcript Sequence Number=SeqID_8736
MEYGYPYNGCGGNKEKRPPLKRGQLKLQIARTLLGGLVVPAGSKNRDRSFGR

SEQ ID NO: 74711 - protein, 75 aa, Setaria italica
  Transcript Sequence Number=SeqID_8737
  Subcellular localization annotation: CTP_CleavageSite=56; ConfidenceScore=5.20e-01
HNTLSLSLSLSLSLSIAASAVPPPTSRDNYEGPNRERALVITMPSNQLLVLGKIPAAFALGSAQAAGGVCAVFFF

SEQ ID NO: 74712 - protein, 74 aa, Setaria italica
  Transcript Sequence Number=SeqID_8738
ASDSARRSLRAHGLHVPPWRKTRYMLAKWLGPYKRSTTTSPAAMPMPGAAGLDVKCRAVGFFPPPAAAPAARIK

SEQ ID NO: 74713 - protein, 79 aa, Setaria italica
  Transcript Sequence Number=SeqID_8739
  Gene Ontology: Cellular component=protein complex
MAAYLSMGEAHRRIGDYLSRVVNAISSSDGAALASLVAVSSAPGSTPLSDALAALPDFPRLAGDRFPHLADFLVPLLRA

SEQ ID NO: 74714 - protein, 178 aa, Setaria italica
  Transcript Sequence Number=SeqID_8740
  Gene Ontology: Mol. function=protein serine/threonine kinase activity; Cellular component=intracellular; Biological process =protein amino acid phosphorylation
  Homolog annotation: Hit_ID=Q069I5; Match level="QueryCoverage=98%, HitCoverage=44%, E-value=2e-79, Identity=80%"; Hit description=MAP kinase kinase
  Pfam annotation: Domain name=Pkinase; Domain location=1-149; Score =30.2; E_value=2.7e-10; Accession=PF00069.17; Description=Protein kinase domain
  Pfam annotation: Domain name=Pkinase_Tyr; Domain location=1-149; Score=-143.2; E_value=0.00033; Accession=PF07714.9; Description =Protein tyrosine kinase
  Pfam module annotation: Pfam domain module=Pkinase::Pkinase_Tyr; Domain location=1-149::1-149
LKGLIYLHNERHIIHRDLKPSNILINHRGEVKISDFGVSAIISSSSGQRDTFIGTRYYMAPERINAKKHGYMSDIWSLGLVILECATGNFPFPPCDSFYELLEAVVDQPPPSAPSDQFSPEFCSFISACTQKDAKDRSSAQALLNHPYLSMYDDLHVDLASYFTTAGSPLATFNSRQL

SEQ ID NO: 74715 - protein, 637 aa, Setaria italica
  Transcript Sequence Number=SeqID_8741
  Homolog annotation: Hit_ID=Q10L59; Match level="QueryCoverage=54%, HitCoverage=21%, E-value=1e-54, Identity=38%"; Hit description=PWWP domain containing protein, expressed
  Pfam annotation: Domain name=DUF618; Domain location=336-404; Score =7.7; E_value=0.019; Accession=PF04818.5; Description=Protein of unknown function, DUF618
RGKISSHAGNASIKKSGPAREEKSKSVGMSPVRHELVCSSPSQDKMHARHQAIGRRSITGSVDTSAGMGNKTNLVDRKSSGQVKMPTSSEVKKIHSSSKQLHLTSGNSHSRNYPASEKNSLPKSEDTKAKSKPGAQAVEHKVSTTVTVSAERGAKRDHLKEERSISVDKAASSEPNSDSVKSMKHLIAAAQARRNLMASAHGKFDGSLTDNAGMTSTQYGLPGLSPSPVFRIPSPSRIAFPESPGERTVLKSPTELDHEHGKSPKSRQVSGSPSIGTDAAIARDALEGMIETLSRTKESIGRATRHAIECSKYGIAGEIVELLVQKLEREPNLHRRIDLLFLVDSITQCSHSQRGVAGASYVPTVQAALPRLLGAAAPPGAGARENRRQCLKVLRLWLERKIMPEDILRKYMGDIEVPNDNTSTSFMLKRPSRAERSVDDPIREMDDMLVDEYGSNATFELSGILSSKVFEDDEDLPRNNGSSPFISQPVESDGIQEAEDTVAPASVEEQIRPENVTADAAMEGALELLGSKQQTDGAILVEHDCSQEPGSELELIDQNEPPPLPDVPPPLPSDSPPPPPPLPPSPPPDTPPPPPPLPLSPASPPPPPPPLPSGPPPQPAPPPLPTQAPPLPSIPPP

SEQ ID NO: 74716 - protein, 63 aa, Setaria italica
  Transcript Sequence Number=SeqID_8742
  Gene Ontology: Mol. function=triacylglycerol lipase activity
VHSGFLGAYDSVRNRIMALIKFAVGYQDEEDAENIPRWHVYVTGHSLGGALATLLALELSSSQ

SEQ ID NO: 74717 - protein, 241 aa, Setaria italica
  Transcript Sequence Number=SeqID_8743
  Gene Ontology: Mol. function=triacylglycerol lipase activity; Biological process=lipid metabolic process
  Homolog annotation: Hit_ID=B9RWS5; Match level="QueryCoverage=86%, HitCoverage=25%, E-value=6e-83, Identity=70%"; Hit description =Triacylglycerol lipase, putative
  Pfam annotation: Domain name=Lipase_3; Domain location=101-241; Score= 79.4; E_value=1.3e-20; Accession=PF01764.17; Description=Lipase (class 3)
RRTNKKDDMIIEQEVAAAEDSIDKDNTVASTKLSVDAQKAEDMRHLFASAETAMEAWAMLATSLGRNSFIKSDFEKICFLDNVSTDTQVAIWRDSSRRRLVVAFRGTEQSKWKDLRTDLMLLPAGLNPERLGGDFKQEVQVHSGFLGAYDSVRNRIMALIKFAVGYQDEEDAENIPRWHVYVTGHSLGGALATLLALELSSSQMAKNGVIFVTMYNFGSPRVGNRRFAEVYNAKVKDSWRI

SEQ ID NO: 74718 - protein, 162 aa, Setaria italica
  Transcript Sequence Number=SeqID_8744
  Gene Ontology: Mol. function=triacylglycerol lipase activity; Biological process=lipid metabolic process
  Homolog annotation: Hit_ID=B9RWS5; Match level="QueryCoverage=92%, HitCoverage=20%, E-value=6e-59, Identity=66%"; Hit description =Triacylglycerol lipase, putative
MAKNGVIFVTMYNFGSPRVGNRRFAEVYNAKVKDSWRIVNHRDIIPTVPRLMGYCHVEAPVYLKFGDSKDELVNNGILDDEDQGDVIGEYTPDVLVTEFMKGEKQLVEKLLQTEINLLRSIRDGSALMQHMEDFYYVTLLENVRSRYQVVDSAIDESHQLTA

SEQ ID NO: 74719 - protein, 46 aa, Setaria italica
  Transcript Sequence Number=SeqID_8745
SNSSLRKSMWRWRCGCMISFIRVQIQVPINYCTSKSLSVWCACVLL

SEQ ID NO: 74720 - protein, 60 aa, Setaria italica
  Transcript Sequence Number=SeqID_8746
HLLIRLVYTGQIFYSLQSSKHTVLLIIWSSIFFSYYKRTHALSHTRICTMVLWVLQFELK

SEQ ID NO: 74721 - protein, 84 aa, Setaria italica
  Transcript Sequence Number=SeqID_8747
  Gene Ontology: Mol. function=protein serine/threonine kinase activity; Cellular component=cytoplasm; Biological process=protein amino acid phosphorylation
  Homolog annotation: Hit_ID=Q6Z437; Match level="QueryCoverage=100%, HitCoverage=22%, E-value=2e-42, Identity=96%"; Hit description =Mitogen-activated protein kinase 3
MVDPPNGLGSQGKHYYSMWQTLFEIDTKYVPIKPIGRGAYGIVCSSINRETNEKVAIKKIHNVFDNRVDALRTLRELKLLRHLR

SEQ ID NO: 74722 - protein, 88 aa, Setaria italica
  Transcript Sequence Number=SeqID_8748
  Homolog annotation: Hit_ID=Q5JM90; Match level="QueryCoverage=54%, HitCoverage=11%, E-value=4e-16, Identity=77%"; Hit description =Carboxyl-terminal peptidase-like
MAATRACLVARAVALAFLLLEGPTMVAALGAAGGSSEEHLRQVRSFLRRVNKAPVTSIQSPDGDMIDCVPISKQPAFDHPLLKNHTIQ

SEQ ID NO: 74723 - protein, 186 aa, Setaria italica
  misc_feature (70)..(70): Xaa can be any naturally occurring amino acid
  misc_feature (116)..(116): Xaa can be any naturally occurring amino acid
  misc_feature (135)..(135): Xaa can be any naturally occurring amino acid
  misc_feature (173)..(173): Xaa can be any naturally occurring amino acid
  Transcript Sequence Number=SeqID_8749
  Gene Ontology: Mol. function=cation transmembrane transporter activity; Cellular component=integral to membrane; Biological process=cation transport
  Homolog annotation: Hit_ID=B9HV32; Match level="QueryCoverage=94%, HitCoverage=49%, E-value=8e-73, Identity=78%"; Hit description=Metal tolerance protein (Fragment)
  Pfam annotation: Domain name=Cation_efflux; Domain location=3-185; Score=-126.5; E_value=0.033; Accession=PF01545.13; Description =Cation efflux family
SCSLSCLFLVADFANQALLAYGLSSSRRAPDALHPYGYSKERFVWSLISAVGIFCLGSGATIVHGVQNLXWSSQPPENIHWAALVIGGSFLIEGASLLVAIKAVRKGAEAEGMSIXRDYIWRGHDPTSVAVMTEXLAIAAASLVAVQTTGNAMYDPIGSIIVGNLLGMVAIFXSIQRNRHALIGRV

SEQ ID NO: 74724 - protein, 371 aa, Setaria italica
  Transcript Sequence Number=SeqID_8750
  Gene Ontology: Mol. function=cation transmembrane transporter activity; Cellular component=integral to membrane; Biological process=cation transport
  Homolog annotation: Hit_ID=B9HV32; Match level="QueryCoverage=95%, HitCoverage=98%, E-value=1e-170, Identity=80%"; Hit description =Metal tolerance protein (Fragment)
  Pfam annotation: Domain name=Cation_efflux; Domain location=28-328; Score=113.6; E_value=6.6e-31; Accession=PF01545.13; Description =Cation efflux family
PAARSYSLRVAKGKKKAHFDDEHSHRAVNTALWCNFLVFSLKFGVWITTSSHVMLAELVHSVADFANQALLAYGLSSSRRAPDALHPYGYSKERFVWSLISAVGIFCLGSGATIVHGVQNLWSSQPPENIHWAALVIGGSFLIEGASLLVAIKAVRKGAEAEGMSIWDYIWRGHDPTSVAVMTEDGAAVTGLAIAAASLVAVQTTGNAMYDPIGSIIVGNLLGMVAIFLIQRNRHALIGRAIDDHDMQRVLEFLKSDPVVDALYDCKSEVIGPGFFRFKAEIDFNGVVLVQNYLERTGRGTWAKQFREAAMSKDDTELLRVMANYGEDVVEALGYEVDRLESEIQKLVPGIKHVDIEAHNPEGLSLRAEVL

SEQ ID NO: 74725 - protein, 98 aa, Setaria italica
  Transcript Sequence Number=SeqID_8751
GGMPSGPEDDAGAGNPMAQQAYMSMMPQQQQLQMMMNGHGPHGHHGHHAHGGAGYPPMGYGYGYPRPAMPYDRPMYYPAPHSHDNMFSDENPNSCSVM

SEQ ID NO: 74726 - protein, 165 aa, Setaria italica
  Transcript Sequence Number=SeqID_8752
MMMRPPNMMGGAGFPGMGQMGGGPLGGMPMGHPHMGGNGMQPGGGGAALHGMPAGGGMMRGAGFYPGGGMPSGPEMMQAAGNPMAQQAYMSMMPQQQQPQMMVNGHGPHGHHGHHAHGGAGYPPMGYGYGYGRPAMPYPPPMYYPAPHPHDNMFSDENPNSCSVM

SEQ ID NO: 74727 - protein, 78 aa, Setaria italica
  Transcript Sequence Number=SeqID_8753
  Gene Ontology: Mol. function=sequence-specific DNA binding; Cellular component=nucleus; Biological process=regulation of transcription, DNA-dependent
  Homolog annotation: Hit_ID=B6SWM4; Match level="QueryCoverage=56%, HitCoverage=6%, E-value=2e-15, Identity=84%"; Hit description=BEL1 -related homeotic protein 30
MFTRNISHICTRLRPYIFIYLRVLSVDYTFMSLQISNWFINARVRLWKPMIEDMYKDEIGDIEQDSNSSSDNAPRSKG

SEQ ID NO: 74728 - protein, 153 aa, Setaria italica
  Transcript Sequence Number=SeqID_8754
LGNYLSYLILNLPPEGSSANTTSLIDVNIEPVDPALSAHAKRTKEFHFYPSDVPEPKKSQPALVVATSMPAAAPANLVVDVPMSSATAAAFVPSVSVPAPAPAPELLAPVGPSPVNVPILPTTVPCFYASPLHPHLHLAPASVPVPSHLQPAP

SEQ ID NO: 74729 - protein, 265 aa, Setaria italica
  misc_feature (120)..(120): Xaa can be any naturally occurring amino acid
  misc_feature (124)..(124): Xaa can be any naturally occurring amino acid
  misc_feature (130)..(130): Xaa can be any naturally occurring amino acid
  misc_feature (155)..(155): Xaa can be any naturally occurring amino acid
  Transcript Sequence Number=SeqID_8755
  Gene Ontology: Mol. function=zinc ion binding; Cellular component =centrosome
  Homolog annotation: Hit_ID=B8K1X5; Match level="QueryCoverage=95%, HitCoverage=29%, E-value=3e-83, Identity=63%"; Hit description =Ubiquitin-associated protein
GVLNFISHALETGIAVEYTKIDKPILPHRLLRDPHSYRKVHHPRVVMKSKREKLESRFILDVTVLDGTLMTPSTPFTKIWRMHNNGSIVWPLGTQLIWVGGDQFALQTSVPLEIPVNGFXVDKXIDVAVXFVAPTRPGRYISYWRLASPSGQKIXGTRRSLGLHIQVEDPSFVNDNNRNTAINLNLPPEGSSANTTSLIDVNIEPVDPALSAHAKRTKEFHFYPSDVPEPKKSQPALVVATSMPAAAPANLVVDVPMSSATAAVF

SEQ ID NO: 74730 - protein, 131 aa, Setaria italica
  Transcript Sequence Number=SeqID_8756
  Gene Ontology: Mol. function=zinc ion binding
  Homolog annotation: Hit_ID=B8K1X5; Match level="QueryCoverage=39%, HitCoverage=5%, E-value=2e-18, Identity=90%"; Hit description =Ubiquitin-associated protein
  Pfam annotation: Domain name=UBA; Domain location=86-123; Score=25.5; E_value=0.00021; Accession=PF00627.23; Description=UBATS-N domain
  Subcellular localization annotation: CTP_CleavageSite=52; ConfidenceScore=5.53e-01
RRPPRPQPPAAWPRTPPTPRSPWWPRPSGPAWTGRRGARKSRREREPSDQPLAFAAKDRTAAGALLSPLLCLVLAAARGELGGVNEWDPLLAELEEMGFDDTEMNKELLAKNGGSIKRAVMDLIAREKKDK

SEQ ID NO: 74731 - protein, 260 aa, Setaria italica
  Transcript Sequence Number=SeqID_8757
  Gene Ontology: Mol. function=zinc ion binding
  Homolog annotation: Hit_ID=B8K1X5; Match level="QueryCoverage=83%, HitCoverage=26%, E-value=4e-48, Identity=49%"; Hit description =Ubiquitin-associated protein
  Pfam annotation: Domain name=PB1; Domain location=23-108; Score=39.1; E_value=1.7e-08; Accession=PF00564.16; Description=PB1 domain
MSDRSSPAAPTFFPFGPQAEVRDVTFKVKYGDTLKRFYGCVNGAHLDMNLSALRAKIATAFKFGPDADFILTYTDEDGDAVMLDDDDDLRDAALRQKLNPLRITVQLKKSQPTEQKERNSTPVKPTAQDPLSQIMSAIEGLKPAQEESLAHIKSAIGEAIKSIPEPIPDAIAKLSHEVLDAAPPPLAELMKPFVQMMAPSNGGNGPSDAHAEGSSTSSTRVAEDAPVAVPATAKPKAKACLDLRSVLKDAPVAAPSVEAS

SEQ ID NO: 74732 - protein, 647 aa, Setaria italica
  Transcript Sequence Number=SeqID_8758
  Gene Ontology: Mol. function=sequence-specific DNA binding; Cellular component=nucleus; Biological process=regulation of transcription, DNA-dependent
  Homolog annotation: Hit_ID=B6SWM4; Match level="QueryCoverage=99%, HitCoverage=100%, E-value=0.0, Identity=69%"; Hit description=BEL1 -related homeotic protein 30
  Pfam annotation: Domain name=Homeobox; Domain location=388-446; Score= 8.0; E_value=0.0019; Accession=PF00046.21; Description=Homeobox domain
  Pfam annotation: Domain name=POX; Domain location=199-338; Score =264.6; E_value=2.4e-76; Accession=PF07526.3; Description=Associated with HOX
  Pfam module annotation: Pfam domain module=Homeobox::POX; Domain location=388-446::199-338
MMATYYSSPGSERDSQNMYSRDPGNASYPMPSALGNLLYLNNSTSGPYTEFSGILHPQQNCMEMPDPGHPSVMSQDSSARESDMLGSHQGQRSFGPVKDMKNEMLMHMMDGSQSSTADLIHDDAHNGAQLDFGVLNNHSSSNIPSVQGQGLSLSLNTQILAPSLPYWSVKPDMLSPHSYHDSLRVDDIRMKSMQSEASRAIRNSRYLKAAQELLDEVVNVWKNIKQKAQKEQVEAGKTDGKETEGGAKSEGSNPQESAANAAPELSTAEKQELQNKMAKLMAMLDEVDRKYKHYYHQMQSVVSSFDVVAGPGAAKPYTAVALQTISRHFRCLKDAINDQINVIRKKLGEEENSSGKEGKLTRLRYIDQQLRQQRAFQQYGMIPQNAWRPQRGLPENSVTILRAWLFEHFLHPYPKDSEKMMLARQTGLTRSQISNWFINARVRLWKPMIEDMYKDEIGDIEQDSNSSSDNAPRSKGKMASSEDKEDLKSSTPRVCESSQLSESRASIGTMNIGGAPVGFQNEPNPDDSFMNLMLKDQRSNEADGGLLLHNAVAHHQDENARFMAYHLAELGRYGNGNVSLTLGLQHSSSSLSVPNAQQSFPGVGDDDIYNATAPLGVSVASSDYESMNQMDQRQRFEQSPLLHDFVA

SEQ ID NO: 74733 - protein, 541 aa, Setaria italica
  misc_feature (234)..(234): Xaa can be any naturally occurring amino acid
  Transcript Sequence Number=SeqID_8759
  Gene Ontology: Mol. function=zinc ion binding; Cellular component =centrosome
  Homolog annotation: Hit_ID=B8K1X5; Match level="QueryCoverage=84%, HitCoverage=56%, E-value=1e-134, Identity=55%"; Hit description =Ubiquitin-associated protein
  Pfam annotation: Domain name=ZZ; Domain location=331-374; Score=35.5; E_value=2.2e-07; Accession=PF00569.9; Description=Zinc finger, ZZ type
GRIAVMLDDDDDLRDAALRQKLNPLRITVQLKKSQPTEQKERNSTPVKPTAQDPLSQIMSAIEGLKPAQEESLAHIKSAIGEAIKSIPEPIPDAIAKLSHEVLDAAPPPLAELMKPFVQMMAPSNGGNGPSDAHAEGSSTSSTRVAEDAPVAVPATAKPKAKACLDLRSVLKDAPVAAPSVEASQGQQPSMYPSVEELLFPSNSVDKPVCKGKIDAQSKGKSVASSATQPASPXAVPIHVPPPPPCVSELFRPRRSQPHQWQSENNTKVTSDSRWRIPMYKVPYAPPAAVSHAPPGYGPSPHFPYPGRLLSSGHPYGDLAGNMENSAPRSLHRWIQCDGCGVQPIVGPRFKSNVKEDYDLCNSCFQRMGNEVEYTKIDKPILPHRLLRDPHSVHHPRVVMKSKREKLESRFILDVTVLDGTLMTPSTPFTKIWRMHNNGSIVWPLGTQLIWVGGDQFALQTSVPLEIPVNGFPVDKLCAQWPHDRPIVMHAPNLSKRGRRCHQCAIQDSYIQNEATFKFLPFRLHHNPWVVHLSIRMRISQ

SEQ ID NO: 74734 - protein, 184 aa, Setaria italica
  Transcript Sequence Number=SeqID_8760
  Gene Ontology: Mol. function=sequence-specific DNA binding; Cellular component=nucleus; Biological process=regulation of transcription, DNA-dependent
  Homolog annotation: Hit_ID=B6SZX1; Match level="QueryCoverage=100%, HitCoverage=65%, E-value=2e-90, Identity=88%"; Hit description=GATA transcription factor 25
  Pfam annotation: Domain name=CCT; Domain location=8-52; Score=79.7; E_ value=1.1e-20; Accession=PF06203.6; Description=CCT motif
  Pfam annotation: Domain name=CCT_2; Domain location=5-32; Score=32.0; E_value=2.4e-06; Accession=PF09425.2; Description=Divergent CCT motif
  Pfam annotation: Domain name=GATA; Domain location=79-116; Score =54.8; E_value=3.3e-13; Accession=PF00320.19; Description=GATA zinc finger
  Pfam module annotation: Pfam domain module=CCT::CCT_2::GATA; Domain location=8-52::5-32::79-116
STTVAARRVASLMRFREKRKERCFDKRIRYNVRKEVAQKMKRRKGQFAGRSDFGDGACSSVACGSPPNGEDDHFRETHCQNCGISSRLTPAMRRGPAGPRSLCNACGLMWANKGTLRSPINAPKMTLQHPANPSKTGDTDDKNSTVLPVEHNQATVKTDSGMMPEQEQKLDILPPTKEDIKSVS

SEQ ID NO: 74735 - protein, 249 aa, Setaria italica
  misc_feature (36)..(36): Xaa can be any naturally occurring amino acid
  Transcript Sequence Number=SeqID_8761
  Homolog annotation: Hit_ID=B6TMT3; Match level="QueryCoverage=100%, HitCoverage=69%, E-value=1e-88, Identity=68%"; Hit description=Poor homologous synapsis 1 protein
  Subcellular localization annotation: CTP_CleavageSite=32; ConfidenceScore=5.15e-01
HFVSILNFSWPQVMCVTQCPIHGSRRVFMSLRAKWXQKFAVRFPQLCDAESFLNCVKECPCETMDIIPSGSDYVCEDSSASEYIASNGLHHRPDDASSFEEQASDHMIEAPTMSYHEEWDLPVLEPLSANNTNNSYSGFPPSFSQMLTNFSTENEQDAEESYPVGTTNHASQEVYALDTSHDDNVSGVAVAPEETTADKGMDVGEGIDTSILTGDIMTRVKTYMADDSFNDMLFKLEKVIDELGGDMSL

SEQ ID NO: 74736 - protein, 67 aa, Setaria italica
  Transcript Sequence Number=SeqID_8762
RLHQRCIILKPAPDCVIFHGKQMFSELSEYINEFRFRFQSIHGCGWDLEPIDLNFVGNCTVPRVTRQ

SEQ ID NO: 74737 - protein, 44 aa, Setaria italica
  Transcript Sequence Number=SeqID_8763
ETRQVYDDNGTCRSAGTIIIIYLSCLSRPLLWPPIIISHRTLLC

SEQ ID NO: 74738 - protein, 229 aa, Setaria italica
  misc_feature (33)..(33): Xaa can be any naturally occurring amino acid
  Transcript Sequence Number=SeqID_8764
  Gene Ontology: Mol. function=nucleic acid binding
  Homolog annotation: Hit_ID=B6T4N9; Match level="QueryCoverage=72%, HitCoverage=45%, E-value=8e-89, Identity=91%"; Hit description =Nucleic acid binding protein
  Pfam annotation: Domain name=RRM_1; Domain location=161-229; Score =51.3; E_value=3.7e-12; Accession=PF00076.14; Description=RNA recognition motif. (a.k.a. RRM, RBD, o
  Pfam annotation: Domain name=RRM_1; Domain location=68-138; Score =44.4; E_value=4.6e-10; Accession=PF00076.14; Description=RNA recognition motif. (a.k.a. RRM, RBD, o
  Pfam module annotation: Pfam domain module=RRM_1::RRM_1; Domain location=161-229::68-138
HAPHPHHHMPQPRWVVIPYPPPHHPMVAAPPPXPPQFVKHFAPPASVTPPPPPSAGSGGNGGEDNRTIWVGDLQYWMDENYLHSCFGPSGEVVTIKVIRNRHSGVSEGYGFVEFYSHASAEKALQNFSGHVMPNTDRAFKLNWASYSMGEKRSELASDHSIFVGDLAVDVTDDMLLDLFSSKYRSVKGAKVIIDANTGRSRGYGFVRFGDDNDKTHAMTEMNGVYCSTR

SEQ ID NO: 74739 - protein, 159 aa, Setaria italica
  misc_feature (84)..(84): Xaa can be any naturally occurring amino acid
  Transcript Sequence Number=SeqID_8765
  Gene Ontology: Mol. function=nucleic acid binding
  Homolog annotation: Hit_ID=B6T4N9; Match level="QueryCoverage=91%, HitCoverage=39%, E-value=3e-66, Identity=93%"; Hit description =Nucleic acid binding protein
  Pfam annotation: Domain name=RRM_1; Domain location=56-121; Score =64.2; E_value=4.9e-16; Accession=PF00076.14; Description=RNA recognition motif. (a.k.a. RRM, RBD, o
CVRIELYKTHAMTEMNGVYCSTRPIRVGPATPRRSQGDSGSSTPGHSDGDSSNRTVYVGGLDPNVSEDELRKAFAKYGDLASVXKIPLGKQCGFVQFVSRTDAEEALQGLNGSVIGKQAVRLSWGRSPSHKQSRGDSGNRRNMYYGTPFYGGYWLTSFP

SEQ ID NO: 74740 - protein, 144 aa, Setaria italica
  misc_feature (140)..(140): Xaa can be any naturally occurring amino acid
  Transcript Sequence Number=SeqID_8766
  Gene Ontology: Mol. function=nucleic acid binding
  Homolog annotation: Hit_ID=Q6YTH3; Match level="QueryCoverage=100%, HitCoverage=33%, E-value=5e-42, Identity=65%"; Hit description =Putative nucleic acid binding protein
  Pfam annotation: Domain name=RRM_1; Domain location=6-80; Score=54.2; E_value=4.9e-13; Accession=PF00076.14; Description=RNA recognition motif. (a.k.a. RRM, RBD, o
STNRTVYVGGLDPNVSEEELRKAFAKYGDLASVKIPVGKQCGFVQFVNRFVNVLVLNCRADAEEALQGLNGSTIGKQAVRLSWGRSPASKQSRGDSGHRRNGNGMYYGTPFYGGYGYASPVPHPNMYAAAYGAYPYYGNXQLVS

SEQ ID NO: 74741 - protein, 94 aa, Setaria italica
  Transcript Sequence Number=SeqID_8767
  Gene Ontology: Mol. function=nucleic acid binding
  Homolog annotation: Hit_ID=A6N0J4; Match level="QueryCoverage=90%, HitCoverage=56%, E-value=6e-21, Identity=65%"; Hit description =Nucleic acid binding protein (Fragment)
RTLVTNLVKTRTDAEEALQGLNGSVIGKQAVRLSWGRSPSHKQSRGDSGNRRNMYYGTPFYGGYGYASPVPHPNMYAAAYGAYPFYGGNQQLVS

SEQ ID NO: 74742 - protein, 110 aa, Setaria italica
  Transcript Sequence Number=SeqID_8768
  Gene Ontology: Mol. function=nucleic acid binding
  Homolog annotation: Hit_ID=Q6YTH3; Match level="QueryCoverage=100%, HitCoverage=27%, E-value=5e-35, Identity=70%"; Hit description =Putative nucleic acid binding protein
  Pfam annotation: Domain name=RRM_1; Domain location=1-46; Score=8.2; E_value=0.035; Accession=PF00076.14; Description=RNA recognition motif. (a.k.a. RRM, RBD, o
AEYGDLASVKIPLGKQCGFVQFVSRADAEEALQGLNGSTIGKQAVRLSWGRSPASKQSRGDSGHRRNGNGMYYGTPFYGGYGYASPVPHPNMYAAAYGAYPYYGNQQLVS

SEQ ID NO: 74743 - protein, 128 aa, Setaria italica
  Transcript Sequence Number=SeqID_8769
  Gene Ontology: Mol. function=nucleic acid binding
  Homolog annotation: Hit_ID=A6N0J4; Match level="QueryCoverage=82%, HitCoverage=69%, E-value=1e-50, Identity=92%"; Hit description =Nucleic acid binding protein (Fragment)
  Pfam annotation: Domain name=RRM_1; Domain location=24-88; Score =74.5; E_value=3.9e-19; Accession=PF00076.14; Description=RNA recognition motif. (a.k.a. RRM, RBD, o
LLHSGDSGSSTPGHSDGDSSNRTVYVGGLDPNVSEDELRKAFAKYGDLASVKIPLGKQCGFVQFVSRTDAEEALQGLNGSVIGKQAVRLSWGRSPSHKQSRGDSGNRRNMFGCGTGEGRKTNNTYRKK

SEQ ID NO: 74744 - protein, 79 aa, Setaria italica
  Transcript Sequence Number=SeqID_8770
LPMQGSNELDRSPSIRHVSRSNNWLPKEIDAVREYTSSSSTSVVNVLWYYPKSSSVLGGCHLVKSARLQLFSGSLMHIP

SEQ ID NO: 74745 - protein, 178 aa, Setaria italica
  Transcript Sequence Number=SeqID_8771
  Gene Ontology: Mol. function=zinc ion binding; Biological process =regulation of transcription
  Homolog annotation: Hit_ID=Q0MXD3; Match level="QueryCoverage=64%, HitCoverage=76%, E-value=2e-14, Identity=42%"; Hit description=Dof1 (Fragment)
  Subcellular localization annotation: CTP_CleavageSite=78; ConfidenceScore=5.86e-01
SFLPPTFGPTVDAKNPRRASASSPRSNSGSGSGSASPTAAVATAPTTPATPSSNSIGLTSHHTNPFSTVDVAPPAPIFADHAAALASLFAPPPPPPLPAFTFTAQPKEESAAAAAASAQHLAGQAVPSEAPSSVSTDMTPFASLDTSGMFDLGDASAAAYWNAGSCWTDVHDPSMYLP

SEQ ID NO: 74746 - protein, 103 aa, Setaria italica
  Transcript Sequence Number=SeqID_8772
  Gene Ontology: Mol. function=oxidoreductase activity; Biological process=oxidation reduction
  Homolog annotation: Hit_ID=B6SZL1; Match level="QueryCoverage=93%, HitCoverage=37%, E-value=1e-39, Identity=83%"; Hit description =Tropinone reductase 2
  Pfam annotation: Domain name=adh_short; Domain location=15-103; Score= -36.8; E_value=0.0036; Accession=PF00106.17; Description=short chain dehydrogenase
MATAGSGERWSLAGATALVTGGSKGIGHAIVEELAAFGARVHTCSRNAAELEECRRRWEEKGLTVTVSVCDVGVRADREKLMDTVRDTFAGKLDILVNNAAQL

SEQ ID NO: 74747 - protein, 215 aa, Setaria italica
  Transcript Sequence Number=SeqID_8773
  Homolog annotation: Hit_ID=B6U6J6; Match level="QueryCoverage=87%, HitCoverage=36%, E-value=3e-51, Identity=61%"; Hit description=ABI3 -interacting protein 2
MSAPVLFIVHILHCTDSSYFLNYLGLWQSAADSKERTLLGTLQKFIKEQKLEELPILEEANKRLAQLEQLSAERKRAAAAAVAAAQQVSKNIEQQQKILQLMQPAKRSKVDNVVQGSSGQNVHSAVVPSQQFILRQSIHTAAAPNRYQAALNPNVLPVITPIPQVVTGNHRPVGIQSQVPVAPAVLTQYGGLADYEGMSSRPYRSSTLVLGPSCF

SEQ ID NO: 74748 - protein, 307 aa, Setaria italica
  Transcript Sequence Number=SeqID_8774
  Gene Ontology: Mol. function=hydrolase activity; Cellular component =nucleus; Biological process=metabolic process
  Homolog annotation: Hit_ID=Q8RZ79; Match level="QueryCoverage=99%, HitCoverage=74%, E-value=1e-153, Identity=89%"; Hit description =B1065G12.16 protein
  Pfam annotation: Domain name=Abhydrolase_3; Domain location=32-273; Score=256.7; E_value=5.4e-74; Accession=PF07859.5; Description =alphabeta hydrolase fold
  Subcellular localization annotation: CTP_CleavageSite=33; ConfidenceScore=5.56e-01
PASNGAPYRGYLPHAVSSPRAPASARRRLPIVVQFHGGGFVTGSSSAAANDAFCRRVAKLCDAIVVAVGYRLAPESRYPAAFEDGVKVLKWIAKQANLAMMSKVGSGVDTFGASTVEPWIAAHGDPARCVLLGASCGANIADYVTRKTVEDSKLFDPIKVVAQVLMYPFFIGSVPTHSEIRLANSYFYDKSTCILAWKLFLSEKEFNLDHPAANPLAPGRGGPPLKCMPPTLTVIAEHDWMRDRAIAYSEELRKVNVDSPVLDYKDTVHEFATLDVFLKTPQAQACAEDIAIWMKKYISLRGHEFSY

SEQ ID NO: 74749 - protein, 156 aa, Setaria italica
  misc_feature (51)..(51): Xaa can be any naturally occurring amino acid
  Transcript Sequence Number=SeqID_8775
  Gene Ontology: Mol. function=oxidoreductase activity, acting on the CH-CH group of donors; Cellular component=mitochondrion; Biological process=metabolic process
  Homolog annotation: Hit_ID=Q9M7Y7; Match level="QueryCoverage=98%, HitCoverage=36%, E-value=5e-71, Identity=86%"; Hit description =Acetyl-coA dehydrogenase, putative
  Pfam annotation: Domain name=Acyl-CoA_dh_1; Domain location=1-151; Score=151.2; E_value=3.1e-42; Accession=PF00441.16; Description=Acyl- CoA dehydrogenase, C-terminal dom
  Pfam annotation: Domain name=Acyl-CoA_dh_2; Domain location=15-140; Score=31.2; E_value=8.7e-07; Accession=PF08028.3; Description=Acyl -CoA dehydrogenase, C-terminal doma
  Pfam module annotation: Pfam domain module=Acyl-CoA_dh_1::Acyl-CoA_dh_ 2; Domain location=1-151::15-140
RGFEIAQGRLGPGRLHHCMRLIGAAERGMDLMVERALNRTAFGKRIAQHGXFLSDLAKCRVDLEQARLLVLEAADQLDRHGNKKARGILAMAKVAAPNMALKVLDMAMQVHGAAGLSSDTVLSHLWATARTLRIADGPDEVHLGTIAKLELQRARL

SEQ ID NO: 74750 - protein, 769 aa, Setaria italica
  Transcript Sequence Number=SeqID_8776
  Gene Ontology: Mol. function=oxidoreductase activity, acting on the CH-CH group of donors; Cellular component=mitochondrion; Biological process=metabolic process
  Homolog annotation: Hit_ID=Q8K370; Match level="QueryCoverage=98%, HitCoverage=69%, E-value=0.0, Identity=47%"; Hit description=Acyl -CoA dehydrogenase family member 10
  Pfam annotation: Domain name=APH; Domain location=42-322; Score =177.4; E_value=4e-50; Accession=PF01636.15; Description =Phosphotransferase enzyme family
  Pfam annotation: Domain name=Acyl-CoA_dh_1; Domain location=678-767; Score=4.6; E_value=0.00029; Accession=PF00441.16; Description=Acyl -CoA dehydrogenase, C-terminal dom
  Pfam annotation: Domain name=Acyl-CoA_dh_M; Domain location=565-619; Score=68.5; E_value=2.5e-17; Accession=PF02770.11; Description=Acyl -CoA dehydrogenase, middle domain
  Pfam annotation: Domain name=Acyl-CoA_dh_N; Domain location=415-561; Score=46.9; E_value=7.7e-11; Accession=PF02771.8; Description=Acyl -CoA dehydrogenase, N-terminal domain
  Pfam module annotation: Pfam domain module=APH::Acyl-CoA_dh_1::Acyl -CoA_dh_M::Acyl-CoA_dh_N; Domain location=42-322::678-767::565 -619::415-561
MAKLTSELLRPVDPAHALDEAALLRYAAANVPGFPGPAPALALTQFGHGQSNPTYCIQASAPGGGRTTRYVLRKKPPGAILQSAHAVEREYQVLKALGAHTDVPVPKVYCLCTDASVIGTPFYIMEYLEGIIYPDNALPGVTPSKRRAIYLSTAKTLAAIHKVDVNAIGLQKYGRRDNYCKRQVERWEKQYLASTGEGKPARYQRMLNLARWLKEHVPQEDSSAGSGTGLVHGDYRADNLVFHPTEDRVIGVIDWELSTLGNQMCDVAYSCLPYIIDATPGERTSYGGFQHAGIPDGVPQLEEYLSVYCSFSARTWPAANWKFYVAFSLFRGASIYAGVYHRWTMGNASGGERAKFAGRIANTMVDCAWDFINRKNVLQEQPSRGFQVSEAPWQEFGREQEGSTSTKDQGKFVPSEKVMQLRKKLMKFIEDHIYPMEGEFYKHAQSTSRWTIHPEEENLKALAKKEGLWNMFIPLDSAARARKLLFEDRSLVSPGSSNDLLLGAGLTNLEYGYLCEIMGRSVWAPQIFNCGAPDTGNMEVLLRYGTKEQQKQWLVPLLEGKIRSGFAMTEPQVASSDATNIECSISRQGDFYVINGRKWWTSGAMDPRCKILILMGKTDFSAPKHKQQSMILVDIDTPGVHVKRPLLVFGFDDAPHGHAEITFENVRVPVTNILLGEGRGFEIAQGRLGPGRLHHCMRLIGAAERGMDLMVERALNRTAFGKRIAQHGSFLSDLAKCRVDLEQARLLVLEAADQLDRHGNKKARGILAM

SEQ ID NO: 74751 - protein, 80 aa, Setaria italica
  misc_feature (24)..(24): Xaa can be any naturally occurring amino acid
  Transcript Sequence Number=SeqID_8777
  Gene Ontology: Mol. function=asparagine-tRNA ligase activity; Cellular component=cytoplasm; Biological process=tRNA aminoacylation for protein translation
  Homolog annotation: Hit_ID=B6SVU1; Match level="QueryCoverage=98%, HitCoverage=15%, E-value=6e-30, Identity=78%"; Hit description =Asparaginyl-tRNA synthetase, cytoplasmic 3
LKLVSSTHFERISYTMAVDILKNXNKVEWGIDLASEHERYLTEVIYKKPVIVYNYPKEIKAFYMRLNDDQKTVSAMDVLA

SEQ ID NO: 74752 - protein, 59 aa, Setaria italica
  Transcript Sequence Number=SeqID_8778
RSQRFSDAEDRSWHSHSRQGSASTPASIGCDAGASAGGGGAAERPRKSCVSECSLDDVV

SEQ ID NO: 74753 - protein, 241 aa, Setaria italica
  Transcript Sequence Number=SeqID_8779
  Gene Ontology: Cellular component=membrane
  Homolog annotation: Hit_ID=O80599; Match level="QueryCoverage=73%, HitCoverage=34%, E-value=3e-46, Identity=57%"; Hit description =T27I1.10 protein
  Pfam annotation: Domain name=DUF221; Domain location=1-103; Score= -168.9; E_value=0.019; Accession=PF02714.7; Description=Domain of unknown function DUF221
VFLLVRRYILRMKEEDLLYSFPYHTEVPKVLLFGLLGFTCSVLAPLILPFLLIYFCLGYVVYRNQFLNVYCTKYDTGGLYWPIAHNTTIFSLVLSQIICLGVFGLKESPVASGFTVPLIIFTLLFNQYCRKRHLPLFKTFPAQSLIDMDKEDQQMGRTEDLHDRLHSAYFQFPDTDDIPLEGAHNVGRDENGNGTSGESSRKESADDDPKDDLSHPTLAGLPVSQLRNAVISIGMSSVSGN

SEQ ID NO: 74754 - protein, 104 aa, Setaria italica
  Transcript Sequence Number=SeqID_8780
  Gene Ontology: Cellular component=membrane
FLVAQSLIDMDKEDQQMGRTEDLHDRLHSAYFQFPDTDDIPLEGAHNVGRDENGNGTSGESSRKESADDDPKDDLSHPTLAGLPVSQLRNAVISIGSILRPQRR

SEQ ID NO: 74755 - protein, 454 aa, Setaria italica
  misc_feature (419)..(419): Xaa can be any naturally occurring amino acid
  misc_feature (426)..(426): Xaa can be any naturally occurring amino acid
  Transcript Sequence Number=SeqID_8781
  Gene Ontology: Cellular component=membrane
  Homolog annotation: Hit_ID=O80599; Match level="QueryCoverage=54%, HitCoverage=55%, E-value=2e-82, Identity=54%"; Hit description =T27I1.10 protein
  Pfam annotation: Domain name=DUF221; Domain location=157-454; Score =247.9; E_value=2.4e-71; Accession=PF02714.7; Description=Domain of unknown function DUF221
HCVVLYIISAVACVLLYFEYKHIARLRLCHISRATSNPRHFTVLVQGIPKSTESFSRTVENFFTKYHASSYLSHQVVYKVGKVQKIVSGAKKVYRKFRHSKGTTVDKRCRSITFQCCFCGASSNSFQLLPSDFEQESEKPQMNDSSLSLPDEECGAAFIFFKTRYAALVVAKILQTSNPMRWVTSLAPERDDIYWSNLWLPYKQLWIRHIATLLGSIVFMFLFLMPVTFIQGLTQLEQLQQRFPFLRGILEKKYMTQLITGYLPSVILQIFLYTVPPTMMLFSTLEGPIYHSERKKSACCKVLYFTIWNVFFVNVLSGSAISQVIALSSPKDIPMQLARAVPVQATFFTTYVLTSGWASLSSELMQLFGLTWNFIRRYILRMKEEDLLYSFPYHTEVPKVLLLGLFGASHAPVLAPLIXLPFLLIXFCLGYVVYRQPVPSNCFTCYLLKILTLL

SEQ ID NO: 74756 - protein, 127 aa, Setaria italica
  Transcript Sequence Number=SeqID_8782
  Gene Ontology: Cellular component=membrane
KKNKKKKNKKKTRHLPLFKTFPAQSLIDMDKEDQQMGRTEDLHDRLHSAYFQFPDTDDIPLEGAHNVGRDENGNGTSGESSRKESADDDPKDDLSHPTLAGLPVSQLRNAVISIGSILRPQRRELPV

SEQ ID NO: 74757 - protein, 228 aa, Setaria italica
  Transcript Sequence Number=SeqID_8783
  Gene Ontology: Mol. function=kinase activity; Biological process =protein amino acid phosphorylation
  Homolog annotation: Hit_ID=Q01MD7; Match level="QueryCoverage=94%, HitCoverage=41%, E-value=2e-58, Identity=50%"; Hit description =H0215E01.6 protein
  Pfam annotation: Domain name=B_lectin; Domain location=3-83; Score =39.3; E_value=1.5e-08; Accession=PF01453.16; Description=D-mannose binding lectin
TYVPTKDGRTATVVWSAGSAGRSVAGISINSDGNLVMLDGSNRTVWQSFDHPTDTLLVGQSLRQGARLTANTSAANWSPSRLYLAVADDSLSAYVDAKPPQRYYHLGFTRTAGAYAAYANGSLTVLASPAGAPLTTIQLPAVAAGTVQYMRLEYDGHLRLYEWRPAGWAPVFDVLRLFPDDCAFPTVCGAYGVCTEMQCSCPDTANFRPVDFRRPNRGCVPAAPPVSC

SEQ ID NO: 74758 - protein, 366 aa, Setaria italica
  Transcript Sequence Number=SeqID_8784
  Gene Ontology: Mol. function=protein serine/threonine kinase activity; Cellular component=plasma membrane; Biological process =protein amino acid phosphorylation
  Homolog annotation: Hit_ID=B6T4Q9; Match level="QueryCoverage=95%, HitCoverage=95%, E-value=0.0, Identity=94%"; Hit description=ATP binding protein
  Pfam annotation: Domain name=Pkinase; Domain location=63-337; Score =194.8; E_value=2.4e-55; Accession=PF00069.17; Description=Protein kinase domain
  Pfam annotation: Domain name=Pkinase_Tyr; Domain location=63-337; Score=218.5; E_value=1.7e-62; Accession=PF07714.9; Description =Protein tyrosine kinase
  Pfam module annotation: Pfam domain module=Pkinase::Pkinase_Tyr; Domain location=63-337::63-337
MASSAGDGASAAAKNETYVRADKIDLESLDIQLEKQLAKTWEKHKGKSTLGPREDWEIDLAKLEIRYVIAQGTYGTVYRGTYDGQDVAVKLLDWGEDGFATETETATLRASFKQEVAVWHELSHPNVTKFIGASMGTTDLKIPANSSHTELPPRACCVVVEYLAGGTLKQYLIKNRRRKLAYKVVVQIALDLARGLSYLHARKIVHRDVKTENMLLDTQRNLKIADFGVARVEAQNPKDMTGATGTLGYMAPEVLEGKPYNRKCDVYSFGICLWEIYCCDMPYPDLSFADVSSAVVHQNLRPDIPRCCPSAMANIMRKCWDANPDKRPDMDEVVRLMEALDTSKGGGMIPEGQAGGCLCFFRARGP

SEQ ID NO: 74759 - protein, 378 aa, Setaria italica
  Transcript Sequence Number=SeqID_8785
  Gene Ontology: Mol. function=protein serine/threonine kinase activity; Cellular component=plasma membrane; Biological process =protein amino acid phosphorylation
  Homolog annotation: Hit_ID=B6T4Q9; Match level="QueryCoverage=93%, HitCoverage=95%, E-value=0.0, Identity=88%"; Hit description=ATP binding protein
  Pfam annotation: Domain name=Pkinase; Domain location=71-349; Score =185.5; E_value=1.5e-52; Accession=PF00069.17; Description=Protein kinase domain
  Pfam annotation: Domain name=Pkinase_Tyr; Domain location=71-349; Score=214.6; E_value=2.7e-61; Accession=PF07714.9; Description =Protein tyrosine kinase
  Pfam module annotation: Pfam domain module=Pkinase::Pkinase_Tyr; Domain location=71-349::71-349
MASSTSEMPEAKEKLKRSGSLGGNDAYVRADKIDLTSLDIQLEKQLTKTWGKANLKSQGPKEEWEIDLAKLEIRYVIAQGTYGTVYRGTYDGQDVAVKLLDWGEDGFATEAETAALRTSFKQEVAVWHKLSHPNVTKFVGASMGTTDLKIPANNSNGGARTNLPARACCVVVEYLAGGTLKQYLIKNSRRKLAYKVVVQLALDLARGLSYLHSRKIVHRDVKTENMLLTPQRNLKIADFGVARVEAQNPKDMTGATGTLGYMAPEVLDGKPYNRKCDVYSFGICLWEIYCCDMPYPDLSFADVSSAVVHQNLRPDIPRCCPSTFANVMRKCWDANPDKRPDMDEVVQLLEALDTSKGGGMIPDGQSPGCLCFTKARGP

SEQ ID NO: 74760 - protein, 188 aa, Setaria italica
  Transcript Sequence Number=SeqID_8786
  Gene Ontology: Mol. function=nucleoside-triphosphatase activity; Cellular component=nucleoplasm; Biological process=regulation of transcription, DNA-dependent
  Homolog annotation: Hit_ID=B9SGR4; Match level="QueryCoverage=98%, HitCoverage=24%, E-value=2e-76, Identity=73%"; Hit description=DNA replication licensing factor MCM8, putative
  Pfam annotation: Domain name=MCM; Domain location=1-90; Score=-175.4; E_value=6.4e-06; Accession=PF00493.15; Description=MCM235 family
PLAGQFLRKYIAYSREHVFPRMSKAAAEILKKFYLGLRNRSTSADGTPITARQLESLVRLAEARARVDLREEVTREDAQDVVDIMKESLYDKYVDEHGFVDFARSGGMSQQKEARTFLNALNKESELQRKDCFSRTEIYNLADKISLRVPDLDALVDNLNSLGYLLLKGGMYQLVTASYSQCQPTRSK

SEQ ID NO: 74761 - protein, 43 aa, Setaria italica
  Transcript Sequence Number=SeqID_8787
ERQKVRQTSKGKLTRHSLAAISQLLIDKYSNRTDNSYYENWFN

SEQ ID NO: 74762 - protein, 150 aa, Setaria italica
  misc_feature (58)..(58): Xaa can be any naturally occurring amino acid
  Transcript Sequence Number=SeqID_8788
  Gene Ontology: Cellular component=chloroplast envelope
GGGRVGQALLSMGPPGRDVLVGRGEKVPDDAPGPILVCTRNDDLDAVLESTPKSRWRXNGMLDPWFESKGLVDANQVLAYFAVSKLGEPPVDGITDTNPDGLTAAFGSWAPAVAARLQNGGLTCKVAPQHVIHNFCVSLVDNSHVHQLHL

SEQ ID NO: 74763 - protein, 304 aa, Setaria italica
  Transcript Sequence Number=SeqID_8789
  Gene Ontology: Cellular component=chloroplast envelope
  Pfam annotation: Domain name=ApbA_C; Domain location=186-304; Score= -12.9; E_value=0.0038; Accession=PF08546.3; Description=Ketopantoate reductase PanEApbA C ter
  Subcellular localization annotation: CTP_CleavageSite=36; ConfidenceScore=5.76e-01
MALKAAVSVTQLPSPPLRRLLSSSSRTAVRRLARVSAAMAATAVQPAVVVGGGRVGQALLSMGPPGRDVLVGRGEKVPDDAPGPILVCTRNDDLDAVLESTPKSRWRDLVFFQNGMLDPWFESKGLVDANQVLAYFAVSKLGEPPVDGITDTNPDGLTAAFGSWAPAVAARLQNGGLTCKVLEKEAFQKQMLEKLIWISAFMLVGARHPGATVGVVEKDYRAEVASLIAELASAAAAERGLTFDEGIEERLCAYSRAVAHFPTAVKEFKWRNGWFYSLTEKALAAGKPDPCPLHTAWLKEIKVI

SEQ ID NO: 74764 - protein, 48 aa, Setaria italica
  misc_feature (1)..(11): Xaa can be any naturally occurring amino acid
  Transcript Sequence Number=SeqID_8790
XXXXXXXXXXXFFFLFSNHTSHFIIHDQKISTSILYIRDHKPLNLISL

SEQ ID NO: 74765 - protein, 93 aa, Setaria italica
  Transcript Sequence Number=SeqID_8791
RALRRRRSRRRAGRRIRRHDGRTRSRPRRPYGWGGMRRRKPQRRRGSAPPAPGHAHVRASSGGQALRARYPGTRTSGHFIHPAAISRLTRGEK

SEQ ID NO: 74766 - protein, 74 aa, Setaria italica
  Transcript Sequence Number=SeqID_8792
  Gene Ontology: Mol. function=serine-type peptidase activity; Cellular component=chloroplast; Biological process=proteolysis
  Homolog annotation: Hit_ID=B6UHC0; Match level="QueryCoverage=97%, HitCoverage=10%, E-value=5e-30, Identity=86%"; Hit description=Acyl -peptide hydrolase-like
TTVVQPDQTTKIYRAIKDKGLPVALVEYEGEPHGFRKAENIKFTLEQEMMFFARLVGKFKVADDITPIKIENFD

SEQ ID NO: 74767 - protein, 642 aa, Setaria italica
  Transcript Sequence Number=SeqID_8793
  Gene Ontology: Mol. function=serine-type peptidase activity; Cellular component=chloroplast; Biological process=proteolysis
  Homolog annotation: Hit_ID=B6UHC0; Match level="QueryCoverage=100%, HitCoverage=94%, E-value=0.0, Identity=67%"; Hit description=Acyl -peptide hydrolase-like
  Pfam annotation: Domain name=AXE1; Domain location=335-615; Score= -189.1; E_value=0.00056; Accession=PF05448.4; Description=Acetyl xylan esterase (AXE1)
  Pfam annotation: Domain name=Abhydrolase_3; Domain location=437-605; Score=-69.5; E_value=0.0044; Accession=PF07859.5; Description =alphabeta hydrolase fold
  Pfam annotation: Domain name=Peptidase_S15; Domain location=372-596; Score=-112.4; E_value=0.065; Accession=PF02129.10; Description=X-Pro dipeptidyl-peptidase (S15 family)
  Pfam annotation: Domain name=Peptidase_S9; Domain location=421-627; Score=145.0; E_value=2.3e-40; Accession=PF00326.13; Description =Prolyl oligopeptidase family
  Pfam module annotation: Pfam domain module=AXE1::Abhydrolase _3::Peptidase_S15::Peptidase_S9; Domain location=335-615::437 -605::372-596::421-627
RTAEGLAVAGDGRLVWVETRPEEGGRAVLVKESTESGAKAREVTPQGFAVRSLAQEYGGGAFAVQGDVVVFSNYTDQRLYKQTIGDNSPLPLTPEYAESVVRYADGVFDPHFHRFVTIMEDHRQNSSNPITTIAAVRISDQDVEEPTMLVSGSDFYAFPRVDQTKKRMAWIEWSNPNMSWDKSQLWVGYFNEKGEVTKRICVAGGDPTLVESPTEPKWSSKGELFFITDRRSGFWNIYKWDEQRNVVTTLYSLDAEFSKPMWIFGVSSYDFLGKDNSSHKIICCYRQNGKSYFGVLDPGSESFSTLDIPFSSVTNIVSGDECFYIEGASANLPESIAKVTLDEKRKVTADFSLVWSSSEDVTKHKSYFSVPEFIKFPTVIPGQHAYAYFYAPYNDSFQGSSEEKPPLLVRTHGGPTAEAQGVLDLSVQYWTSRGWALVDVNYGGSSGYGREYRERLLGQWGVVDVNDCCSCATFLVETRRVDGQRLCVTGESAGGFTTLACLAFRQTFKTGSSLYGIADLAALRAGMNKFEAYYIDNLVGNKQAYFERSPINFVNNFSCPVILFQGLEDTVVSPDQATKIYKAIKDKGLPVALVEYEGEQHGFRKAENIKFTLEQEMVFFARLVGKFKVADDITPIKIENFD

SEQ ID NO: 74768 - protein, 246 aa, Setaria italica
  Transcript Sequence Number=SeqID_8794
WSGGGSRKFLREGRDAGAAEADEMVMWPPAPVMELARLAVDSGGDPGAIHRALDPTMLPVPDVQGTQKDKCQLTRTPYGRRFANEELNSYLAFLFELIVARGPLVGLNVSLSRYDLFHGHLFLSYETGRLGILFHAKEYPAIDKELFPYNLGYCQAGSNVPYDDSMNLRNILWLAPLPSKETKAWLAPGTLVVLDAHPDGIIYQEIIRDYVQIVRTVYEDDFGENAVDVNYLNVANSAPVDRIFIC

SEQ ID NO: 74769 - protein, 156 aa, Setaria italica
  Transcript Sequence Number=SeqID_8795
  Gene Ontology: Mol. function=protein binding; Cellular component =cytoskeleton
  Homolog annotation: Hit_ID=B6T4T9; Match level="QueryCoverage=100%, HitCoverage=48%, E-value=1e-73, Identity=89%"; Hit description =Protein ABIL1
FYRNNSHKSTVMTSLKDYTVEALVSTVDHLGFVSYKVDNLVSEKADEVNETEFLVSSVEQRVRICQQTIDQEGRSQQALLIKAPKYHRRYILPGVDLLESSIHPVSEPPRYNRQYTSRKMHKSQSSISTPGCRQTTMRRARSPSPTPNDAYHRSRS

SEQ ID NO: 74770 - protein, 174 aa, Setaria italica
  Transcript Sequence Number=SeqID_8796
  Homolog annotation: Hit_ID=B9STW6; Match level="QueryCoverage=98%, HitCoverage=28%, E-value=2e-42, Identity=51%"; Hit description =Electron transporter, putative
  Pfam annotation: Domain name=DUF547; Domain location=1-89; Score =53.5; E_value=8.3e-13; Accession=PF04784.6; Description=Protein of unknown function, DUF547
TTINVSGQKFNALVIENFILRQPSSVKEEFWKCDVDVEEQQVRELYGLKSSEPNILFALCCGIRSSPALRIYKADRVAMDLEKAKLEYLQASLVVTSTRRLLIPSLIHSSMHDFAKDMESLLRWICEQLPTSWSLRKSMVECLSLRGHTHHLINMEEVVDVIPFDYEFQYLLPM

SEQ ID NO: 74771 - protein, 67 aa, Setaria italica
  Transcript Sequence Number=SeqID_8797
  Gene Ontology: Mol. function=galactosylgalactosylxylosylprotein 3 -beta-glucuronosyltransferase activity; Cellular component=membrane
  Homolog annotation: Hit_ID=Q50HV6; Match level="QueryCoverage=100%, HitCoverage=14%, E-value=5e-24, Identity=77%"; Hit description =Glycosyltransferase
AGRVEPLAGCAQAALAWSLRSESLHDVKFPHEWKIDPPLLNTGSHQENAKPETPLKQTNLASSEDQH

SEQ ID NO: 74772 - protein, 129 aa, Setaria italica
  Transcript Sequence Number=SeqID_8798
  Gene Ontology: Mol. function=kinase activity; Cellular component =chloroplast; Biological process=carbohydrate metabolic process
  Homolog annotation: Hit_ID=Q10H44; Match level="QueryCoverage=100%, HitCoverage=20%, E-value=5e-53, Identity=77%"; Hit description=PfkB -type carbohydrate kinase family protein, putative, expressed
PLVCCFGPAKYSFIPSGRPANRLIDHEIHDRMRDMFWSPDKFVRAPGGPSSNVALALAAIGGRVAFMGKLGDDEYGQSLLYHLNVNGVQTRAVCMDSSAPTAVSLMKVTSKGSLKTNCVKPCAEDCFLQ

SEQ ID NO: 74773 - protein, 79 aa, Setaria italica
  Transcript Sequence Number=SeqID_8799
MGGCFSSSGASAGEDAGGYGCEKRVMRVWPSDEDGGRWPYVGERDVDNKAAIFIANFHRHQSGVVCTDCPDQQPQAPAA

SEQ ID NO: 74774 - protein, 245 aa, Setaria italica
  Transcript Sequence Number=SeqID_8800
  Gene Ontology: Mol. function=voltage-gated potassium channel activity; Cellular component=integral to membrane; Biological process=potassium ion transport
  Homolog annotation: Hit_ID=Q69KL7; Match level="QueryCoverage=100%, HitCoverage=36%, E-value=1e-120, Identity=85%"; Hit description =Putative cyclic nucleotide and calmodulin-regulated ion channel
  Pfam annotation: Domain name=cNMP_binding; Domain location=62-162; Score=24.9; E_value=0.00034; Accession=PF00027.21; Description =Cyclic nucleotide-binding domain
RIIHYKWLATRGVDEESILIALPADLRRDIKRHLCLDLVRRVPLFSQMDDQLLDAICERLVSSLSTEGTYIVREGDLVTEMLFIIRGKLESSTTDGGRTGFFNSITLKPGEFCGEELLEWALVPKPTVNLPSSTRTVKAILEVEAFALRAEDLRFVASQFRRLHSRKLQHTFRYYSHHWKTWAACFIQHAWRRHKRRKMAKDLRMRESFSSMRSYEGHGSPEQNFTLRRGVSIIKELPKFRKPSE

SEQ ID NO: 74775 - protein, 588 aa, Setaria italica
  Transcript Sequence Number=SeqID_8801
  Gene Ontology: Mol. function=hydrolase activity, hydrolyzing O -glycosyl compounds; Cellular component=vacuole; Biological process =carbohydrate metabolic process
  Homolog annotation: Hit_ID=B6T0A9; Match level="QueryCoverage=99%, HitCoverage=87%, E-value=0.0, Identity=85%"; Hit description=Beta -fructofuranosidase 1
  Pfam annotation: Domain name=Glyco_hydro_32C; Domain location=421 -535; Score=181.7; E_value=2.1e-51; Accession=PF08244.4; Description =Glycosyl hydrolases family 32 C termi
  Pfam annotation: Domain name=Glyco_hydro_32N; Domain location=49-380; Score=668.4; E_value=6.4e-198; Accession=PF00251.12; Description =Glycosyl hydrolases family 32 N termi
  Pfam module annotation: Pfam domain module=Glyco_hydro_32C::Glyco _hydro_32N; Domain location=421-535::49-380
MSSRGPEAGVSEKTSGASSSGMLLGGGEGGGNAFPWSNAMLQWQRTGFHFQPQKNWMNDPNGPVYYKGWYHLFYQYNPDGAIWGNKIAWGHAVSRDLVHWRHLPLAMVPDQWYDINGVWTGSATTLPDGRLAMLYTGSTNESVQVQCLAVPSDPSDPLLTNWTKYEGNPVLFPPPAIGPKDFRDPTTAWFDPSDRTWRIVIGSKDPHHAGIAVTYKTKDFIHFDLLPGLLHRVEGTGMWECIDFYPVGTRGRGSENGIDMSDAISENGVVVGDVVHVMKASMDDDRHDYYALGRYDAAANAWTPLDAARDVGIGLRYDWGKFYASKTFYDPAKRRRVLWGWVGETDSERADVSKGWASLQSIPRTVLFDTKTGSNLLQWPVDEVETLRTNSTDLSGITIDYGSVFPLNLHRATQLDIVAEFEVDRHAVMALNEADVGYNCSTSGGAANRGALGPFGLLVLADKHLREQTAVYFYVAKGLDGGITTHFCQDESRSSSANDIVKRVVGSALPVLDGETLSLRVLVDHSIVESFAQGGRSTATSRVYPTEAIYANAGVYLFNNATAARVTAKKLVVHEMDSSYNHDYVAQL

SEQ ID NO: 74776 - protein, 121 aa, Setaria italica
  Transcript Sequence Number=SeqID_8802
  Gene Ontology: Mol. function=transferase activity, transferring glycosyl groups; Biological process=metabolic process
  Homolog annotation: Hit_ID=B6TY52; Match level="QueryCoverage=100%, HitCoverage=25%, E-value=2e-52, Identity=75%"; Hit description =Cytokinin-O-glucosyltransferase 2
APQEIVLAHSAVGCFVTHCGWNSTLEGIRNGVPLLCWPYFTDQFANQTYICDIWRVGIRVATVGREGIVTKEEITERLESLLGDGGVKERVNKLKELAESSMSGEGQSLKNLNAFMESIRK

SEQ ID NO: 74777 - protein, 33 aa, Setaria italica
  Transcript Sequence Number=SeqID_8803
RIPKSSSGFRTRLSSALALVLVLAASAFLLLQQ

SEQ ID NO: 74778 - protein, 136 aa, Setaria italica
  Transcript Sequence Number=SeqID_8804
  Homolog annotation: Hit_ID=Q7XTG7; Match level="QueryCoverage=98%, HitCoverage=28%, E-value=4e-66, Identity=88%"; Hit description =OSJNBa0041M06.1 protein
  Pfam annotation: Domain name=FrhB_FdhB_C; Domain location=1-102; Score=-8.4; E_value=4.6e-06; Accession=PF04432.5; Description =Coenzyme F420 hydrogenasedehydrogenase, beta subunit C terminus
GSIQEHMVHLKHLDGHIEEVPYFCLPANDLVDVIAPSCYSCFDYTNGLADLVVGYMGVPKYSGVSMTQHPQYITVRNDRGREMLSLVEGLLESTPTVSSGARQPFVMETVKADDAAKLGKGPSKPAPRFVGEILAF

SEQ ID NO: 74779 - protein, 218 aa, Setaria italica
  misc_feature (94)..(94): Xaa can be any naturally occurring amino acid
  misc_feature (163)..(163): Xaa can be any naturally occurring amino acid
  Transcript Sequence Number=SeqID_8805
  Homolog annotation: Hit_ID=Q7XTG7; Match level="QueryCoverage=79%, HitCoverage=37%, E-value=3e-77, Identity=80%"; Hit description =OSJNBa0041M06.1 protein
  Pfam annotation: Domain name=FrhB_FdhB_N; Domain location=126-201; Score=91.9; E_value=2.3e-24; Accession=PF04422.5; Description =Coenzyme F420 hydrogenasedehydrogenase, beta subunit N terminus
  Subcellular localization annotation: CTP_CleavageSite=31; ConfidenceScore=5.68e-01
MASTTCLSLSLHASSAPPSDPEPRRFSFAPSSSSSTSKRRREAGRAKVLREDWRQKSKPIPPGAVYPAKDHCSRCGLCDTYYVAHVKNACAFLXGDGMSRVEDLEPLVHGRGRKEGMNEMYFGVYDQLLYARKTEPVQGAQWTGIVTTIAVEMLKANMVDAVXDPDDRLAPRPVLARTPDEVIAAKGVKPTLSPNLNTLALVEVNHSFHTILCCVCCP

SEQ ID NO: 74780 - protein, 63 aa, Setaria italica
  misc_feature (58)..(58): Xaa can be any naturally occurring amino acid
  Transcript Sequence Number=SeqID_8806
  Homolog annotation: Hit_ID=Q7XTG7; Match level="QueryCoverage=88%, HitCoverage=11%, E-value=4e-24, Identity=94%"; Hit description =OSJNBa0041M06.1 protein
SREFNSFLWQAAGVKRLLFCGVGCQVQALRSVEKYLGLEKLYVLGTNCVDNGTREGLXKFLKA

SEQ ID NO: 74781 - protein, 134 aa, Setaria italica
  misc_feature (17)..(17): Xaa can be any naturally occurring amino acid
  Transcript Sequence Number=SeqID_8807
  Homolog annotation: Hit_ID=Q7XTG7; Match level="QueryCoverage=85%, HitCoverage=24%, E-value=5e-56, Identity=90%"; Hit description =OSJNBa0041M06.1 protein
  Pfam annotation: Domain name=FrhB_FdhB_C; Domain location=1-96; Score= -23.1; E_value=6.6e-05; Accession=PF04432.5; Description=Coenzyme F420 hydrogenasedehydrogenase, beta subunit C terminus
QVHLKHLDGHIEEVPYXCLPANDLVDVIAPSCYSCFDYTNGLADLVVGYMGVPKYSGVSMTQHPQYITVRNDRGREMLSLVEGLLESTPTVSSGARQPFVMETVKADDDKTKVRGKGPLRKPRLPKNLVRTKNY

SEQ ID NO: 74782 - protein, 314 aa, Setaria italica
  Transcript Sequence Number=SeqID_8808
  Homolog annotation: Hit_ID=Q7XTG7; Match level="QueryCoverage=96%, HitCoverage=64%, E-value=1e-166, Identity=93%"; Hit description =OSJNBa0041M06.1 protein
  Pfam annotation: Domain name=FrhB_FdhB_C; Domain location=48-213; Score=182.6; E_value=1.1e-51; Accession=PF04432.5; Description =Coenzyme F420 hydrogenasedehydrogenase, beta subunit C terminus
WFCYFCSDPDDRLAPRPVLARTPDEVIAAKGVKPTLSPNLNTLALVEAAGVKRLLFCGVGCQVQALRSVEKYLGLEKLYVLGTNCVDNGTREGLDKFLKAASSDPETVLHYEFMQDYKVHLKHLDGHIEEVPYFCLPANDLVDVIAPSCYSCFDYTNGLADLVVGYMGVPKYSGVSMTQHPQYITVRNDRGREMLSLVEGLLESTPTVSSGARQPFVMETVKADDAAKLGKGPSKPAPRFVGEILAFLLNLVGPKGLEFARYSLDYHTIRNYLHVRRAWGKRRAEQHIPGYAKKIVEAYDGSGQIESMLQQSRD

SEQ ID NO: 74783 - protein, 145 aa, Setaria italica
  Transcript Sequence Number=SeqID_8809
  Homolog annotation: Hit_ID=Q9FI46; Match level="QueryCoverage=74%, HitCoverage=40%, E-value=3e-48, Identity=79%"; Hit description =CRUMPLED LEAF
  Pfam annotation: Domain name=DUF1001; Domain location=11-145; Score= -13.6; E_value=8.7e-07; Accession=PF06206.3; Description=Protein of unknown function (DUF1001)
MPADRVVYCVLSVHSILIISYVLFICTNNNKFFSLQRFYMVKPCPKEMKCDVELSSYAIRDAEEYKNFCDRSKDQRPQPEEVIADIAEHLTTIHLSRCGRGKRCLYEGSTPPEGFPNNWSGASYCTSDLSIHKNGEVHIWYKGNK

SEQ ID NO: 74784 - protein, 65 aa, Setaria italica
  Transcript Sequence Number=SeqID_8810
  Homolog annotation: Hit_ID=Q2RAU9; Match level="QueryCoverage=100%, HitCoverage=18%, E-value=2e-18, Identity=81%"; Hit description=Dual specificity phosphatase, catalytic domain containing protein, expressed
MPHLVRERLYFGDIKDAIAALTDSSSTPTFTHVLSVVSSASISFITDCRPGLAIPTEEVRRVVAG

SEQ ID NO: 74785 - protein, 75 aa, Setaria italica
  Transcript Sequence Number=SeqID_8811
RTELRPLDYDKKNIRIQIIALHSKLWSLVFLSHFPFIGLQPFFKFLALLKVCRPIKGKWLRKTRDHNLEFRFYSP

SEQ ID NO: 74786 - protein, 85 aa, Setaria italica
  Transcript Sequence Number=SeqID_8812
  Gene Ontology: Mol. function=catalytic activity
  Homolog annotation: Hit_ID=Q01B77; Match level="QueryCoverage=74%, HitCoverage=20%, E-value=6e-10, Identity=44%"; Hit description =CNPV141 HAL3-like domain protein (ISS)
  Pfam annotation: Domain name=CHCH; Domain location=10-53; Score=14.1; E_value=0.064; Accession=PF06747.5; Description=CHCH domain
  Pfam annotation: Domain name=Cmc1; Domain location=5-65; Score=68.1; E_value=3.3e-17; Accession=PF08583.2; Description=Cytochrome c oxidase biogenesis protein Cmc1
  Pfam module annotation: Pfam domain module=CHCH::Cmc1; Domain location=10-53::5-65
TSLEMHPPLTLHRHPMCAEIIEAFQKCHVDHPVKKFFGECTDLKIKLDQCFRQEKALKRKANFEESKKFKERLQAYKREMAEETR

SEQ ID NO: 74787 - protein, 109 aa, Setaria italica
  Transcript Sequence Number=SeqID_8813
  Gene Ontology: Mol. function=substrate-specific transmembrane transporter activity; Cellular component=integral to membrane; Biological process=transmembrane transport
  Homolog annotation: Hit_ID=B4FS29; Match level="QueryCoverage=85%, HitCoverage=17%, E-value=2e-44, Identity=94%"; Hit description =Hexose carrier protein HEX6
MAIGGGGFAEGPAGAGYSGRVTSFVVLSCIVAGSGGILFGYDLGISGGVTSMESFLSKFFPDVYHQMRGDKKVSNYCRFDSELLTVFTSSLYVAGLVATLFASSVTRRF

SEQ ID NO: 74788 - protein, 154 aa, Setaria italica
  Transcript Sequence Number=SeqID_8814
  Gene Ontology: Mol. function=metal ion binding; Biological process =cell redox homeostasis
  Homolog annotation: Hit_ID=B6SQ45; Match level="QueryCoverage=74%, HitCoverage=77%, E-value=5e-23, Identity=50%"; Hit description =Protein binding protein
  Pfam annotation: Domain name=PHD; Domain location=63-107; Score=3.1; E_value=0.012; Accession=PF00628.21; Description=PHD-finger
  Pfam annotation: Domain name=zf-C3HC4; Domain location=64-104; Score =25.2; E_value=0.00014; Accession=PF00097.17; Description=Zinc finger, C3HC4 type (RING finger)
  Pfam annotation: Domain name=zf-RING-like; Domain location=64-104; Score=3.7; E_value=0.059; Accession=PF08746.3; Description=RING-like domain
  Pfam module annotation: Pfam domain module=PHD::zf-C3HC4::zf-RING -like; Domain location=63-107::64-104::64-104
MDGEMDWIAARFLLSTILGVHPLVVLDDGDRDDERFPVDDGVQQRVTVPAAVEAPEGVAGVSVCAVCTEEVAAGQAVVRLPCAHWYHAGCIAPWLRIRTTCPTCRAELPREGGPERSRPAVVHAARLAEVAMETAGGRLRREASYTMLAGMLPS

SEQ ID NO: 74789 - protein, 112 aa, Setaria italica
  Transcript Sequence Number=SeqID_8815
  Gene Ontology: Mol. function=heat shock protein binding; Cellular component=mitochondrial inner membrane; Biological process =intracellular protein transmembrane transport
  Homolog annotation: Hit_ID=B4FMD9; Match level="QueryCoverage=100%, HitCoverage=100%, E-value=1e-47, Identity=82%"; Hit description =Mitochondrial import inner membrane translocase subunit TIM14
  Pfam annotation: Domain name=DnaJ; Domain location=53-106; Score=9.5; E_value=0.00053; Accession=PF00226.23; Description=DnaJ domain
MATPLIAGLAVAATALAGRYGIQAWQAYKARPIVPRMRKFYEGGFQPTMNRREAALILGVRESANTEKVKEAHKRVMVANHPDAGGSHYLASKINEAKDVLTGKTKGGGSAF

SEQ ID NO: 74790 - protein, 291 aa, Setaria italica
  Transcript Sequence Number=SeqID_8816
  Gene Ontology: Mol. function=binding
  Homolog annotation: Hit_ID=B9SQS9; Match level="QueryCoverage=33%, HitCoverage=46%, E-value=3e-34, Identity=65%"; Hit description=O -linked n-acetylglucosamine transferase, ogt, putative
  Subcellular localization annotation: CTP_CleavageSite=48; ConfidenceScore=5.80e-01
MLLRSSSTPFLHPFLSSFPSSPSSLQLRRAFSDSHIPSLHRLSSTTPSGASKPTSGGLHTELPFSIYNTFGEHGGAEPLASQEEPRHDEPELLLQQRTSQPDHPEVPLFLARGLGIDRIASGFFTAGTDKTKQGAGAKMEGVEERLAPQDEAVAALDAQYKRMVDEQPGNALFLRNYAQFLHEVKGDPRRAEEYYSRAMLADPSDGEIKSQYAKLIWEVHRDQERSLGYFQKSVQAAPQNSHVLAAYASFLWEQDDDDLGQEEQGAGGAGAPDQRAAHQAGQVRELASATV

SEQ ID NO: 74791 - protein, 389 aa, Setaria italica
  Transcript Sequence Number=SeqID_8817
  Gene Ontology: Mol. function=metal ion binding
  Homolog annotation: Hit_ID=B6TDS7; Match level="QueryCoverage=94%, HitCoverage=78%, E-value=1e-129, Identity=66%"; Hit description=Zinc finger, C3HC4 type family protein
  Pfam annotation: Domain name=zf-C3HC4; Domain location=165-205; Score= 46.5; E_value=1e-10; Accession=PF00097.17; Description=Zinc finger, C3HC4 type (RING finger)
NPIVYAWLDGHSTDGEEDTDAPELAPVDDANVSQPLVAASGLEGDGFTPWVEKSLQPGSRMEMVNTSTLRQSLRGASAIEEGTPELRFQRVIQISQQHSIVRPGSVNRSQRAASPDADRLVWAIQRTHNSLEAARRQKMDSDKKVGGKGAAKKDGCCECSSSFECNICLDPAKQPVVTPCGHLFCWPCLYQWLHAHSANSECPVCKGEVLEVNVTPIYGRGGEEGDSANLDMPPRPRANRRESLRQQLQMTDTRGIATVVRQLIENQGIVRGLPSPTGIEMTVVPAGRQRARARRQQRQDNNASSSVPATAIMLHMGNVASESSNQIPLPPSNANNTAPVAPAAPQQSSSVEQLSNSSTTAVIVGEPGSSRRARPSESTVTRRTRRRPQ

SEQ ID NO: 74792 - protein, 176 aa, Setaria italica
  misc_feature (137)..(137): Xaa can be any naturally occurring amino acid
  misc_feature (157)..(157): Xaa can be any naturally occurring amino acid
  Transcript Sequence Number=SeqID_8818
  Gene Ontology: Mol. function=metal ion binding
  Homolog annotation: Hit_ID=B6TDS7; Match level="QueryCoverage=98%, HitCoverage=50%, E-value=1e-59, Identity=57%"; Hit description=Zinc finger, C3HC4 type family protein
TYPPEEQPMLDPIVYAWLDGHSTDGEEDTDAPELAPVDDANVSQPLVAASGLEGDGFTPWVERFVQPGSRMEMVNTSTLRQSLRGASAIEEGTPELRFQRVIQISQQHSIVRPGSVNRSQRAASPDADRLVWAIQRXPCLYQWLHAHSANSECPVCXGEVLEVNVTPIYGRGGEEG

SEQ ID NO: 74793 - protein, 241 aa, Setaria italica
  Transcript Sequence Number=SeqID_8819
  Homolog annotation: Hit_ID=B9S9N6; Match level="QueryCoverage=85%, HitCoverage=72%, E-value=2e-51, Identity=37%"; Hit description =Pentatricopeptide repeat-containing protein, putative
  Pfam annotation: Domain name=PPR; Domain location=156-190; Score =47.4; E_value=5.6e-11; Accession=PF01535.12; Description=PPR repeat
  Pfam annotation: Domain name=PPR; Domain location=191-225; Score=6.4; E_value=1.5; Accession=PF01535.12; Description=PPR repeat
  Pfam annotation: Domain name=PPR; Domain location=51-85; Score=36.2; E_value=1.3e-07; Accession=PF01535.12; Description=PPR repeat
  Pfam module annotation: Pfam domain module=PPR::PPR::PPR; Domain location=156-190::191-225::51-85
ATAAHSLVVKSGFDNELDVVITLTSMYAKFGCIVAARALFDTVPTPRVNVILWNAMISGYSKNGLANEAVQLFKQMRKVARSMTPDSVTLRSVILACAQLGSVELAEWMEDYVQGSEYRDDVLVNTALIDMYSKAGSIARARTVFERMHMQERDVVVWSALIGGYGVHGHVKEAVALFEDMKHAGVKPNDVTFLGLLSACNHAGVVEKGWSYFHSMKHDYGIEPRHPHYACIGWTLSLSSL

SEQ ID NO: 74794 - protein, 47 aa, Setaria italica
  Transcript Sequence Number=SeqID_8820
FLKKNVCQSIKPQGRRRNRSVFVSKILILYIVHDNQNVLLMNHSSFK

SEQ ID NO: 74795 - protein, 315 aa, Setaria italica
  misc_feature (8)..(8): Xaa can be any naturally occurring amino acid
  misc_feature (56)..(56): Xaa can be any naturally occurring amino acid
  misc_feature (83)..(83): Xaa can be any naturally occurring amino acid
  Transcript Sequence Number=SeqID_8821
  Gene Ontology: Mol. function=catalytic activity; Cellular component =plasma membrane
  Homolog annotation: Hit_ID=Q6YTI2; Match level="QueryCoverage=95%, HitCoverage=67%, E-value=1e-148, Identity=85%"; Hit description =Probable protein phosphatase 2C 15
  Pfam annotation: Domain name=PP2C; Domain location=1-170; Score= -57.4; E_value=0.015; Accession=PF00481.13; Description=Protein phosphatase 2C
DKDFQTKXRSSGTTVTFVIIDGLVITVASVGDSRCVLEAEGSIYHLSSDHRFDASXEEVDRVTESGGDVGRLNVVGGAEIGPXLRCWPGGLCLSRSIGDQDVGQFIVPVPLVKQVKLSTAGGRLIIASDGVWDALSPEAAFNCSRELPPEPAAEQIVKTAVHSKGLRDDTTCIVVDIVAEKNSSSMPLPKKQQGIGVFKNMFCKKKSSDSSSHADREYMDPDIVEEMFEDGCALLSRRLDSEYPVRNMFKLFICAICQVELKPNQGISVHEDSSQPGSLRRWDGPFLCQSCQEKKEAMEGKHRSRDSSRNSGSGE

SEQ ID NO: 74796 - protein, 96 aa, Setaria italica
  Transcript Sequence Number=SeqID_8822
  Homolog annotation: Hit_ID=Q0MVR3; Match level="QueryCoverage=100%, HitCoverage=17%, E-value=2e-31, Identity=71%"; Hit description=DNA damage signaling and repair protein
  Pfam annotation: Domain name=Nbs1_C; Domain location=14-75; Score= -3.6; E_value=0.043; Accession=PF08599.2; Description=DNA damage repair protein Nbs1
LPRPAPAAATEVRGVNFKRFRKRETVSGNSFKDLVPFAREPYRESDYEAGTVTDFMREEKQRKQMEAIAEDLFNNAKSKKRAAAGSSIQTLLTGCR

SEQ ID NO: 74797 - protein, 80 aa, Setaria italica
  Transcript Sequence Number=SeqID_8823
DAASRPTMKQVLQQLIQYDRTASVAGACRDARDDDDDNAARAQLGKGKKGDRGVKGALDSGGEFWDGDVEMSSGFVAHPV

SEQ ID NO: 74798 - protein, 80 aa, Setaria italica
  Transcript Sequence Number=SeqID_8824
  Gene Ontology: Mol. function=aspartic-type endopeptidase activity; Cellular component=chromatin; Biological process=DNA integration
  Homolog annotation: Hit_ID=Q688L2; Match level="QueryCoverage=80%, HitCoverage=3%, E-value=4e-20, Identity=65%"; Hit description =Putative polyprotein
  Subcellular localization annotation: CTP_CleavageSite=27; ConfidenceScore=5.11e-01
QTNTFSTLANFFAHVATQFGAKIKAVQCENGREFDNSSTRTFFLTHGMHLRMPCPYTSSQNGKAGRIIRSTNNIIRSLLF

SEQ ID NO: 74799 - protein, 122 aa, Setaria italica
  Transcript Sequence Number=SeqID_8825
  Homolog annotation: Hit_ID=B6UG75; Match level="QueryCoverage=56%, HitCoverage=69%, E-value=4e-16, Identity=66%"; Hit description=Wound- induced protein WI12 containing protein
  Pfam annotation: Domain name=WI12; Domain location=25-121; Score =79.5; E_value=1.2e-20; Accession=PF07107.3; Description=Wound -induced protein WI12
GREAADSGATRRGHGNRTGGGDERQLRIGGETGNGGFAFTPRSVDAFGSTVIAEGADETRQLYWVHAWTVGPDGVITQLREYFNTDLTVTLLSGAASAKNAAAIAAAPPKQDAASSSFPYLT

SEQ ID NO: 74800 - protein, 98 aa, Setaria italica
  Transcript Sequence Number=SeqID_8826
  Homolog annotation: Hit_ID=B6UG75; Match level="QueryCoverage=50%, HitCoverage=49%, E-value=5e-14, Identity=78%"; Hit description=Wound- induced protein WI12 containing protein
  Pfam annotation: Domain name=WI12; Domain location=32-98; Score=58.8; E_value=2e-14; Accession=PF07107.3; Description=Wound-induced protein WI12
  Subcellular localization annotation: CTP_CleavageSite=32; ConfidenceScore=5.63e-01
VFLWFVSSLFFFFFFFFLFFFLFFLLTKFLVLLALAGGGSNSSSSFRFAPRSVDAFGSTVIAEGGDQERGVYWVHAWTVGADGVITQLREYFNTDLTV

SEQ ID NO: 74801 - protein, 246 aa, Setaria italica
  misc_feature (241)..(241): Xaa can be any naturally occurring amino acid
  Transcript Sequence Number=SeqID_8827
  Homolog annotation: Hit_ID=B9T6C1; Match level="QueryCoverage=43%, HitCoverage=63%, E-value=3e-19, Identity=51%"; Hit description=Wound- induced protein, putative
  Pfam annotation: Domain name=WI12; Domain location=124-246; Score =109.0; E_value=1.6e-29; Accession=PF07107.3; Description=Wound -induced protein WI12
STGLVSSFRFVSFPSLCFEYCFSVAGQGGLPRSPAKGSIEEPARGSRLELATHHQGQGAASPRPQEAAELAALVVEESEEQRNRFLVLRLYEALNARDARRAQELLAADLEWWFHGPPARQHMMRLLTGAEKGNGGFAFTPRSVDAFGSTVIAEGADETRQLYWVHAWTVGPDGVITQLREYFNTDLTVTLLSGAASAKNAAAIAAAPPKQDAASSSSSSPSSASSSAGPKCLWQSRRADXAHKSL

SEQ ID NO: 74802 - protein, 188 aa, Setaria italica
  Transcript Sequence Number=SeqID_8828
  Homolog annotation: Hit_ID=B6UG75; Match level="QueryCoverage=52%, HitCoverage=100%, E-value=8e-32, Identity=72%"; Hit description =Wound-induced protein WI12 containing protein
  Pfam annotation: Domain name=WI12; Domain location=92-188; Score =161.3; E_value=2.9e-45; Accession=PF07107.3; Description=Wound -induced protein WI12
CICLGLLAQQDTKTIQSRALGSKELAASAKLEEEPLVLGATAAGESEEQRNKFLVLRLYEALNGRDHAGVQALLAADLEWWFHGPPKHQHMMRVLTGGGSNSSSSFRFAPRSVDAFGSTVIAEGGDQERGVYWVHAWTVGADGVITQLREYFNTDLTVTRLAAATKCIWQSRRPDRATNSLPGLVLAL

SEQ ID NO: 74803 - protein, 130 aa, Setaria italica
  Transcript Sequence Number=SeqID_8829
  Gene Ontology: Mol. function=nucleic acid binding
  Pfam annotation: Domain name=Alba; Domain location=18-87; Score=90.6; E_value=5.5e-24; Accession=PF01918.13; Description=Alba
MEEVTEGVNNLAITEPHKKNRIQVSNTKKPLFFYVNLAKRYMQQHEEVELSALGMAIATVVTVAEILKNNGLAVEKKIMTSTVDVKDDSRSRPIQKAKIEIVLGKTEKFDELMAAADEEREAAKAAEEQS

SEQ ID NO: 74804 - protein, 126 aa, Setaria italica
  Transcript Sequence Number=SeqID_8830
  Subcellular localization annotation: CTP_CleavageSite=26; ConfidenceScore=5.08e-01
LSPASGASAFRPPPQAPPSSAAFFLNAAAAAAGQDFGDDGGNGPHSFMQTKPFHGLMQLPDLQGNGAGGPGGSAPGLFNLGFFANNGNSSGSSHEHASQGLMNNDQFSGGAGGGGGSEASAAGIFG

SEQ ID NO: 74805 - protein, 429 aa, Setaria italica
  misc_feature (22)..(22): Xaa can be any naturally occurring amino acid
  Transcript Sequence Number=SeqID_8831
  Gene Ontology: Cellular component=cytoplasm; Biological process =response to stress
  Homolog annotation: Hit_ID=B6THA0; Match level="QueryCoverage=99%, HitCoverage=83%, E-value=9e-80, Identity=85%"; Hit description=Heat shock protein
  Pfam annotation: Domain name=DUF926; Domain location=308-412; Score =270.8; E_value=3e-78; Accession=PF06047.3; Description=Domain of Unknown Function (DUF926)
RDRRRQWSPYHNDRGRDRDRAXPFRGGGDGGGAWSASDDDNDKELQGLSYFEYRRIKRQKLRKSKKRCIWNITPSPPRAEGDDENYGYSDVEEEKKESPEKKSSPEGSEEDSKDASGSESGESDSLSESSESEGSRRKRKGRKSSRRSSKRSRRRHRRRSYHSESEDESVSNDDSEGSLDSEDSRDRRSKKRSRRHRKSRRGRSSRKKKRSQDTASEQSSEEAEHSDPSPRDSKKKSKTSKRKRSKRSDSEESLPSDTNPDVKEDDEEIKEPEIDPEAIKFKERLEAQKKAALENDMPVGPMPLPRAEGHISYGGALRPGEGDAIAQYVQQGKRIPRRGEVGLSAEEIQKFEDLGYVMSGSRHQRMNAIRIRKENQVYSAEDKRALAMFNYEEKSKREHKVMADLQRLVQRTIGNDVGPSHDPFATTDS

SEQ ID NO: 74806 - protein, 89 aa, Setaria italica
  Transcript Sequence Number=SeqID_8832
IENGRTTINVPWVGGDKKGTREVKPAQTIAKTRPTPDFFLEYCKLLQAQPQHGILLHSIQLNAVAGFQNENPNPANRDKPKFSCNQLNC

SEQ ID NO: 74807 - protein, 75 aa, Setaria italica
  Transcript Sequence Number=SeqID_8833
  Gene Ontology: Mol. function=protein binding
KQKETPLVGDNGELQQELHTFVCDVSWVCQVLSKLEMVKCIVLYWVGVSSDVVEAVDAVCPGHDCLNTRLKVVEV

SEQ ID NO: 74808 - protein, 469 aa, Setaria italica
  misc_feature (138)..(138): Xaa can be any naturally occurring amino acid
  misc_feature (154)..(154): Xaa can be any naturally occurring amino acid
  misc_feature (221)..(221): Xaa can be any naturally occurring amino acid
  misc_feature (230)..(230): Xaa can be any naturally occurring amino acid
  misc_feature (301)..(301): Xaa can be any naturally occurring amino acid
  Transcript Sequence Number=SeqID_8834
  Gene Ontology: Mol. function=protein serine/threonine kinase activity; Biological process=protein amino acid phosphorylation
  Homolog annotation: Hit_ID=C4P7U4; Match level="QueryCoverage=93%, HitCoverage=96%, E-value=0.0, Identity=77%"; Hit description=CBL -interacting protein kinase 10 (Fragment)
  Pfam annotation: Domain name=NAF; Domain location=311-370; Score =95.5; E_value=1.9e-25; Accession=PF03822.6; Description=NAF domain
  Pfam annotation: Domain name=Pkinase; Domain location=30-272; Score =247.3; E_value=3.7e-71; Accession=PF00069.17; Description=Protein kinase domain
  Pfam annotation: Domain name=Pkinase_Tyr; Domain location=30-270; Score=-2.6; E_value=1.5e-13; Accession=PF07714.9; Description =Protein tyrosine kinase
  Pfam module annotation: Pfam domain module=NAF::Pkinase::Pkinase_Tyr; Domain location=311-370::30-272::30-270
LSVSPANFRGCKVCSRAYIMKERSVLMERYEIGRLLGQGTFVKVNLATGQTVAIKMIHKDKIMKTGLMDQIKREISIMRLVRHPNILQLFEVMATKNRIYFVLEYAKGGELFKKIEKGKLTEEAARKYFQQLISAVDXCDLKPENLLLDENETXKVCDFGLSAVAESKRQDGMLHTACGTPAYVAPEVLSRKGYSGAKADVWSCGVILFVLVASYLPFHDXNLIEMYKKXSKAEYRCPRYFSAALKELLYGILDPDPNTRMPISMIKRSAWYRKPVGLAVLKTEIVNKICTEATTSGLTDXRSERNQGSLRLTNLNAFNIISLSTGFDLSCMFDEKYSQREARFTSEQSAGAVFGKLKELARRLKLKVTKKDGVLKLATTKEGRNGILELDAEIFEIAPSFVLVGLKKTNGDTLEYQTLMKDGIRPSLKDIVWTWQGDQQQSCILRHAGQQQLQLPTTAAISTTPVIHQ

SEQ ID NO: 74809 - protein, 94 aa, Setaria italica
  Transcript Sequence Number=SeqID_8835
  Pfam annotation: Domain name=VQ; Domain location=18-48; Score=49.3; E_ value=1.5e-11; Accession=PF05678.6; Description=VQ motif
HQHQHQYQQQARQPVIIYDASPKVIHTKPGDFMALVQRLTGPGSSSQAQFDAAAASGAGAGAGTSSDAPSQAASAMEFEPREFLLSPTAALSPA

SEQ ID NO: 74810 - protein, 145 aa, Setaria italica
  Transcript Sequence Number=SeqID_8836
  Subcellular localization annotation: CTP_CleavageSite=69; ConfidenceScore=5.47e-01
PARAYDAAALKLRGPGATTNYPSADAKTAAAAAPATSGSGSGSIVLSEGASSSSSSSRDSPLAPSLALPATAAAQPCHLFLDPTTTTVVVVAPALLQFLPPKSEEEHSFAGSSSSPYVVFDSAPPAVGLGLDLNLALPAPGTMVV

SEQ ID NO: 74811 - protein, 102 aa, Setaria italica
  Transcript Sequence Number=SeqID_8837
  Gene Ontology: Mol. function=protein disulfide oxidoreductase activity; Cellular component=cytoplasm; Biological process=glycerol ether metabolic process
  Homolog annotation: Hit_ID=Q39362; Match level="QueryCoverage=92%, HitCoverage=78%, E-value=2e-11, Identity=31%"; Hit description =Thioredoxin H-type 2
  Pfam annotation: Domain name=Thioredoxin; Domain location=1-100; Score=-5.9; E_value=0.00064; Accession=PF00085.12; Description =Thioredoxin
TTTQLERELSRNPNKLIVLEFMAPWSEPSKVMKIPYRQIAGNSSKDKVNFYTLNVDKFRDLAEEVGVEALPTYFLVKDEDVKDMIVGMKRQELEKAIGDWSK

SEQ ID NO: 74812 - protein, 110 aa, Setaria italica
  Transcript Sequence Number=SeqID_8838
  Gene Ontology: Mol. function=protein disulfide oxidoreductase activity; Cellular component=cytoplasm; Biological process=glycerol ether metabolic process
  Homolog annotation: Hit_ID=Q39362; Match level="QueryCoverage=85%, HitCoverage=78%, E-value=2e-11, Identity=31%"; Hit description =Thioredoxin H-type 2
  Pfam annotation: Domain name=Thioredoxin; Domain location=4-108; Score=8.6; E_value=4.3e-05; Accession=PF00085.12; Description =Thioredoxin
MAGVVTITTTTQLERELSRNPNKLIVLEFMAPWSEPSKVMKIPYRQIAGNSSKDKVNFYTLNVDKFRDLAEEVGVEALPTYFLVKDEDVKDMIVGMKRQELEKAIGDWSK

SEQ ID NO: 74813 - protein, 65 aa, Setaria italica
  Transcript Sequence Number=SeqID_8839
YWVDIQCFLMLGGVRVYSYYIVSLVNLARSTCHGTTIFCCQLITSTMNLSRQDHSAAGSIAGDVW

SEQ ID NO: 74814 - protein, 142 aa, Setaria italica
  Transcript Sequence Number=SeqID_8840
  Gene Ontology: Mol. function=RNA-directed DNA polymerase activity; Cellular component=chromatin; Biological process=chromatin assembly or disassembly
  Homolog annotation: Hit_ID=Q2QQD0; Match level="QueryCoverage=97%, HitCoverage=6%, E-value=2e-30, Identity=52%"; Hit description =Retrotransposon protein, putative, unclassified
HPPRHFGITNLTASAVPELETRLTERDLLSKLIQQQLLRAQQRMKSQADKLRTEREFQVNDLVYLKLQPYNQTSVASRSNQKLSFKFYGPFKVLQRVGSVAYKLDLPVECRIHPVVHVSQLKKHVSATTPISSELPSLPVDS

SEQ ID NO: 74815 - protein, 97 aa, Setaria italica
  misc_feature (9)..(9): Xaa can be any naturally occurring amino acid
  Transcript Sequence Number=SeqID_8841
  Gene Ontology: Mol. function=tRNA isopentenyltransferase activity; Biological process=tRNA processing
  Homolog annotation: Hit_ID=B3VS79; Match level="QueryCoverage=100%, HitCoverage=21%, E-value=5e-43, Identity=83%"; Hit description =Isopentenyl transferase
EATKLDYDXFCIFLASPRIELYRALDLRCEEMLADTGGLLSEASWLLDIGLHPNMNSATRAIGYKQAMEYLLHCRQNGGESTPQEFLKFLAKFTRSN

SEQ ID NO: 74816 - protein, 57 aa, Setaria italica
  Transcript Sequence Number=SeqID_8842
TSSVYKHLQHYPHIYMQFSSTRTGTRLYKMRPLLRDKKSNHPQCLVFFSGNKRHGCN

SEQ ID NO: 74817 - protein, 246 aa, Setaria italica
  Transcript Sequence Number=SeqID_8843
  Homolog annotation: Hit_ID=B6U8T2; Match level="QueryCoverage=100%, HitCoverage=41%, E-value=9e-80, Identity=64%"; Hit description =Growth-regulating factor 1
  Subcellular localization annotation: CTP_CleavageSite=28; ConfidenceScore=5.46e-01
NPGSLFPFSKQNNPFEVTSSRPEFGLVSSDSLMSSPHSSLENVNLLSSQSLNENQSSASLQHFVDWPRTPAQGGLSWPDAEDMQAQRSQLSVSAPMASSELSSASTSPIHEKLMLSPLKLSREYSPIGLSIAASRDEVSQLEANWATMFRDSSMGGPLGEVLTKNGNAEAKNCLSAPLNLLTDFWDSSPGMESSPVGVLQKTTFGSVSSSTGSSPRMENHGAYDGISNLRDDLGSIVVSHPNIRLL

SEQ ID NO: 74818 - protein, 87 aa, Setaria italica
  Transcript Sequence Number=SeqID_8844
NRDYRRRSRSRSRERYDQDRYRDSDHRRRSRTRSVSPDYDRKHDRNSRSPAHRSPSHGKGHSPRRIPSCEGTPSRPRDGRSPRSGSH

SEQ ID NO: 74819 - protein, 234 aa, Setaria italica
  Transcript Sequence Number=SeqID_8845
  Gene Ontology: Mol. function=nucleic acid binding; Cellular component= nuclear speck; Biological process=nuclear mRNA splicing, via spliceosome
  Homolog annotation: Hit_ID=B6T2T8; Match level="QueryCoverage=47%, HitCoverage=51%, E-value=3e-48, Identity=83%"; Hit description =Splicing factor, arginine/serine-rich 2
  Pfam annotation: Domain name=RRM_1; Domain location=34-104; Score =78.8; E_value=2e-20; Accession=PF00076.14; Description=RNA recognition motif. (a.k.a. RRM, RBD, o
  Subcellular localization annotation: CTP_CleavageSite=15; ConfidenceScore=5.32e-01
PTAPPPSSRPAPSPAAMSHFRRSGPPENRDTFSLLVLNVSFRTTADDLFPLFDRYGDVVDIYIPRDRRTGDSRGFAFVRYNYEGEAQDAVDGLDGRKVDGRAIMVQFAKYGPNSEKIHRGRITEEIPKPRGHFRSRSPRWRYRDDYRDRDYRRRSRSRSRERYDQDRYRDSDHRRRSRTRSVSPDYDRKHDRNSRSPAHRSPSHGKGHSPRRIPSCEGTPSRPRDGRSPRSGSH

SEQ ID NO: 74820 - protein, 75 aa, Setaria italica
  Transcript Sequence Number=SeqID_8846
  Gene Ontology: Cellular component=cytoskeleton
  Homolog annotation: Hit_ID=Q9AXA6; Match level="QueryCoverage=88%, HitCoverage=21%, E-value=1e-16, Identity=62%"; Hit description =Probable protein ABIL1
  Subcellular localization annotation: CTP_CleavageSite=16; ConfidenceScore=5.09e-01
DRKNLLCRFNRSTSSDAMQKVGTKNQSGVKEFSTFHSFDNPKGRAIQKAPVGTKSMLAALFIKHKSAKMKKIAVR

SEQ ID NO: 74821 - protein, 297 aa, Setaria italica
  Transcript Sequence Number=SeqID_8847
  Gene Ontology: Mol. function=protein binding; Cellular component =cytoskeleton
  Homolog annotation: Hit_ID=Q6I588; Match level="QueryCoverage=92%, HitCoverage=93%, E-value=1e-116, Identity=73%"; Hit description =Probable protein ABIL4
MQALRHGPAAGGGWGGVAGAGPTTVDEASMERSKSFIKALQELQNLRPQLYSASEYCEKSYLHSEQKQMVLDNLKDYAVRAVVNAVDHLGTVAYKLTDLFEQQASEVSTFELKVARLNQQVFTCQVYTDKEGLRQQQMMGTNIKHHKHYILPSTGHKRSPAHAHLPADTDQESKPRPYPSAKTLSWHLASENSTTANAAHKPTFALVDTASSKPASGKERSASPMRRPLQFNRSTSSDAMQKVGTKNQSGVKEFSTFHSFDNPKGRAIQKAPVGTKSMLAALFIKHKSAKMKKIAVR

SEQ ID NO: 74822 - protein, 364 aa, Setaria italica
  misc_feature (52)..(52): Xaa can be any naturally occurring amino acid
  Transcript Sequence Number=SeqID_8848
  Gene Ontology: Mol. function=protein binding; Cellular component =cytoskeleton
  Homolog annotation: Hit_ID=B6TCZ2; Match level="QueryCoverage=82%, HitCoverage=100%, E-value=1e-146, Identity=83%"; Hit description =Protein ABIL1
TPPLGTRCTWETGKARGAAREASRVPCFVLTCRGHPASSSSPRIRPVPPPSXTGGGGVGQWAEAMHHEPWRPGAETAGAGAGPAPTTVDEASMERSKSFVKALQELKNLRPQLYSASEYCEKSYLHSEQKQMVLDNLKDYAVRAVVNAVDHLGTVAYKLTDLYEQQASEVSTFELKVACLNQQVLTCQTYTDKEGLRQQQMTGAARRHHKHYIVPYAGNKRMQSFSEMQGNADFDSTPRPYSSAKTLQWHLVSEKNSKSNRPDQSESTPGETKTTKPSSSGFRLLGKESSASPLSKHVQSNLTSLDIVSVGMKDQPGTRHLSSFSSFDNPRGRQIQKAPLRTKSMLAAFFVKHRSAKMKNVSVR

SEQ ID NO: 74823 - protein, 172 aa, Setaria italica
  Transcript Sequence Number=SeqID_8849
  Gene Ontology: Cellular component=plasma membrane
  Homolog annotation: Hit_ID=B6T0C0; Match level="QueryCoverage=86%, HitCoverage=68%, E-value=1e-76, Identity=91%"; Hit description=Heme -binding protein 2
  Pfam annotation: Domain name=SOUL; Domain location=29-172; Score =207.7; E_value=3.1e-59; Accession=PF04832.4; Description=SOUL heme -binding protein
MARRSSLLLAAAAAALLAVAAAVPPTCERIECPAYEVVDSANGFEIRRYTDAMWVSTSPIEDISFVAATRAGFLQLFNYIQGKNAYNETIEMTAPVLTLVLPSDGPFCASSFVVSFYVPAKNQADPPPAEGLRVHRWAGARYAAVRRFGGFVSDADVGEQAARLDASLQGTK

SEQ ID NO: 74824 - protein, 362 aa, Setaria italica
  misc_feature (354)..(354): Xaa can be any naturally occurring amino acid
  Transcript Sequence Number=SeqID_8850
  Gene Ontology: Mol. function=actin binding; Cellular component =cytoskeleton
  Homolog annotation: Hit_ID=Q84TX2; Match level="QueryCoverage=99%, HitCoverage=16%, E-value=2e-61, Identity=44%"; Hit description=SCAR -like protein 1
EVLSAGHFPVESDYQEELLESSHNAGVHSLCDLDKDFAVSLKCNTMGEQPEDVDDQDLAWGMPDQDFTSTNPFMDPAYMLSLTQTCPSPIVSCQPCFPEEQDFLSELLVQHDNMGAAADSLWEPATPPDEAPLPSEVMTEEDFRSFCREYHEINFSAAAEGCHSEPASDSNNISNAFLVSESDFPSSVSALPVKLNQEACVHSKFGSQCAEPSSTMDIQGATSMTFSGKEDLTDETPGVDSHLKSDASFSVNRSSELDMLSVPVDLQQEQLSGIDSHSSSPLLDKEMTGEGCCSPSSDVVEVKHDLEIHANLALHSFINETGDELDVAVQVEPEVGAHADDNQDIPCCSTSEKXDSLMGKPV

SEQ ID NO: 74825 - protein, 174 aa, Setaria italica
  misc_feature (13)..(13): Xaa can be any naturally occurring amino acid
  Transcript Sequence Number=SeqID_8851
  Gene Ontology: Mol. function=protein binding; Cellular component =signalosome; Biological process=red or far red light signaling pathway
  Homolog annotation: Hit_ID=Q8W207; Match level="QueryCoverage=85%, HitCoverage=33%, E-value=3e-70, Identity=85%"; Hit description=COP9 signalosome complex subunit 2
  Pfam annotation: Domain name=PCI; Domain location=49-153; Score =119.5; E_value=1.1e-32; Accession=PF01399.19; Description=PCI domain
FKNYDEAGNPRRXIQCLKYLVLANMLMESEVNPFDGQEAKPYKNDPEILAMTNLIAAYQKNDIMEFEKILKSNRRTIMDDPFIRNYIEDLLKNIRTQVLLKLIKPYTRIRIPFISQELNVPEKDVEQLLVSLILDNRIQGHIDQVNKLLTERECCTMERPMELIHSSFSFSVSA

SEQ ID NO: 74826 - protein, 81 aa, Setaria italica
  Transcript Sequence Number=SeqID_8852
  Gene Ontology: Mol. function=protein binding; Cellular component =signalosome; Biological process=red or far red light signaling pathway
  Homolog annotation: Hit_ID=Q8W207; Match level="QueryCoverage=95%, HitCoverage=17%, E-value=2e-36, Identity=90%"; Hit description=COP9 signalosome complex subunit 2
GKMHMAERQWAEAATDFFEAFKNYDEAGNPRRIQCLKYLVLANMLMESEVNPFDGQEAKPYKNDPEILAMTNMMSFFWYAL

SEQ ID NO: 74827 - protein, 439 aa, Setaria italica
  Transcript Sequence Number=SeqID_8853
  Gene Ontology: Mol. function=protein binding; Cellular component =signalosome; Biological process=red or far red light signaling pathway
  Homolog annotation: Hit_ID=Q8W207; Match level="QueryCoverage=99%, HitCoverage=99%, E-value=0.0, Identity=82%"; Hit description=COP9 signalosome complex subunit 2
  Pfam annotation: Domain name=PCI; Domain location=305-409; Score =123.9; E_value=5.3e-34; Accession=PF01399.19; Description=PCI domain
MGSDADMEDYGFEYSDEEPEEQDVDIENQYYNSKGMVETDPEGALAGFDQVVKMEPEKAEWGFKALKQTVKLYYKLVKYKEMMDAYREMLTYIKSAVTRNYSEKCINNIMDFVSGSASQNFSLLQEFYQTTLKALEEAKNERLWFKTNLKLCKIWFDMGEYGRMSKILKELHKSCQKEDGSDDQKKGTQLLEVYAIEIQMYTETKNNKKLKELYQRALSIKSAIPHPRIMGIIRECGGKMHMAERQWAEAATDFFEAFKNYDEAGNPRRIQCLKYLVLANMLMESEVNPFDGQEAKPYKNDPEILAMTNLIAAYQKNDIMEFEKILKSNRRTIMDDPFIRNYIEDLLKNIRTQVLLKLIKPYTRIRIPFISQELNVPEKDVEQLLVSLILDNRIQGHIDQVNKLLERGDRSKGMRKYNAIDKWNTQLKTIYQTVSNRVG

SEQ ID NO: 74828 - protein, 233 aa, Setaria italica
  Transcript Sequence Number=SeqID_8854
  Gene Ontology: Mol. function=protein disulfide oxidoreductase activity; Cellular component=chloroplast; Biological process=cell redox homeostasis
  Homolog annotation: Hit_ID=Q2QX01; Match level="QueryCoverage=100%, HitCoverage=81%, E-value=1e-124, Identity=91%"; Hit description =Monothiol glutaredoxin-S12, chloroplastic
  Pfam annotation: Domain name=Glutaredoxin; Domain location=145-212; Score=96.0; E_value=1.3e-25; Accession=PF00462.16; Description =Glutaredoxin
ASPVPIPPESAQPPLDEEALPPKPGVYGVYDAAGELQFVGISRNVRASVEGHRRKVPADLCASVKVSVADEETPDRAVLTNAWKSWMEEHIESTGKAPPGNVAGNNTWVGAPQRPPDLRLTPGRHVQLTVPLEQLIDRLVKENKVVAFIKGSRSAPQCGFSQRVVGILEAHGVDFVTVDVLDEEHNHGLRETLKTYSNWPTFPQLFVGGELVGGCDIISSMAEKGELSALFQK

SEQ ID NO: 74829 - protein, 75 aa, Setaria italica
  Transcript Sequence Number=SeqID_8855
  Gene Ontology: Mol. function=ATP binding
  Homolog annotation: Hit_ID=Q01M14; Match level="QueryCoverage=53%, HitCoverage=5%, E-value=1e-15, Identity=92%"; Hit description =OSIGBa0148D14.7 protein
SIRVLCAVACVRDVSRWASSLSFSGYLCPHQFFISASGMDHVRVHPRFLHSNATSHKWALGALAELLDNSLDEVS

SEQ ID NO: 74830 - protein, 788 aa, Setaria italica
  Transcript Sequence Number=SeqID_8856
  Gene Ontology: Mol. function=ATP binding
  Homolog annotation: Hit_ID=Q01M14; Match level="QueryCoverage=87%, HitCoverage=88%, E-value=0.0, Identity=73%"; Hit description =OSIGBa0148D14.7 protein
  Pfam annotation: Domain name=HATPase_c; Domain location=147-341; Score=8.7; E_value=0.01; Accession=PF02518.18; Description=Histidine kinase-, DNA gyrase B-, and HSP90-like ATPase
VFFSPPVVKTEAAEERGSLPRTPAAATAGANGGAASASPAAVIDLSSSDSDSDGEGAGGSGKRARGAGGGGSAGKRARVSAAVDLPPGFLEPIPLPPPVVPAACATKQFWKAGDYDGKPLGNGVPQPSASGMDHVRVHPRFLHSNATSHKWALGALAELLDNSLDEVINGATYVNIDMLENEKDSDKEMSRMLLVEDDGGGMDPDKMRQCMSLGYSVKSKIASTIGQYGNGFKTSTMRLGADVLVFSRSRGKSGKRPTQSIGMLSYTFLRSTGKEDIIVPMIDYEYKQGWERMVRTTSDDWNTSLRTIIAWSPYSTEAELLEQFNSMKEQGTRIIIYNLWEDDQGDLELDFDADVHDIQLRGGNRDEKNIQMANQFPNSKHYLTYRHSLRSYASILYLRLPNYFQMILRGKEIEHHNIVTDMMLKKEVTYRPVAPNGHPKDSNMVADVTIGFVKDAKHHIDVQGFNVYHKNRLIKPFWRVWTAAGSGGRGVIGVLEANFIEPAHDKQDFERTTLLARLEARLVQMQKDYWSGNAHRIGYVAPRPGRISESGEGEIFPENTTSAQPSPYCSGKGYTYSKDFHNSKKSGKAGTSFGIQQRAEKSARTKRSTKSVLHGLPDSDDSDSEFVGTPSSRSRSHILNINQKSFQNGSIGLTTPQSSGLTERERVRTESQLMDPNATIDEYEAVIKQLRDENSSLKERLSKVEESMQQELVMERDKNKSLTERVEDLQRQLVSATKEQEALIDIFSEERTRRDLEEDSLKKKLKEASLTIQDLLEQLNNARKGRKF

SEQ ID NO: 74831 - protein, 63 aa, Setaria italica
  Transcript Sequence Number=SeqID_8857
  Subcellular localization annotation: CTP_CleavageSite=47; ConfidenceScore=5.43e-01
QQPSLPHINTHSHRAHTAHSTSARQANLRSSFLAIPIENAKTQIMISTSAVVTSATYFEKTKK

SEQ ID NO: 74832 - protein, 168 aa, Setaria italica
  Transcript Sequence Number=SeqID_8858
  Gene Ontology: Mol. function=protein kinase activity; Biological process=protein amino acid phosphorylation
  Homolog annotation: Hit_ID=B9S235; Match level="QueryCoverage=96%, HitCoverage=39%, E-value=3e-69, Identity=78%"; Hit description=ATP binding protein, putative
FLLVVLNTVMEKEGPYLVPRLRDLAFSVDIGYSSVGAGALSDGLWRRASAAGASTPLEKRAFGIADDIYGAGLLIAYMAFIPFCEAGIMDGISLQRLLESTFRLDIYAAREYCLADDRLSEAVNFLDLGDGAGWELLQAMLDPDYRKRPTAEAVLNHRFITGAVLRNY

SEQ ID NO: 74833 - protein, 170 aa, Setaria italica
  Transcript Sequence Number=SeqID_8859
  Gene Ontology: Mol. function=protein kinase activity; Biological process=protein amino acid phosphorylation
  Homolog annotation: Hit_ID=B9S235; Match level="QueryCoverage=88%, HitCoverage=36%, E-value=3e-50, Identity=65%"; Hit description=ATP binding protein, putative
WLAFRDDGRYSAADYAKITSERQLKEQSGDMPFWNPFSRAYKLELRRYFVLKLLNGAMSGLVHMHNHDRLHQSLGPSSVVLNTVMEKEGPYLVPRLRDLAFSVDIGYSSVGAGALSDGLWRRASAAGASTPLEKRAFGIADDMQVFLFFYFNKNDHLHLRVLDKTVMEQS

SEQ ID NO: 74834 - protein, 81 aa, Setaria italica
  Transcript Sequence Number=SeqID_8860
MRERERWRRRCGQLSSAPASLRVSPANSGHLSVGGSVKVSTSSEESTMEELQSAIEAAIAHCKNSISVAKQTAAGDGNKLQ

SEQ ID NO: 74835 - protein, 130 aa, Setaria italica
  Transcript Sequence Number=SeqID_8861
  Homolog annotation: Hit_ID=B9SZX8; Match level="QueryCoverage=97%, HitCoverage=9%, E-value=9e-13, Identity=39%"; Hit description =Kinesin heavy chain, putative
EQSQDQQNEIDKLKSSLESCEKAIDDCTLQHELEKDSILSDLLNLQKEVSTLSSSSLMKEKESIRKELDRTKAKLRETENKLKNSIQEKIKLQSEKAEAHKEVKKLQSQRTLLERDLRKRDSVTVDKRHE

SEQ ID NO: 74836 - protein, 85 aa, Setaria italica
  Transcript Sequence Number=SeqID_8862
NAVDAIQYSLGHRQLHCKHTQVKKYTTWQEETESPKWTCIVEVQPMRNSTGLHYILANTFLTALDISAYRKLTFIVHLRKCQFSK

SEQ ID NO: 74837 - protein, 74 aa, Setaria italica
  misc_feature (30)..(30): Xaa can be any naturally occurring amino acid
  Transcript Sequence Number=SeqID_8863
  Gene Ontology: Mol. function=1,3-beta-glucan synthase activity; Cellular component=1,3-beta-glucan synthase complex; Biological process=1,3-beta-glucan biosynthetic process
  Homolog annotation: Hit_ID=Q5SMM3; Match level="QueryCoverage=98%, HitCoverage=4%, E-value=2e-22, Identity=73%"; Hit description =Putative callose synthase 1 catalytic subunit
  Subcellular localization annotation: CTP_CleavageSite=14; ConfidenceScore=5.20e-01
ASLQTSQASKPVVKAFGLWGSVKVLSMGIXIFILMAVLAWFPSVLELQMRSLFNQAFSRGLPITRVLAGGKKQR

SEQ ID NO: 74838 - protein, 86 aa, Setaria italica
  Transcript Sequence Number=SeqID_8864
  Subcellular localization annotation: CTP_CleavageSite=53; ConfidenceScore=5.54e-01
RAPLPAAAGRRGGAGGASGTGMRLGTRRGFPRRRAPCGEEGSPVPNPRPGSVRVEREAPPGSSSSSTAVARVAWRNRWAGVGVRRR

SEQ ID NO: 74839 - protein, 110 aa, Setaria italica
  Transcript Sequence Number=SeqID_8865
  Gene Ontology: Cellular component=extracellular region
  Homolog annotation: Hit_ID=Q19VG5; Match level="QueryCoverage=62%, HitCoverage=60%, E-value=4e-30, Identity=92%"; Hit description =Gibberellin-regulated protein 1
  Pfam annotation: Domain name=GASA; Domain location=4-110; Score=95.7; E_value=1.7e-25; Accession=PF02704.6; Description=Gibberellin regulated protein
MAPGKLAAAVALVATLLLLSNSNIKAAPGGYPPAPPVGPPPHQIVDPAKDCGGACDVRCGAHSRKNRCTRACLKCCSVCRCVPAGTAGNQETCGKCYTDWTTHGNRTKCP

SEQ ID NO: 74840 - protein, 131 aa, Setaria italica
  Transcript Sequence Number=SeqID_8866
  Gene Ontology: Mol. function=oxidoreductase activity; Cellular component=cytoplasm; Biological process=cell redox homeostasis
  Homolog annotation: Hit_ID=B6TNL1; Match level="QueryCoverage=98%, HitCoverage=72%, E-value=3e-64, Identity=66%"; Hit description =Protein disulfide isomerase
QVHFPELDGKIIGLYFAANWYPKCEAFTPVLAAAYQHLKERGAGFEVVLVSCDEDRPSFERFHRTMPWPAVPFGDLQCKKRLSERFQVEGIPRLVVLAPDGEVVHPDAADLVHRYGERAFPFTAARVAESW

SEQ ID NO: 74841 - protein, 414 aa, Setaria italica
  misc_feature (229)..(229): Xaa can be any naturally occurring amino acid
  misc_feature (357)..(357): Xaa can be any naturally occurring amino acid
  Transcript Sequence Number=SeqID_8867
  Gene Ontology: Mol. function=oxidoreductase activity; Biological process=cell redox homeostasis
  Homolog annotation: Hit_ID=B6TNL1; Match level="QueryCoverage=93%, HitCoverage=97%, E-value=0.0, Identity=86%"; Hit description=Protein disulfide isomerase
  Pfam annotation: Domain name=AhpC-TSA; Domain location=156-298; Score= -2.1; E_value=0.0012; Accession=PF00578.13; Description=AhpCTSA family
  Pfam annotation: Domain name=C1_3; Domain location=358-386; Score =13.7; E_value=0.015; Accession=PF07649.4; Description=C1-like domain
  Pfam module annotation: Pfam domain module=AhpC-TSA::C1_3; Domain location=156-298::358-386
MAGVLLEVEEAPEGGGGIRSVLTMGSLVSPSGNEVHFPELDGKIIGLYFAANWYPKCEAFTPVLAAAYQHLKERGAGFEVVLVSCDEDRPSFERFHRTMPWPAVPFGDLQCKKRLSERFQVEGIPRLVVLAPDGEVVHPDAADLVHRYGERAFPFTAARVAELEADDQHKYASQTLEKLFSIDGKEFVNGGNEQVPISSLVGKTVGLYFSAHQCAPCMKFTAKLAAIYXQLKGRAKDFEIVYIPMDKEEDGYLRSCSDMPWLALPYDGAPSRALARYFDVREIPTLVVVGPDGKTVTRDGRNLVNLYFDMAFPFTDAQIRQLQEAEDEAAKGYPQSLRHRGHRHELSIVSEKSGGGXYTCCECEEQGLGWAYQCIACGYEIHLRCGRNAEGGSAGPVSGYLPRLASCVLDVVCV

SEQ ID NO: 74842 - protein, 132 aa, Setaria italica
  Transcript Sequence Number=SeqID_8868
  Gene Ontology: Mol. function=phosphopantetheine binding; Cellular component=mitochondrial respiratory chain; Biological process=fatty acid biosynthetic process
  Homolog annotation: Hit_ID=B6SND3; Match level="QueryCoverage=71%, HitCoverage=74%, E-value=7e-43, Identity=93%"; Hit description=Acyl carrier protein
  Pfam annotation: Domain name=PP-binding; Domain location=58-125; Score=71.1; E_value=4.1e-18; Accession=PF00550.17; Description =Phosphopantetheine attachment site
  Subcellular localization annotation: CTP_CleavageSite=22; ConfidenceScore=5.19e-01
MAMAAARRALLTHLRVPVARTAAAAVAAGTVPVAARRLLSSTTEETKGSFLDKGEVADRVVSVVKNFQKVEPAKVTPTAHFQKDLGLDSLDTVEVVMAFEEEFGFEIPDNEAEKIDSIKTAVDFIASHPQAK

SEQ ID NO: 74843 - protein, 97 aa, Setaria italica
  Transcript Sequence Number=SeqID_8869
  Gene Ontology: Mol. function=methyltransferase activity
  Homolog annotation: Hit_ID=B6U1V3; Match level="QueryCoverage=98%, HitCoverage=38%, E-value=8e-32, Identity=72%"; Hit description =Methylase
ACVESGIATMFQCADDAPDGASKMLAEVARLLRPRGIYLLVTYGAPKERVPLLNQAGCSWSIALYIMPTPGYQLKMSKGAPQPTMEELGEHREGPPD

SEQ ID NO: 74844 - protein, 108 aa, Setaria italica
  misc_feature (22)..(22): Xaa can be any naturally occurring amino acid
  Transcript Sequence Number=SeqID_8870
  Gene Ontology: Cellular component=integral to membrane
  Homolog annotation: Hit_ID=B6T254; Match level="QueryCoverage=77%, HitCoverage=18%, E-value=6e-39, Identity=91%"; Hit description=Auxin Efflux Carrier family protein
NTGNLPIAIIGSVCHTSDHPFXGPACDTKGIAYVSFAQWVAVILVYTLVYHMMEPPMQFYEIVGEGDEIQEEPEQVSNYSRSLLMKTLAMNGVFECYVTLSNIPGHSA

SEQ ID NO: 74845 - protein, 451 aa, Setaria italica
  Transcript Sequence Number=SeqID_8871
  Gene Ontology: Cellular component=integral to membrane
  Homolog annotation: Hit_ID=B6T254; Match level="QueryCoverage=100%, HitCoverage=100%, E-value=0.0, Identity=91%"; Hit description=Auxin Efflux Carrier family protein
  Pfam annotation: Domain name=Mem_trans; Domain location=17-441; Score= 399.6; E_value=5.2e-117; Accession=PF03547.10; Description=Membrane transport protein
MLWSMDPQVDIHGDWVSAVAPQLKLLCLTVIGLLLANPRVQVVPRATFKLLSKLVFALFLPCLIFVHLGKSVTFDNILHWWFIPVNVLVSTVIGCILGYIVALICRPPPHLFRFTVIMTGFGNTGNLPIAIIGSVCHTSDHPFGPACDTKGIAYVSFAQWVAVILVYTLVYHMMEPPMQFYEIVGEGDEIQEEPEQVSNYSRSLLHEAEWPGMFDKVTEHSKTPFIARVFMSISGSSQNTFPDIDFTEEGTSGAGPSSPKSIRCLAEPRVVRRIRVVAEKTPIQHVLQPPTIASLLAIIIGMVPVLKDFVFGADAPLSFFTDSLDILAAAVVPSVMLILGGMLAEGPKDNALGIRTTIGIIVARLLVLPCIGIGVVTLADKLHLLVEEDHMYRFVLSLQYSTPSAILLAAIAGLRGYGVKEASALLFWQHICAVFSLSLYLIVYFKLMSFI

SEQ ID NO: 74846 - protein, 327 aa, Setaria italica
  Transcript Sequence Number=SeqID_8872
  Gene Ontology: Mol. function=binding; Cellular component=nucleus
  Homolog annotation: Hit_ID=B6TRX0; Match level="QueryCoverage=89%, HitCoverage=96%, E-value=1e-138, Identity=86%"; Hit description=Cell differentiation protein rcd1
  Pfam annotation: Domain name=Rcd1; Domain location=48-310; Score =619.2; E_value=4.1e-183; Accession=PF04078.5; Description=Cell differentiation family, Rcd1-like
  Subcellular localization annotation: CTP_CleavageSite=25; ConfidenceScore=5.44e-01
MANLQATLTIPPSFAGASPPSPSPVAGSSGGPALGQAAKDKKMASAEQLVLELCDPELRENALLELSKKREIFQDLAPLLWHSFGTIAALLQEIVSIYPSLSPPTLSPGASNRVCNALALLQCVASHPETRILFLNAHIPLYLYPFLNTTSKTRPFEYLRLTSLGVIGALVKVDDTEVISFLLQTEIIPLCLRTMEMGSELSKTVATFIVQKILLDDVGLRYICATAERFFAVGSVLANMVVSLADQPSTRLLKHIIRCYLRLSDNPRACAALQSCLPDMLKDGTFNNCLRDDPATRRWLQQLLHNVTGGGGMGGAPQPGLDHMMGI

SEQ ID NO: 74847 - protein, 278 aa, Setaria italica
  Transcript Sequence Number=SeqID_8873
  Gene Ontology: Mol. function=protein kinase activity; Cellular component=integral to membrane; Biological process=protein amino acid phosphorylation
  Homolog annotation: Hit_ID=B9T6G8; Match level="QueryCoverage=98%, HitCoverage=42%, E-value=1e-105, Identity=66%"; Hit description =Nodulation receptor kinase, putative
  Pfam annotation: Domain name=Pkinase; Domain location=1-252; Score =51.8; E_value=2.6e-12; Accession=PF00069.17; Description=Protein kinase domain
  Pfam annotation: Domain name=Pkinase_Tyr; Domain location=1-252; Score=-1.2; E_value=1.2e-13; Accession=PF07714.9; Description =Protein tyrosine kinase
  Pfam module annotation: Pfam domain module=Pkinase::Pkinase_Tyr; Domain location=1-252::1-252
LEDGTIVVVKRLKDVVAGKKEFEQQMELIGRVGKHANIAPIRAYYYSKDEKLVVYEYIATGSFSALLHGIKGVCEKTPLDWNTRMKIILGTARGIEHIHAEGGSKLAHGNIKSTNVLLDQGHNPYVSDYGLSALMSLPINTSRVIAGYRAPETFESRKFTHKSDVYSFGVLLMEMLTGKTPLQSQGQDDVVDLPRWVHSVVREEWTAEVFDVQLMKYPNIEDELVQMLHIAMACTSWSPDRRPTMAEVIRMMEELRQSASESRTPSNGNPRESNPPSV

SEQ ID NO: 74848 - protein, 40 aa, Setaria italica
  Transcript Sequence Number=SeqID_8874
  Gene Ontology: Mol. function=nucleotidyltransferase activity; Biological process=biosynthetic process
  Homolog annotation: Hit_ID=Q84X92; Match level="QueryCoverage=92%, HitCoverage=8%, E-value=3e-14, Identity=89%"; Hit description =Phosphoethanolamine cytidylyltransferase
RADDIIPDAPYAITEEFMNKLFTEYNIDYIIHGDDPCMLF

SEQ ID NO: 74849 - protein, 90 aa, Setaria italica
  Transcript Sequence Number=SeqID_8875
  Gene Ontology: Mol. function=nucleotidyltransferase activity; Cellular component=phagocytic vesicle; Biological process =biosynthetic process
  Homolog annotation: Hit_ID=Q84X92; Match level="QueryCoverage=87%, HitCoverage=18%, E-value=5e-32, Identity=81%"; Hit description =Phosphoethanolamine cytidylyltransferase
GRHHPIMNLHDRSLSVLACRYVDEVIIGAPWDVSKDMITTFNISSVVHGTIAENMDFMEDDSNPYAVPIAMGFYSRSTSSHWLPSSRSAS

SEQ ID NO: 74850 - protein, 171 aa, Setaria italica
  Transcript Sequence Number=SeqID_8876
  Gene Ontology: Mol. function=nucleotidyltransferase activity; Cellular component=phagocytic vesicle; Biological process =biosynthetic process
  Homolog annotation: Hit_ID=Q84X92; Match level="QueryCoverage=62%, HitCoverage=25%, E-value=7e-51, Identity=89%"; Hit description =Phosphoethanolamine cytidylyltransferase
LLRKGKSKGSLLSIFYQLSQYDSWIGNWGTAGDALNTDIQPIFLLVFTIPASSTRGRHRPIMNLHERSLSVLACRYVDEVIIGAPWDVSKDMITTFNISSVVHGTIAENMDFMEDDSNPYAVPIAMGIYCRLESPLDITTSTIIRRIVGNHEAYQKRNEKKEASEKKYYES

SEQ ID NO: 74851 - protein, 253 aa, Setaria italica
  Transcript Sequence Number=SeqID_8877
  Gene Ontology: Mol. function=nucleotidyltransferase activity; Cellular component=phagocytic vesicle; Biological process =biosynthetic process
  Homolog annotation: Hit_ID=Q84X92; Match level="QueryCoverage=92%, HitCoverage=78%, E-value=1e-126, Identity=70%"; Hit description =Phosphoethanolamine cytidylyltransferase
  Pfam annotation: Domain name=CTP_transf_2; Domain location=17-147; Score=103.6; E_value=6.9e-28; Accession=PF01467.18; Description =Cytidylyltransferase
GRPDYRTTDRRRPVRVYMDGCFDMMHYGHCNALRQARALGDELIVGVISDDEIKANKGPPVTPLHERMIMVRAVKWVDDVIPDAPYAITEEFMNKLFTEYNIDYIIHGDDPCLLPDGTDAYALAKKAGRYKQIKRTEGVSTTDIVGRMLLCVRERSSSDAHNHSSLQRQFSSGHGQKVDDSGSGSGTRVSHFLPTSRRIVQFSNSRGPGPDSRIVYIDGAFDLFHAGHVEILRLARELGDFLLVGIHTDQTIR

SEQ ID NO: 74852 - protein, 130 aa, Setaria italica
  misc_feature (110)..(110): Xaa can be any naturally occurring amino acid
  Transcript Sequence Number=SeqID_8878
  Gene Ontology: Mol. function=acid-amino acid ligase activity; Cellular component=intracellular; Biological process=ubiquitin -dependent protein catabolic process
  Homolog annotation: Hit_ID=B9S9V5; Match level="QueryCoverage=99%, HitCoverage=3%, E-value=1e-59, Identity=79%"; Hit description=E3 ubiquitin protein ligase upl2, putative
MKLKRRRAVEVPPNIKSFIDSVTAVPLDNVELPLKDFAWEFDKGDFHHWVDLFNHFDSFFESYIKSRKDLLLEDNFLDVDPPFPREAVLQILRVSRIILENCTNRHFYRXFEQHLSALLASTDADIVEAS

SEQ ID NO: 74853 - protein, 93 aa, Setaria italica
  Transcript Sequence Number=SeqID_8879
  Gene Ontology: Mol. function=iron ion transmembrane transporter activity; Cellular component=integral to membrane; Biological process=iron ion transport
  Homolog annotation: Hit_ID=B9N487; Match level="QueryCoverage=97%, HitCoverage=14%, E-value=2e-20, Identity=51%"; Hit description =Ferroportin protein family
VASRLGHMAYSVIGLQVVQSGNPMGKAKLIGATEIAVASLAELTMMGVAVVARDAAHFGWLAALSAASVAAAACLFCSWLANPTDELKRLFPR

SEQ ID NO: 74854 - protein, 165 aa, Setaria italica
  Transcript Sequence Number=SeqID_8880
  Gene Ontology: Mol. function=transferase activity
  Homolog annotation: Hit_ID=Q5QPZ3; Match level="QueryCoverage=98%, HitCoverage=34%, E-value=2e-67, Identity=72%"; Hit description =Glycosyltransferase (Fragment)
KDKTEQRMFLNLKEIVAMAEEIGYEVVVEEANVNSNVAHFAKVVNSVDVMMGVHGAGLTNCVFLPHSAILIQIVPWGALDGICRIDFGYPAEQMGLRYKHYSIGVHESSLTDQYPMDHEIFKNPLAFHKNGFEFVRQTFMDTQNVRLDCNRFRPILLEALDQLNQ

SEQ ID NO: 74855 - protein, 242 aa, Setaria italica
  misc_feature (34)..(34): Xaa can be any naturally occurring amino acid
  Transcript Sequence Number=SeqID_8881
  Gene Ontology: Mol. function=nucleotidyltransferase activity; Cellular component=intracellular; Biological process=DNA repair
  Homolog annotation: Hit_ID=B9RY76; Match level="QueryCoverage=82%, HitCoverage=15%, E-value=5e-29, Identity=38%"; Hit description =Terminal deoxycytidyl transferase rev1, putative
KQLSEVKAANDASCSRACELVEKTKCVTQLDLTXDPLSQADFAVLQELPEDVKADLFSALPLHRPGDPTCSTSNVSESKPPNVGGAENRSLNDGGAENRSLNDGGADDPRDRSIFVPPGSFQKWIEQFRVSSCLILNVIAEQHTDSICSRPLSAVLEPLASFLSLCPDSGSEEWNETLSCLSELLRQYIQLKVETDIEELYKCFCLMKRFASASEFFLELHDSILPFLQDSVSQHYGGTLHF

SEQ ID NO: 74856 - protein, 203 aa, Setaria italica
  misc_feature (56)..(56): Xaa can be any naturally occurring amino acid
  misc_feature (142)..(142): Xaa can be any naturally occurring amino acid
  misc_feature (171)..(171): Xaa can be any naturally occurring amino acid
  Transcript Sequence Number=SeqID_8882
  Gene Ontology: Mol. function=nucleotide binding; Cellular component =plasma membrane; Biological process=small GTPase mediated signal transduction
  Homolog annotation: Hit_ID=P28186; Match level="QueryCoverage=91%, HitCoverage=85%, E-value=9e-75, Identity=79%"; Hit description=Ras -related protein ARA-3
  Pfam annotation: Domain name=Arf; Domain location=1-177; Score=-75.5; E_value=0.00095; Accession=PF00025.13; Description=ADP-ribosylation factor family
  Pfam annotation: Domain name=GTP_EFTU; Domain location=13-179; Score=- 72.1; E_value=0.00093; Accession=PF00009.19; Description=Elongation factor Tu GTP binding domain
  Pfam annotation: Domain name=MMR_HSR1; Domain location=16-130; Score =2.6; E_value=0.00057; Accession=PF01926.15; Description=GTPase of unknown function
  Pfam annotation: Domain name=Miro; Domain location=17-130; Score =74.4; E_value=4.2e-19; Accession=PF08477.5; Description=Miro-like protein
  Pfam annotation: Domain name=Ras; Domain location=17-179; Score =328.8; E_value=1.1e-95; Accession=PF00071.14; Description=Ras family
  Pfam module annotation: Pfam domain module=Arf::GTP_EFTU::MMR _HSR1::Miro::Ras; Domain location=1-177::13-179::16-130::17-130::17 -179
MAAPPARARADYDYLIKLLLIGDSGVGKSCLLLRFSDGSFTTSFITTIGIDFKIRXTIRNDNTKLQIWDTAGQERFRTITTAYYRGAMGILLVYDVTDESSFNNIRNWIRNIEQHASDNVNKILVGNKADMDESKRAVPTAXKGQALADEYGIKFFETSAKTNLNVEQVFXSIARDIKQRLAETDSKPEDKAIKINKPDATET

SEQ ID NO: 74857 - protein, 214 aa, Setaria italica
  Transcript Sequence Number=SeqID_8883
  Gene Ontology: Mol. function=nucleotide binding; Cellular component =plasma membrane; Biological process=small GTPase mediated signal transduction
  Homolog annotation: Hit_ID=P28186; Match level="QueryCoverage=93%, HitCoverage=93%, E-value=4e-87, Identity=80%"; Hit description=Ras -related protein ARA-3
  Pfam annotation: Domain name=Arf; Domain location=1-177; Score=-64.0; E_value=0.00013; Accession=PF00025.13; Description=ADP-ribosylation factor family
  Pfam annotation: Domain name=GTP_EFTU; Domain location=13-179; Score=- 72.9; E_value=0.0011; Accession=PF00009.19; Description=Elongation factor Tu GTP binding domain
  Pfam annotation: Domain name=MMR_HSR1; Domain location=16-131; Score =2.6; E_value=0.00057; Accession=PF01926.15; Description=GTPase of unknown function
  Pfam annotation: Domain name=Miro; Domain location=17-131; Score =91.9; E_value=2.3e-24; Accession=PF08477.5; Description=Miro-like protein
  Pfam annotation: Domain name=Ras; Domain location=17-179; Score =372.8; E_value=6.1e-109; Accession=PF00071.14; Description=Ras family
  Pfam module annotation: Pfam domain module=Arf::GTP_EFTU::MMR _HSR1::Miro::Ras; Domain location=1-177::13-179::16-131::17-131::17 -179
MAAPPARARADYDYLIKLLLIGDSGVGKSCLLLRFSDGSFTTSFITTIGIDFKIRTIELDGKRIKLQIWDTAGQERFRTITTAYYRGAMGILLVYDVTDESSFNNIRNWIRNIEQHASDNVNKILVGNKADMDESKRAVPTAKGQALADEYGIKFFETSAKTNLNVEQVFFSIARDIKQRLAETDSKPEDKAIKINKPDATETPVGQKSACCGS

SEQ ID NO: 74858 - protein, 248 aa, Setaria italica
  Transcript Sequence Number=SeqID_8884
  Gene Ontology: Mol. function=protein binding; Cellular component =cytoplasm; Biological process=ubiquitin-dependent protein catabolic process
  Homolog annotation: Hit_ID=B6T716; Match level="QueryCoverage=100%, HitCoverage=78%, E-value=1e-131, Identity=87%"; Hit description =Ubiquitin-protein ligase
PGFAESTPGAEAAAWWTPAFQRRVDAMLRSAATLAAGELREVRVRHCSDDGLAFAAERSPRLSILSIRTSPAVTDRSMLIVGTCCTMLTELDISNCYEVSYRSLEVIGQSCQNLRVLKRNIFNWIDPSEHVGIVPEDYLRECPQDGDREAITISKFMPKLKHLELRFSKLTAVGLNSIPGGCKELEILDLFGCANLTSRGIDQAAANLKNLETLVKPNIYIPRSSFHMGRYGHWQLYDERFQTNVFQI

SEQ ID NO: 74859 - protein, 97 aa, Setaria italica
  Transcript Sequence Number=SeqID_8885
  Gene Ontology: Mol. function=oxidoreductase activity; Cellular component=extracellular region; Biological process=oxidation reduction
  Homolog annotation: Hit_ID=Q2PAJ0; Match level="QueryCoverage=100%, HitCoverage=16%, E-value=2e-52, Identity=97%"; Hit description =Putative laccase
  Pfam annotation: Domain name=Cu-oxidase_2; Domain location=1-81; Score=93.0; E_value=1e-24; Accession=PF07731.6; Description =Multicopper oxidase
HLHGFNFFVVGQGYGNYDPVNDPAKFNLVDPVERNTVGVPAGGWVAIRFLADNPGVWFMHCHLEVHTTWGLRMAWLVLDGSLPHQKLLPPPSDLPKC

SEQ ID NO: 74860 - protein, 48 aa, Setaria italica
  Transcript Sequence Number=SeqID_8886
MCSIEILSFSTDCKLPRLVELILLQLTKSMCSLQLTLFQGATLTTIFY

SEQ ID NO: 74861 - protein, 637 aa, Setaria italica
  Transcript Sequence Number=SeqID_8887
  Gene Ontology: Mol. function=transferase activity, transferring glycosyl groups; Cellular component=integral to membrane
  Homolog annotation: Hit_ID=B9IC41; Match level="QueryCoverage=96%, HitCoverage=89%, E-value=0.0, Identity=75%"; Hit description =Glycosyltransferase
  Pfam annotation: Domain name=Glyco_transf_8; Domain location=295-611; Score=403.7; E_value=3.1e-118; Accession=PF01501.12; Description =Glycosyl transferase family 8
NRRYDGPIVPTYDLPNTQRARNGDQEAVTMKNLKSILPKEVIDAITASQQEAGTLSLDFFRNHESPSWKTDDLVTDMSMYVDGKANDENSVPEHDLPTNKSPKDSDEHQVDTAAKIARRKLREKRREKRAMELVRKDDEARVKLENAAIERSKAVDSAVLGKYSIWRKENENENSDSTVRLMRDQLIMARVYSALAKSKNKSGLFQELQTRIKESQRAVGEAAADADLHHSAPEKVRAMGQVLSKARGELYDCRAITQRLRAMLQSADEQVRSLKKQSTFLSQLAAKTIPNSIHCLSMRLTIDYYLLPLEQRKFPRSENLENPSLYHYALFSDNVLAASVVVNSTIMNAKEPEKHVFHLVTDKLNFGAMNMWFLLNPPGKATIHVENVDEFKWLNSSYCPVLRQLESAAMKEYYFKADRPTTLSAGSSNLKYRNPKYLSMLNHLRFYLPEVYPKLDKILFLDDDIVVQKDLTGLWDVDLNGKVNGAVETCGESFHRFDKYLNFSNPHIARNFDPNACGWAYGMNIFDLKEWKKKDITGIYHKWQNMNEDRVLWKLGTLPPGLLTFYKLTHPLDKSWHVLGLGYNPSIDRSEIDGAAVVHYNGNMKPWLELAMTKYRPYWTKYIKYDHPYIRGCNLSE

SEQ ID NO: 74862 - protein, 65 aa, Setaria italica
  Transcript Sequence Number=SeqID_8888
MESSAERLRGLRITSLDGDDDETVVPHQPSPAPGAAAADYEDDDEDEEEEAEVTLGVLKKPKHPG

SEQ ID NO: 74863 - protein, 60 aa, Setaria italica
  Transcript Sequence Number=SeqID_8889
  Subcellular localization annotation: CTP_CleavageSite=47; ConfidenceScore=5.32e-01
ASAAPAKKKKPAAPAEAKKARAKRARKAAPAPAQPMPKPKQAARPVRAAVARKAANKASA

SEQ ID NO: 74864 - protein, 115 aa, Setaria italica
  misc_feature (63)..(63): Xaa can be any naturally occurring amino acid
  Transcript Sequence Number=SeqID_8890
LIQDMIVDSQSILDVINSSERLISDDDGAFGYYQPELFASVSSITNIRYPFLDGQQKEQHSNXYFMEEVKFSDEELHSNQDEASILSYMQKIYPDQWKNFLERLGSKATNEEIRY

SEQ ID NO: 74865 - protein, 190 aa, Setaria italica
  Transcript Sequence Number=SeqID_8891
  Gene Ontology: Mol. function=transferase activity, transferring glycosyl groups; Cellular component=integral to membrane; Biological process=cell wall organization and biogenesis
  Homolog annotation: Hit_ID=B9SVW5; Match level="QueryCoverage=93%, HitCoverage=9%, E-value=3e-29, Identity=43%"; Hit description =Transferase, transferring glycosyl groups, putative
PIDKKLIFKFLIIGETEKRVVAAIFDEIEKSILKSSLLTDFKMDHLPSLFSKFDRLAELLFINKQEHRYEVTILLQDIVDILIQDMIVDSQSILDVINSSERLISDDDGAFGYYQPELFASVSSITNIRYPFLDGQQKEQVKRLYLLLNTKEKVVEIPSNSEARRRISFFATSLFMDMPAAPKVRSMLSF

SEQ ID NO: 74866 - protein, 259 aa, Setaria italica
  Transcript Sequence Number=SeqID_8892
  Gene Ontology: Mol. function=transferase activity, transferring glycosyl groups; Cellular component=integral to membrane; Biological process=1,3-beta-glucan biosynthetic process
  Homolog annotation: Hit_ID=Q9LUD7; Match level="QueryCoverage=94%, HitCoverage=12%, E-value=6e-88, Identity=65%"; Hit description =Putative callose synthase 8
PSRNGNEVRYWASYRGQTLSRTVRGMMYYRRALRLQAFLDRTSDQELYKGPLATEQGKNKRNIHQSLSTEIEALADMKFSYVISCQKFGEQKIKGDPHAQDIIDLMTRYPTLRVAYIEEKEVILHSSPHKVYSSVLIKAENNFDQEIYRIKLPGPPIIGEGKPENQNHAIIFTRGEALQTIDMNQDNYLEEAYKMRNVLQEFVRHPRDQAPTILGLREHIFTGSVSSLAGFMSYQETSFVTIGQRFLADPLRWFSSGLK

SEQ ID NO: 74867 - protein, 58 aa, Setaria italica
  Transcript Sequence Number=SeqID_8893
  Homolog annotation: Hit_ID=B6UAH6; Match level="QueryCoverage=100%, HitCoverage=18%, E-value=1e-18, Identity=82%"; Hit description=MPPN domain containing protein
  Subcellular localization annotation: CTP_CleavageSite=23; ConfidenceScore=5.28e-01
TLALKSTGSSNQLGALPRPYDPKANTNVNRDAGRRATGSVAAPAKSIVTNVMDLIFGI

SEQ ID NO: 74868 - protein, 307 aa, Setaria italica
  misc_feature (141)..(141): Xaa can be any naturally occurring amino acid
  Transcript Sequence Number=SeqID_8894
  Gene Ontology: Mol. function=SNAP receptor activity; Cellular component=membrane; Biological process=intracellular protein transport
  Homolog annotation: Hit_ID=B9SUS4; Match level="QueryCoverage=92%, HitCoverage=91%, E-value=8e-88, Identity=58%"; Hit description =Syntaxin, putative
  Pfam annotation: Domain name=SNARE; Domain location=214-276; Score =82.1; E_value=2e-21; Accession=PF05739.11; Description=SNARE domain
  Pfam annotation: Domain name=Syntaxin; Domain location=38-145; Score =53.2; E_value=1e-12; Accession=PF00804.17; Description=Syntaxin
  Pfam module annotation: Pfam domain module=SNARE::Syntaxin; Domain location=214-276::38-145
MRNLLTDSFELGKRELAPGNVDIELGLQGDLTSSAQPGFEGFFEQVKDIENLLSTLTKLLKDLQNSNEESKVVTKASAMKEVKKRMEKDVNEVTKVARLAKSKVEELNKDNAANRQKPGFGKGSGVDRSRTTTTVALTRGXVERILEFQTLREEIQKEYRGVVERRVFTVTGERADEETIDKLIETGDGEQIFQRAIQEQGRGRVLDTLQEIQERHDTVKEIEKKLLDLHQIFLDLAVLVEAQGEMLDNIETQVTGAAEHIQTGTNLLQKAKKLQKNTRKWTCIAIIILLIIVLVIILSLKPWSWGK

SEQ ID NO: 74869 - protein, 52 aa, Setaria italica
  misc_feature (11)..(11): Xaa can be any naturally occurring amino acid
  Transcript Sequence Number=SeqID_8895
  Homolog annotation: Hit_ID=B6UHQ4; Match level="QueryCoverage=96%, HitCoverage=12%, E-value=2e-19, Identity=92%"; Hit description=Kelch motif family protein
  Pfam annotation: Domain name=Kelch_2; Domain location=1-51; Score =17.6; E_value=0.051; Accession=PF07646.7; Description=Kelch motif
PRYAPAAQLWXGRIHVMGGGKGDRHEPGLEHWSLAVKDGKALENEWRAEVHH

SEQ ID NO: 74870 - protein, 100 aa, Setaria italica
  Transcript Sequence Number=SeqID_8896
  Gene Ontology: Mol. function=sequence-specific DNA binding; Cellular component=intracellular; Biological process=regulation of transcription, DNA-dependent
  Homolog annotation: Hit_ID=B6STN2; Match level="QueryCoverage=55%, HitCoverage=24%, E-value=2e-27, Identity=100%"; Hit description =Nuclear transcription factor Y subunit B-3
ISFITGEASDKCQREKRKTINGDDLLWAMTTLGFEDYVEPLKHYLHKFREIEGERAAASSGSAAAQQQQGDVARSAANAGGYAGYGAPGAGGMMMMMRQP

SEQ ID NO: 74871 - protein, 132 aa, Setaria italica
  Transcript Sequence Number=SeqID_8897
  Gene Ontology: Mol. function=sequence-specific DNA binding; Cellular component=intracellular; Biological process=regulation of transcription, DNA-dependent
  Homolog annotation: Hit_ID=B6STN2; Match level="QueryCoverage=88%, HitCoverage=52%, E-value=5e-62, Identity=96%"; Hit description =Nuclear transcription factor Y subunit B-3
  Pfam annotation: Domain name=CBFD_NFYB_HMF; Domain location=26-91; Score=130.9; E_value=4.1e-36; Accession=PF00808.15; Description =Histone-like transcription factor (CBFNF-Y) and archaeal histone
  Pfam annotation: Domain name=Histone; Domain location=20-94; Score =0.6; E_value=0.079; Accession=PF00125.16; Description=Core histone H2AH2BH3H4
  Pfam module annotation: Pfam domain module=CBFD_NFYB_HMF::Histone; Domain location=26-91::20-94
MPDSDNDSGGPSNAGGELSSPREQDRFLPIANVSRIMKKALPANAKISKDAKETVQECVSEFISFITGEASDKCQREKRKTINGDDLLWAMTTLGFEDYIEPLKLYLHKFRELEGEKLATGAAGSSGSGSAL

SEQ ID NO: 74872 - protein, 132 aa, Setaria italica
  Transcript Sequence Number=SeqID_8898
  Subcellular localization annotation: CTP_CleavageSite=67; ConfidenceScore=5.39e-01
TRRESTPGTAATNWALPPSETQSSGGSEPSPTARCQPRRQKHAQERVLNPRRSQVNPAGGCRARPRSGSAVWTGFGRRRACVCVLSRPRLAQGHQEGCVWRRSGSGSGSGKEGGREVGASSARDSQLSGWGC

SEQ ID NO: 74873 - protein, 126 aa, Setaria italica
  Transcript Sequence Number=SeqID_8899
KKGITPYYLIQVLVAILQSELNLYGSLGGLSTQITDVSFKNSSIHAAFIFVIILNIYLETFDPCMYLILWPTKQSDGWIWITGCDRNRPTLIARAISVMRQQAAAAPATAASSELPPPPPRYRGVR

SEQ ID NO: 74874 - protein, 97 aa, Setaria italica
  Transcript Sequence Number=SeqID_8900
LYSVLHGSLTSLQLHNVLGNTSSTDMLTNEMMFKDSLLTHPDRFRDVQSDSLFTSMGMLLCSRTLWLYCHRFLSCIHHELSWSPHMSSSESSPNLHI

SEQ ID NO: 74875 - protein, 49 aa, Setaria italica
  Transcript Sequence Number=SeqID_8901
QGFELASILKNINKQFASQQHSSHSNYLRLTEEKLSQDTSHSHIFYNLK

SEQ ID NO: 74876 - protein, 53 aa, Setaria italica
  misc_feature (43)..(43): Xaa can be any naturally occurring amino acid
  Transcript Sequence Number=SeqID_8902
  Subcellular localization annotation: CTP_CleavageSite=25; ConfidenceScore=5.12e-01
SVTCIWASIFAYSKKSVAINSHYIVSRKSSNVLVFLDSTVFFXNTCILLSKLE

SEQ ID NO: 74877 - protein, 82 aa, Setaria italica
  Transcript Sequence Number=SeqID_8903
RREAATCARVPLESAAPNPDGRRARPIGGRGTARADRIGSAAGGGRLARSEGRRESENYSRLRLRSLNLFLPLLICWGRKVD

SEQ ID NO: 74878 - protein, 39 aa, Setaria italica
  Transcript Sequence Number=SeqID_8904
FWHTKPITGVKSRSNEVCRRKPNFDESAYRNIWIGPRGC

SEQ ID NO: 74879 - protein, 44 aa, Setaria italica
  Transcript Sequence Number=SeqID_8905
FFFSRVMLPFYMEMTYLCPVTCCHVQQNPFRFELPEQLLKSYNS

SEQ ID NO: 74880 - protein, 527 aa, Setaria italica
  Transcript Sequence Number=SeqID_8906
  Gene Ontology: Mol. function=oxidoreductase activity, acting on single donors with incorporation of molecular oxygen, incorporation of two atoms of oxygen; Cellular component=cytoplasm; Biological process=fatty acid biosynthetic process
  Homolog annotation: Hit_ID=A1XCH8; Match level="QueryCoverage=99%, HitCoverage=60%, E-value=0.0, Identity=84%"; Hit description =Lipoxygenase
  Pfam annotation: Domain name=Lipoxygenase; Domain location=1-507; Score=869.2; E_value=2.3e-258; Accession=PF00305.11; Description =Lipoxygenase
VGGDFLLKLPMPKIIKEDKKAWMSDDEFAREILAGVNPMIIKRLTEFPPKSTLDPSKYGDHTSTITAAHIERNLEGLTVQQALESNRLYVVDHHDHYMPFLVEINNLDDNFIYATRTLLFLRGDGTLAPVAIELSLPELRDGITAAKSTVYTPTSTTGAEAWVWHLAKAYVNVNDYCWHQGISHWLNTHAVMEPFIIATNRQLSVTHPVHKLLLPHYRDTMNINALARQKLINAGGIFEMTVFPRKYAIEISSKVYGSWSFADQALPNDLVKRGMAVEDPSSPYKVRLLIEDYPYASDGLAIWHAIEQWVAEYLAIYYPDDGVLQADAELQAWWKEAREVGHADLKDEPWWPRMTTVAELTRACATIIWIASALHAAVNFGQYPYCGYHPNRPSVSRRPMPAPGTEEYAELERDPERFFVRSITCQFQAVVGISLLEILSSHSSDEVYLGQRDTPGWTSDARAQEAFKRFGARLAEIEKRVEAMNADPRLKNRNSPAKFPYTLLSPNVSDRENAGVTARGIPNSISI

SEQ ID NO: 74881 - protein, 190 aa, Setaria italica
  Transcript Sequence Number=SeqID_8907
  Gene Ontology: Mol. function=sequence-specific DNA binding; Cellular component=endoplasmic reticulum membrane; Biological process=lipid biosynthetic process
  Homolog annotation: Hit_ID=B6TBD7; Match level="QueryCoverage=100%, HitCoverage=60%, E-value=1e-102, Identity=95%"; Hit description=ASC1- like protein 1
  Pfam annotation: Domain name=TRAM_LAG1_CLN8; Domain location=1-162; Score=99.6; E_value=1.1e-26; Accession=PF03798.8; Description=TLC domain
DQKIKLKLKAVYMYAAGFYTYSIFALLFWETRRSDFGVSMSHHVATVVLIILSYIFRFARVGSVVLALHDASDIFLEIGKMAKYSSCEWLAVVAFLLFVASWILLRLIIFPFWIIRSTSYEVLLTLDKEKHRFYGPIYYYVFNCLLFSLLVLHIYWWVLIWRMLVRQVQSKGRVGDDVRSDSEGEEEHED

SEQ ID NO: 74882 - protein, 279 aa, Setaria italica
  Transcript Sequence Number=SeqID_8908
  Gene Ontology: Mol. function=oxidoreductase activity; Biological process=oxidation reduction
  Homolog annotation: Hit_ID=B6UFQ5; Match level="QueryCoverage=84%, HitCoverage=74%, E-value=1e-108, Identity=78%"; Hit description =Oxidoreductase
  Pfam annotation: Domain name=2OG-FeII_Oxy; Domain location=101-200; Score=77.9; E_value=3.8e-20; Accession=PF03171.12; Description=2OG -Fe(II) oxygenase superfamily
ELFALPLEVKQQTVSSKGMFRGYIGQRPGMDWESLRVGEPTNADNVREFADFLWPEGNPEFCETIVSFAKNMRKLEEMVETLVLEGLGARGESVAAHMDMLGQGIRMSHYGVPPDTETSMSMQAHYDDSMVTMIVQHEVEGLEVHVGNGRWAAVPPEPGTFAFIAGEQLRVVTNGRVPACLHRVRTPSNRERFSVLFGRRQKDGVAVRALDDLVDAEHPLAYNPLKHEEYSKWRYSEEGLKIGGSTESVLRSGEGWSHHRGLIAARMSACPSVPKSLSL

SEQ ID NO: 74883 - protein, 63 aa, Setaria italica
  misc_feature (45)..(45): Xaa can be any naturally occurring amino acid
  Transcript Sequence Number=SeqID_8909
KEKKWEEGEETPRNQDHPVEVVLMPDSGESSPKPSPPADQDSPGXCESAPFKVEEMQGLREQR

SEQ ID NO: 74884 - protein, 84 aa, Setaria italica
  Transcript Sequence Number=SeqID_8910
FCCSCEADQPICQRLWSSTPAGLRLIRNWELIANVRSFALTVLCCAPVLWFEMSCYLCIINFEFKPRLMCALCVAWGLKSWAGM

SEQ ID NO: 74885 - protein, 42 aa, Setaria italica
  Transcript Sequence Number=SeqID_8911
AIGNFLARETAQVKHVIKVLHDSGPYKENILKEFAPQQDDEM

SEQ ID NO: 74886 - protein, 144 aa, Setaria italica
  Transcript Sequence Number=SeqID_8912
  Gene Ontology: Mol. function=single-stranded DNA binding; Cellular component=mitochondrion; Biological process=response to DNA damage stimulus
  Homolog annotation: Hit_ID=B6U5B2; Match level="QueryCoverage=100%, HitCoverage=64%, E-value=3e-74, Identity=91%"; Hit description =Single-stranded DNA-binding protein
  Pfam annotation: Domain name=SSB; Domain location=9-126; Score=60.9; E_value=4.9e-15; Accession=PF00436.17; Description=Single-strand binding protein family
LENGLDPGIYKAIMVGKVGQEPMQKRLRNGIRIVLFSLGTGGIRNNRRPLDREEPHQYADRCSVQWHRVCVYPERLGTLALNHVKTGTVLYLEGNLETKVFCDPITGLVRRIREIAVRANGRLLFLGNDANGPKLGEVKGVGYF

SEQ ID NO: 74887 - protein, 88 aa, Setaria italica
  Transcript Sequence Number=SeqID_8913
GGRKRTNERCPHDVATRSLSQRIRLGHLLVQQQQWMGSGPCRHGRALGPARIGRLGALGPALLLLPGRGRRATRQAQAAAARHTGPRC

SEQ ID NO: 74888 - protein, 124 aa, Setaria italica
  Transcript Sequence Number=SeqID_8914
GWSSISSCIGFLFITKIFICLPTFILCYRVLFIFSSPTLLRIFQAAGFFPASYTIKKIVHKLKFGSLFTTIARKEKHTVLQLSSHLRSDFVRFSSQVTFIGPKELVSRSPSPSTCSNFLHSASG

SEQ ID NO: 74889 - protein, 108 aa, Setaria italica
  Transcript Sequence Number=SeqID_8915
  Pfam annotation: Domain name=DUF544; Domain location=1-87; Score= -25.1; E_value=0.01; Accession=PF04424.5; Description=Protein of unknown function (DUF544)
QFNYKDSRWINTCQSNRKVIVSLSETFTIYPKFTRTNDFEDTSDKLLYNALGIAIYHGWLMNPQDTDTSEAVGIESSAKLVIEAEELMKSESEGKTDRWSLLEPFIPV

SEQ ID NO: 74890 - protein, 195 aa, Setaria italica
  Transcript Sequence Number=SeqID_8916
NNQFTSYGLAHLCNDVPEGVLCLLYRDERFNVLYKHKGMLHVLVTAQDVLEDYPDALWRKLEQVDKNGDLLTSSFGPINVTWLENQQNLIEDERKAVKQKETCSLKNAKKHGRGKDKMNTVTQDECGEANKYLGDEEEANTAGDRGPASPKDGVLGANYPSQDNMLRDGFMKFLKEYLLDGKSYFRDQVELMHLK

SEQ ID NO: 74891 - protein, 118 aa, Setaria italica
  Transcript Sequence Number=SeqID_8917
  Gene Ontology: Mol. function=cysteine-type peptidase activity
  Pfam annotation: Domain name=Inhibitor_I29; Domain location=34-87; Score=-2.1; E_value=0.051; Accession=PF08246.4; Description =Cathepsin propeptide inhibitor domain (
MARSDQGTLEPLTRPAFEVDDKDLESDEALWAFYERWCKFWGQERSREEMQRRFDLFKDTVLFVHRCNKNGDQLEVGMFADGKLAEQKVCMCKEVFESLPYSKSLIIGRAGPMLFNNK

SEQ ID NO: 74892 - protein, 299 aa, Setaria italica
  Transcript Sequence Number=SeqID_8918
  Homolog annotation: Hit_ID=UPI00006A0250; Match level="QueryCoverage =86%, HitCoverage=66%, E-value=1e-17, Identity=30%"; Hit description =family with sequence similarity 63, member B (FAM63B), transcript variant 1, mRNA
  Pfam annotation: Domain name=DUF544; Domain location=68-169; Score= -11.9; E_value=0.00062; Accession=PF04424.5; Description=Protein of unknown function (DUF544)
MADSKKKYRAREIEFLGQKRHIVLQDVGGWSHLVEVVNVLLLGDELPEGIIFQSKAHGEKYIEQYMMENVLDTCLVRRLQTLVKLGTFTQAQVDQHLPEYRNVIVSLSETFTIYPKFTRTNDFEDTSDKLMYNALGIASYHGWLMNPQDTDTSEAVGIESSAMLIIEADELIKSESEGKTDRLSLLESIWNNQFTSYGLAHLCNDVPEGVLCLLYRDERFNVLYKHKGMLHVLVTAQDVLEDYPDALWRKLEQVDEDGDLLTSSFGPINVTWRENERNLIEDERKAVKQYVFLSCYSGE

SEQ ID NO: 74893 - protein, 282 aa, Setaria italica
  misc_feature (96)..(96): Xaa can be any naturally occurring amino acid
  Transcript Sequence Number=SeqID_8919
  Gene Ontology: Mol. function=DNA primase activity; Cellular component= alpha DNA polymerase:primase complex; Biological process=DNA replication, synthesis of RNA primer
  Homolog annotation: Hit_ID=B9RMC0; Match level="QueryCoverage=99%, HitCoverage=63%, E-value=1e-117, Identity=70%"; Hit description=DNA primase large subunit, putative
  Pfam annotation: Domain name=DNA_primase_lrg; Domain location=41-281; Score=379.0; E_value=8.5e-111; Accession=PF04104.6; Description =Eukaryotic-type DNA primase, large subunit
KLMTDFQLPYKALPRSEFEVVKDKLSQVARSIGQSANVESVFFKVPFEEVPDLVSSRRVFLSKGYAYVAMSQVVSLVVTQFRCNISKALVLTNRKXWTATIKEQEKDRLTPIVEALSNAYFGPDYSQPKDAVEISLKDIDQLAKSSFPLCMRHMLDKLRENHHLKHGGRMQFGLFLKGAGLKLEDALAFWRAEFSQKVGSERFDKEYAYSIRHNYGKEGKRTDYTPYSCQKIISATPGVGDHHGCPYRHFGEENLRAALNKMGVSGHALEEIMDKVKNRHYQ

SEQ ID NO: 74894 - protein, 101 aa, Setaria italica
  Transcript Sequence Number=SeqID_8920
  Gene Ontology: Mol. function=DNA primase activity; Cellular component= alpha DNA polymerase:primase complex; Biological process=DNA replication, synthesis of RNA primer
  Homolog annotation: Hit_ID=Q69PX1; Match level="QueryCoverage=99%, HitCoverage=38%, E-value=4e-48, Identity=86%"; Hit description =Putative DNA primase large subunit
LCQKIISATPGVGDHHGCPYRHFGEENLRAALNIVGVSGHALEEIMDKVKNRHYQLACTLTFEATHGVSCDSGINHPNQYFSESQKVLRAKNQTVESKSAT

SEQ ID NO: 74895 - protein, 112 aa, Setaria italica
  misc_feature (65)..(65): Xaa can be any naturally occurring amino acid
  Transcript Sequence Number=SeqID_8921
RWAPLPPRFALAPSVLRAAGGGAAGRVANMEGEGYASVSLAALEYIHVHKTARLVEAAVASGAIXGGSGVAEVERVSWFSSPSPPAASEDVGARRPAARWRGGAPWSCWRPA

SEQ ID NO: 74896 - protein, 187 aa, Setaria italica
  misc_feature (19)..(19): Xaa can be any naturally occurring amino acid
  misc_feature (30)..(30): Xaa can be any naturally occurring amino acid
  misc_feature (96)..(96): Xaa can be any naturally occurring amino acid
  misc_feature (127)..(127): Xaa can be any naturally occurring amino acid
  misc_feature (160)..(160): Xaa can be any naturally occurring amino acid
  Transcript Sequence Number=SeqID_8922
  Gene Ontology: Mol. function=helicase activity; Cellular component =chloroplast
  Homolog annotation: Hit_ID=Q9SH46; Match level="QueryCoverage=83%, HitCoverage=48%, E-value=9e-14, Identity=33%"; Hit description =F2K11.2
  Pfam annotation: Domain name=PPR; Domain location=39-73; Score=7.7; E_ value=1.1; Accession=PF01535.12; Description=PPR repeat
  Pfam annotation: Domain name=PPR; Domain location=75-109; Score=25.9; E_value=0.00017; Accession=PF01535.12; Description=PPR repeat
  Pfam module annotation: Pfam domain module=PPR::PPR; Domain location =39-73::75-109
KGIIPNVTFNILIHSRCIXGKLSVAKNLVXNHGIPANVVTYNMLIHWSYYHGSASDVENMFEYMTKVANIAPDEITYTIIVDGLCRQGKFDRATDXFKEPLKDGLSKDLLTALINRLGHRERIWNNXLIIFEEIGRQGFVRNHIIFEGTIRSFCRFGFCXRTKIISLEFLQDGILGSGKEVYPAHKG

SEQ ID NO: 74897 - protein, 66 aa, Setaria italica
  Transcript Sequence Number=SeqID_8923
  Homolog annotation: Hit_ID=Q10M68; Match level="QueryCoverage=51%, HitCoverage=8%, E-value=6e-11, Identity=91%"; Hit description =Serologically defined breast cancer antigen NY-BR-84, putative, expressed
MVDACMRFSTWQQQMPRDDGSRMEENHIGDGKLEGFVQRLKDEQGEGCNIHGFVNVNKVAGNFTFP

SEQ ID NO: 74898 - protein, 180 aa, Setaria italica
  misc_feature (54)..(54): Xaa can be any naturally occurring amino acid
  misc_feature (82)..(82): Xaa can be any naturally occurring amino acid
  misc_feature (98)..(98): Xaa can be any naturally occurring amino acid
  Transcript Sequence Number=SeqID_8924
  Gene Ontology: Mol. function=protein binding; Cellular component =plasma membrane; Biological process=vesicle-mediated transport
  Homolog annotation: Hit_ID=Q10M68; Match level="QueryCoverage=95%, HitCoverage=44%, E-value=2e-80, Identity=84%"; Hit description =Serologically defined breast cancer antigen NY-BR-84, putative, expressed
  Pfam annotation: Domain name=DUF1692; Domain location=8-180; Score =228.3; E_value=2e-65; Accession=PF07970.4; Description=Protein of unknown function (DUF1692)
PVSFLTFQCKREGFVQRLKDRNKGEGCNIHGFVNVNKVAGNFHFAPGKSLDQSXTSCKDLLNLQPETYNISHKINKLSFGEXFPGVINPLDGVEWSQXTPNGLTGMYQYFVKVVPTIYTDIRGGRFTQISFSVTEHFREAIGYPRPPPGVYFFYEFSPIKVDFTEENTSLLHFLTNICAN

SEQ ID NO: 74899 - protein, 51 aa, Setaria italica
  Transcript Sequence Number=SeqID_8925
  Gene Ontology: Cellular component=plasma membrane
  Homolog annotation: Hit_ID=Q10M68; Match level="QueryCoverage=90%, HitCoverage=11%, E-value=5e-18, Identity=91%"; Hit description =Serologically defined breast cancer antigen NY-BR-84, putative, expressed
YDNFPVGLYLYSATESKLTVDTSRGERLHINFDITFPALPCSLVAVDTMDV

SEQ ID NO: 74900 - protein, 387 aa, Setaria italica
  Transcript Sequence Number=SeqID_8926
  Gene Ontology: Mol. function=protein binding; Cellular component =plasma membrane; Biological process=vesicle-mediated transport
  Homolog annotation: Hit_ID=Q10M68; Match level="QueryCoverage=100%, HitCoverage=100%, E-value=0.0, Identity=83%"; Hit description =Serologically defined breast cancer antigen NY-BR-84, putative, expressed
  Pfam annotation: Domain name=DUF1692; Domain location=184-367; Score =330.3; E_value=3.8e-96; Accession=PF07970.4; Description=Protein of unknown function (DUF1692)
MELWSKLRNLDAYPKVNEDFYSRTLSGGLITILSSLAILLLLFSEIRLYLYSATESKLTVDTSRGERLHINFDITFPALPCSLVAVDTMDVSGEQHYDIKHDIIKKRIDHLGNVIESRKDGVGAPKIERPLQKHGGRLDHNEVYCGSCYGSEESDDQCCNSCEEVRDAYRKKGWALTNVESIDQCKREGFVQRLKDEQGEGCNIHGFVNVNKVAGNFHFAPGKSLDQSFNFLQDLLNLQPETYNISHKINKLSFGEEFPGVINPLDGVEWSQDNSNGLTGMYQYFVKVVPTIYTDIRGRKIYSNQFSVTEHFREAIGYPRPPPGVYFFYEFSPIKVDFTEENTSLLHFLTNICAIVGGIFTVAGIIDSFVYHGHHAIKKKMELGKLG

SEQ ID NO: 74901 - protein, 38 aa, Setaria italica
  Transcript Sequence Number=SeqID_8927
WLMLRILYVIWDKQISLKMNRHVYPKHHRILKTEVYSR

SEQ ID NO: 74902 - protein, 782 aa, Setaria italica
  Transcript Sequence Number=SeqID_8928
  Gene Ontology: Mol. function=binding; Cellular component=nucleus; Biological process=ribosome biogenesis
  Homolog annotation: Hit_ID=UPI0001A7B101; Match level="QueryCoverage =96%, HitCoverage=64%, E-value=1e-111, Identity=35%"; Hit description= binding
  Pfam annotation: Domain name=NUC173; Domain location=14-210; Score =80.3; E_value=7e-21; Accession=PF08161.4; Description=NUC173 domain
SKCDVEGLSDQAAMKSICLTINSRLHTCACPPDSILTVILVLFLKLGECSFVFMKDILLTLARFAMKMDKESQLKNVEECIGAAVIAMGPDKVLSLIPIAFDEDRLTCSNTWLLPILDKYTYGAPLQLFLERIVPLAKSVQNASDRVKKGRKRKDLQSWTNQLWKLLPSFCRYPVDVHHSFGSLSKLLVEILKCDECLYKSAVEALQQLVDGTRKLSSNDQDVEIYMELSALFSSKPITFRCARLERCSKKEARKNLKVLASHSADLLCTFADYFLDSSPEKRAHLKVAFRCLAQLSGSTNVCELFVSLVKRFDLEDTQLESDSQECKTDEPDRKDEESTDTAEELNNRRSLLLELISTFAEVADEDLLDKLFGFIKSCLLNTSMSCHSKALLALSMIVKEHNEYSLVHLDEIMLLLHGMKPALDNTVLESQLLCYQHLLVHMIKVNEENTSKKAFLILNELIVALKSKKESRKLAYDVLLAVSANLRSSGSNSADSDLQRLFTMIMGYLSTPSPHIVSGAIAALSLLIYSDANFCMEVPNLIQSVLVLLQHKAIEVTKAALGFVKVLVTSLQPEKLLNLRADIMKGILEWSSVTKHHFKAKVVLILEILIRKCGFDAINLVTPDKYKKFVNSVEEGRNGNHSLADGAESESKEHKQNDAKRRKRIDSNDETGQEGTPSRRPPSKSWSAGKQAKDFHFKKGAGRGNPHAAKSHKSKASGDKGNRTNFKSKSKWQPGNSQGSRGDKLPGSNKKLGWVPSARRKNSGSRAPGHSPSFKKRKRTA

SEQ ID NO: 74903 - protein, 99 aa, Setaria italica
  Transcript Sequence Number=SeqID_8929
  Gene Ontology: Cellular component=chloroplast
  Homolog annotation: Hit_ID=B6ST86; Match level="QueryCoverage=100%, HitCoverage=52%, E-value=2e-42, Identity=82%"; Hit description=SnRK1- interacting protein 1
ASDPVVPWYHANRMLSFYAPGWCGEIRDVIYTDSGKVTVIYRVTVRGTDGEVHREAAGTASLSDARFDDPVAAAEEAAFCKACARFGFGLYLYHDDETP

SEQ ID NO: 74904 - protein, 73 aa, Setaria italica
  Transcript Sequence Number=SeqID_8930
TEYLRRSRRRPNQNYSVGNTSCCCFYTSLFHITALQLLLTAAVNNACYFKWTAVVTPASCCDHPQHCFCRKTE

SEQ ID NO: 74905 - protein, 196 aa, Setaria italica
  Transcript Sequence Number=SeqID_8931
  Gene Ontology: Mol. function=nucleic acid binding
  Homolog annotation: Hit_ID=Q10KI0; Match level="QueryCoverage=75%, HitCoverage=21%, E-value=9e-18, Identity=41%"; Hit description=SAP domain containing protein, expressed
KKNKRTKTRTKDLLEDVEANADDQLPDANASEETTVTITEVRQESVVHVTQQVEVPTTEVSQEFTISATGGTPSIDVEASLNEASAAKGEVPDSIVGGNLAFEEVQLHTESNNEPVLEKTSDVETNEAVIVNDVSTDVKSDLATSEVKSDATKASKIQEQDSAPAPVDAITSDAGPMDYRIVCSYLVLCSYLSLSL

SEQ ID NO: 74906 - protein, 472 aa, Setaria italica
  misc_feature (459)..(459): Xaa can be any naturally occurring amino acid
  misc_feature (464)..(464): Xaa can be any naturally occurring amino acid
  Transcript Sequence Number=SeqID_8932
  Gene Ontology: Mol. function=nucleic acid binding; Cellular component= chloroplast
  Homolog annotation: Hit_ID=Q10KI0; Match level="QueryCoverage=100%, HitCoverage=64%, E-value=1e-134, Identity=59%"; Hit description=SAP domain containing protein, expressed
  Pfam annotation: Domain name=SAP; Domain location=12-46; Score=45.7; E_value=1.9e-10; Accession=PF02037.19; Description=SAP domain
MSSYPVLNNRPIDQWRVTDLKDELRKRRLPVKGLKEELVRRLFESIQSETAADEASEDVEANADDQLPDANASEETTVTITEVRQESVVHVTQQVEVPTTEVSQEFTISATGGTPSIDVEASLNEASAAKGEVPDSIVGGNLAFEEVQLHTESNNEPVLEKTSDVETNEAVIVNDVSTDVKSDLATSEVKSDATKASKIQEQDSAPAPVDAITSDAGPMDTDVVTAAPVSDDGEKLAPKDDLGDKVSMYDEEHKDSDTMNEDCEPIVSKPNNQVPEVSPDLGSQIKCESISSDLSTNKKNNIEDNLNANNFDLELEVKPKMVEPSSGITPLGGDLQPLDDDKELVKDQSSVEDIDSTANEDSYKKDSPEGSPEKLNLDRSSGDESMEEDVMEIKQVELNMKSDDLRGKTELNSEDVKSVTLPDSVVEASSVDTKEVIAEEKSAASTEKRKLEAEEVVAXTEPIXKRQRRWTA

SEQ ID NO: 74907 - protein, 480 aa, Setaria italica
  misc_feature (71)..(71): Xaa can be any naturally occurring amino acid
  Transcript Sequence Number=SeqID_8933
  Gene Ontology: Mol. function=nucleic acid binding; Cellular component= chloroplast; Biological process=positive regulation of monocyte differentiation
  Homolog annotation: Hit_ID=C3SA89; Match level="QueryCoverage=75%, HitCoverage=54%, E-value=1e-138, Identity=65%"; Hit description=SAP domain containing protein
LGCLGCLAITSDADSYKKDSPEGSPVSDDGEKLAPKDDLGDKVSMYDEEHKDSDTMNEDCEPIVSKPNNQXLEVKPKMVEPSSGITPLGGDLQPLDDDKELVKDQSSVEDIDSTANEDSYKKDSPEGSPEKLNLDRSSGDESMEEDVMEIKQVELNMKSDDLRGKTELNSEDVKSVTLPDSVVEASSVDTKEVIAEEKSAASTEKRKLEAEEVVANTEPIKRQRRWTADGAKVPERQTLDQTGSDAPKDVFQPALKRSFGRSDSTASVDSPKERIVPPSQKPATTSLRIDRFVRPFTLKAVQELLGKTGSVQNFWMDHIKTHCYVTFSSVDEAVATRDAVYNLQWPPNNGNKLIAEFVDPQEVKLKIEPPPPPAAPVSPAAAARAPPVQQAQANQNVPRQAATPKEQLPPPPPLAKPPTADPVASARERLPPTPKKPEPPVVTLDDLFRKTQSSPRIYYLPLSEEEVAAKLAAQGKGKKE

SEQ ID NO: 74908 - protein, 72 aa, Setaria italica
  misc_feature (34)..(34): Xaa can be any naturally occurring amino acid
  misc_feature (42)..(42): Xaa can be any naturally occurring amino acid
  Transcript Sequence Number=SeqID_8934
LRRFGSEPRERGTLCSECCSGGQNCKSNDESEKXDPNAESDXKKSNKSSSPGNKKDNSDSDDCCCQADKVWL

SEQ ID NO: 74909 - protein, 160 aa, Setaria italica
  misc_feature (29)..(29): Xaa can be any naturally occurring amino acid
  misc_feature (40)..(40): Xaa can be any naturally occurring amino acid
  misc_feature (128)..(128): Xaa can be any naturally occurring amino acid
  misc_feature (144)..(144): Xaa can be any naturally occurring amino acid
  Transcript Sequence Number=SeqID_8935
CCVTRQTFMRQKGTHCPPPVLPSNPAEEXGNRPCDVNVGXKSSQSVSCGSEPRERGTLCSECCSGGQNCKSNDESEKGDPNAESDCKKSNKSSSPGNKKDNSDSDDCCCQADKVGLGGKKPCCSSSKXNDSSGGGVLRYALHLXRFLSPLKRNPTKSMLR

SEQ ID NO: 74910 - protein, 232 aa, Setaria italica
  Transcript Sequence Number=SeqID_8936
  Subcellular localization annotation: CTP_CleavageSite=55; ConfidenceScore=5.53e-01
TCFVFFYLSFSSCFSCCVTRQTFMRQKVTLSPSVLPSNPAEEGNRPCDVNVGPKSSQSVSCGSEPRERGTLCSECCSGGQNCKSNDESEKGDPNAESDCKKSNKSSSPGNKKDNSDSDDCCCQADKVGLGGKKPCCSSSKINDSSGGGVLRYALHLRFLCPSKKSSKSMLRCKSDPSSVPYNSNTVAEEERRFYLYNDLRVVFPQRHSDSDEGKLRVEHDFPADPKYFPISN

SEQ ID NO: 74911 - protein, 583 aa, Setaria italica
  Transcript Sequence Number=SeqID_8937
MGLPQLSSVNDDAPTAPHTPFSCPPHCGGVGACDLDGLAGSSSSRVFSYPLIGDFDRKTALDAPNESNGYSEGDNMFHEPADHHGLKIDSSDANSRSYTKLLPSVHMPVRRVVGFESSCIRATDGTETDIVNSSLVNSNCHLPFDQHELQARKRLLSPLKNVLTKQFHGDMLNISSGDSRFRHSDSAGKLYSSGFQDNKKANTGCLNSFETQESPTYRCSNWSPEWDISRSNSNSFTDGPLLGSKDSISYYDHLAASAKLAHSPLSLSPLSPKYMNKIKVAGSQRYIMRDLENDFLDLKETGGSDGTRMQEISEETNFLHDELDVTTPKWVSLRRYRNWGPQASPTSPRIGYGRSSSLLVRRSLVGSFEESLLSGRYSYGKDNQTIDGFLAVLNITGGSFFPPTQKLPFSVTSIDEDSSLLYYSSIDLAGRLPANNSKSPKLQRSYSNNDSRSAKSRLRIPVKGRIQLVVSNPEKTPLHTFFCNYDLSDMPSGTKTFMRQKVTLSPSVLPSNPAEEGNRPCDVNVGPKSSQSVSCGSEPRERGTLCSECCSGGQNCKSNDESEKGNRKTRIRPRKITKINKEQ

SEQ ID NO: 74912 - protein, 201 aa, Setaria italica
  Transcript Sequence Number=SeqID_8938
  Gene Ontology: Mol. function=serine-type peptidase activity; Cellular component=thylakoid lumen; Biological process=proteolysis
  Homolog annotation: Hit_ID=Q8S3I9; Match level="QueryCoverage=26%, HitCoverage=13%, E-value=8e-23, Identity=88%"; Hit description=D1 protease (Fragment)
  Subcellular localization annotation: CTP_CleavageSite=50; ConfidenceScore=5.53e-01
MATCSRALFVSASAASSASPSRASLRRLHTVAVVSIWEPHPPLRGAACCFAQTKQCCRRSIKCLASGPSVSRLTRPIKRILSRYSSLMTVLHSNINRCYQAMSALHQDGASKNFLSVGFGRVVLGVVLVMSISAASYTTPSSSALTEENLLFLEAWRAVDRAYYDKTFNGQSWFRYRENALRNEPMNTREETYAAIKKIAF

SEQ ID NO: 74913 - protein, 51 aa, Setaria italica
  misc_feature (24)..(24): Xaa can be any naturally occurring amino acid
  misc_feature (39)..(39): Xaa can be any naturally occurring amino acid
  Transcript Sequence Number=SeqID_8939
AEMIETQSLLSGTPTASFEIEAGXTTGYPTQEGEHLLVXIPMNPTSSYYAR

SEQ ID NO: 74914 - protein, 85 aa, Setaria italica
  Transcript Sequence Number=SeqID_8940
SASRSSLADSSSSAAETADDIANRRDDTGAKTAEIAPRRRSVGNDETGSEAAAARQLCRRRHYSVGGDRDLPPIGHHVSLSRSAS

SEQ ID NO: 74915 - protein, 78 aa, Setaria italica
  Transcript Sequence Number=SeqID_8941
PRSSCSFHPSIHVFLLCASFEIWYKSYLGLVYRRLAVTVNTNFTATPLIELVDIILRIGYNWILKDHSWPDQSPPQQH

SEQ ID NO: 74916 - protein, 82 aa, Setaria italica
  Transcript Sequence Number=SeqID_8942
  Subcellular localization annotation: CTP_CleavageSite=21; ConfidenceScore=5.19e-01
YHPEDQVQLNSQGSFMACPVSANATLEVEPSVNSSSTLPPCNCVRNCGFHLLLLSLLFIVKSSDNSLLGLSPLSPVPKPEAI

SEQ ID NO: 74917 - protein, 56 aa, Setaria italica
  Transcript Sequence Number=SeqID_8943
  Subcellular localization annotation: CTP_CleavageSite=58; ConfidenceScore=5.34e-01
AAITADPNFTVALAAAITSIIGGGGQQQHGSSNNNNNVTSSSNNTATSNNTNSETQ

SEQ ID NO: 74918 - protein, 67 aa, Setaria italica
  misc_feature (1)..(9): Xaa can be any naturally occurring amino acid
  Transcript Sequence Number=SeqID_8944
XXXXXXXXXFFFFFFVHRVNHDSLIPWVFFFLHLHNYRMRAAIQNIHSWSMSTSSRSTPLCSTTQFY

SEQ ID NO: 74919 - protein, 89 aa, Setaria italica
  Transcript Sequence Number=SeqID_8945
FFSIAPGLPTTPLFPWLSFFHIYIITGCELLYRTSIHGRCPPRRAPRHCALPHSSTAIHASRAPVGPDKLAGTREARRPRSRPKAPIAR

SEQ ID NO: 74920 - protein, 91 aa, Setaria italica
  Transcript Sequence Number=SeqID_8946
  Subcellular localization annotation: CTP_CleavageSite=72; ConfidenceScore=5.18e-01
DDIMCQLHSTARAMGVMSWSSRLAAWPPPRMLQELDFLNSKFSFFSIFGLAGSCRCRCSRVNRGVSMCPHLRCSRGSGRRRRRGGRSRGSP

SEQ ID NO: 74921 - protein, 90 aa, Setaria italica
  Transcript Sequence Number=SeqID_8947
FFVTGITTISLFTWLFFFHIYIITGCELLYRTSIHGRCPPRRAPRHCALPHSSTAIHASRAPVGPDKLAGTREARRPRSRPKAPIARIPG

SEQ ID NO: 74922 - protein, 88 aa, Setaria italica
  Transcript Sequence Number=SeqID_8948
VLQPSMLPRAPVGPDKLAGTREARRPRSRPKASNCPDSRSGGKKHHHRHRHVLLDHNSLHCPRHARTLLSKRGTISCVSSTPPPGPWV

SEQ ID NO: 74923 - protein, 91 aa, Setaria italica
  Transcript Sequence Number=SeqID_8949
  Subcellular localization annotation: CTP_CleavageSite=20; ConfidenceScore=5.09e-01
LPHSSTAIHASRAPVGPDKLAGTREARRPRSRPKAPIARIPGAGEEAPPPPPPCPPGSQLTPLPTPRTHTSKVKGGRYHVSAPLHRPGQGL

SEQ ID NO: 74924 - protein, 113 aa, Setaria italica
  Transcript Sequence Number=SeqID_8950
  Subcellular localization annotation: CTP_CleavageSite=41; ConfidenceScore=5.64e-01
MRAAIQNIHSWSMSTSSRSTPLCSTTQFYSHPCFPGAGWPRQARRNPRGPSSTFPAKSSNCRIPGAGKKHHHRHRHVLLDHNSLHCPRHARTLLSKRGTISCVSSTPPPGPWV

SEQ ID NO: 74925 - protein, 111 aa, Setaria italica
  Transcript Sequence Number=SeqID_8951
FFLSPGLPRSPYSLGYSFFYIYIITGCELLYRTSIHGRCPPRRAPRHCALPHSSTAIHASRAPVGPDKLAGTREARRPRSRPKAPIARIPGAGEEAPPPPTPWSSWITTHS

SEQ ID NO: 74926 - protein, 87 aa, Setaria italica
  Transcript Sequence Number=SeqID_8952
  Gene Ontology: Mol. function=binding
  Homolog annotation: Hit_ID=Q9LNU7; Match level="QueryCoverage=96%, HitCoverage=24%, E-value=2e-13, Identity=42%"; Hit description =F22G5.38
PNNSLILANFAQFLYLVQNDHDRAEPADAEALSRYATFLWKARDNLAGAEDTYQEAIAADPGNAHHAAAYAHFLWNTGGEDTCYPLD

SEQ ID NO: 74927 - protein, 90 aa, Setaria italica
  misc_feature (59)..(59): Xaa can be any naturally occurring amino acid
  Transcript Sequence Number=SeqID_8953
  Gene Ontology: Mol. function=peroxidase activity
  Homolog annotation: Hit_ID=Q9LNU7; Match level="QueryCoverage=86%, HitCoverage=20%, E-value=2e-22, Identity=62%"; Hit description =F22G5.38
FAQFLYLVQNDHDRAEHYFELAVRAEPADAEALSRYATFLWKARDNLAGAEDTYQEAIXTDRTPGNAHHAAAYAHFLWNTGGEDTCYPLD

SEQ ID NO: 74928 - protein, 67 aa, Setaria italica
  misc_feature (14)..(14): Xaa can be any naturally occurring amino acid
  Transcript Sequence Number=SeqID_8954
  Gene Ontology: Mol. function=binding
RAEPADAEALEDRXRATFLWKARDNLAGAEDTYQEAIAADPGNAHHAAAYAHFLWNTGGEDTCYPLD

SEQ ID NO: 74929 - protein, 151 aa, Setaria italica
  Transcript Sequence Number=SeqID_8955
  Gene Ontology: Mol. function=binding
  Homolog annotation: Hit_ID=Q9LNU7; Match level="QueryCoverage=56%, HitCoverage=21%, E-value=1e-11, Identity=45%"; Hit description =F22G5.38
  Pfam annotation: Domain name=TPR_2; Domain location=56-90; Score=5.6; E_value=6.8; Accession=PF07719.9; Description=Tetratricopeptide repeat
  Pfam annotation: Domain name=TPR_2; Domain location=91-125; Score =13.2; E_value=0.77; Accession=PF07719.9; Description=Tetratricopeptid e repeat
  Pfam module annotation: Pfam domain module=TPR_2::TPR_2; Domain location=56-90::91-125
MVWRPRPARTTARSALSASLDGMGAGDAELETEDQAEHVRTRQRYEQAVADEPNNSLILANFAQFLYLVQNDHDRAEHYFELAVRAEPADAEALSRYATFLWKARDNLAGAEDTYQEAIAADPGNAHHAAAYAHFLWNTGACAGAATRRDG

SEQ ID NO: 74930 - protein, 123 aa, Setaria italica
  misc_feature (1)..(8): Xaa can be any naturally occurring amino acid
  Transcript Sequence Number=SeqID_8956
XXXXXXXXPLRISLFTWLSFFHIYIITGCELLYRTSIHGRCPPRRAPRHCALPHSSTAIHASRAPVGPDKLAGTREARRPRSRPKAPIARIPGAGEEAPPPPPPCPPGSQLTPLPTPRTHTSK

SEQ ID NO: 74931 - protein, 320 aa, Setaria italica
  Transcript Sequence Number=SeqID_8957
  Gene Ontology: Mol. function=binding
  Homolog annotation: Hit_ID=Q9LNU7; Match level="QueryCoverage=93%, HitCoverage=96%, E-value=5e-21, Identity=35%"; Hit description =F22G5.38
  Pfam annotation: Domain name=TPR_2; Domain location=208-242; Score =5.6; E_value=6.8; Accession=PF07719.9; Description=Tetratricopeptide repeat
  Pfam annotation: Domain name=TPR_2; Domain location=243-277; Score =13.2; E_value=0.77; Accession=PF07719.9; Description=Tetratricopeptid e repeat
  Pfam module annotation: Pfam domain module=TPR_2::TPR_2; Domain location=208-242::243-277
  Subcellular localization annotation: CTP_CleavageSite=57; ConfidenceScore=5.14e-01
SFVWLFQHIFAGTPALMLSLMLLLANFTVHSMGHSVAAAAATIPPAPPAVAAAAAVVDNQRAEPSRPRFDKVSVKTFSVGRTASVGGNSGGGGKAPPVAGATGDGWSDESLYRLSRVAPQQPSTPAGAGLGEAAPDASDEDEQAIWEMMVTEASKMQASARAEELSDPDVLGSLVAPVEAELETEDQAEHVRTRQRYEQAVADEPNNSLILANFAQFLYLVQNDHDRAEHYFELAVRAEPADAEALSRYATFLWKARDNLAGAEDTYQEAIAADPGNAHHAAAYAHFLWNTGGEDTCLPPRLTREHRHRHEPARPKIEKK

SEQ ID NO: 74932 - protein, 89 aa, Setaria italica
  Transcript Sequence Number=SeqID_8958
  Subcellular localization annotation: CTP_CleavageSite=22; ConfidenceScore=5.48e-01
CPPLQSQLISSAHCPRPARRCSRSRRWRPATGELPRPRVPWSGALNPARRLHSARRFPLSSARDLVALVSDGRRHYMRILAAKIAVDMG

SEQ ID NO: 74933 - protein, 373 aa, Setaria italica
  Transcript Sequence Number=SeqID_8959
  Homolog annotation: Hit_ID=B6U4I4; Match level="QueryCoverage=95%, HitCoverage=61%, E-value=0.0, Identity=91%"; Hit description =Microtubule-associated protein MAP65-1a
SLYSWFVFLVLVVLAGDITCGSLLQKLQLIWDEVGESEEDRDKVLYQLDQECLDVYKRKVDQATNSRDLLIQALDDSKIELARLLSALGEKAIARTPEKTTGTIKQQLAAIAPTLEQLTKQKNERKREFVNVQSQIDQICGEIAGTIEVGEQVATPQVNEDDLTLERLEDFRSQLQELEKEKSNRLEKVLEYVSMVHNLCTVLGMDFLSTVTEVHPSLDDSIPDDSKSISNDTLSKLDKTVATLNEDKKLRLSKLQELAGQLYDLWDLMDAPKEERRMFDHVTCNRSASVDEVTAPRSLALDLIEQAEVEVQRLDQLKYSKMKEIAFKKQTELEDIYAGAHIVIDTAAAHEKILALIEAGNIEPSELIADYWY

SEQ ID NO: 74934 - protein, 327 aa, Setaria italica
  Transcript Sequence Number=SeqID_8960
  Homolog annotation: Hit_ID=B6U4I4; Match level="QueryCoverage=100%, HitCoverage=54%, E-value=1e-147, Identity=83%"; Hit description =Microtubule-associated protein MAP65-1a
MFDHVTCNRSASVDEVTAPRSLALDLIEQAEVEVQRLDQLKYSKMKEIAFKKQTELEDIYAGAHIVIDTAAAHEKILALIEAGNIEPSELIADMDSQIAKAKEEALSRKDILDKVERWMSACEEESWLEDYNRDDNRYNSSRGAHLNLKRAEKARILVNKIPALVETLVAKTRAWEENRGLSFMYDGVPLLAMLDEYVMLRQEREEEKKRMREQKRYIEQQLNTDHEGPFGSRVSPNRPASSKKAIGPKLNGSVSNGTPPNRRLSISGQQNGHGVRSGGKDSKKDTVKTASPGNNNAAAAAPASVPAAAKEDAASHISGTDPVPSTP

SEQ ID NO: 74935 - protein, 258 aa, Setaria italica
  Transcript Sequence Number=SeqID_8961
  Gene Ontology: Mol. function=serine-type endopeptidase activity; Cellular component=cell wall; Biological process=negative regulation of catalytic activity
  Homolog annotation: Hit_ID=B6SWW5; Match level="QueryCoverage=100%, HitCoverage=31%, E-value=1e-128, Identity=84%"; Hit description=SLP3
  Pfam annotation: Domain name=Peptidase_S8; Domain location=21-258; Score=-44.8; E_value=0.00026; Accession=PF00082.14; Description =Subtilase family
ERDMKIQKLTTHTPQFLGLPTGVWPTGGGFDRAGEDVVIGFVDSGIYPQHPSFSSHKTDPYGPVPRYKGKCEMDPVTHRSFCNGKIVGTQHFAKAAMAAGAFNPDIEFASPLDGDGHGSHTAAIAAGNNGIPVRMHGHEFGKASGMAPRARIAVYKVLYRLFGGYVADVVAAIDQAVQDGVDILNLSVGPNSPPTATRTTFLNPFDAALLSAVKAGVFVAQAAGNGGPFPKTLVSFSPWITTVAAGVDDRRYKNHLTL

SEQ ID NO: 74936 - protein, 134 aa, Setaria italica
  Transcript Sequence Number=SeqID_8962
EKESHRQRGRKTTDEGTLRLRNIKESAAYNLPTLSDSKRELLRSSSGRSSLANFLSASITEYVPKISCKLSEDILRCISAVYCKLASKPLKEANSEPSSTPSFSSASSSFSLKYPVDSWSPRCHYNVAETRDTY

SEQ ID NO: 74937 - protein, 414 aa, Setaria italica
  Transcript Sequence Number=SeqID_8963
  Gene Ontology: Mol. function=nucleic acid binding
  Homolog annotation: Hit_ID=Q0JDM0; Match level="QueryCoverage=90%, HitCoverage=43%, E-value=1e-135, Identity=67%"; Hit description=Zinc finger CCCH domain-containing protein 27
KRLLFQFSKREEAEAALKAPDAVMGNRFIRLWWANRDRIPDEGEGRIPAKSSQSSTMLANSAPQPSYPNRVKENVQLAPRPSSGSSAEPLSSGTGSKTLSTSSIKPIPNAPKRHESLELLEELRKKQEILAQKRDEFRRQLEKLAKQKGSANSVKHAEASGKEVASNDASKVKDARSMSARAEGSQEVAGSLEKQSSGELASCSQKSAEISTQKSAVVTKQTTLLVPPQNRFKLDNRTTSFRILPPLPSEIANESILADHFSSFGELSSVVLEHTEAHNHDATLKPSLSCSACVTYTTRQSAEKAFIGGKSCKGHTLRFMWLTASPGSNNHSRPQNTSIPIRASSPVGKISSTATSCTAAIPHNKSISTAESAKTSPVGISKASGSSSSLSSNDECPPEHGSTRDVISDSALPQ

SEQ ID NO: 74938 - protein, 61 aa, Setaria italica
  misc_feature (43)..(43): Xaa can be any naturally occurring amino acid
  Transcript Sequence Number=SeqID_8964
  Homolog annotation: Hit_ID=B4FTW1; Match level="QueryCoverage=91%, HitCoverage=18%, E-value=1e-09, Identity=59%"; Hit description=DNA binding protein
VPKKEPVEDSKDETVDKELLMKLKASQITDPFARRVKTEDKPXRTQVAFGQGNSSYARSFL

SEQ ID NO: 74939 - protein, 280 aa, Setaria italica
  misc_feature (17)..(17): Xaa can be any naturally occurring amino acid
  Transcript Sequence Number=SeqID_8965
  Gene Ontology: Mol. function=DNA-directed RNA polymerase activity; Cellular component=DNA-directed RNA polymerase III complex; Biological process=transcription from RNA polymerase III promoter
  Homolog annotation: Hit_ID=B4FTW1; Match level="QueryCoverage=92%, HitCoverage=86%, E-value=2e-91, Identity=64%"; Hit description=DNA binding protein
  Pfam annotation: Domain name=RNA_pol_Rpc4; Domain location=154-268; Score=126.6; E_value=8e-35; Accession=PF05132.6; Description=RNA polymerase III RPC4
GRTKFAPKVPVKKAAKXYVPKKEPVEDSKDETVDKELLMKLKASQITDPFARRVKTEDKPKSRTQVAFGQGNSSYARSFSMPKRSKDEEKLTKEYAEPWDYNHTDYPVTLPLRRPYSGNPEILDEEEFGESSASRAQDAKLTAAEELGLIDRSDESQLLFIQLPSSLPLPLQPQSVAEPNKGSEERRQGMKPSSHCGSKLKDLPGGYMGKILVYKSGKVKMKVGDTLFDVSSGSNCKFVQEVAAMDTREKHCCAVGEINKRAVITPDIDYLLGSIDKMEE

SEQ ID NO: 74940 - protein, 331 aa, Setaria italica
  Transcript Sequence Number=SeqID_8966
  Gene Ontology: Mol. function=protein kinase activity; Cellular component=integral to membrane; Biological process=protein amino acid phosphorylation
  Homolog annotation: Hit_ID=B6SWV2; Match level="QueryCoverage=100%, HitCoverage=51%, E-value=1e-143, Identity=78%"; Hit description =Receptor kinase
  Pfam annotation: Domain name=Pkinase_Tyr; Domain location=183-329; Score=-133.3; E_value=7.3e-05; Accession=PF07714.9; Description =Protein tyrosine kinase
LLNGTLPAFRQRGLVVFNVSYNFLQGEVPDTRALRRFPASAFDHNLKLCGEAVNAECREEAPPSSGGSAAADGGGSDDPVIRPAGGKDREARKPVRFRLATWSVVAMCLIAALVPFAAILIFLHHKKKGREVRLGGRADAAVTGAGDINDKTKQGRGSGSRSTDSAGGKGAELQFFLDDRARFELNELFRSTAEMLGKGRLGITYRVTLEAGPVVVVKRLRNMAHVPRRDFTHTMQLLGKLRHENVADLLACFYSKEEKLVVYEHVPGCSLFQLLHGNRGEGRTPLPWPARLSIAQGTARGLAYLHQSLPYFHRPPHGNLKSSNVLVFFSA

SEQ ID NO: 74941 - protein, 153 aa, Setaria italica
  misc_feature (20)..(20): Xaa can be any naturally occurring amino acid
  Transcript Sequence Number=SeqID_8967
  Gene Ontology: Mol. function=phosphatidate cytidylyltransferase activity; Cellular component=membrane; Biological process =phospholipid biosynthetic process
  Homolog annotation: Hit_ID=B6TSG9; Match level="QueryCoverage=96%, HitCoverage=51%, E-value=2e-47, Identity=69%"; Hit description =Phytol kinase 2
TNTTVICNLCAGDGVADVTXRRFGQVKLPHNPEKSYAGSIANFMAGFIASVLFMCYFNIFGFVDKSWAMVGAFGVVSLAAAVVESLPISTRLDDNLTVPLASVLVGALVFHLIGATNLCCFMSSGTQDSSSRSISAIVDQWWLFAGSSYASSW

SEQ ID NO: 74942 - protein, 105 aa, Setaria italica
  Transcript Sequence Number=SeqID_8968
  Subcellular localization annotation: CTP_CleavageSite=59; ConfidenceScore=5.67e-01
SAAPPGRFRPPRLRLLQGLSLRVPTPAPRSLRKPAPRPPLPRRPAPRSRRVLQQVGRVCGAVRPVPSNIAAELLFQTLAVRLRRRRDSFTRSAHSFAASPPSPNP

SEQ ID NO: 74943 - protein, 180 aa, Setaria italica
  Transcript Sequence Number=SeqID_8969
  Homolog annotation: Hit_ID=B4FZ90; Match level="QueryCoverage=44%, HitCoverage=18%, E-value=9e-12, Identity=46%"; Hit description=F-box domain containing protein
  Pfam annotation: Domain name=F-box; Domain location=5-53; Score=25.0; E_value=0.0003; Accession=PF00646.25; Description=F-box domain
PSAPTAQPVLPDEILEEIFLRLDAAADLARTSAACSSFRRLISARRFLRRFRSLHSPPVLGLLDDEGYGGSRLPVERFIPIEPPHRSAPAARALARAADFTFSFLPDACSWRPRDSRDGRVVLSRRVANAAAFDDLVVCDPLHRRYVMIPPIPDDLTASITKLGKNFEPFLAPAGDGKDE

SEQ ID NO: 74944 - protein, 293 aa, Setaria italica
  Transcript Sequence Number=SeqID_8970
  Gene Ontology: Mol. function=transporter activity; Cellular component= integral to membrane; Biological process=transport
  Homolog annotation: Hit_ID=B6T5Y2; Match level="QueryCoverage=99%, HitCoverage=72%, E-value=1e-136, Identity=83%"; Hit description =Triose phosphate/phosphate translocator
  Pfam annotation: Domain name=DUF6; Domain location=143-278; Score =13.6; E_value=0.013; Accession=PF00892.12; Description=Integral membrane protein DUF6
  Pfam annotation: Domain name=DUF6; Domain location=4-125; Score=5.9; E_value=0.035; Accession=PF00892.12; Description=Integral membrane protein DUF6
  Pfam annotation: Domain name=TPT; Domain location=134-278; Score =172.5; E_value=1.2e-48; Accession=PF03151.8; Description=Triose -phosphate Transporter family
  Pfam module annotation: Pfam domain module=DUF6::DUF6::TPT; Domain location=143-278::4-125::134-278
RNVIFNILNKKIFDYFPYPYFVSVSHLFIGVLYCLIGWSFGFPKRAPVNSTLLKQLVPVAVCHAIGHVTSTVSFAAVAVSFAHTIKALEPFFSAAASQFVLGQPVPLTLWLSLVPVVVGVSVASLTELSFNWTGFINAMISNISFTYRSIYSKKAMTDMDSTNLYAYISIIALFVCIPPAIIIEGPQLMQHGFKDAIAKVGLTKLISNFFVVGLFYHLYNQVATNTLERVAPLSHAIGNVLKRVFVIGFSIIVFGNRITTQTGIGTSIAIAGVALYSFMKAKIEEEKRQIKSA

SEQ ID NO: 74945 - protein, 49 aa, Setaria italica
  misc_feature (26)..(26): Xaa can be any naturally occurring amino acid
  Transcript Sequence Number=SeqID_8971
FSKDGMARKDDPDDYVVVDPLLEKGXEKFNKEQAKLKRRQREWAGISLT

SEQ ID NO: 74946 - protein, 413 aa, Setaria italica
  Transcript Sequence Number=SeqID_8972
  Gene Ontology: Mol. function=peptidyl-prolyl cis-trans isomerase activity; Cellular component=nucleus; Biological process=protein folding
  Homolog annotation: Hit_ID=B6T621; Match level="QueryCoverage=100%, HitCoverage=80%, E-value=1e-167, Identity=76%"; Hit description =Peptidyl-prolyl isomerase CWC27
  Pfam annotation: Domain name=Pro_isomerase; Domain location=1-69; Score=-59.0; E_value=0.0057; Accession=PF00160.13; Description =Cyclophilin type peptidyl-prolyl cis-tr
ACANAGTPHSNGSQFFITLDRCDWLDKKNTIFGKVTGDSIFNLLALADVETDKDDRPVYPQKILSVEVLWDPFEDIVPRQLKKAESVAKTDAELKPKKKAVKQLNVLSFGDEVEEEENEAASSVQAKIKSIHDVLDDPRFLKGEPEDVQLSKEEEEKKKDTVLSVRDALISKKVDSRESEQAPESDDYPEDENEEDFDNRMRSQILKKRRELGDVRPRETSKADKPHRKDKELPDRRSNIEHRRDNDDDDDQEHELQKSKKLSLKKKGIGSEASAERMSKADANLQLLNPAEQERHKQKQKKRQLQGREDETLAKLQKFKASFLSKNPATDHVRENNLATDKVEKEAEEDYTGWHTNRLSFLPDSSKDGMARKDDPDDYVVVDPLLEKGKEKFNKEQAKLKRRQREWAGRSLT

SEQ ID NO: 74947 - protein, 189 aa, Setaria italica
  misc_feature (76)..(76): Xaa can be any naturally occurring amino acid
  Transcript Sequence Number=SeqID_8973
  Gene Ontology: Mol. function=peptidyl-prolyl cis-trans isomerase activity; Cellular component=nucleus; Biological process=protein folding
  Homolog annotation: Hit_ID=B6T621; Match level="QueryCoverage=88%, HitCoverage=32%, E-value=1e-84, Identity=89%"; Hit description =Peptidyl-prolyl isomerase CWC27
  Pfam annotation: Domain name=Pro_isomerase; Domain location=14-168; Score=165.3; E_value=1.8e-46; Accession=PF00160.13; Description =Cyclophilin type peptidyl-prolyl cis-tr
MSSVYVLEPPTKGKVVVQTTAGPLDIELWPKEAPKAARNFVQLCLEGYYDGTLFHRVIKNFLVQGGDPTGSGTGGXSIYGAPFADEFHSRLRFNHRGLVACANAGTPHSNGSQFFITLDRCDWLDKKNTIFGKVTGDSIFNLLALADVETDKDDRPVYPQKILSVEVPFSCHILLLSLFWYLPVFGLGF

SEQ ID NO: 74948 - protein, 103 aa, Setaria italica
  misc_feature (39)..(39): Xaa can be any naturally occurring amino acid
  Transcript Sequence Number=SeqID_8974
  Subcellular localization annotation: CTP_CleavageSite=32; ConfidenceScore=5.36e-01
GGGGGGGGRRGGTGSGGSRTRTSTARGNAAPAAASAGGXSGGGGAGLGSGGGRGARGGGAGGRRAGADPCRIAARRAAGGERKGFAGSNRAGVNCNCKLGEAY

SEQ ID NO: 74949 - protein, 103 aa, Setaria italica
  Transcript Sequence Number=SeqID_8975
SSEDVALDALPVSSPEDDRQRLLRYPATRLTVPAHCGRLLASSDGVLLFKKDMGFYLLCNPITRQWAELPRLPNEYCKGKFYINSDPELRLSYFPPSRSGRSL

SEQ ID NO: 74950 - protein, 185 aa, Setaria italica
  Transcript Sequence Number=SeqID_8976
  Homolog annotation: Hit_ID=B6TYF0; Match level="QueryCoverage=88%, HitCoverage=37%, E-value=5e-10, Identity=32%"; Hit description=F-box domain containing protein
PAHCGRDGETRGGVAEEAHCGRLLASSDGVLLFKKDMGFYLLCNPITRQWAELPRLPNEYCKGKFYINSDPEYGFYFHQPSGEFRLLCCSLTRGFWYIVSTGAGKPRHLKLKQEPDLITRFIRPLLTTATMPVALDGKLHWPPIWRCATGKTRITAFDTVSEMFCQMPGPTSRTPKMMKLFEMEG

SEQ ID NO: 74951 - protein, 99 aa, Setaria italica
  Transcript Sequence Number=SeqID_8977
SARSGVHLHQTKRKHPTRPNPVTYCLGHPTRLTFECLIQLVEYLVKGHLGVHTATAQPQVQGYCIIQQIHIHRIYDDQYNLSPESGIIATQIVEIKHNG

SEQ ID NO: 74952 - protein, 58 aa, Setaria italica
  Transcript Sequence Number=SeqID_8978
CKSSTIVLLAPFYVTNFKLQFLKFESTFLNNIYLTTRNHLNEVCIFRIIIGSQWTIIY

SEQ ID NO: 74953 - protein, 316 aa, Setaria italica
  misc_feature (18)..(18): Xaa can be any naturally occurring amino acid
  Transcript Sequence Number=SeqID_8979
  Gene Ontology: Mol. function=lipid binding; Cellular component=Golgi apparatus
  Homolog annotation: Hit_ID=B6T6P7; Match level="QueryCoverage=100%, HitCoverage=100%, E-value=1e-109, Identity=69%"; Hit description=UBA and UBX domain-containing protein
  Pfam annotation: Domain name=SEP; Domain location=130-203; Score =150.2; E_value=6.4e-42; Accession=PF08059.5; Description=SEP domain
  Pfam annotation: Domain name=UBX; Domain location=238-316; Score =74.0; E_value=5.6e-19; Accession=PF00789.12; Description=UBX domain
  Pfam module annotation: Pfam domain module=SEP::UBX; Domain location =130-203::238-316
MSSASNGGKKPASGGGRXGPTIRTLADINRGPAGFPGAGGSGSDSDEPQEYYTGGEKSGMLVQDPTRRNDSDAIFEQARQTGAVQAPPPFLDSQSSSSRSFTGTGRLLSGETTPSAAPAPQEPVHILHVIHLWNNGFSVDDGPLRAYDDPENADFIESLKMSRCPQELEPADRTTPVHVNVMKRLEDYREPIRPRSAFQGVGRTLGGGPSTDETSAPAPAAPTSAPPAASRSTSFVVDDSQPFTSIQLRLADGTRMVARFNMHHTVGDIRSFIDASRPGAARTYQLQTGFPPKQLADPTQTVEQAGLANSVIMQKM

SEQ ID NO: 74954 - protein, 96 aa, Setaria italica
  Transcript Sequence Number=SeqID_8980
  Gene Ontology: Mol. function=protein serine/threonine kinase activity; Cellular component=integral to membrane; Biological process=protein amino acid phosphorylation
  Homolog annotation: Hit_ID=Q7XQT3; Match level="QueryCoverage=94%, HitCoverage=10%, E-value=3e-27, Identity=68%"; Hit description =OSJNBa0043L09.14 protein
GEPSDRARLNWRQRLDIIHGVAHGVAYLHQGSEESVVHRDLKPSNILLDDNWKPKIADFNTAKLFIKDQPDQSDPTIVVSPGYASPEYLQGEMTPK

SEQ ID NO: 74955 - protein, 122 aa, Setaria italica
  Transcript Sequence Number=SeqID_8981
MLPAANVTARQRGRGSGGALRLAAVVLLVALLALCLARADAAASLSPAGRAPSSEKVVESASLENARGQEVERGHYTTLPAAATAEEEEDDDDGPAVPERVELEVIEDYTPSGPNNRHQPHP

SEQ ID NO: 74956 - protein, 465 aa, Setaria italica
  misc_feature (75)..(75): Xaa can be any naturally occurring amino acid
  misc_feature (279)..(279): Xaa can be any naturally occurring amino acid
  Transcript Sequence Number=SeqID_8982
  Gene Ontology: Mol. function=aminoacyl-tRNA ligase activity
  Homolog annotation: Hit_ID=Q84T06; Match level="QueryCoverage=99%, HitCoverage=69%, E-value=1e-134, Identity=54%"; Hit description =Unknow protein
FLKAICDIRCEQEDIRNFIDSSLKHGYHLPIFRKERIGGDSYGISYWYEDDPILGHRLYREVRRVEYVKEPTKRXSKGKGVSSVPVISYQWEAVASNFDEFNTAAEKLFSSRNRTEVSLGKKLKFNHLPEIEKIHKKKEKLLKKQQREALLLDSYLTVNGFTSGRSRRERKRVTYTFDDYERSINEAIKPTKKNEIGPSPLCKGFYGESPAKSHRHQASNHEGKVATLHRSYRQRKRSQRYTKDFVEAVSDIDPNVDSDDDIMGEAVYDEEYLRSKKQXQKASLSENDEEFHLEQVASDGDNEVDHSLSASEDTDELQWYKRFPIHNPQGSKLRSVDEIHIGIRRSKRSTRPRINYQQYDISGRDIEFGKQEKCSASDPDAGSDAQNGMEVSTTSQDREEEDDEVNKAQQQRIEKALVPSRDSKSVSRKFLDLNEIAPLGGFDDAPVLVKDEHMNNGQEKCPAAH

SEQ ID NO: 74957 - protein, 215 aa, Setaria italica
  Transcript Sequence Number=SeqID_8983
  Gene Ontology: Mol. function=phosphotransferase activity, alcohol group as acceptor; Cellular component=cytoplasm; Biological process =carbohydrate phosphorylation
  Homolog annotation: Hit_ID=B6U8E6; Match level="QueryCoverage=96%, HitCoverage=47%, E-value=1e-108, Identity=92%"; Hit description =Galactokinase
GLSSSAAVGIAYLLALENVNDLVISPVDNIQLDKSIENKYLGLENGILDPSAILLSRYGYLTFMDCKTASPSHVYFSELSKSQQPQGELPFKILLAFSGLQHNLPKKRGYNTRVFECKEAARALLHTAGCEDTPNILRNVDPVVYETKKGVLEENLSRRAEHYFSEMKRVAKGRDAWARGNLQELGQLISASGRSSILNYECGSKEMIQLYEILL

SEQ ID NO: 74958 - protein, 441 aa, Setaria italica
  Transcript Sequence Number=SeqID_8984
  Gene Ontology: Mol. function=phosphotransferase activity, alcohol group as acceptor; Cellular component=cytoplasm; Biological process =carbohydrate phosphorylation
  Homolog annotation: Hit_ID=B6U8E6; Match level="QueryCoverage=95%, HitCoverage=96%, E-value=0.0, Identity=84%"; Hit description =Galactokinase
  Pfam annotation: Domain name=GHMP_kinases_C; Domain location=327-405; Score=27.1; E_value=7.1e-05; Accession=PF08544.5; Description=GHMP kinases C terminal
  Pfam annotation: Domain name=GHMP_kinases_N; Domain location=139-206; Score=21.5; E_value=0.0011; Accession=PF00288.18; Description=GHMP kinases N terminal domain
  Pfam annotation: Domain name=GalKase_gal_bdg; Domain location=26-79; Score=2.7; E_value=0.00057; Accession=PF10509.1; Description =Galactokinase galactose-binding signa
  Pfam module annotation: Pfam domain module=GHMP_kinases_C::GHMP _kinases_N::GalKase_gal_bdg; Domain location=327-405::139-206::26-79
MVAPEGVGVGGGPSRWPAAEELDIVRKKVAEISGRDEKEVRVVACPYRICPLGAHIDHQGGIVTAMTINYGVLLGFVPSNDSEVLLQSGQFKGVIQFRVDDLQKPIDNPENINWESYARGAVYALQNSGYDLRKGIIGYISGVKGLDSSGLSSSAAVGIAYLLALENVNDLVISPVDNIQLDKSIENKYLGLENGILDPSAILLSRYGYLTFMDCKTASPSHVYFSELSKSQQPQGELPFKILLAFSGLQHNLPKKRGYNTRVFECKEAARALLHTAGCEDTPNILRNVDPVVYETKKDVLEEILSRRAEHYFSEMKRVAKGRDAWARGNLQELGQLISASGRSSILNYECGSKEMIQLYEILLKAPGVLGARFSGAGFRGCCLAIVESDRAEAAAAYVAAEYEKAQPELVSRIPADRRVLVCEPGDSARVVLPDDDRLRS

SEQ ID NO: 74959 - protein, 500 aa, Setaria italica
  misc_feature (211)..(211): Xaa can be any naturally occurring amino acid
  Transcript Sequence Number=SeqID_8985
  Homolog annotation: Hit_ID=Q4AC18; Match level="QueryCoverage=67%, HitCoverage=71%, E-value=7e-88, Identity=52%"; Hit description =117M18_7
  Pfam annotation: Domain name=DUF618; Domain location=33-95; Score =116.7; E_value=7.6e-32; Accession=PF04818.5; Description=Protein of unknown function, DUF618
ETLSHWCIYHRKNAEQIVQTWDKQFHSSSKEQKVPFLYLANDILQNSKRNGTEFVEEFWKVLPGALKDVTENGDDRGKKVASRLVDIWQERRVFGSRAGGIKDVMLGAAPLPVLDMTKKRSHGSGIKIVKRDSRSVKLRLGVGGTAEKIVSALHTVHSEQADEDADLEKCKTSMRHVGKLEKDVDSACSKAEDPRREVLCAELKDEEANMXKCIEKLKVVEANRAAVVSELKEALQEQESELEKVRTQLQLAEAMVHEASNMQRRLKNEPTIPLPKSAEPGKALPNGQVKEQQKTAAAILADKIAASSNSQQILQSALSKFAAEEAKNSSETRSDKRQKTDQPLQVPSAANAAAFVPMPQVVATTAQQQPQAMLVQQAPMQSQAPAPQPQYNIYQAPPQQFVQQPGGVMMGMPYNMSTMTPPPPPPPPQMMNLGRPSPSAPQPQMAVMPQTQPQPMLQQQMPMNLAPQMQFALQQPGVPPFRPMQQPPPPGMQYFHPQSQ

SEQ ID NO: 74960 - protein, 64 aa, Setaria italica
  Transcript Sequence Number=SeqID_8986
  Subcellular localization annotation: CTP_CleavageSite=32; ConfidenceScore=5.23e-01
FTIVFNFYAIVGRKFTFSVMNPKACFVNSQCRVARGDAKSLVLYAQINVSAETLDFITCFNMKL

SEQ ID NO: 74961 - protein, 70 aa, Setaria italica
  Transcript Sequence Number=SeqID_8987
  Subcellular localization annotation: CTP_CleavageSite=32; ConfidenceScore=5.20e-01
YTSQIRESLSLLPKTLAKPWQNSSWVQPRNCLANSSRVQPRSWELYQTSPYMRPWIQDKSLEQFVQHTIH

SEQ ID NO: 74962 - protein, 168 aa, Setaria italica
  Transcript Sequence Number=SeqID_8988
  Gene Ontology: Cellular component=integral to membrane
  Homolog annotation: Hit_ID=B9RM88; Match level="QueryCoverage=100%, HitCoverage=20%, E-value=2e-68, Identity=78%"; Hit description =Pentatricopeptide repeat-containing protein, putative
  Pfam annotation: Domain name=UPF0016; Domain location=84-159; Score =112.4; E_value=1.5e-30; Accession=PF01169.11; Description =Uncharacterized protein family UPF0016
LFVMTVLSTGLGRIVPNLISRKHTNSAATVLYAFFGLRLLYIAWRSDSKASQKKEIEEVEEKLEAGQGKSTFRRVFSRFCTPIFLESFVLTFLAEWGDRSQIATIALATHKNAIGVATGATLGHTICTSIAVVGGSMLASKISQGTVATIGGLLFLGFSLSSYFYPPL

SEQ ID NO: 74963 - protein, 136 aa, Setaria italica
  Transcript Sequence Number=SeqID_8989
  Gene Ontology: Mol. function=transporter activity; Cellular component= membrane; Biological process=oligopeptide transport
  Homolog annotation: Hit_ID=B9ST00; Match level="QueryCoverage=95%, HitCoverage=75%, E-value=1e-44, Identity=60%"; Hit description =Nitrate transporter, putative
VVAYWLVPQYALHGIAEAFNSVGHLEFMYDQAPESMRSTATALFWLSISLGSYASTMLVDAVHRWSAGPGGANWLSDNINHGRLDYFYWVVTMLQLMNLLYYVVCAKKFTFKPVQLHKEVEEEEVGMALVELQDKV

SEQ ID NO: 74964 - protein, 225 aa, Setaria italica
  misc_feature (132)..(132): Xaa can be any naturally occurring amino acid
  Transcript Sequence Number=SeqID_8990
  Gene Ontology: Mol. function=nucleoside-triphosphatase activity; Cellular component=signal recognition particle; Biological process =SRP-dependent cotranslational protein targeting to membrane
  Homolog annotation: Hit_ID=B6TZA9; Match level="QueryCoverage=100%, HitCoverage=63%, E-value=1e-118, Identity=94%"; Hit description=Cell division protein ftsY
  Pfam annotation: Domain name=SRP54; Domain location=61-225; Score =224.1; E_value=3.5e-64; Accession=PF00448.14; Description=SRP54-type protein, GTPase domain
LLVSDFGPKISFRIVDTLREEIRDGKLKSGPEIKASLKRCILELLTSKGGNPELNLGFRKPAVIMIVGVNGGGKTTSLGKLAHRFKNEGVKVLMAAGDTFRAAARDQLEVWAERTGSEIVIDNDKKAQPPAXVKRGKREGFDVVLCDTSGRLHTNYGLMEELVSCKKVIAKALPGAPNEILLVLDGTTGLNMLQQAREFNDVVGVTGFILTKLDGTAAGCCVVSV

SEQ ID NO: 74965 - protein, 177 aa, Setaria italica
  misc_feature (38)..(38): Xaa can be any naturally occurring amino acid
  Transcript Sequence Number=SeqID_8991
  Gene Ontology: Mol. function=cysteine-type peptidase activity; Biological process=proteolysis
  Homolog annotation: Hit_ID=B6TW94; Match level="QueryCoverage=93%, HitCoverage=47%, E-value=8e-20, Identity=37%"; Hit description=F-box domain containing protein
MATPRRVLSEDLIGEIFLRLPPDHPACPFRASAVSQAXRTFLTDPDILRLYRQLHTAPPVLGFLQHTGRPDSPFAHIITTATPSPPLRRPDIECSLSLELDCRHGRVLFHTINPLGLIVWNPVTGGHHFLPYQLDHPQPAFSHFAGAVLCAADGCDHLDCGEGPFRVVFAATVDEDV

SEQ ID NO: 74966 - protein, 145 aa, Setaria italica
  misc_feature (7)..(7): Xaa can be any naturally occurring amino acid
  misc_feature (96)..(96): Xaa can be any naturally occurring amino acid
  Transcript Sequence Number=SeqID_8992
  Gene Ontology: Mol. function=phosphatidylserine binding; Cellular component=membrane fraction; Biological process=vesicle-mediated transport
  Homolog annotation: Hit_ID=B6SK39; Match level="QueryCoverage=100%, HitCoverage=24%, E-value=3e-71, Identity=89%"; Hit description =Copine-3
  Pfam annotation: Domain name=C2; Domain location=1-79; Score=10.5; E _value=0.016; Accession=PF00168.22; Description=C2 domain
EIKDLLXTKSDPSLLISRISDSGMPVPICKTEVRKNDLNPRWKPVILNLQQIGSKENPLIIECFNFSSNGKHDLVGKIVKSVAELENMYHRQNGEXFFVPASNAHECHSKEVLKSQLYVEKYVESNRHTFLDYISAGCQFVIFIG

SEQ ID NO: 74967 - protein, 158 aa, Setaria italica
  Transcript Sequence Number=SeqID_8993
  Gene Ontology: Mol. function=transporter activity; Cellular component= membrane; Biological process=transport
  Homolog annotation: Hit_ID=Q10BC0; Match level="QueryCoverage=93%, HitCoverage=38%, E-value=2e-77, Identity=95%"; Hit description =Permease I, putative, expressed
LSQYIPHLVPLLGTAFERFAVVMSIAVVWLYAFFLTVGGAYKNAAPKTQFHCRTDRSGLVGGAPWISVPYPFQWGAPTFDAGEAFAMMAASFVALVESTGAFIAVSRYASATPCPPSVMSRGIGWQGVGILLGGLFGTANGSSVFVEILWHRQTHKQR

SEQ ID NO: 74968 - protein, 393 aa, Setaria italica
  misc_feature (8)..(8): Xaa can be any naturally occurring amino acid
  Transcript Sequence Number=SeqID_8994
  Gene Ontology: Mol. function=transporter activity; Cellular component= membrane; Biological process=transport
  Homolog annotation: Hit_ID=B9HJR9; Match level="QueryCoverage=99%, HitCoverage=73%, E-value=1e-173, Identity=75%"; Hit description =Nucleobase ascorbate transporter
  Pfam annotation: Domain name=Xan_ur_permease; Domain location=1-305; Score=20.8; E_value=8.2e-09; Accession=PF00860.12; Description =Permease family
LIVASTLXQIIMGFSGLWRIVVRLLSPLSAAPLVALVGFGLYELGFPSVAKCVEIGLPQILLLVALSQYIPHLVPLLGTAFERFAVVMSIAVVWLYAFFLTVGGAYKNAAPKTQFHCRTDRSGLVGGAPWISVPYPFQWGAPTFDAGEAFAMMAASFVALVESTGAFIAVSRYASATPCPPSVMSRGIGWQGVGILLGGLFGTANGSSVSVENAGLLALTRVGSRRVVQISAGFMIFFSILGKFGAVFASIPGPIIAAIYCLLFAYVGMAGVGFLQFCNLNSFRTKFILGFSLFMGLSVPQYFNEYTSVAGFGPVHTHARWFNDMINVVFSSKAFVGGAVAYFLDNTLHRRDGTVRKDRGHHFWDRFRSFKTDPRSEEFYSLPFNLNKFFPSF

SEQ ID NO: 74969 - protein, 55 aa, Setaria italica
  Transcript Sequence Number=SeqID_8995
MNPLLDHSIVHTKLLTLLLTRYLKSGPGSLEKDVERRFSYALSREDIENAILGGP

SEQ ID NO: 74970 - protein, 150 aa, Setaria italica
  Transcript Sequence Number=SeqID_8996
  Homolog annotation: Hit_ID=Q8YST9; Match level="QueryCoverage=60%, HitCoverage=97%, E-value=2e-14, Identity=43%"; Hit description =Asr2994 protein
  Subcellular localization annotation: CTP_CleavageSite=30; ConfidenceScore=5.67e-01
MSMALSSSLRALALISPALPSARPSGFAAPASRARGRPRRGAGVVSQAAALPSDAQWLERLPEKKKPLYTHSLPCIEAWLRSLGFTQSREDPAVWVAEKPLWHARLSLDVTDLHIRYLKSGPGSLEKDVERRFSYALSREDIENAILGGP

SEQ ID NO: 74971 - protein, 214 aa, Setaria italica
  Transcript Sequence Number=SeqID_8997
  Homolog annotation: Hit_ID=B6TRZ2; Match level="QueryCoverage=100%, HitCoverage=100%, E-value=2e-82, Identity=70%"; Hit description=VAMP protein SEC22
  Pfam annotation: Domain name=Hin1; Domain location=40-178; Score =147.8; E_value=3.3e-41; Accession=PF07320.5; Description=Harpin -induced protein 1 (Hin1)
MSIKYCDQHKDCERQRLYRRCCAAVAGIILLALLIVLIVWLVLRPSKPRFFLSNVDIVCINVSSSSALAVTMQATLAARNPNERVGIFYDRADVYAEYRGLQVTVATALPPMFQGRGDATVWAPFLSAAGVPLPPYLATALAQDETAGYLLVTIRVDGWIRWKAGAFITSHYHLRVRCPALLTVNDGQGSYGSNAGGGLGYFKFNRAAPCVVDI

SEQ ID NO: 74972 - protein, 90 aa, Setaria italica
  Transcript Sequence Number=SeqID_8998
  Subcellular localization annotation: CTP_CleavageSite=61; ConfidenceScore=5.25e-01
HGNFNLSVQDSAIQVLHNSQPPSEIQLNSTATWIQSIARGTHTNRTRTNNARRTDPPITTGAAAVEANLLAARGRRDLLLVAPVLHLRPA

SEQ ID NO: 74973 - protein, 213 aa, Setaria italica
  Transcript Sequence Number=SeqID_8999
  Homolog annotation: Hit_ID=Q01E94; Match level="QueryCoverage=28%, HitCoverage=53%, E-value=3e-13, Identity=53%"; Hit description=CccP Conserved Cys-containing protein (IC)
  Subcellular localization annotation: CTP_CleavageSite=45; ConfidenceScore=5.45e-01
MAAASVWLLQLPPPALHNSLSHPSNQPSSACPPLHKKPRGDLLCCASSGASSSVVAKEQEEAVAAPSEEGYEPALLSYKDDPNFRGCRGCGREELERGCNGEGRIQGGIAAVPGFGWWPIKAYRPCPGFVASGGRYRRQGQSMDDVASGRGKESLSSQEEVTYCTRTCFLLFPGYISRWPMCHLDKFPFLFVCMCDNYRLSFHNSSLIVICSS

SEQ ID NO: 74974 - protein, 76 aa, Setaria italica
  Transcript Sequence Number=SeqID_9000
FMYPVLPLKPDVTAHSFNNSNNYPMGNLQYRDKNQHIMTTRLQICYRMILHFFFTCCILLPRLVEIYLASYWQLFY

SEQ ID NO: 74975 - protein, 302 aa, Setaria italica
  Transcript Sequence Number=SeqID_9001
  Gene Ontology: Mol. function=heat shock protein binding; Biological process=protein folding
  Homolog annotation: Hit_ID=B6TAS0; Match level="QueryCoverage=100%, HitCoverage=88%, E-value=1e-127, Identity=77%"; Hit description=DnaJ protein
  Pfam annotation: Domain name=DnaJ; Domain location=1-30; Score=6.0; E_ value=0.0012; Accession=PF00226.23; Description=DnaJ domain
  Pfam annotation: Domain name=DnaJ_C; Domain location=178-300; Score =57.7; E_value=4.5e-14; Accession=PF01556.10; Description=DnaJ C terminal region
  Pfam module annotation: Pfam domain module=DnaJ::DnaJ_C; Domain location=1-30::178-300
TNKKEAEAKFKQISEAYEVLSDPQKRTIYDQLGEEGLKGQPPPGAGGPGASPFFPGGAHSTSFHFNPRSADDIFKEFFGFSGMGGMGSMRGEPGFQRSMFGNDFFPSRYGGEGSTSMQQPLHKAAPIENRLPVSLADLYKGVTKKMKISRETIDAHGRVSHVEEILTIDVKPGWKKGTKITFPEKGNEAPNMRPADIVFIIDEKPHDVFTRDGNDLVMTEKISLVEALTGYTARVTTLDGRSLSLPINSIIHPSYEEVIPGEGMPIPKDPTKKGNLRIKFNIKFPSRLTSDQKAGIKKLLGS

SEQ ID NO: 74976 - protein, 81 aa, Setaria italica
  misc_feature (69)..(69): Xaa can be any naturally occurring amino acid
  Transcript Sequence Number=SeqID_9002
  Gene Ontology: Cellular component=exocyst; Biological process =exocytosis
  Homolog annotation: Hit_ID=B9T3B0; Match level="QueryCoverage=76%, HitCoverage=10%, E-value=3e-10, Identity=53%"; Hit description =Protein binding protein, putative
VRKPAVDASLRRLGVERLSIGDVQRLEWDALEAKIRRWIRAARAAVRGVFASERRLCFHIFHDLPISTXTISAAAAPPLTD

SEQ ID NO: 74977 - protein, 58 aa, Setaria italica
  Transcript Sequence Number=SeqID_9003
  Gene Ontology: Mol. function=hydrolase activity; Biological process =metabolic process
LPGDEGRAYHAALLASGWSGEAELEDTPGVDHVFHLVRPGTEAAEKLMDRVVAFIARA

SEQ ID NO: 74978 - protein, 111 aa, Setaria italica
  Transcript Sequence Number=SeqID_9004
  Gene Ontology: Mol. function=drug transporter activity; Cellular component=membrane; Biological process=multidrug transport
  Homolog annotation: Hit_ID=B7ZGM0; Match level="QueryCoverage=92%, HitCoverage=21%, E-value=8e-26, Identity=52%"; Hit description =Putative MATE transporter
  Pfam annotation: Domain name=MatE; Domain location=21-111; Score= -27.2; E_value=0.061; Accession=PF01554.10; Description=MatE
SEGWWGEATAEAGRLASLAAPMIAVALLQLTMQLISTIMVGHLGEVPLAGAAIANSLTNVSGFSVLMGLACGLETICGQAYGAEQYHKLALFTYRSITVLLIVSVPIAYFM

SEQ ID NO: 74979 - protein, 88 aa, Setaria italica
  Transcript Sequence Number=SeqID_9005
  Homolog annotation: Hit_ID=Q7XKK4; Match level="QueryCoverage=94%, HitCoverage=16%, E-value=6e-24, Identity=70%"; Hit description =OSJNBa0038O10.3 protein
QQDAGDQMIRGLKILPAQVELRAGELPWLVGDSATQRSRFAFWLQNLHRARSFRWVLVNSFPGEAGVAAGDDVHRLARQSPQVLPVGP

SEQ ID NO: 74980 - protein, 123 aa, Setaria italica
  Transcript Sequence Number=SeqID_9006
  Gene Ontology: Mol. function=electron carrier activity; Cellular component=extracellular region; Biological process=response to oxidative stress
  Homolog annotation: Hit_ID=C5H4Q9; Match level="QueryCoverage=100%, HitCoverage=63%, E-value=3e-37, Identity=65%"; Hit description=Class III peroxidase (Fragment)
AHTIGIAHCSSFADRLYGHPGAGAGNDTTDPTLDAAYAANLRRRKCRAPSGGFAEDAVVEMDPGSHLTFDLGYYRALRKHRCLLQSDAALLTDPAARADVESVAGGPDEVFFQLFARSMATLG

SEQ ID NO: 74981 - protein, 97 aa, Setaria italica
  Transcript Sequence Number=SeqID_9007
  Gene Ontology: Mol. function=protein serine/threonine kinase activity; Biological process=protein amino acid phosphorylation
  Homolog annotation: Hit_ID=Q00RI0; Match level="QueryCoverage=100%, HitCoverage=14%, E-value=7e-45, Identity=87%"; Hit description =OSIGBa0125M19.6 protein
ACGRKPVVQDARDNRLVLVDWVLERWRAGVVTDTVDPRLAGDFVGSEASLVLRLGLLCSHPLPGARPGMRQVVQYLDGDVPLPELSPTYQGLNMLAL

SEQ ID NO: 74982 - protein, 151 aa, Setaria italica
  Transcript Sequence Number=SeqID_9008
  Gene Ontology: Cellular component=chromosome; Biological process =regulation of transcription, DNA-dependent
  Homolog annotation: Hit_ID=Q7X923; Match level="QueryCoverage=90%, HitCoverage=12%, E-value=4e-30, Identity=51%"; Hit description=FACT complex subunit SPT16
MAILETLDQTAPVSGSSTVVSPENFIKCLKKFYGRWKEDVSDLWGSSSAIAVATPPPSDNIRYRKSLALSMWFFGSEFADTIMVFLSSQIHFLSGQDGYDLLQHLKMPASKAGFDIVLHNLEKADNGSLLMDQILNSVFAQYESKNVVMGL

SEQ ID NO: 74983 - protein, 53 aa, Setaria italica
  Transcript Sequence Number=SeqID_9009
LYSCLMCIIILLHSYFKVLSHFFGPYVLGWRECLDTSQTIRKAIKKKWQVAIN

SEQ ID NO: 74984 - protein, 99 aa, Setaria italica
  Transcript Sequence Number=SeqID_9010
  Gene Ontology: Mol. function=transferase activity, transferring nitrogenous groups; Biological process=biosynthetic process
  Homolog annotation: Hit_ID=Q852S6; Match level="QueryCoverage=97%, HitCoverage=20%, E-value=5e-50, Identity=94%"; Hit description=ACC synthase
GDAFLIPTPYYPGFDRDLKWRTGAEIVPVHCTSANGFRVTRAALDDAYRRAQKRRLRVKGVLITNPSNPLGTTSPRADLELLVDFVAAKGIHLVSDEYL

SEQ ID NO: 74985 - protein, 135 aa, Setaria italica
  misc_feature (114)..(114): Xaa can be any naturally occurring amino acid
  Transcript Sequence Number=SeqID_9011
  Gene Ontology: Cellular component=chloroplast
  Homolog annotation: Hit_ID=B9SPX9; Match level="QueryCoverage=100%, HitCoverage=38%, E-value=1e-40, Identity=55%"; Hit description =Electron transporter, putative
  Pfam annotation: Domain name=DUF179; Domain location=18-135; Score= -33.5; E_value=9.4e-06; Accession=PF02622.7; Description =Uncharacterized ACR, COG1678
WAHSIPMPESGCVLVATEELDGNGTFERTVILLLSLGSRDAYDGPFGIILNRPLYTKMKHVNPSFGEKATPFGDCSLLFGGPVDMSLFLMRSTEGKPIKGFEEVVPGICFCFRXDLEKASALMNNGTVKPEDLKF

SEQ ID NO: 74986 - protein, 87 aa, Setaria italica
  Transcript Sequence Number=SeqID_9012
  Homolog annotation: Hit_ID=Q53NA2; Match level="QueryCoverage=100%, HitCoverage=19%, E-value=3e-17, Identity=52%"; Hit description =D8Ertd354e protein, putative
ITVVLMIIVDDVGGLVPAISHSPWDGVTLADFVFPFFLFIVGVSLAFAFKRVPNRALATKKAMIRASKLFLLGLILQGGFFHSIHDL

SEQ ID NO: 74987 - protein, 81 aa, Setaria italica
  Transcript Sequence Number=SeqID_9013
NEERPHKRQRTEDSGEETAKYTNVLDTLLSVESTPISVSTSRKIAIFISRIQMSISSKMVHDDYITSLLHGLIGILYNRFS

SEQ ID NO: 74988 - protein, 39 aa, Setaria italica
  misc_feature (17)..(17): Xaa can be any naturally occurring amino acid
  Transcript Sequence Number=SeqID_9014
  Gene Ontology: Mol. function=catalytic activity; Biological process =metabolic process
  Homolog annotation: Hit_ID=B9H653; Match level="QueryCoverage=97%, HitCoverage=6%, E-value=4e-10, Identity=73%"; Hit description =Acyl:coa ligase acetate-coa synthetase-like protein (Fragment)
YELHFAVPMAGAVLCTXNTRHDAYMLSVLLKHSSVKVLT

SEQ ID NO: 74989 - protein, 78 aa, Setaria italica
  Transcript Sequence Number=SeqID_9015
  Gene Ontology: Mol. function=hydrolase activity, acting on ester bonds; Biological process=lipid metabolic process
  Homolog annotation: Hit_ID=B6TJW4; Match level="QueryCoverage=55%, HitCoverage=11%, E-value=6e-16, Identity=88%"; Hit description =Anther-specific proline-rich protein APG
MGRRAWQMAVAVLAVLGAAATTTVRPAVAAPQVPCYFIFGDSLVDNGNNNFIVSMARANYPPYGIDFAGGPTGRFSNS

SEQ ID NO: 74990 - protein, 121 aa, Setaria italica
  Transcript Sequence Number=SeqID_9016
  Gene Ontology: Mol. function=calcium ion binding; Cellular component =flagellin-based flagellum; Biological process=ciliary or flagellar motility
  Homolog annotation: Hit_ID=B6SJJ2; Match level="QueryCoverage=100%, HitCoverage=70%, E-value=4e-57, Identity=93%"; Hit description =Calmodulin
  Pfam annotation: Domain name=efhand; Domain location=49-77; Score =33.3; E_value=9.6e-07; Accession=PF00036.24; Description=EF hand
  Pfam annotation: Domain name=efhand; Domain location=85-113; Score =38.1; E_value=3.4e-08; Accession=PF00036.24; Description=EF hand
  Pfam annotation: Domain name=efhand; Domain location=9-37; Score =22.8; E_value=0.0014; Accession=PF00036.24; Description=EF hand
  Pfam module annotation: Pfam domain module=efhand::efhand::efhand; Domain location=49-77::85-113::9-37
LGLRPTGEEVRALLAGMDADGNGAVEFEELAAAIAPLLTTQTHLVDQDQLLEVFRAFDRDGNGYISAAELARSMARLGQPLTFEELTRMMRDADADGDGVISFQEFAAVMAKSALDFLGVA

SEQ ID NO: 74991 - protein, 82 aa, Setaria italica
  Transcript Sequence Number=SeqID_9017
  Gene Ontology: Mol. function=transposase activity; Biological process= transposition, DNA-mediated
  Homolog annotation: Hit_ID=Q10JS5; Match level="QueryCoverage=96%, HitCoverage=9%, E-value=1e-12, Identity=37%"; Hit description =Transposon protein, putative, CACTA, En/Spm sub-class
LEMGNYIKGSMTTRGYKLIIEKYYCGSGLRHDRKQIANRIRQLKEMYQFIKDIHSNNGLGRDENGWPIASLEWWETATEVFL

SEQ ID NO: 74992 - protein, 75 aa, Setaria italica
  Transcript Sequence Number=SeqID_9018
ERPNNGKTKAEQNRNPGETATIRRNQTKHAKAQGTDSKERNISSAETAQKTGSAETTTGQPWQISWIGKKPRLRK

SEQ ID NO: 74993 - protein, 55 aa, Setaria italica
  Transcript Sequence Number=SeqID_9019
SSSLELCQVTTFIRFWFSSLSPLVLIRFVSLEFRWENGMQPRLCSQKKKKKKKKK

SEQ ID NO: 74994 - protein, 143 aa, Setaria italica
  Transcript Sequence Number=SeqID_9020
  Gene Ontology: Mol. function=helicase activity
  Homolog annotation: Hit_ID=B9R8Q2; Match level="QueryCoverage=99%, HitCoverage=72%, E-value=2e-52, Identity=66%"; Hit description =Pentatricopeptide repeat-containing protein, putative
  Pfam annotation: Domain name=PPR; Domain location=28-62; Score=22.3; E_value=0.002; Accession=PF01535.12; Description=PPR repeat
  Pfam annotation: Domain name=PPR; Domain location=63-97; Score=17.4; E_value=0.06; Accession=PF01535.12; Description=PPR repeat
  Pfam module annotation: Pfam domain module=PPR::PPR; Domain location =28-62::63-97
PLCTFGPPHAALMIYKKSRKAGCVISLKAYKLLLDRLAKFGKSGIVLNIWEEMQECGYQPDKEIYEFIVNGLCNVGKVDAAVSVMEESLRNGFCLGRIVYSKLNNKLLEMDKVETAYNLFKKVKEARALTNSRNYCRANGWHS

SEQ ID NO: 74995 - protein, 85 aa, Setaria italica
  Transcript Sequence Number=SeqID_9021
  Homolog annotation: Hit_ID=B6U528; Match level="QueryCoverage=97%, HitCoverage=42%, E-value=2e-33, Identity=84%"; Hit description=Px19 -like protein
  Pfam annotation: Domain name=PRELI; Domain location=1-76; Score= -37.5; E_value=0.00096; Accession=PF04707.6; Description=PRELI-like family
LRGLIEVEERASYRPHPDRPDEWTQFRQETTIRCRPLAALAAVAEKVETRCAERFLQNSAKGREVVERICRYLEAESAGAAPSAV

SEQ ID NO: 74996 - protein, 242 aa, Setaria italica
  Transcript Sequence Number=SeqID_9022
  Gene Ontology: Mol. function=voltage-gated potassium channel activity; Cellular component=integral to membrane; Biological process=potassium ion transport
  Homolog annotation: Hit_ID=Q5EEQ2; Match level="QueryCoverage=100%, HitCoverage=31%, E-value=1e-133, Identity=94%"; Hit description =Potassium outward rectifying channel (Fragment)
  Pfam annotation: Domain name=Ion_trans; Domain location=7-177; Score =1.4; E_value=0.02; Accession=PF00520.23; Description=Ion transport protein
  Pfam annotation: Domain name=Ion_trans_2; Domain location=105-183; Score=32.6; E_value=1.6e-06; Accession=PF07885.8; Description=Ion channel
  Pfam module annotation: Pfam domain module=Ion_trans::Ion_trans_2; Domain location=7-177::105-183
YDPTAIALRYCKSSFIFDLLGCFPWDAIYKACGSKEEVRYLLWIRLTRALKVTEFFWQLQKDIRVNYLFTRIVKLIVVELYCTHTAACIFYYLATTLPESMEGYTWIGSLQLGDYSYAHFREIDLAKRYITSLYFAIVTMATVGYGDIHAVNIREMIFIMIYVSFDMILGAYLIGNMTALIVKGSRTERFRDKMKEVIRYMNRNKLGKEIREQIKGHLRLQYESSYTEASALQDIPISIRAK

SEQ ID NO: 74997 - protein, 86 aa, Setaria italica
  Transcript Sequence Number=SeqID_9023
RSRYVRRQPDRSRRPPPLPPPDYGHEHCPVPLWEREFCSYVGNISWQRFCENKQYVSVYNNLEQWNDSGAFENFQNAKARFWSNYH

SEQ ID NO: 74998 - protein, 276 aa, Setaria italica
  Transcript Sequence Number=SeqID_9024
  Homolog annotation: Hit_ID=B9RGG4; Match level="QueryCoverage=42%, HitCoverage=9%, E-value=3e-17, Identity=36%"; Hit description =Pentatricopeptide repeat-containing protein, putative
YRILTFIFIYAGHEHCPVPLWEREFCSYVGNISWQRFCENKQYVSVYNNLEQWDDSGAFENFQNAKARFWSNYHGQPSDIPLPGPDMYIDKVDHRCKVDPELVADLDKVRLPFDSDYSAPATGSGNAGAVNKCTQNESGNWDIYIEKPAEVNKWDWEASLGSKAIWGGNNESSGKWGNGNSGWGAALEKPSWRGWSNEQYASNNRNDSFYGGSNNNRYWDEDPSHTSGRKRNSSGYSQQRNNKQRNQDDGYHQRSGWQDHRGRNKDWRPLHNRAWE

SEQ ID NO: 74999 - protein, 129 aa, Setaria italica
  Transcript Sequence Number=SeqID_9025
  Gene Ontology: Mol. function=oxidoreductase activity, acting on the CH-NH2 group of donors, NAD or NADP as acceptor; Cellular component =chloroplast; Biological process=glutamate biosynthetic process
  Homolog annotation: Hit_ID=A7VKB1; Match level="QueryCoverage=100%, HitCoverage=5%, E-value=9e-45, Identity=70%"; Hit description=NADH -glutamate synthase 2
EVVRVEWGKVDGRFQFKEIEGSQEIIEADLVFLAMGFPGVKADIAKKLGLEQDKRSNFMAQFGNFATNVEGVFAAGDCRRGQSLVVWAIAEGREAAAAVDKYLSRERTNAAEDVAAPSPSEGLVQPVAA

SEQ ID NO: 75000 - protein, 343 aa, Setaria italica
  misc_feature (216)..(216): Xaa can be any naturally occurring amino acid
  Transcript Sequence Number=SeqID_9026
  Gene Ontology: Mol. function=kinase activity; Biological process=D -ribose metabolic process
  Homolog annotation: Hit_ID=B6SW58; Match level="QueryCoverage=99%, HitCoverage=71%, E-value=1e-157, Identity=80%"; Hit description =Protein kinase
  Pfam annotation: Domain name=PfkB; Domain location=4-270; Score= -31.4; E_value=3.7e-05; Accession=PF00294.16; Description=pfkB family carbohydrate kinase
  Pfam annotation: Domain name=Phos_pyr_kin; Domain location=84-269; Score=-148.6; E_value=0.034; Accession=PF08543.4; Description =Phosphomethylpyrimidine kinase
  Pfam module annotation: Pfam domain module=PfkB::Phos_pyr_kin; Domain location=4-270::84-269
GLRGLRCSTLGHVGEEIYGKFLLDVLQAEGISVIGMLENTDATACRQAYETLLCWVLVDPFQKHGFCSRADFSEEPAFSWIRKLPADIRTAIHHSKILFCNGYAFDEFFPDVIASSIDCAIDAGTAVFFDPGPRGKSLLNGTLDEQRALEHALRLSDVLLLTSDEAESLTNVKNPIEAGQELLKRGIRTKQVVIKMGSKGSIMITKNAVSCAPSFXINVVDTVGCGDSFTAAIAFGFLHDLPAVNTLTLANAVGAATATGCGAGRNVAHLDKVLQFLREANLNEDTAWGELIEGSSLCPDVTVLCRTAVNGFSEHFVHVPVGDVVSDLLPMFEAVSERSTVQA

SEQ ID NO: 75001 - protein, 86 aa, Setaria italica
  Transcript Sequence Number=SeqID_9027
MGCAFSSASSSGSLRPCPAGVRVIHTNGYVEDFLGPGVVTVAHVTGCYYADKDDHPASSPRYVLCSSAHLLQPGRGPFRPDDTLQP

SEQ ID NO: 75002 - protein, 85 aa, Setaria italica
  Transcript Sequence Number=SeqID_9028
VAILLAAATSGFVGLVNDHTGDLHIVARKSFKHQQLNPALKLLNLQMIARNDASKFTPFFNFVPSAVVSISCKFNAGTQELVGIT

SEQ ID NO: 75003 - protein, 358 aa, Setaria italica
  misc_feature (280)..(280): Xaa can be any naturally occurring amino acid
  misc_feature (332)..(332): Xaa can be any naturally occurring amino acid
  Transcript Sequence Number=SeqID_9029
  Gene Ontology: Mol. function=metallopeptidase activity; Cellular component=transcription factor TFIID complex; Biological process =transcription initiation from RNA polymerase II promoter
  Homolog annotation: Hit_ID=Q6SJQ9; Match level="QueryCoverage=94%, HitCoverage=20%, E-value=4e-73, Identity=43%"; Hit description=TFIID component TAF2 (Fragment)
MAKARKQKGDGGGAGGGATVLHQKLCVSIDMENQLIYGYTEIKVLLADNDTFALHADNMTIRSILVDGETVEFDYSPHWKNEGDQPNWSSISCLKTAADAACSTYTLALNRESVPNLIVSYERSVKSITEQQVEENSERHEENSRMLEEHGGKPVQTSDDQTVNGCNGSAVEEQKERENGNGNGSEKVKENGIETENEKVKNIKLVHIDYILEKAETGIHFVGNVLHSSSQIRRAHCWFPCIDSTTQRCPFDLEFTVSTDLIAVSNGDLLYQVLSKEDPXKKTYVYKLNTPVSAQWISLVVGPLEVLPDRNDISVSHICLSPALSKLQNTIXFFHDAYSCYEDYLAASFPLGLYKQIF

SEQ ID NO: 75004 - protein, 114 aa, Setaria italica
  misc_feature (11)..(11): Xaa can be any naturally occurring amino acid
  Transcript Sequence Number=SeqID_9030
  Gene Ontology: Mol. function=protein binding; Cellular component =nucleus; Biological process=regulation of transcription, DNA -dependent
  Homolog annotation: Hit_ID=Q9SYM8; Match level="QueryCoverage=68%, HitCoverage=10%, E-value=3e-21, Identity=55%"; Hit description =T30F21.13 protein
  Pfam annotation: Domain name=SH2; Domain location=16-96; Score=-15.3; E_value=0.091; Accession=PF00017.16; Description=SH2 domain
RDKIIKRLWEXTSPRWIEGLITVQEAENALRSSRELLKEPGTFVLRFPTTRSWPHPDAGNLVVTYVGSDNSIHHRLLSLDSSVARAENLQDLLLQEPELSQLGRVDRLPTAIRR

SEQ ID NO: 75005 - protein, 55 aa, Setaria italica
  Transcript Sequence Number=SeqID_9031
EILRLYRDLTGTQILEISSSSQLFLHHRLTHSLLLHYHDRNIAVALFILPPSFNI

SEQ ID NO: 75006 - protein, 101 aa, Setaria italica
  Transcript Sequence Number=SeqID_9032
  Gene Ontology: Mol. function=hydrolase activity; Cellular component =cell wall
  Homolog annotation: Hit_ID=B6TNN9; Match level="QueryCoverage=97%, HitCoverage=36%, E-value=2e-44, Identity=86%"; Hit description =Cyclase
TVYRKLMWKKAGDLSYVGFTEDGAQWLVDNTDIKLVGVDYLSVAAFDHLISAHVVFFKNPDIIPVEGLKLDDVPAGIYNLHCLPLRLVGAEGSPVRCILIK

SEQ ID NO: 75007 - protein, 274 aa, Setaria italica
  Transcript Sequence Number=SeqID_9033
  Gene Ontology: Mol. function=hydrolase activity; Cellular component =cell wall
  Homolog annotation: Hit_ID=B6TNN9; Match level="QueryCoverage=90%, HitCoverage=91%, E-value=2e-98, Identity=74%"; Hit description =Cyclase
  Pfam annotation: Domain name=Cyclase; Domain location=60-260; Score =116.0; E_value=1.2e-31; Accession=PF04199.5; Description=Putative cyclase
MAVALLASLLLALLLLVPSPLSAGGDAHPGYPSGEGTCTVDSDAGGGGFWLRERGPAGRIIDITHAYVPDLPAFAPGAVAGPVVRLKHSMAEGSEYNLSELRMECHTGTHVDAPGHINQDNFAAGLDVDTLDLDVLNGPALLVDVPRNTNITAEAMEFLKIPKGVRRVLFRTLNTDRKLMWKKAGDLSYVGFTEDGAQWLVDNTDIKLVGVDYLSVAAFDHLISAHVVFFKNPDIIPVEGLKLDDVPAGIYNLHCLPLRLVGAEGSPVRCILIK

SEQ ID NO: 75008 - protein, 212 aa, Setaria italica
  Transcript Sequence Number=SeqID_9034
RKRIAEWWLRMPLWLAYLLADYIAIYALGNLSQNQKLCDGSRNAEMHVLVFWAPFLILHLGGQDTITAFAVEDNELWLRHLLSLVSQVVLAGYVYWKSLPGVRLMVPAIIMFMAGVTKYGERTLALRAASMGSLRSSMLTPPDPGPNYAKFVEECQSRTDAGLVAKIVIVPERPPDGDARVEVRRVAYGDLVCSAHRLFHTFRRLFVDLILS

SEQ ID NO: 75009 - protein, 258 aa, Setaria italica
  Transcript Sequence Number=SeqID_9035
  Gene Ontology: Mol. function=nucleic acid binding; Cellular component= intracellular
  Homolog annotation: Hit_ID=B9MU66; Match level="QueryCoverage=100%, HitCoverage=29%, E-value=3e-89, Identity=61%"; Hit description =Jumonji domain protein
  Pfam annotation: Domain name=JmjN; Domain location=94-127; Score =69.1; E_value=1.6e-17; Accession=PF02375.9; Description=jmjN domain
LPAEVRNGLETLKRRRLERMRLSAQNEVGDNPAVAARSGGDALRSPVNCGVRLHSNNGTGVSGNVQDKDPFAKRKVEKFDMSNLEWINKIPECPVYSPTREEFEDPIAYIQKISPEAAKYGICKIVAPVSASVPAGVVLMKEQPNFKFMTRVQPLRLAEWAEDDTVTFFMSGRKYTFRDYERMANKVFSKKYSSASCLPARYVEEEFWREIAFGKMDFVEYACDVDGSAFSSSPHDQLGKSNWNLKNFSRLPNSVLRL

SEQ ID NO: 75010 - protein, 72 aa, Setaria italica
  Transcript Sequence Number=SeqID_9036
GGGAHTAAVRRVQTRVAEMDISLDIVKEVPGWPPVRKTSVPAPPVAGQQAQERPRSSLGSLLWSHLGKLSNN

SEQ ID NO: 75011 - protein, 252 aa, Setaria italica
  Transcript Sequence Number=SeqID_9037
  Gene Ontology: Mol. function=hydrolase activity, hydrolyzing O -glycosyl compounds; Cellular component=cell wall; Biological process= carbohydrate metabolic process
  Homolog annotation: Hit_ID=C0IRH2; Match level="QueryCoverage=77%, HitCoverage=59%, E-value=3e-86, Identity=72%"; Hit description =Xyloglucan endotransglucosylase/hydrolase 13
  Pfam annotation: Domain name=Glyco_hydro_16; Domain location=44-229; Score=307.2; E_value=3.4e-89; Accession=PF00722.13; Description =Glycosyl hydrolases family 16
MAAAGSFVAFLAVFAAAAAAAACLSAAAMGDGELLRPAGTSLSFREGYTQLFGDSNLALHGDGKRVHITLDERTGAGFASQGAYLHGLFSARIKLPADHTAGVVVAFYMSNGDVYERTHDELDFEFLGNVRGREWRVQTNVYGNGSTAAGREERYGLWFDPTEDFHRYAILWSHDRIIFYVDETPIREVVRTGSMGAQFPSKPMSLYATIWDGSSWATSGGRYKVDYKYAPYVVGVSSDLRRLPFGSLFVRF

SEQ ID NO: 75012 - protein, 136 aa, Setaria italica
  Transcript Sequence Number=SeqID_9038
DFTLVVIMSKRNDKPVAQMETNFMESDILGTLSSMLSFFRWPLPQNWYIFIPFPDVVHLPELVDSVIHRPLAREGAGDDEGDVDGVAAHHHAVERVEEAHRSGGGGVRERERSLRWRWIRAREAQECCMTETRNGG

SEQ ID NO: 75013 - protein, 442 aa, Setaria italica
  Transcript Sequence Number=SeqID_9039
  Gene Ontology: Mol. function=metal ion binding; Cellular component =plasma membrane; Biological process=ubiquitin-dependent protein catabolic process
  Homolog annotation: Hit_ID=B9SAB0; Match level="QueryCoverage=97%, HitCoverage=97%, E-value=0.0, Identity=74%"; Hit description=Uvb -resistance protein uvr8, putative
  Pfam annotation: Domain name=RCC1; Domain location=136-185; Score =32.1; E_value=2.2e-06; Accession=PF00415.10; Description=Regulator of chromosome condensation (RCC1)
  Pfam annotation: Domain name=RCC1; Domain location=188-237; Score =33.2; E_value=1e-06; Accession=PF00415.10; Description=Regulator of chromosome condensation (RCC1)
  Pfam annotation: Domain name=RCC1; Domain location=240-289; Score =18.8; E_value=0.0076; Accession=PF00415.10; Description=Regulator of chromosome condensation (RCC1)
  Pfam annotation: Domain name=RCC1; Domain location=292-341; Score =35.1; E_value=2.9e-07; Accession=PF00415.10; Description=Regulator of chromosome condensation (RCC1)
  Pfam annotation: Domain name=RCC1; Domain location=30-80; Score=18.8; E_value=0.0076; Accession=PF00415.10; Description=Regulator of chromosome condensation (RCC1)
  Pfam annotation: Domain name=RCC1; Domain location=346-397; Score =1.5; E_value=0.56; Accession=PF00415.10; Description=Regulator of chromosome condensation (RCC1)
  Pfam annotation: Domain name=RCC1; Domain location=84-133; Score =25.1; E_value=0.00028; Accession=PF00415.10; Description=Regulator of chromosome condensation (RCC1)
  Pfam module annotation: Pfam domain module=RCC1::RCC1::RCC1::RCC1::RCC 1::RCC1::RCC1; Domain location=136-185::188-237::240-289::292-341::30- 80::346-397::84-133
MDSVMAAPDAPPQAVVLVSAGASHSVALLTGNALCSWGRGEDGQLGHGDAEDRLVPTVLSGFDAPGITSVICGADHTTAYSEEELQVYSWGWGDFGRLGHGNSTDVFTPQPVKALQGLKIKQIACGDSHCLAVTMAGEVQSWGRNQNGQLGLGTTEDSLLPQKIQAFEGVCVKMIAAGAEHTAAVTEDGDLYGWGWGRYGNLGLGDRNDRLLPEKVSSVEGEKMVLVACGWRHTITVSDSGTMYTYGWSKYGQLGHGDFEDHLVPHKLEALKDSTISQISGGWRHTMALTSEGKLYGWGWNKFGQVGVGNNDDHCSPVQVHFPEEQKISQVACGWRHTLALSEKKNVFSWGRGTSGQLGNGEIVDRNTPVLIDALSPDGSGCKKLESSAAAPFAAKVWVSPSERYAIVPDENVPKSGEGTARGNGADANVPENDVKRMRVQS

SEQ ID NO: 75014 - protein, 148 aa, Setaria italica
  Transcript Sequence Number=SeqID_9040
  Gene Ontology: Mol. function=small conjugating protein ligase activity; Cellular component=cytosol; Biological process=regulation of protein metabolic process
  Homolog annotation: Hit_ID=Q9SVD7; Match level="QueryCoverage=90%, HitCoverage=91%, E-value=2e-67, Identity=88%"; Hit description =Ubiquitin-conjugating enzyme E2 variant 1D
  Pfam annotation: Domain name=UQ_con; Domain location=19-140; Score= -14.8; E_value=0.00046; Accession=PF00179.18; Description=Ubiquitin -conjugating enzyme
MTLGSSGAGSSVVVPRNFRLLEELERGEKGIGDGTVSYGMDDADDIYMRSWTGTIIGPHNTVHEGRIYQLKLFCDKDYPEKPPSVRFHSRINMTCVNHETGVVDPKKFGLLANWQRDYTMENILTQLKKEMAASHNRKLVQPPEGTFF

SEQ ID NO: 75015 - protein, 136 aa, Setaria italica
  misc_feature (114)..(114): Xaa can be any naturally occurring amino acid
  Transcript Sequence Number=SeqID_9041
  Gene Ontology: Mol. function=phosphoprotein phosphatase activity; Cellular component=plasma membrane; Biological process=protein modification process
  Homolog annotation: Hit_ID=B9S9W3; Match level="QueryCoverage=94%, HitCoverage=19%, E-value=7e-31, Identity=59%"; Hit description =Paramyosin, putative
  Pfam annotation: Domain name=DUF827; Domain location=27-131; Score= -43.0; E_value=3.3e-07; Accession=PF05701.3; Description=Plant protein of unknown function (DUF827)
MKANMGTKARPPPADADKGEIGEIDTRAPFESVKAAVSLFGEVRFSSDKSAARKPKAPQAERVLAKETELHLAQKELNKYKEQLSNAETTRVQALSELEKAKITVEELTTKLDXLYNKSKELAIQATEDAKTRTSS

SEQ ID NO: 75016 - protein, 96 aa, Setaria italica
  Transcript Sequence Number=SeqID_9042
  Gene Ontology: Mol. function=microtubule motor activity; Cellular component=microtubule associated complex; Biological process =microtubule-based movement
  Homolog annotation: Hit_ID=B9REV0; Match level="QueryCoverage=93%, HitCoverage=18%, E-value=5e-28, Identity=67%"; Hit description=ATP binding protein, putative
KFGLFLLEVEGLKDVSIPDLKKANQWYCRGRRARSTSWTNVNDVSSRSHCCRLTRITIRRQGVTEEVSKLWLIDLGGSERLLKTGASGLTMDEGRP

SEQ ID NO: 75017 - protein, 345 aa, Setaria italica
  Transcript Sequence Number=SeqID_9043
  Gene Ontology: Mol. function=microtubule motor activity; Cellular component=microtubule associated complex; Biological process =microtubule-based movement
  Homolog annotation: Hit_ID=Q2R0E8; Match level="QueryCoverage=97%, HitCoverage=89%, E-value=1e-136, Identity=76%"; Hit description =Kinesin motor domain containing protein, expressed
  Pfam annotation: Domain name=Kinesin; Domain location=1-131; Score= -28.9; E_value=1.4e-13; Accession=PF00225.15; Description=Kinesin motor domain
MLIGHAFLCSTTGWLSSGPVLRQGVTEEVSKLWLIDLGGSERLLKTGASGLTMDEGKAINLSLSALGDVIAALRRKRSHVPYRNSKLTQILSDSLGDRSKVLMVVHISPSEDDVGETVCSLSFAKRARSIESNRDIPEDLKMLKQKRLAELDNEVRDAEEELKHLNEQIRIAEISLEEKKKLNSSVCQALSDEKGSPRSTLVVSHIDATESPHPTEKAKIRVSHGPVPHFMSPTVCSRQRHSAGSHSVSKPRLTKSVNRYPAELSGSQSFSYSSCKNAAKARSVAFSSSVSKMKCLPVKSDQINISSNSIDSTAASAPRRGESFGSRPVQRVPLHQHRRRMSSLI

SEQ ID NO: 75018 - protein, 153 aa, Setaria italica
  Transcript Sequence Number=SeqID_9044
  Pfam annotation: Domain name=F-box; Domain location=1-46; Score=25.2; E_value=0.00027; Accession=PF00646.25; Description=F-box domain
MDWLPGELCLKIFQLLDHQSLASAPQVCRKWRALTSDDELWRKLFSDRWGADAGAFYAPEGSKSWKDVFVVQDRCDRYGLGVRIIREGKDYYLIYQGEIQRYLGSRQDTDGDGGGKDAPRQDAEDEQRQISNRILFFLGDLEAACADAKRVKA

SEQ ID NO: 75019 - protein, 48 aa, Setaria italica
  Transcript Sequence Number=SeqID_9045
ISTAAALYIMNEMTLQCYAIYYFLATYSLLFRLSCRGLDVWHNLLISH

SEQ ID NO: 75020 - protein, 98 aa, Setaria italica
  misc_feature (91)..(91): Xaa can be any naturally occurring amino acid
  Transcript Sequence Number=SeqID_9046
  Gene Ontology: Mol. function=protein serine/threonine kinase activity; Cellular component=integral to plasma membrane; Biological process=protein amino acid phosphorylation
  Homolog annotation: Hit_ID=Q8H8M5; Match level="QueryCoverage=100%, HitCoverage=21%, E-value=7e-47, Identity=91%"; Hit description =Putative kinase
  Pfam annotation: Domain name=Pkinase_Tyr; Domain location=1-96; Score= -168.5; E_value=0.016; Accession=PF07714.9; Description=Protein tyrosine kinase
FSPANLLGQGGFGYVHKGVLPGGRAVAVKQLKSGSGQGEREFQAEVDIISRVHHRHLVSLVGYCIAGARRVLVYEFVPNKTLEFHLHGKGXPVMEWPT

SEQ ID NO: 75021 - protein, 335 aa, Setaria italica
  misc_feature (324)..(324): Xaa can be any naturally occurring amino acid
  Transcript Sequence Number=SeqID_9047
  Gene Ontology: Mol. function=protein disulfide oxidoreductase activity; Cellular component=membrane; Biological process =intracellular signaling cascade
  Homolog annotation: Hit_ID=B9RJD7; Match level="QueryCoverage=97%, HitCoverage=45%, E-value=1e-115, Identity=62%"; Hit description =Electron transporter, putative
  Pfam annotation: Domain name=DEP; Domain location=188-259; Score =62.8; E_value=1.3e-15; Accession=PF00610.13; Description=Domain found in Dishevelled, Egl-10, and Pleckstrin
  Pfam annotation: Domain name=Glutaredoxin; Domain location=74-133; Score=59.2; E_value=1.6e-14; Accession=PF00462.16; Description =Glutaredoxin
  Pfam module annotation: Pfam domain module=DEP::Glutaredoxin; Domain location=188-259::74-133
ADKSDGSECINSEKTGSDAEPKPKEVQQKTDERTAWNPLNLIKIGRDFDTLITGEAGHEDVPGLLEQPTVKGRIIIYTKLGCEDCKMVRLFLHQKRLKYVEINIDIFPSRKLELEKNTGSFTVPKVYFNDLLIGGLIELKKMEDSGILDEHIGVLFKEEPSSSAPLPGEDDESGSGKMDELATIVRKMRESVTPKDRFYKMRRFSNCFLGSEAVDFLSEDQYLERDEAVEFGRKLASKYFFRHVLDENVFEDGNQLYRFLDHDPVVMTQCYNIPRGIIDVALKPIAEIATRLRLLSYAIFEAYVSVDGRHVDYRSIQGCEEFKXYIRTIEELQRV

SEQ ID NO: 75022 - protein, 69 aa, Setaria italica
  Transcript Sequence Number=SeqID_9048
  Subcellular localization annotation: CTP_CleavageSite=55; ConfidenceScore=5.62e-01
SSSSSAEPSTAPSSPQPALSPGGARAAGPPSSRPARIPPPSDPPCLLPSPTSIPPCSAPPLLLVLTNPA

SEQ ID NO: 75023 - protein, 97 aa, Setaria italica
  misc_feature (29)..(29): Xaa can be any naturally occurring amino acid
  Transcript Sequence Number=SeqID_9049
  Subcellular localization annotation: CTP_CleavageSite=41; ConfidenceScore=5.80e-01
TQSSPPPPIRCPSSSPPSIHCPPSRSISXPSSLIRCLPYPRSSPSSSPSILCCPCKISCPPPSIASTSAPAPSPELPGPGLDLASSASRACALVRLS

SEQ ID NO: 75024 - protein, 39 aa, Setaria italica
  Transcript Sequence Number=SeqID_9050
MEIKIDRIPLFFFKSKKKSPFLYVGHRFSILKEDACPSK

SEQ ID NO: 75025 - protein, 401 aa, Setaria italica
  Transcript Sequence Number=SeqID_9051
  Subcellular localization annotation: CTP_CleavageSite=25; ConfidenceScore=5.12e-01
SKAADAAATSPSTSRRRAEPRPEVRRAMESVGERRAMENGGGTMRRLPGTGLVMCSTCSGFLLRMKRTSVPKPDEEVLEVVTEAEKMRALMKAVLLHGPLQEIEPAEATKEQWKVLQRRRRIMMETKKCPTCSGSLLQKPGPDEEDKAMVADPGSKAGSKEKMSSREEGSEFMAVLPSQGGKERMKIATEDEAMVADARSEQKLKRSREEGKRSSSGLKEKKKAKSEDKEGSGSKKKAKRSSEMEGSGSKEAKMKGSGLEEEAKIEFIVKSVGGDRKTKMEIKRMLKKAFEILNEPPVKSQSEEAKMEDSESAVGNRKTKMVTYRVDKKTIDFLKNHPPLKPPPIGACEPELRQRFIDITAPYVEVERVLLEYLQCHYSIKGYAEVQLEVTDDEGDDHKLV

SEQ ID NO: 75026 - protein, 329 aa, Setaria italica
  misc_feature (42)..(42): Xaa can be any naturally occurring amino acid
  Transcript Sequence Number=SeqID_9052
  Gene Ontology: Mol. function=phosphoinositide binding; Biological process=cell communication
  Homolog annotation: Hit_ID=A8PK75; Match level="QueryCoverage=62%, HitCoverage=45%, E-value=1e-24, Identity=33%"; Hit description=Def8 protein, putative
VVDKVHKIFGNASPDVVRERSGLIQDCLRSLLVSSYPFGIPXPLVNFLSPGRPGYEYSFLKTLIPRSLQKRSSDLNSKDSECNEGAHDDSTSMGKTISLIVEDRPRKSTRQLLELQHYNCAGCHRHLDAGRTLLQELAQTIGWNKPRFCSYTGQLFCASCHTNDTAVLPARVLHHWDFSLYPISQLAKAYLDSIYDQPMLCVSAVNPFLFSKVPALLNIMSVRKKIAAMLPCVQCPFRNSILKGLGVRRYLLDGNDFFALRDLVDLSKGAFAALPVKVQTISNRILVHITEQCLVCYDAGVPCAVHGTFAQFPIHLHHSSLLTNKQCIL

SEQ ID NO: 75027 - protein, 147 aa, Setaria italica
  Transcript Sequence Number=SeqID_9053
  Gene Ontology: Mol. function=phosphoinositide binding; Biological process=cell communication
TTYQVKVQTISNRILVHITEQCLVCYDAGVPCAARQACDDPLSLIFPFQEDEATKCGLCGSIFHKQCFRKISVCPCGKASNAGRKVVALEQAGGTGMPSTESVQPPPFSSSSGFFSDILSKARPDKLWRPKNSSPVILMGSLPDTSI

SEQ ID NO: 75028 - protein, 129 aa, Setaria italica
  Transcript Sequence Number=SeqID_9054
  Gene Ontology: Mol. function=peptidase activity; Biological process =lipid transport
  Homolog annotation: Hit_ID=B6T026; Match level="QueryCoverage=62%, HitCoverage=62%, E-value=8e-34, Identity=90%"; Hit description =Cortical cell-delineating protein
  Pfam annotation: Domain name=Tryp_alpha_amyl; Domain location=47-128; Score=81.7; E_value=2.7e-21; Accession=PF00234.14; Description =Protease inhibitorseed storageLTP f
  Subcellular localization annotation: CTP_CleavageSite=65; ConfidenceScore=5.52e-01
MASKAFLLVALVLVLFTVTNACGGGCPTPTPPTPTPPSPSPSSKGKCPKNALKLAACANVAGLVSAEVGQPPAEPCCSILGGLADLEAAACLCTAIKANVLGISLDIPVKLSLIVNYCGKNLPSGFICA

SEQ ID NO: 75029 - protein, 86 aa, Setaria italica
  Transcript Sequence Number=SeqID_9055
LFCFVVVVYCLAILAFVFAEFSFVCLLCLPGGSECRTTDGSTIMCELIVCVLPFSPFSSFLPLIVWLWRFSSPRSKLGNAYACNLF

SEQ ID NO: 75030 - protein, 223 aa, Setaria italica
  Transcript Sequence Number=SeqID_9056
  Gene Ontology: Mol. function=translation release factor activity; Cellular component=cellular_component; Biological process =translational termination
  Homolog annotation: Hit_ID=B6TMW0; Match level="QueryCoverage=96%, HitCoverage=92%, E-value=3e-89, Identity=78%"; Hit description =Immature colon carcinoma transcript 1 protein
  Pfam annotation: Domain name=RF-1; Domain location=78-184; Score=5.8; E_value=2.6e-05; Accession=PF00472.12; Description=Peptidyl-tRNA hydrolase domain
  Subcellular localization annotation: CTP_CleavageSite=44; ConfidenceScore=5.27e-01
MAAAMRSGSLLRVGFRQVSSLLFQVPPCPAPSLAVGRAGLVRIRCSAAAAGDDGGKKVSARLALTQQVLRDAEERAASAGSDPAPKITLEHVTVNFARSGGPGGQNVNKVNTKVDMRFNVKEAHWLGERIKERILQAEKNRINKDGELVISSTKTRTQKGNIEDALQKIQAIIDAASYVPPPPTEEQKKKIEKIAAVAERKRLQNKKVLSQKKEFRRNRTSWD

SEQ ID NO: 75031 - protein, 117 aa, Setaria italica
  Transcript Sequence Number=SeqID_9057
  Gene Ontology: Mol. function=diphosphomevalonate decarboxylase activity; Biological process=isoprenoid biosynthetic process
  Homolog annotation: Hit_ID=B6TCA9; Match level="QueryCoverage=98%, HitCoverage=27%, E-value=1e-50, Identity=86%"; Hit description =Diphosphomevalonate decarboxylase
QVAYTFDAGPNAVLIARNRKTAALLLQKLLYYFPPQDKDLSSYLVGDKSILSDAGLHSLEDVEALPAPPEMKIHDQKFKGDVSYFICSRLGVGINVVADESQALLDSVTGLPKVVCF

SEQ ID NO: 75032 - protein, 95 aa, Setaria italica
  Transcript Sequence Number=SeqID_9058
RSRSPCRSTVLGFAGDSPPADDAIAGDGASRSRGGGSGERLTDQPEPSNPRGPSYTAGPRGGDSGGAARKTAEFAGGGAAAATRGGGLGWISGFG

SEQ ID NO: 75033 - protein, 137 aa, Setaria italica
  Transcript Sequence Number=SeqID_9059
  Gene Ontology: Mol. function=serine-type endopeptidase activity; Biological process=negative regulation of catalytic activity
  Homolog annotation: Hit_ID=B4FKE8; Match level="QueryCoverage=100%, HitCoverage=100%, E-value=3e-46, Identity=70%"; Hit description=Pi starvation-induced protein
  Pfam annotation: Domain name=Inhibitor_I9; Domain location=43-120; Score=80.6; E_value=5.8e-21; Accession=PF05922.8; Description =Peptidase inhibitor I9
MKKTSSPLLQHRSPLLILLFLTAVTAAAMAAEPEQNAAAQEAAVHIVYVDRPEGADPEEFHLRILNPVLGSEQKAKDAVLYHYRHAASGFSAKLTPQQVEELKKQPGVLQVVPSQTYQLHGPGSGTHQGTTRTLGLM

SEQ ID NO: 75034 - protein, 221 aa, Setaria italica
  Transcript Sequence Number=SeqID_9060
  Gene Ontology: Mol. function=hydrolase activity; Cellular component =histone deacetylase complex; Biological process=regulation of transcription, DNA-dependent
  Homolog annotation: Hit_ID=B6T7F6; Match level="QueryCoverage=99%, HitCoverage=62%, E-value=1e-117, Identity=92%"; Hit description =Histone deacetylase 11
  Pfam annotation: Domain name=Hist_deacetyl; Domain location=2-210; Score=125.9; E_value=1.3e-34; Accession=PF00850.11; Description =Histone deacetylase family
YTPFRKQVGGSILSAKLALERGWAINVGGGFHHCSAEEGGGFCAYADISLCIQFAFVRLNISRLLIIDLDAHQGNGHEKDFANDGRVYILDMYNAGIYPFDFTAKQYIDQKVELASGTKTDEYLELLDKALEVCKSRFQPQLIVYNAGTDILDGDPLGRLKISPEGVITRDEKVFRFAKDQNIPLLMLTSGGYMKSSARVIADSIINLANKNLIELGSQLG

SEQ ID NO: 75035 - protein, 134 aa, Setaria italica
  misc_feature (40)..(40): Xaa can be any naturally occurring amino acid
  Transcript Sequence Number=SeqID_9061
  Gene Ontology: Mol. function=hydrolase activity; Cellular component =histone deacetylase complex; Biological process=regulation of transcription, DNA-dependent
  Homolog annotation: Hit_ID=B6T7F6; Match level="QueryCoverage=68%, HitCoverage=26%, E-value=1e-41, Identity=88%"; Hit description =Histone deacetylase 11
YWDYILLSPYFSRLFEPRIIHYCCLYMCIFNKLVIHSSSXTYCLQVCKSRFQPQLIVYNAGTDILDGDPLGRLKISPEGVITRDEKVFRFAKDQNIPLLMLTSGGYMKSSARVIADSIINLANKNLIELGSQLG

SEQ ID NO: 75036 - protein, 214 aa, Setaria italica
  Transcript Sequence Number=SeqID_9062
  Gene Ontology: Mol. function=hydrolase activity; Cellular component =histone deacetylase complex; Biological process=regulation of transcription, DNA-dependent
  Homolog annotation: Hit_ID=B6T7F6; Match level="QueryCoverage=96%, HitCoverage=58%, E-value=1e-111, Identity=91%"; Hit description =Histone deacetylase 11
  Pfam annotation: Domain name=Hist_deacetyl; Domain location=1-214; Score=37.4; E_value=2.2e-11; Accession=PF00850.11; Description =Histone deacetylase family
FDSAKWGRICRYLTREGHLEKKQVVEPLEACKEDLLVVHTEAYLNSLKCSFRVASIVEVPPVSLVPNWIVQKKLLYPFRKQVGGSILSAKLALERGWAINVGGGFHHCSAEEGGGFCAYADISLCIQFAFVRLNISRLLIIDLDAHQGNGHEKDFANDGRVYILDMYNAGIYPFDFTAKQYIDQKVELASGTKTDEYLELLDKALEVHLHTCKI

SEQ ID NO: 75037 - protein, 125 aa, Setaria italica
  Transcript Sequence Number=SeqID_9063
  Gene Ontology: Mol. function=methyltransferase activity; Cellular component=cytoplasm; Biological process=rRNA processing
  Homolog annotation: Hit_ID=C1FD75; Match level="QueryCoverage=71%, HitCoverage=17%, E-value=1e-18, Identity=51%"; Hit description=Sam -dependent methyltransferase
  Pfam annotation: Domain name=Methyltransf_10; Domain location=1-125; Score=-125.9; E_value=3.8e-06; Accession=PF05971.4; Description =Protein of unknown function (DUF890)
LCPTLPNRFNYIHWIEDLLSSNLIPPIPSSSGMVRGFDIGTGANCIYPLLGASLLGWSFVGSDVTDVGLEWAKKNVESNPHLAELIEIRNANAASFSSESEAIVKEAETENILEPVEDCLVVFVL

SEQ ID NO: 75038 - protein, 81 aa, Setaria italica
  Transcript Sequence Number=SeqID_9064
HHSMGWSHDATPNRRVPPLEAAVVAEVESPRRGELGRRGAGHEPMNPQSPCTLRRHRFAAACAEEKAASGCITHPAVPRRA

SEQ ID NO: 75039 - protein, 231 aa, Setaria italica
  Transcript Sequence Number=SeqID_9065
  Gene Ontology: Mol. function=aspartic-type endopeptidase activity; Cellular component=chromatin; Biological process=DNA integration
  Homolog annotation: Hit_ID=Q6ATL7; Match level="QueryCoverage=99%, HitCoverage=16%, E-value=1e-37, Identity=37%"; Hit description =Putative polyprotein
VAQDQQLLGYLLNSLTKDVLAQVATLTSSAEVWVVLEGMFSAQSHARATHLRMQLASLKKGGMTATVHVAKMKAIGDELATVGKAVGDDEMISFILNGLDSDYNSLVSSVIGRLDMTLSDLYAQIVAFDMHLQMLAENNNGGGFQSSANSASHGRGGFHPRDGNRGRGGSSGSGGHGFNNGFNNNAGGAPKQGGQSTKVARQICKKPNHEADECWYRFEEDYQPKVAGSAT

SEQ ID NO: 75040 - protein, 172 aa, Setaria italica
  Transcript Sequence Number=SeqID_9066
  Gene Ontology: Cellular component=nucleus
  Homolog annotation: Hit_ID=B6TUM9; Match level="QueryCoverage=100%, HitCoverage=100%, E-value=1e-76, Identity=82%"; Hit description=PRPK
  Pfam annotation: Domain name=CGI-121; Domain location=47-149; Score =152.2; E_value=1.6e-42; Accession=PF08617.2; Description=Kinase binding protein CGI-121
  Pfam annotation: Domain name=DUF509; Domain location=24-162; Score= -6.0; E_value=9.3e-05; Accession=PF04416.4; Description=Protein of unknown function (DUF509)
  Pfam module annotation: Pfam domain module=CGI-121::DUF509; Domain location=47-149::24-162
MKSFPVAGGRSVSLALYSDVSNSRELLDLMQSGKLEPEVAFLNASLVPDVFPVLAAAHKALLSKARESLTTRTLHSELVYNYSGSKHITESLKRCGISDNTMYILAARFDASDEEMKAVEKLISGAEIDLGELESRANQPQILKHYKIPAQELLISTLPDAIVCRIAARDAL

SEQ ID NO: 75041 - protein, 93 aa, Setaria italica
  misc_feature (33)..(33): Xaa can be any naturally occurring amino acid
  Transcript Sequence Number=SeqID_9067
  Gene Ontology: Mol. function=transferase activity, transferring groups other than amino-acyl groups
  Homolog annotation: Hit_ID=Q6K6S6; Match level="QueryCoverage=97%, HitCoverage=26%, E-value=1e-21, Identity=55%"; Hit description =Anthocyanin 5-aromatic acyltransferase-like protein
SMDAWLDRIKEASANGILSVAGSPRFRVYELDXGFGRPLKVDIVSVARTGAVAVAESRSCIGGMEVGVSLQPAGMDRYRKCFTDGIAWLHQRS

SEQ ID NO: 75042 - protein, 385 aa, Setaria italica
  Transcript Sequence Number=SeqID_9068
  Gene Ontology: Mol. function=transferase activity, transferring groups other than amino-acyl groups
  Homolog annotation: Hit_ID=Q6K6T2; Match level="QueryCoverage=99%, HitCoverage=83%, E-value=1e-107, Identity=55%"; Hit description =Putative quercetin 3-O-glucoside-6''-O-malonyltransferase
  Pfam annotation: Domain name=Transferase; Domain location=1-374; Score=-48.0; E_value=1.4e-08; Accession=PF02458.7; Description =Transferase family
HKAFRVFYPLAGRLRLIPGTSDRYELYYRPGDAVTFTVAECADGDADIDGLTTDDPREVAKIGTLVPPLAEGGGLFALQATLLSARRGLAIGVTVHHAACDGSNSTHFLHTWAAACSGTEAPPPPVIDRTLLADPRGLYNVFYQEAPSTDEMEFAKMSADQLFATFTLSKDDLQRIKEVVADEAARRGVAPPRCSSLVATFGFVWSCYQRAKESCGSGEGPMTCILFPVNHRSRMKPPLPERYLGNCVGPAFGMAPKSELAVAGVGGLFTACAAVASAIDEAVRDIGTSSMDAWSDRIKEASANGILSVAGSPRFRVYELDFGFGRPLKVDIVSVARTGAMAVAESRSSAGGMEIGVSLQPADMDRFRKCMADAIAWLHNHNHQS

SEQ ID NO: 75043 - protein, 120 aa, Setaria italica
  Transcript Sequence Number=SeqID_9069
  Gene Ontology: Biological process=cell volume homeostasis
  Homolog annotation: Hit_ID=B4FU22; Match level="QueryCoverage=98%, HitCoverage=52%, E-value=2e-45, Identity=79%"; Hit description =Methylosome subunit pICln
EESDESDSEINGEIEVSKVTEMRIIPSDPGQLDGLFEAFSLCAELNPDPNAESDEENGWVHGDEGDEDMTDGSDAEFSDVNPIGQTDDRDITHAVVELQINDQRFQDAEEADEESNRNWH

SEQ ID NO: 75044 - protein, 103 aa, Setaria italica
  Transcript Sequence Number=SeqID_9070
KINKFPGGPGEASPHAHVANHKSRDFHAKYAPLLSRLVLQTRIKGSEGFSFVPATRGGPFYPGWKHLLSRLVLQIGIKGSEGFSSFSAIREGPFYPGWSFQSG

SEQ ID NO: 75045 - protein, 89 aa, Setaria italica
  Transcript Sequence Number=SeqID_9071
PFSPRDVLPILPRQVAWPVMNTLHSAVDLLPSFVAAVAPGAPAPAAWSGACFAVNEAAIELTPGDRNGTDVGGAVLRLKTASAQSWTCM

SEQ ID NO: 75046 - protein, 98 aa, Setaria italica
  misc_feature (15)..(15): Xaa can be any naturally occurring amino acid
  Transcript Sequence Number=SeqID_9072
  Gene Ontology: Mol. function=[ribulose-bisphosphate carboxylase] -lysine N-methyltransferase activity; Cellular component=chloroplast
  Homolog annotation: Hit_ID=B6U6Z1; Match level="QueryCoverage=92%, HitCoverage=18%, E-value=1e-35, Identity=79%"; Hit description =Ribulose-1,5-bisphosphate carboxylase/oxygenase small subunit N -methyltransferase I
ASASAPVQQEAVAGXPWGCEIESLESAASLERWLIDSGLPEQRLAIQRVDVGERGLVALKNIRKGEKLLFVPPSLVITADSEWSRPEVGDVMKKNAVP

SEQ ID NO: 75047 - protein, 150 aa, Setaria italica
  Transcript Sequence Number=SeqID_9073
LFHAFETTLFFHDGFPSLTKLKLKEVSTLQELVIGKRAMPMLSILAMYDCDSLRTLKALNGLEHIQEVAVYNMPEIVDNIKLEDEKLFGKIKRLTTPTMVTDRGVVPGHLVRRARIPHEQCDAVASESCFSVMEGAGPGVGKAADDIQVH

SEQ ID NO: 75048 - protein, 106 aa, Setaria italica
  Transcript Sequence Number=SeqID_9074
  Subcellular localization annotation: CTP_CleavageSite=54; ConfidenceScore=5.75e-01
FRNLRQYKNTSGSTSSLRPAPPRRQCRHLISTSFVYSSNRGLHRHLLPRRSSAPATAVEAFSAGPSDNNAWLCTLPCTSSIGNTGACHRPGCVPGPGKPGNVSPDG

SEQ ID NO: 75049 - protein, 59 aa, Setaria italica
  Transcript Sequence Number=SeqID_9075
KIKYLRSGNMSYSEHHLRRQLERGTIPNLPIHHCRSRSRAPTLKSYHLLEKRAGHVNSQ

SEQ ID NO: 75050 - protein, 134 aa, Setaria italica
  Transcript Sequence Number=SeqID_9076
  Subcellular localization annotation: CTP_CleavageSite=40; ConfidenceScore=5.38e-01
PLQGCYAAGATRSSSSNPIPPSPAAAPALAHAPRLLLPPPATSARGSIRRPPCPQIPPAPPRHSPTRWTATTRTRMVPPTTAPSWRSSAPMTPTPPTASSPPSLRSSLPPPPRRPASSRSSPSVPAAPTRSPAP

SEQ ID NO: 75051 - protein, 105 aa, Setaria italica
  Transcript Sequence Number=SeqID_9077
PVDRWNMRIFSIKNNIFISDRLVQIHQQESNQVVYLFLVKKTACNFYFCGMNPRHLHGNCSKKLETLWRKEKRDSGIRPDRRIKPGLEILAQPEASRRPDFFRVN

SEQ ID NO: 75052 - protein, 59 aa, Setaria italica
  Transcript Sequence Number=SeqID_9078
FIQMASYLPSRVNFSILVFPLHANLSLLVLLNICRWVQHSHMVMEEGMMPKLLQSLVSR

SEQ ID NO: 75053 - protein, 152 aa, Setaria italica
  Transcript Sequence Number=SeqID_9079
  Gene Ontology: Mol. function=protein binding; Cellular component =histone deacetylase complex; Biological process=regulation of transcription, DNA-dependent
  Homolog annotation: Hit_ID=B6SJC7; Match level="QueryCoverage=100%, HitCoverage=100%, E-value=1e-73, Identity=90%"; Hit description =Histone deacetylase complex subunit SAP18
  Pfam annotation: Domain name=SAP18; Domain location=30-151; Score =244.7; E_value=2.3e-70; Accession=PF06487.4; Description=Sin3 associated polypeptide p18 (SAP18)
MAGMGDMPMRPARPGPPLQHRGPPPMARLRPEPIDREKTCPLLLRVFTRVAGHHQNEEFAVRGKEPKDEVQIYTWKDATLRELTDLVKEVALPARKRNARLSFAFVYPDKNGRFVVRQVGSTFAYGHGRGDDAKTLAELGFQIGDYLSVAIM

SEQ ID NO: 75054 - protein, 87 aa, Setaria italica
  Transcript Sequence Number=SeqID_9080
  Gene Ontology: Mol. function=uroporphyrinogen decarboxylase activity; Cellular component=chloroplast; Biological process=chlorophyll biosynthetic process
  Homolog annotation: Hit_ID=Q42855; Match level="QueryCoverage=74%, HitCoverage=19%, E-value=1e-28, Identity=95%"; Hit description =Uroporphyrinogen decarboxylase (Fragment)
FFYFIFFCQVILFSDILTPLPGMNIPFDIVKGKGPVIYDPLRTAAAVNAVREFVPEEWVPYVGQALNLLRQEVSICFSAPKHQIENM

SEQ ID NO: 75055 - protein, 110 aa, Setaria italica
  misc_feature (94)..(94): Xaa can be any naturally occurring amino acid
  Transcript Sequence Number=SeqID_9081
  Gene Ontology: Mol. function=uroporphyrinogen decarboxylase activity; Cellular component=chloroplast; Biological process=chlorophyll biosynthetic process
  Homolog annotation: Hit_ID=Q10LR9; Match level="QueryCoverage=100%, HitCoverage=28%, E-value=7e-57, Identity=96%"; Hit description =Uroporphyrinogen decarboxylase 2, chloroplastic
  Pfam annotation: Domain name=URO-D; Domain location=1-110; Score= -141.0; E_value=4.3e-05; Accession=PF01208.9; Description =Uroporphyrinogen decarboxylase (URO-D)
ILHNLLQKFTTSMANYIKYQADNGAQAVQIFDSWATELSPTDFEEFSLPYLKQIVDSVRETHPDLPLILYASGSGGLLERLPLTGVDVVSLDWXVDMAEGRKRLGSNIAV

SEQ ID NO: 75056 - protein, 395 aa, Setaria italica
  Transcript Sequence Number=SeqID_9082
  Gene Ontology: Mol. function=uroporphyrinogen decarboxylase activity; Cellular component=chloroplast; Biological process=chlorophyll biosynthetic process
  Homolog annotation: Hit_ID=Q10LR9; Match level="QueryCoverage=91%, HitCoverage=93%, E-value=0.0, Identity=90%"; Hit description =Uroporphyrinogen decarboxylase 2, chloroplastic
  Pfam annotation: Domain name=URO-D; Domain location=52-393; Score =636.1; E_value=3.3e-188; Accession=PF01208.9; Description =Uroporphyrinogen decarboxylase (URO-D)
  Subcellular localization annotation: CTP_CleavageSite=35; ConfidenceScore=5.56e-01
MATACPPLSLPSTSLLRGGGSARAGPRRRQLSAVRCSAVGEAVAEEASVVTAEEPLLVSAIRGKKVERPPVWLMRQAGRYMKSYQLLCERYPNFRERSENVDLVVEISLQPWKVFKPDGVILFSDILTPLPGMNIPFDIVKGKGPVIYDPLRTAAAVNAVREFVPEEWVPYVGQALNLLRQEVKNEAAVLGFVGAPFTLASYCVEGGSSKNFTMIKKLAFSEPTILHNLLQKFTTSMANYIKYQADNGAQAVQIFDSWATELSPTDFEEFSLPYLKQIVDSVRETHPDLPLILYASGSGGLLERLPLTGVDVVSLDWTVDMAEGRKRLGSNIAVQGNVDPGVLFGSKEFISKRIYDTVQKAGNVGHVLNLGHGIKVGTPEENVAHFFEVAKGIRY

SEQ ID NO: 75057 - protein, 127 aa, Setaria italica
  Transcript Sequence Number=SeqID_9083
  Gene Ontology: Mol. function=microtubule motor activity; Cellular component=microtubule associated complex; Biological process =microtubule-based process
  Homolog annotation: Hit_ID=B6TQL2; Match level="QueryCoverage=62%, HitCoverage=39%, E-value=8e-27, Identity=79%"; Hit description =Microtubule motor
RSERAEPTARGAASGGRRRRGGTGRGGASSPALAVEEEEKREVKEEGADGEGKQIKGKVEGGLKEEDGGSKKVSVRVRAADMPLPLQRRAIRLAYEAIAAMPRLDSKRLALALKKEFDTAYVVPWLC

SEQ ID NO: 75058 - protein, 88 aa, Setaria italica
  Transcript Sequence Number=SeqID_9084
SSRQWVQRVASLCLRHDWNPFGRALRGVGRRDVPRHHGAAAGCRRDLRLFLSCGHWSGFATWPCPYPPPAPRESRSDMQHRAPGPPPP

SEQ ID NO: 75059 - protein, 43 aa, Setaria italica
  Transcript Sequence Number=SeqID_9085
AVESHVQWKDGKVVQDMILKLKKVDNGLIVVQLEWVHVPGVKL

SEQ ID NO: 75060 - protein, 50 aa, Setaria italica
  Transcript Sequence Number=SeqID_9086
MQEVFDEDKFTADDSMGVAEINITDIYDAAKLNLSHATNGTRIKTIYPVG

SEQ ID NO: 75061 - protein, 172 aa, Setaria italica
  Transcript Sequence Number=SeqID_9087
  Gene Ontology: Mol. function=ARF GTPase activator activity; Cellular component=plasma membrane; Biological process=regulation of ARF GTPase activity
  Homolog annotation: Hit_ID=B6SZL6; Match level="QueryCoverage=95%, HitCoverage=99%, E-value=3e-45, Identity=54%"; Hit description =GTPase activating protein
  Pfam annotation: Domain name=C2; Domain location=14-95; Score=105.5; E_value=1.8e-28; Accession=PF00168.22; Description=C2 domain
MAASASKEEVIGKLNVRVVRGNNLAICDPLTHTSDPYVVLQYGGQKVKTSVQKKNPNPVWNEVLQLSVTHPTKPVHLEVFDEDKFTADDSMGVAEINITDIYDAAKLNLSHATNGTRIKTIYPVGVNYLGGESHVQWKDGKVVQDMILKLKKVDNGLIVVQLEWVHVPGVKL

SEQ ID NO: 75062 - protein, 71 aa, Setaria italica
  Transcript Sequence Number=SeqID_9088
TSRIVMAGLPFLLVQCMGCMLACCNHSTHRLFFLFCIFAVLFCSLTKGRICILFVCIFLTKRTETLPFECH

SEQ ID NO: 75063 - protein, 301 aa, Setaria italica
  Transcript Sequence Number=SeqID_9089
  Gene Ontology: Mol. function=carbon-nitrogen ligase activity, with glutamine as amido-N-donor
  Homolog annotation: Hit_ID=Q8H0H8; Match level="QueryCoverage=79%, HitCoverage=38%, E-value=6e-76, Identity=60%"; Hit description =Amidase-like protein
MAWPSKCTWLPLPNNARCHSYTLVSRYHKIWKDTKGVVSATEVLKKEPVSDVIALKDSMKYFDANFFSDSKLREMEDGAKEFNVPAFRENRKLVALENGGLHNPSVLLFKSSWSGDSIISETRTFNYPGAPAVHRPSNDEDIAFMSVIELGELVRTKQITSRELTNIFLRRLKRYNPVLESVVTYTEDLAYKQAKEADDLLAQGKYLGPLHGIPYGLKDIIAVPHYKTTWGSRTFKNQVLDTEAFVYKRFFRFSGYASCFKLSCEISANYLSCLPLSFRLKSAGAVLVAKLVTGSLAYDDI

SEQ ID NO: 75064 - protein, 443 aa, Setaria italica
  Transcript Sequence Number=SeqID_9090
  Gene Ontology: Mol. function=carbon-nitrogen ligase activity, with glutamine as amido-N-donor
  Homolog annotation: Hit_ID=B9RA38; Match level="QueryCoverage=97%, HitCoverage=74%, E-value=0.0, Identity=76%"; Hit description =Glutamyl-tRNA(Gln) amidotransferase subunit A, putative
  Pfam annotation: Domain name=Amidase; Domain location=18-413; Score =355.9; E_value=7.8e-104; Accession=PF01425.13; Description=Amidase
FVVFGVVFVRTKQITSRELTNIFLRRLKRYNPVLESVVTYTEDLAYKQAKEADDLLAQGKYLGPLHGIPYGLKDIIAVPHYKTTWGSRTFKNQVLDTEAFVYKRLKSAGAVLVAKLVTGSLAYDDIWFGGRTRNPWNIEEFSTGSSAGPAASTSAGMVPFAIGSETAGSITYPAARCGVTALRPTFGTVARTDVMSISESLDKLGPFCRSAVDCAIVLDAIRGKDAGDPSSREVALGDPFHVDITKLTVGYLDDAEMEVVDVLSSKGVKLVPFKLNYTVESVQSILNITMDVDMLAHFDNWQREGHDDDYEAQDQWPVELRRARLIPAVDYIQAQRARGKLIHEVRDSFTVDAFIGNVTDWERVCLGNLVGMPVVVVPTGLKTIEDPPKGGTRRRTTVTTGIYAPPDHDHIALALAMAYQSATGHNKQRPPIDDLGPNDSIHR

SEQ ID NO: 75065 - protein, 398 aa, Setaria italica
  Transcript Sequence Number=SeqID_9091
  Gene Ontology: Mol. function=catalytic activity; Cellular component =peroxisome; Biological process=metabolic process
  Homolog annotation: Hit_ID=Q10S72; Match level="QueryCoverage=99%, HitCoverage=71%, E-value=0.0, Identity=90%"; Hit description=4 -coumarate--CoA ligase-like 4
  Pfam annotation: Domain name=AMP-binding; Domain location=1-325; Score=259.6; E_value=7.6e-75; Accession=PF00501.20; Description=AMP -binding enzyme
GDGLRVVLLEPERLPSDPAAVVATIEEISATPPDPARRRDRVTQDDPATLLYSSGTTGPSKGVVATHRSLISMVQIIMTRFRLEGADRTEAFLCTVPMFHVYGLVAFATGLLGCGATIVVLSKYELPEMLRAINEYGVTYLPLVPPILVAMVAHPKPLPLGQLRKVLSGGAPLSKELIEGFREKYPQVEILQGYGLTESTAIGASTDSAEESRRYGTAGLLSPNTEAKIVDPETGEALPVNRTGELWIRGPYVMKGYFKNPEATQSTVTPDGWLKTGDLCYIDEDGYLFVVDRLKELIKYKGYQVPPAELEALLLTHPEIADVAVIPFPDREVGQFPMAYVVRKKGSNLSEREIMEFVAKQVAPYKKVRKVAFVAEIPKNASGKILRKDLIKLATSKL

SEQ ID NO: 75066 - protein, 147 aa, Setaria italica
  Transcript Sequence Number=SeqID_9092
  Gene Ontology: Mol. function=metal ion binding
  Homolog annotation: Hit_ID=Q5Z8R1; Match level="QueryCoverage=78%, HitCoverage=26%, E-value=1e-44, Identity=70%"; Hit description =Putative VIP2 protein
  Pfam annotation: Domain name=PHD; Domain location=39-88; Score=-0.2; E_value=0.028; Accession=PF00628.21; Description=PHD-finger
  Pfam annotation: Domain name=zf-C3HC4; Domain location=40-85; Score =34.6; E_value=3.9e-07; Accession=PF00097.17; Description=Zinc finger, C3HC4 type (RING finger)
  Pfam annotation: Domain name=zf-RING-like; Domain location=40-85; Score=3.6; E_value=0.06; Accession=PF08746.3; Description=RING-like domain
  Pfam module annotation: Pfam domain module=PHD::zf-C3HC4::zf-RING -like; Domain location=39-88::40-85::40-85
VVAEGGGGGGEGEQVAEEEQVREGGGGEGGDEKDAAVVSCSICLDAVVAGGEERSTARLQCGHEFHLDCIGSAFNAKGIMQCPNCRKTEMGNWLYANGPRSSQDANNDEWGYDEGPYDVAQSDMATFVPLRIQWCPIGRLPALFEEL

SEQ ID NO: 75067 - protein, 88 aa, Setaria italica
  misc_feature (70)..(70): Xaa can be any naturally occurring amino acid
  Transcript Sequence Number=SeqID_9093
  Gene Ontology: Mol. function=metal ion binding
  Homolog annotation: Hit_ID=Q5Z8R1; Match level="QueryCoverage=84%, HitCoverage=14%, E-value=3e-12, Identity=56%"; Hit description =Putative VIP2 protein
  Subcellular localization annotation: CTP_CleavageSite=76; ConfidenceScore=5.14e-01
WPDIFLVCCRSGTPRIPSVPPMAPQFVRAHGNINDQLQQSSSLFAGSQRSGGMHPLGAGGSAVAPPDNTXFCLFPPASSGPSTMETED

SEQ ID NO: 75068 - protein, 69 aa, Setaria italica
  Transcript Sequence Number=SeqID_9094
TRLGSTVEINRKVTWWSSSQQQHPHGPPEPASASRRLPGQWIGGASRLPPQENRSIDNSPFRSMHIPRM

SEQ ID NO: 75069 - protein, 64 aa, Setaria italica
  Transcript Sequence Number=SeqID_9095
FVTIAVLCILPMNGIHNHHFSRHFSKNRLTMQSYLNYSHKSAKGLHIFHNPQCTCAKHSNSQEP

SEQ ID NO: 75070 - protein, 328 aa, Setaria italica
  Transcript Sequence Number=SeqID_9096
  Gene Ontology: Mol. function=metal ion binding
  Homolog annotation: Hit_ID=Q5Z8R1; Match level="QueryCoverage=98%, HitCoverage=69%, E-value=4e-87, Identity=55%"; Hit description =Putative VIP2 protein
CRSSDMATFVPLRIQWCPIGRLPALFEELEAAAPATFNDFMGPNFNSEHVAVPVPGTAHPGPYLAYLQPVPPPAPSSSHVAERTVDGTAYHDHWNPLAGPSDGRSVQTVHPIDFHHNPWAHMPHSYPQSNNNNGVAEQPVLPVGVMRVAGVDNDSQQRGSLPSFYGSGSGTPRIPSVPPMAPQFVRAHGNINDQLQQSSSLFAGSQRSGGMHPLGAGGSAVAPPDNTSFCLFPPASSGPSTMETEDGRGNQFYAWERDRLAPYPLVSVNNEGTWWSSSQQQHPHGPPEPASASRRLPGQWIGGASRLPPQENRSIDNSPFRSMHIPRM

SEQ ID NO: 75071 - protein, 109 aa, Setaria italica
  Transcript Sequence Number=SeqID_9097
  Subcellular localization annotation: CTP_CleavageSite=29; ConfidenceScore=5.16e-01
RPPHAPRPTYNPNTLTSVPRRRRQAKRLEAERRRPCSPDSLLGTPAGASHHSSSRCSCATSPRCQCPTGAPRTHEDPSCRRASTPSTAGRNSGRCTASPLPVSILVSQP

SEQ ID NO: 75072 - protein, 84 aa, Setaria italica
  Transcript Sequence Number=SeqID_9098
YSTRPVKDATCRAAFKSIAGGHGSHHSLENNNSCRGGRAAAPGEEEIELGITIIQVASTAAAALKRRKERRSREKVDEGAAGVG

SEQ ID NO: 75073 - protein, 81 aa, Setaria italica
  Transcript Sequence Number=SeqID_9099
  Homolog annotation: Hit_ID=B9G5N1; Match level="QueryCoverage=100%, HitCoverage=9%, E-value=7e-35, Identity=87%"; Hit description=Coiled- coil protein
QQLEGVEVQMQADVDKLVNVGKSKRKRLESTFEEQQEKLRILHEKFKEEVNKQLLDCRTSLEDFESYHAELKGVADKQKSS

SEQ ID NO: 75074 - protein, 100 aa, Setaria italica
  Transcript Sequence Number=SeqID_9100
CWVILRVCIEKKPSISISLNLLKSLSRVARHGLSRVDSNMSCADNESIELFERVFDCMSLLFSSNTRVFFNAGVDLWASCVIEVINLAQVSANEENSCPV

SEQ ID NO: 75075 - protein, 115 aa, Setaria italica
  Transcript Sequence Number=SeqID_9101
  Gene Ontology: Mol. function=nucleotide binding; Biological process =defense response
  Homolog annotation: Hit_ID=Q8LJZ8; Match level="QueryCoverage=94%, HitCoverage=17%, E-value=7e-24, Identity=45%"; Hit description =Putative Mla1
  Pfam annotation: Domain name=LRR_1; Domain location=43-64; Score =10.8; E_value=2.7; Accession=PF00560.25; Description=Leucine Rich Repeat
  Pfam annotation: Domain name=LRR_1; Domain location=66-87; Score =10.7; E_value=2.7; Accession=PF00560.25; Description=Leucine Rich Repeat
  Pfam module annotation: Pfam domain module=LRR_1::LRR_1; Domain location=43-64::66-87
MENTSSNTIRRLSLQSANEDHSMTWTTKSLQQVSLKHLGNLFHLRYLGLRGTSIAQLPEKIGNLSFLQTLDVTRNQISSLPPTVVQLRNLMFLYTDWSTILPSRIGNMACLEYLL

SEQ ID NO: 75076 - protein, 42 aa, Setaria italica
  Transcript Sequence Number=SeqID_9102
FAEVYRLIYYYTLILLELPQYVLLLVIYLLFSLSNLVLDGQS

SEQ ID NO: 75077 - protein, 131 aa, Setaria italica
  misc_feature (95)..(95): Xaa can be any naturally occurring amino acid
  Transcript Sequence Number=SeqID_9103
  Gene Ontology: Mol. function=P-P-bond-hydrolysis-driven protein transmembrane transporter activity; Cellular component=membrane; Biological process=protein transport
  Homolog annotation: Hit_ID=Q94B06; Match level="QueryCoverage=100%, HitCoverage=32%, E-value=2e-59, Identity=76%"; Hit description=Sec61 alpha subunit
LIVIYSRLPCCAPVRSKNARGQQGSYPIKLFYTSNMPIILHSALITNLYFISQLLYRKYSGNFLVNLLGKWKESEYSGHSVPVGGLAYYVTAPSXACALFSKTWIEVSGSSAKDVAKQLKEQQMVMPGHRE

SEQ ID NO: 75078 - protein, 84 aa, Setaria italica
  misc_feature (73)..(73): Xaa can be any naturally occurring amino acid
  Transcript Sequence Number=SeqID_9104
  Gene Ontology: Mol. function=P-P-bond-hydrolysis-driven protein transmembrane transporter activity; Cellular component=membrane; Biological process=protein transport
  Homolog annotation: Hit_ID=Q9ZV90; Match level="QueryCoverage=100%, HitCoverage=17%, E-value=1e-37, Identity=88%"; Hit description =F9K20.24 protein
NSAWNEVSGSSAKDVAKQLKEQQMVMPGHRESNLQKELNRYIPTAAAFGGVCIGALTVLADFMGAIGSGTGIXLAVTIIYQYFE

SEQ ID NO: 75079 - protein, 134 aa, Setaria italica
  Transcript Sequence Number=SeqID_9105
  Gene Ontology: Mol. function=P-P-bond-hydrolysis-driven protein transmembrane transporter activity; Cellular component=membrane; Biological process=protein transport
  Homolog annotation: Hit_ID=Q94B06; Match level="QueryCoverage=94%, HitCoverage=26%, E-value=3e-66, Identity=94%"; Hit description=Sec61 alpha subunit
MARVLRFLPVGGLAYYVTAPSSLADVLANPFHALFYVVFMLSACALFSKTWIEVSGSSAKDVAKQLKEQQMVMPGHRESNLQKELNRYIPTAAAFGGVCIGALTVLADFMGAIGSGTGILLAVTIIYQYFETFE

SEQ ID NO: 75080 - protein, 370 aa, Setaria italica
  Transcript Sequence Number=SeqID_9106
  Gene Ontology: Mol. function=P-P-bond-hydrolysis-driven protein transmembrane transporter activity; Cellular component=membrane; Biological process=protein transport
  Homolog annotation: Hit_ID=Q94B06; Match level="QueryCoverage=96%, HitCoverage=75%, E-value=0.0, Identity=96%"; Hit description=Sec61 alpha subunit
  Pfam annotation: Domain name=SecY; Domain location=7-356; Score= -100.9; E_value=4e-08; Accession=PF00344.12; Description=eubacterial secY protein
PRAFFDLTGSTTQKLLGILIAIGEAVAYVLSGMYGSVSQLGTGNAILIILQLFFAGIISTICLDELLQKGYGLGSGISLFIATNICENIIWKAFSPTTINSGRGAEFEGAVIALFHLLITRTDKVRALREAFYRQNLPNVTNLLATVLVFLIVIYFQGFRVVLPVRSKNARGQQGSYPIKLFYTSNMPIILHSALITNLYFISQLLYRKYSGNFLVNLLGKWKESEYSGHSVPVGGLAYYVTAPSSLADVIANPFHALFYVVFMLSACALFSKTWIEVSGSSAKDVAKQLKEQQMVMPGHRESNLQKELNRYIPTAAAFGGVCIGALTVLADFMGAIGSGTGILLAVTIIYQYFETFEKERATELGFFGF

SEQ ID NO: 75081 - protein, 41 aa, Setaria italica
  Transcript Sequence Number=SeqID_9107
MERRTVVYDAESGDDHERQGTVWTATSHIVAAVVGSGVLAL

SEQ ID NO: 75082 - protein, 202 aa, Setaria italica
  misc_feature (184)..(184): Xaa can be any naturally occurring amino acid
  misc_feature (201)..(201): Xaa can be any naturally occurring amino acid
  Transcript Sequence Number=SeqID_9108
  Gene Ontology: Cellular component=plasma membrane
  Homolog annotation: Hit_ID=B6SWG6; Match level="QueryCoverage=99%, HitCoverage=38%, E-value=1e-65, Identity=66%"; Hit description=AAP6
MERRTVVYDAESGDDHERHSSIGLLIHWIVGHGHTGTVWTATSHIVAAVVGSGVLALAWTVAQLGWVVGPLVLLGFSCVTYYTSALLADCYRYPDPVDGAVNREYIDAVRCYLGRKNVVLCGCAQYVNLWGTLVGYTITASTSMIAVKRVNCFHRDGFGAGDCNPSGSTYMVVFGLFQLLLSQXLPSLHNIAWLSVVPVAXS

SEQ ID NO: 75083 - protein, 172 aa, Setaria italica
  Transcript Sequence Number=SeqID_9109
  Gene Ontology: Mol. function=binding
  Homolog annotation: Hit_ID=B9T205; Match level="QueryCoverage=55%, HitCoverage=15%, E-value=1e-33, Identity=68%"; Hit description =Pentatricopeptide repeat-containing protein, putative
SRSGKLHSAKEFIERMPIKPAAAVWRSLLSACRLFGNVEIGRYAAEMALLVDPLDSGPYVLLSNIYASKGLWADVQKLRLGMDYAGMMKEPGYSWIEVMMEVHTFIARGTEHPQAESIYAVLDNLTSLLKDFGYLPDTYELPLLGIMVNATCSVVSSYFHEMDYSNSVSTQY

SEQ ID NO: 75084 - protein, 51 aa, Setaria italica
  Transcript Sequence Number=SeqID_9110
LKIGNHVSYTRCLHFQAISYPYADPYYGGAVAAYGPHAIVSDLYASSLFFH

SEQ ID NO: 75085 - protein, 157 aa, Setaria italica
  Transcript Sequence Number=SeqID_9111
  Gene Ontology: Mol. function=transcription factor activity; Cellular component=nucleus; Biological process=regulation of transcription, DNA-dependent
  Homolog annotation: Hit_ID=B6TQI5; Match level="QueryCoverage=96%, HitCoverage=63%, E-value=1e-63, Identity=82%"; Hit description =Nuclear transcription factor Y subunit A-3
MLPPHLTENGTIMIQFGHQMPDYDSPATQSTSGSHQEVSGMSEGSLNEHNDQSGNHDGYSKSDENKMMSALSLGNPETAYAYPKPDRTQSFAISYPYADPYYGGAVAAYGPHAIMHDQHVGMVPSSRVPLPIEPAAEEPIYVNSKQYHAILRRRQLR

SEQ ID NO: 75086 - protein, 56 aa, Setaria italica
  Transcript Sequence Number=SeqID_9112
  Gene Ontology: Mol. function=transcription factor activity; Cellular component=nucleus; Biological process=regulation of transcription, DNA-dependent
  Homolog annotation: Hit_ID=B6TQI5; Match level="QueryCoverage=98%, HitCoverage=25%, E-value=3e-16, Identity=80%"; Hit description =Nuclear transcription factor Y subunit A-3
AMKRARGTGGRFLNTKQQAEGPGGGSSDAQRNGGLFTKHEHSLPPGDRHYHPRGGA

SEQ ID NO: 75087 - protein, 232 aa, Setaria italica
  Transcript Sequence Number=SeqID_9113
  Gene Ontology: Mol. function=transcription factor activity; Cellular component=nucleus; Biological process=regulation of transcription, DNA-dependent
  Homolog annotation: Hit_ID=B6TQI5; Match level="QueryCoverage=99%, HitCoverage=99%, E-value=1e-107, Identity=86%"; Hit description =Nuclear transcription factor Y subunit A-3
  Pfam annotation: Domain name=CBFB_NFYA; Domain location=132-188; Score=149.4; E_value=1.1e-41; Accession=PF02045.7; Description=CCAAT- binding transcription factor (CBF-BNF-YA) subunit B
MRQNGTIMIQFGHQMPDYDSPATQSTSESHQEVSGMSEGSLNEHNDQSGNHDGYSKSDENKMMSALSLGNPETAYAYPKPDRTQSFAISYPYADPYYGGAVAAYGPHAIMHPQLVGMVPSSRVPLPIEPAAEEPIYVNAKQYHAILRRRQLRAKLEAENKLVKSRKPYLHESRHQHAMKRARGTGGRFLNTKQQAEGPGGGSSDAQRNGGLFTKHEHSLPPGDRHYHPRGGA

SEQ ID NO: 75088 - protein, 283 aa, Setaria italica
  Transcript Sequence Number=SeqID_9114
  Gene Ontology: Cellular component=anchored to membrane
  Homolog annotation: Hit_ID=B6TZG5; Match level="QueryCoverage=88%, HitCoverage=58%, E-value=1e-113, Identity=82%"; Hit description =Fasciclin-like arabinogalactan protein 10
  Pfam annotation: Domain name=Fasciclin; Domain location=122-252; Score=81.4; E_value=3.2e-21; Accession=PF02469.14; Description =Fasciclin domain
ANLSLADIKNALRLLTLLDYFDEKKLHSLDSGSELTTSLYQKTGQAAGNMGHVNITDLRGGKVGFAPAAPGAKFQSTYTKRVDEEPSTLSVLEVSDPITFPGLFGSPSASSVNLTDLLEKAGCKQFARLIVSSGVVKMYQAAMDKALTLLAPNDDAFKAKDLPDLSKLSSADLVTLLQYHALPQYTPKSSLKVAKGDIPTLASTGAGKYDLSVVSSGDDVSLDTGKDKSRVASTVLDDTPTVILTVDKVLLPPGLFGGAPSPAPAPGPAADVPASAPAPETSA

SEQ ID NO: 75089 - protein, 72 aa, Setaria italica
  misc_feature (21)..(21): Xaa can be any naturally occurring amino acid
  Transcript Sequence Number=SeqID_9115
  Gene Ontology: Mol. function=metal ion binding
  Homolog annotation: Hit_ID=B6T4N6; Match level="QueryCoverage=100%, HitCoverage=26%, E-value=6e-32, Identity=87%"; Hit description=RING finger and CHY zinc finger domain-containing protein 1
  Pfam annotation: Domain name=zf-C3HC4; Domain location=30-72; Score =31.6; E_value=3.1e-06; Accession=PF00097.17; Description=Zinc finger, C3HC4 type (RING finger)
IGGRENFFHCSKCGCCYSSAXIEGAMHHDCPICFEYLFESTNDVSVLPCGHTIHVKCLKEMEEHCQFACPLC

SEQ ID NO: 75090 - protein, 51 aa, Setaria italica
  Transcript Sequence Number=SeqID_9116
LGLSMLSSSRLKMQVQCDHFDCFLTSESYHVANTTQTPASIMYLAGLSNLL

SEQ ID NO: 75091 - protein, 34 aa, Setaria italica
  Transcript Sequence Number=SeqID_9117
  Homolog annotation: Hit_ID=B6T4N6; Match level="QueryCoverage=100%, HitCoverage=11%, E-value=2e-10, Identity=94%"; Hit description=RING finger and CHY zinc finger domain-containing protein 1
VRILCNDCGAISEVQFHLIAHKCQNCKSYNTRQI

SEQ ID NO: 75092 - protein, 117 aa, Setaria italica
  Transcript Sequence Number=SeqID_9118
  Gene Ontology: Mol. function=metal ion binding; Cellular component =cytoplasm
  Homolog annotation: Hit_ID=B6T4N6; Match level="QueryCoverage=100%, HitCoverage=39%, E-value=7e-57, Identity=92%"; Hit description=RING finger and CHY zinc finger domain-containing protein 1
  Pfam annotation: Domain name=zf-C3HC4; Domain location=12-54; Score =19.7; E_value=0.00057; Accession=PF00097.17; Description=Zinc finger, C3HC4 type (RING finger)
HACVEGAMHHDCPICFEYLFESQMMFPVLPCGHTIHVKCLKEMEEHCQFACPLCSKSVCDMSKAWERLDMELATLSDSCDDKMVRILCNDCGAISEVQFHLIAHKCQNCKSYNTRQI

SEQ ID NO: 75093 - protein, 65 aa, Setaria italica
  misc_feature (51)..(51): Xaa can be any naturally occurring amino acid
  Transcript Sequence Number=SeqID_9119
  Homolog annotation: Hit_ID=B6T4N6; Match level="QueryCoverage=100%, HitCoverage=21%, E-value=8e-19, Identity=73%"; Hit description=RING finger and CHY zinc finger domain-containing protein 1
MVALDLHLESAAAQHGQAKLNVEECAKGSLLSGGNYKEEKIDGSDADDYEXFEKGIMHYGCPHYR

SEQ ID NO: 75094 - protein, 302 aa, Setaria italica
  misc_feature (276)..(276): Xaa can be any naturally occurring amino acid
  Transcript Sequence Number=SeqID_9120
  Gene Ontology: Mol. function=metal ion binding; Cellular component =cytoplasm
  Homolog annotation: Hit_ID=B6T4N6; Match level="QueryCoverage=100%, HitCoverage=100%, E-value=1e-151, Identity=87%"; Hit description =RING finger and CHY zinc finger domain-containing protein 1
  Pfam annotation: Domain name=zf-C3HC4; Domain location=197-239; Score= 31.6; E_value=3.1e-06; Accession=PF00097.17; Description=Zinc finger, C3HC4 type (RING finger)
  Pfam annotation: Domain name=zf-CHY; Domain location=61-144; Score =141.1; E_value=3.5e-39; Accession=PF05495.4; Description=CHY zinc finger
  Pfam module annotation: Pfam domain module=zf-C3HC4::zf-CHY; Domain location=197-239::61-144
MVALDLHLESAAAQHGQAKLNVEECAKGSLLSGGNYKEEKIDGSDADDYEKFEKGIMHYGCPHYRRRCRIRAPCCNEIFDCRHCHNEVKNSIKVDTMKRHELPRHEVQQVICSLCGTEQEVRQVCINCGVCMGKYFCGSCKLFDDDVSKQQYHCNGCGICRIGGRENFFHCSKCGCCYSIVLKNSHACVEGAMHHDCPICFEYLFESTNDVSVLPCGHTIHVKCLKEMEEHCQFACPLCSKSVCDMSKAWERLDMELATLSDSCDDKMVRILCNDXGAISEVQFHLIAHKCQNCKSYNTRQI

SEQ ID NO: 75095 - protein, 104 aa, Setaria italica
  Transcript Sequence Number=SeqID_9121
  Gene Ontology: Mol. function=beta-N-acetylhexosaminidase activity; Biological process=carbohydrate metabolic process
  Homolog annotation: Hit_ID=B4FYZ2; Match level="QueryCoverage=97%, HitCoverage=16%, E-value=2e-38, Identity=79%"; Hit description=Beta -hexosaminidase beta chain
  Pfam annotation: Domain name=Glyco_hydro_20b; Domain location=1-93; Score=-8.5; E_value=0.014; Accession=PF02838.7; Description=Glycosyl hydrolase family 20, domain 2
PIVPPANYTLARVPIRLLALSVSDPDVPLGPGVDESYTLSVPPNSGSADISSATSWGAIRGLETFSQMSWAGGGPAAGGQPIVPSDIEISDHPLFTHRGILPTN

SEQ ID NO: 75096 - protein, 440 aa, Setaria italica
  Transcript Sequence Number=SeqID_9122
  Homolog annotation: Hit_ID=B6SVM5; Match level="QueryCoverage=100%, HitCoverage=66%, E-value=0.0, Identity=87%"; Hit description=EMB2756
  Pfam annotation: Domain name=DUF616; Domain location=108-427; Score =688.2; E_value=7.2e-204; Accession=PF04765.5; Description=Protein of unknown function (DUF616)
GIDTQDDLEDSHLHSADGGRKLGDGSHESAEKDEVAVERHTETGAGVVDSHDVNTMDKKKVSGTSDKKHGSKKKSKRKKSGSTCEMKFLNSTAQLVEPVRNEKFASFNLEYVEVEEKPVGSEYWEPRFAGHQSLEEREESYKARDQQLKCAFVKSPNGTSTGFDISDDDRKYMSKCHIAVSSCIFGNSDRLRTPFGKTITSLSKKTVCFAMFLDEVTLQTLESEGQKMDNMGFIGIWKIILIKNMPYNDMRRVGKIPKFLAHRLFPSSRFSIWLDSKLRLQTDPILILEYFLWRHGYEYAISNHYDRHCVWEEVAQNKKLNKFNHTIIDQQFEFYQADGLTRFNPSDPNKLLPSYVPEGSFIVREHTPMSNLFSCLWYNEVDRFTPRDQLSFAYTYLKLRRTNPDKPFRLNMFKDCERRSIAKLFHHRSEERHSGPQLTR

SEQ ID NO: 75097 - protein, 135 aa, Setaria italica
  Transcript Sequence Number=SeqID_9123
  Gene Ontology: Mol. function=catalytic activity; Cellular component =plasma membrane; Biological process=cellular metabolic process
  Homolog annotation: Hit_ID=B9SKV5; Match level="QueryCoverage=95%, HitCoverage=39%, E-value=3e-27, Identity=43%"; Hit description =Cinnamoyl-CoA reductase, putative
DCWADVELPQETSGFWYNVSKTLAEKAAWKFTEKEGLQLVVLNPGTTLGPFFTPSVNTSLNILLQLLKGQELELDAVYTGWVDVRDVARSAIVLYENPSAQGRHLCLASMERLVDFTDKLADMYPEFPVQQEIQR

SEQ ID NO: 75098 - protein, 231 aa, Setaria italica
  Transcript Sequence Number=SeqID_9124
  Gene Ontology: Mol. function=catalytic activity; Cellular component =plasma membrane; Biological process=cellular metabolic process
  Homolog annotation: Hit_ID=C3VPA5; Match level="QueryCoverage=99%, HitCoverage=68%, E-value=8e-54, Identity=47%"; Hit description =Cinnamoyl-CoA reductase
EERKLPRKPAVKGHDYKTSSAPPKDCGVARVVLMSSKSAMVPNPSWPAGKAVAEDDCWADVELLKKRQLWYNVSKTLAEKAAWEFTEKEGLQLVVLNPGTTLGPFFTPSVNTSLNILLQLLKGQELELDAVYTGWVDVRDVARSAIVLYENPSAQGRHLCLASMERLVDFTDKLADMYPEFPVHRIKEDKQGWLMRTKDPSKKLIDLGVGFIPFDQTVRETVDCFRNKGLI

SEQ ID NO: 75099 - protein, 285 aa, Setaria italica
  Transcript Sequence Number=SeqID_9125
  Gene Ontology: Cellular component=chloroplast
  Subcellular localization annotation: CTP_CleavageSite=61; ConfidenceScore=5.22e-01
MALLTAQLAPLLSPARHRVAPPPLLAAATTPSPLISLFPHGHRHHDALCTNGRPLRLRRRSASLEREESGASETTFAPEEDPGPPVPSDDDAEDSVTASAEQAEASPEDLENIREVKRVLELLKKNRDMTFGEVKLTIMIEDPRDIERKRTLGIEDPDEITRDDLADALVEVNEGRIPENRIALQLLAKEMAEWPDLEVEAPKGKGKPGKSVYAKATDTGIDPETAAKRLNLDWDSAADIDGEEEEEDETEVPAAVGYGALYLLTAFPVIIGISVVLILFYNSLQ

SEQ ID NO: 75100 - protein, 268 aa, Setaria italica
  Transcript Sequence Number=SeqID_9126
SPIIHFIASSKFRDKIDSKPIEVMLPNGKLIPIERGCFDMASEDSGIIGIRCTNPTPGVECGFGMLEPIEICEDPVQEQQEVYTYSHHFKERLLTPGSTMLVEENSFDHGCGRFIHTHIGTAVVNTDGRFVGFNFSHKGYLTAYNMREVAARIEKNQGRHFKRISDTFQHLRQQCRVLGFRLCNLDVFVKIQLIGQPEDSASWKNLAEFQQQNSAFQFDEETKQEIEQAVADVRDARFGRFYVRNRNRKRAVVDAKFGRCYVRRRDRK

SEQ ID NO: 75101 - protein, 88 aa, Setaria italica
  Transcript Sequence Number=SeqID_9127
SLTASPLFPFLQCQFFRTRTQILKEKTSNTYHILEDNPHINKHTLRNTRPRGKLPSLDHSTNCLAKSQQLNRKRRKKMQQKKIKCPPR

SEQ ID NO: 75102 - protein, 242 aa, Setaria italica
  Transcript Sequence Number=SeqID_9128
  Gene Ontology: Mol. function=protein binding; Cellular component =endoplasmic reticulum membrane; Biological process=response to stress
  Homolog annotation: Hit_ID=Q06397; Match level="QueryCoverage=100%, HitCoverage=100%, E-value=1e-118, Identity=85%"; Hit description =Derlin-1
  Pfam annotation: Domain name=DER1; Domain location=11-202; Score =163.7; E_value=5.6e-46; Accession=PF04511.7; Description=Der1-like family
MSSPAEYYNSLPPISKAYGTLCFFTTVLVQLRILDPKFIALYYPWVFKNFEIWRLFTNFFFLGPFSINFGIRLLMIARYGVQLEKGAFEKRTADFLWMMIFGAISLLVVSAIPLFEFSFLGIPMVSMLLYVWSREYPNSQINMYGLVQLRSFYLPWAMLGLDVIFGSPLLPGLLGIMVGHLYYFLAVLHPLATGKNYLKTPKWVHSIVARFRIGVQANSPVRPPANTGGTGAFRGRSYRLNQ

SEQ ID NO: 75103 - protein, 137 aa, Setaria italica
  Transcript Sequence Number=SeqID_9129
FFGLAPPCALCSRLGVDSLFERHAHRGVGGAEPLRRVLCDAHAAELSCLGYCSAHRRLADAGDMCEDCAAAPGKALLSWMGRSELGERELACACCGVVLVSGFYSPPFLLPTPAPRGTDCGNKEEEETGSEWPPARG

SEQ ID NO: 75104 - protein, 382 aa, Setaria italica
  Transcript Sequence Number=SeqID_9130
  Gene Ontology: Mol. function=transferase activity, transferring glycosyl groups; Biological process=metabolic process
  Homolog annotation: Hit_ID=B6TZ09; Match level="QueryCoverage=100%, HitCoverage=77%, E-value=1e-130, Identity=64%"; Hit description =Limonoid UDP-glucosyltransferase
  Pfam annotation: Domain name=UDPGT; Domain location=1-382; Score= -140.9; E_value=0.00076; Accession=PF00201.10; Description=UDP -glucoronosyl and UDP-glucosyl transferase
  Subcellular localization annotation: CTP_CleavageSite=27; ConfidenceScore=5.34e-01
LRLAKRVAAKGLLVTFSSVSSVGAKLAASAGVSSGGDGVRVGRGRVRFEFLEDGDPAGPDLDDLMRHLESAGPPAFAALLRRQASEGRPVACVVANPFMPWTIGVAAGAGIPSAVLWVQSCAVFSLYYHHVHGLVEFPPEDDAEARFSLPGLPEMTVADVPSFLLPSNPYKLLAGAIVEQFRTIGQASWVLVNSFTELESGVAAALRGVTPRPPELIPVGPLVEAVGWQDGDGDGGGDEVRGDLMKAAEECVGWLDLHPPRSVVYVSVGSVVVLSPAEVAEMAHGLASTGRPFLWVVRPDTQPHLPPGFPASVAAGRGAVVAWSPQERVLAHPSTACFLTHCGWNSTLETVAAGVPVVAFPQWGDQCTDARFLVEELGMGVR

SEQ ID NO: 75105 - protein, 86 aa, Setaria italica
  Transcript Sequence Number=SeqID_9131
  Gene Ontology: Mol. function=protein binding; Cellular component =plasma membrane; Biological process=response to light stimulus
  Homolog annotation: Hit_ID=B9SH03; Match level="QueryCoverage=100%, HitCoverage=21%, E-value=1e-20, Identity=54%"; Hit description =Protein binding protein, putative
LPVEEFLVAVEAMRARFAHDHDLMYTVVDHYLENHKGKLTEEDKGRLCYNINCTKLSQHLFMHLVQNPRLPLRFVVQAMLVEQLHS

SEQ ID NO: 75106 - protein, 111 aa, Setaria italica
  Transcript Sequence Number=SeqID_9132
  Gene Ontology: Mol. function=oxidoreductase activity; Biological process=oxidation reduction
  Homolog annotation: Hit_ID=A9PHC3; Match level="QueryCoverage=81%, HitCoverage=25%, E-value=1e-15, Identity=47%"; Hit description=20G -Fe(II) oxidoreductase
IAVGPPPPSDDDPALGDLVAEYADHMARVARRLFDAIAEALCLDADRTASYINEHGGYLRVHRYPRCPEPGHHGIQAHTDSTTLSIINQDAASGGSGGLQVHHDGAWRDLA

SEQ ID NO: 75107 - protein, 76 aa, Setaria italica
  Transcript Sequence Number=SeqID_9133
RGVQGHDGRGRMLRQDRLGSCAICSIFPSSSPFFGSPLPLYSLSQRAVCGFSKVYIEATIITSARFFLLIIGNRGS

SEQ ID NO: 75108 - protein, 276 aa, Setaria italica
  misc_feature (10)..(10): Xaa can be any naturally occurring amino acid
  misc_feature (33)..(33): Xaa can be any naturally occurring amino acid
  Transcript Sequence Number=SeqID_9134
  Gene Ontology: Mol. function=molecular_function; Cellular component =mitochondrion; Biological process=culmination during sorocarp development
  Homolog annotation: Hit_ID=B6SLS9; Match level="QueryCoverage=100%, HitCoverage=55%, E-value=1e-147, Identity=90%"; Hit description =Uncharacterized ACR, COG1565 family protein
  Pfam annotation: Domain name=DUF185; Domain location=4-199; Score =26.4; E_value=5.9e-07; Accession=PF02636.9; Description =Uncharacterized ACR, COG1565
IQYDTLKCEXEPVDDGKRTVSKLCGAPVCWHAXSLEQVPSGLPTIIIAHEFYDALPIHQFQKATRGWCEKMVDLAEDSSFRFVLSPQPTASLIYLSKRCGWASSEELEKVEHIEVCPKAMELTEQIADRISSDGGGALIIDYGKNGIVSDSLQAIRKHKFVHILDDPGSADLSAYVDFASIRHSAQEASDDISVHGPITQSQFLGSLGINFRVEALLQNCTEEQAESLRTGYWRLVGDGEAPFWEGPQGQTPIGMGTRYLAMAIVNKKQGTPVPFE

SEQ ID NO: 75109 - protein, 107 aa, Setaria italica
  Transcript Sequence Number=SeqID_9135
  Gene Ontology: Mol. function=binding; Biological process=ubiquitin -dependent protein catabolic process
  Homolog annotation: Hit_ID=Q0QW06; Match level="QueryCoverage=98%, HitCoverage=49%, E-value=4e-32, Identity=48%"; Hit description =Ethylene-overproducer1-like protein
  Pfam annotation: Domain name=TPR_1; Domain location=68-101; Score =17.4; E_value=0.048; Accession=PF00515.20; Description =Tetratricopeptide repeat
DEPAGWMYQERSLYCVGKEKLADLQSATELDPTMTFPYKYRACALLEEDNAASAIAEISKVIGFKMATDCLELRAWFYLAMEEYELAVQDVRAILTLDPTYMMFHGR

SEQ ID NO: 75110 - protein, 131 aa, Setaria italica
  Transcript Sequence Number=SeqID_9136
HLKVPLRREKAKSLCQMIVSLKSIGDLFNTRGSNIVRSLPHIINIIQSDIELLLVPLKTRLQSEIAKADQVSKTGFLSLLRRGSAEMETKLLVAFSLVLISLQLLEGSGSSPRQLTLSITVDILHSLGHLD

SEQ ID NO: 75111 - protein, 68 aa, Setaria italica
  Transcript Sequence Number=SeqID_9137
  Subcellular localization annotation: CTP_CleavageSite=54; ConfidenceScore=5.03e-01
YLVLSIVSTQCNVQPNKINKYNFPFCLYQAALLIANSAAFIAATLAAFTPSSKVAAELSKASFVNEGK

SEQ ID NO: 75112 - protein, 92 aa, Setaria italica
  misc_feature (24)..(24): Xaa can be any naturally occurring amino acid
  Transcript Sequence Number=SeqID_9138
  Subcellular localization annotation: CTP_CleavageSite=31; ConfidenceScore=5.13e-01
MAVNRNIAAFGAGTGRLSTDQKKXFFWLPKRSSPSEETSNRWDLNLFSDRERQEKFNKLMSLRMPWWLWPITGCEEQCPSSGEQGREQGREL

SEQ ID NO: 75113 - protein, 242 aa, Setaria italica
  Transcript Sequence Number=SeqID_9139
SINERKQDSPHAYQRNDVGEYNKYTDARKQESRGSGDDRDHRRVVDKNKETIKEEEVLKKRNGKEIEKETLVETREKRRSLFSSTGPNSKVMNSTDVKPSSVTNEALDNSAATLDDGVNAAKVAAMKAAELVNRNIAAFGAGTGRLSTDQKKKLLWGNKKSSPSEETSNRWDLNLFSDRERQEKFNKLMGVKSSAPVQESKVENKDGSSAEAKKLEELDTNLEKHYIAGLRRRDGRTVGLGL

SEQ ID NO: 75114 - protein, 328 aa, Setaria italica
  Transcript Sequence Number=SeqID_9140
MNSKRRRSHSPVEYKEGRDKDYETSGRKDNSRDLEESNDTRLGRGHESGRHSYGTSRESKRHDDHRRYHDKYSDDYGRSHPRSSRSDRESRADTYYDRSKRDNTSGRSRGDQRDVDSRYGEKSVNRDQRSINERKQDSPHAYQRNDVGEYNKYTDARKQESRGSGDDRDHRRVVDKNKETIKEEEVLKKRNGKEIEKETLVETREKRRSLFSSTGPNVYIAGDVKPSSVTNEALDNSAATLDDGVNAAKVAAMKAAELVNRNIAAFGAGTGRLSTDQKKKLLWGNKKSSPSEETSNRWDLNLFSDRERQEKFNKLMVIPASSSILNIS

SEQ ID NO: 75115 - protein, 58 aa, Setaria italica
  Transcript Sequence Number=SeqID_9141
IDDAPCLERLLYAEYFGLNVSAVTAPKLLTGDIMLFCWSVQFLQTCVWQHRVSGIECC

SEQ ID NO: 75116 - protein, 418 aa, Setaria italica
  Transcript Sequence Number=SeqID_9142
  Homolog annotation: Hit_ID=Q25AI1; Match level="QueryCoverage=66%, HitCoverage=29%, E-value=6e-66, Identity=48%"; Hit description =H0702G05.12 protein
MPQLHSTESEPFNVAALPASDPYLESLNEVIEEHGMDKTRTEVESTLIYQRQGKAGSPKLLSPIEQEPEHSDDNIPMHQDEPDMGQLSAKLTHKSMKRNLVSSLNEGIEHRRSKRLAKQSAATTYYESPESDSEESQAASPSISNSLDIGRASDDSSSSLQPQHDTPQRSSNEADSVTMQSASSIPDMSDPESFARYYSKVYPPEVRRALERNSNVWLEPRLIHQSPSSYLHAGGKEKRRRGRGSTLCLKIWTMPEGVRIPVSLNDLGQPIGNEAATLSYFLGTIARDVTLAPLTYTDWRGFPEKNKDVMWHLVNLKFVIAPIGEIWAMKALGKKWKDWRATLKHERYDVHETDEERLADRDARVPEEQWKCLVAYWGTEKAKAASARCRALRARQPVHKHRAGSKSYARIREEERQK

SEQ ID NO: 75117 - protein, 289 aa, Setaria italica
  Transcript Sequence Number=SeqID_9143
  Gene Ontology: Mol. function=calcium ion binding; Cellular component =plasma membrane
  Homolog annotation: Hit_ID=B9RGH6; Match level="QueryCoverage=90%, HitCoverage=71%, E-value=7e-74, Identity=52%"; Hit description =Reticulocalbin-2, putative
  Pfam annotation: Domain name=efhand; Domain location=118-146; Score =12.6; E_value=0.9; Accession=PF00036.24; Description=EF hand
  Pfam annotation: Domain name=efhand; Domain location=157-185; Score =15.9; E_value=0.16; Accession=PF00036.24; Description=EF hand
  Pfam annotation: Domain name=efhand; Domain location=204-232; Score =27.8; E_value=4.5e-05; Accession=PF00036.24; Description=EF hand
  Pfam annotation: Domain name=efhand; Domain location=243-271; Score =10.2; E_value=1.6; Accession=PF00036.24; Description=EF hand
  Pfam annotation: Domain name=efhand; Domain location=78-106; Score =4.8; E_value=6.2; Accession=PF00036.24; Description=EF hand
  Pfam module annotation: Pfam domain module=efhand::efhand::efhand::efh and::efhand; Domain location=118-146::157-185::204-232::243-271::78 -106
ASSDGDEDGDGPDDHMKEWEEFLKEEEDFINDDDRFNLADRIHALFPKIDVSPTDGFVSLDELTRWNLEQARADQHHRSAREMELYDKKGNGIVSFATFNTLRQESHGDGNMLGFPWWKEEHFNASDANGDGFLDKSEFNDFLNPSDSDNPKIINLLSKQEIRQRDKDGDGKLNFDEYFNGLHDHIHGYDDENADISHIGNITVAKDRFSKLDKDNDGFISEQELEPVLDKLYLSERYYARQQAIHAISEADKDHDGRLALDEMIENPYVFYGSVYLSDDDDYFHDEFR

SEQ ID NO: 75118 - protein, 41 aa, Setaria italica
  Transcript Sequence Number=SeqID_9144
  Gene Ontology: Mol. function=calcium ion binding
MQADKDHDGRLALDEMIENPYVFYGSVYLSDDDDYFHDEFR

SEQ ID NO: 75119 - protein, 159 aa, Setaria italica
  misc_feature (52)..(52): Xaa can be any naturally occurring amino acid
  misc_feature (90)..(90): Xaa can be any naturally occurring amino acid
  Transcript Sequence Number=SeqID_9145
  Gene Ontology: Mol. function=FMN binding
  Homolog annotation: Hit_ID=B6TBI9; Match level="QueryCoverage=96%, HitCoverage=41%, E-value=5e-74, Identity=81%"; Hit description =Pyridoxamine 5-phosphate oxidase family protein
LSNTRVTIFGDVIPLPAEQQEWAHQQYVSKHQQWASQQWGNFYYYRMETISXWIDVKEYESLQPDKISMDGGEQYLKEINSMFSKPLKEXLSTEGEVDDVAVISMDSKGIDIRVRQGAQFNIQRIAFEVDRSVETLDEAKEALRRIISKSRWSSLCATE

SEQ ID NO: 75120 - protein, 396 aa, Setaria italica
  misc_feature (86)..(86): Xaa can be any naturally occurring amino acid
  Transcript Sequence Number=SeqID_9146
  Gene Ontology: Mol. function=FMN binding
  Homolog annotation: Hit_ID=B6TBI9; Match level="QueryCoverage=99%, HitCoverage=99%, E-value=1e-166, Identity=75%"; Hit description =Pyridoxamine 5-phosphate oxidase family protein
  Pfam annotation: Domain name=Pyridox_oxidase; Domain location=143 -242; Score=32.8; E_value=1.4e-06; Accession=PF01243.12; Description =Pyridoxamine 5'-phosphate oxidase
  Subcellular localization annotation: CTP_CleavageSite=52; ConfidenceScore=5.82e-01
IGKTLVARSSVLSPAAVAGDASPSPSRIRVSVALPRSLRSPSTLAISTRWPRASPRRGGARLLAGSGEGGSWTPPVDAGGHAEGIXLLENNVTLHESHHMDTTKQDEIGICGNGGSNIGGSRTGLFRTPISGGVHSATAVHDLPPPALAVRNLMEQARFAQLCTVMSRMHHRRAGYPFGSLVDFAPDPLGHPILSLSPLAIHTRNLLADPRCSLVVQITGSSGLSNTRVTIFGDVIPLPAEQQEWAHQQYVSKHQQWASQQWGNFYYYRMETISDIYFIGGFGTVAWIDVKEYESLQPDKISMDGGEQYLKEINSMFSKPLKELLSTEGEVDDVAVISMDSKGIDIRVRQGAQFNIQRIAFEVDRSVETLDEAKEALRRIISKSRWHTKSSILRRP

SEQ ID NO: 75121 - protein, 44 aa, Setaria italica
  Transcript Sequence Number=SeqID_9147
KLLTVPVTYKNSEIRSFPFGDNTFVRMAGCISVIHKISANVVIV

SEQ ID NO: 75122 - protein, 47 aa, Setaria italica
  Transcript Sequence Number=SeqID_9148
  Gene Ontology: Biological process=biosynthetic process
ASKTIRNEFYNAAIWYWRKKRAELVQPLQWLAQMFLPAPEVRSITKC

SEQ ID NO: 75123 - protein, 694 aa, Setaria italica
  Transcript Sequence Number=SeqID_9149
  Gene Ontology: Mol. function=endonuclease activity; Cellular component=cytoplasm; Biological process=cell redox homeostasis
  Homolog annotation: Hit_ID=Q5ZE24; Match level="QueryCoverage=100%, HitCoverage=79%, E-value=0.0, Identity=59%"; Hit description =Endonuclease/exonuclease/phosphatase family protein-like
  Pfam annotation: Domain name=Exo_endo_phos; Domain location=10-690; Score=73.5; E_value=7.5e-19; Accession=PF03372.15; Description =EndonucleaseExonucleasephosphatase family
QRPPRQAERFKVLSYNILADYLAQEHRFLYERIPSFILDWNWRKDKLVFEFGLWSPDILCLQEVDRFTDLEQEMASRGYNGIWKMRTGNAADGCAIFWRTTRFQLRYEEDIEFNKLGLRDNVAQLCVLESVVPQNVQTDSTNLSTSSSHPQQAKQVVVCNIHVLYNPKRGDIKLGQVRTLLDRAYTVSKMWNDAPVILCGDFNSTPKSPLYNFVSEQKLNLSGLAKNTISGQQTSGSSQGLYTGPNIYRSHPPFYPTNSREGNITLLNGREPQTETTKLVENSCPAGREPVTDTSSESLLDSKSSNSCGNNIPCSGSSNLDKHGLLNCLEGPVNDDCASDAGEESASIDKPNEGCFGGIKTESGEGPDITDVPSAPATVCAGSCEIVGSSQLLSSDNLSGNEISEEFTCTFEANGVQSDELLAASKDKSDEKENAIESMLSSQDNCATNEPESSHFNGSQNVADALYHMSNVRLGESSIGPAAPVHQPNGAVSDACGNQCSAEVINKHSVSCGDDSESNAHAFKDDITIDEVTCSDVNSDPSFFEELCGGNDHLYEEGAQLPATSDRSSPPQQVVRSSEGYYYYDPYRWTPEEIKAATGNVECTSVEHSLKLRSVYTDVEDFDGTKDANKEPLVTSYNSKFMGTVDYIWASEDLQTVQVLDTFPKQILKQTIGFPTKKWGSDHIAIACELSFTK

SEQ ID NO: 75124 - protein, 127 aa, Setaria italica
  misc_feature (95)..(95): Xaa can be any naturally occurring amino acid
  Transcript Sequence Number=SeqID_9150
  Homolog annotation: Hit_ID=B6TXT9; Match level="QueryCoverage=93%, HitCoverage=61%, E-value=7e-23, Identity=53%"; Hit description =Hydrolase
AAELADQARAFRFGSSLVDLPAVSAARSLLILCAYTACGGGAAYMWVAVACSVASLCYVLAKAVAVFGVAGAATGLGLQGKGHLVAVEAMFLMSXRERRRLLVYRIDVEAVRLKGGQTPKALKQCMV

SEQ ID NO: 75125 - protein, 320 aa, Setaria italica
  Transcript Sequence Number=SeqID_9151
  Gene Ontology: Mol. function=Rab GTPase activator activity; Cellular component=intracellular; Biological process=regulation of Rab GTPase activity
  Subcellular localization annotation: CTP_CleavageSite=42; ConfidenceScore=5.12e-01
SHSKLSAARPPSPKRLRGCSATLRRPVRAHGESLRTDRLAAAAAMGAGAFDFELKRDAYGFAVRPQHLQRFREYAKIYKEEEEERAHIWRDFLDRLAESANVPATPSVSPYAVAGDGDEGAGKAEENNGAGMHSDKEGDEEADNAEDNNKLEGLNEADASDESQEANGAPEDPKDVTDNLDKVKEEETSSRSTEGSKGSEDLKEVNVDSKELKDSNLGSEEFEDRNSGNLEKLVELFLDKGLLDELKPIKVESQRRVRAALSIIEKMMSSRVVKRDNGANNIHGKDATQLASIEEEGGTAEVSYEGDPAEPVSCIAENDE

SEQ ID NO: 75126 - protein, 76 aa, Setaria italica
  Transcript Sequence Number=SeqID_9152
  Homolog annotation: Hit_ID=B6SRM3; Match level="QueryCoverage=100%, HitCoverage=12%, E-value=7e-28, Identity=78%"; Hit description =Methyltransferase small domain
FFRDTASKGIAVDQYMAVALLTCSGRLKNAFLGRSVHGVIVRRMDPGDWGLILMNALLDMYAKCGEMDAAMRVFGE

SEQ ID NO: 75127 - protein, 467 aa, Setaria italica
  Transcript Sequence Number=SeqID_9153
  Gene Ontology: Mol. function=hydrolase activity, acting on acid anhydrides, in phosphorus-containing anhydrides; Cellular component =nucleus; Biological process=nucleobase, nucleoside, nucleotide and nucleic acid metabolic process
  Homolog annotation: Hit_ID=Q8W4M7; Match level="QueryCoverage=98%, HitCoverage=60%, E-value=0.0, Identity=81%"; Hit description=DNA repair helicase UVH6
  Pfam annotation: Domain name=DUF1227; Domain location=1-125; Score =214.6; E_value=2.5e-61; Accession=PF06777.3; Description=Protein of unknown function (DUF1227)
LDGLAQRGNLPISDAWLANPALPDDILREAVPGNIRRAEHFLAVLRRLVRFLDGRLETENVENEMPIAFVASIHSSAGIDQKMLRFCYDRLHSLMMTLEITDTDEFMHIQTICDFATLIGTYTRGFSIIIEPYDERMPDIRDPVIQLSCHDASLAIRPVFDRFETVVITSGTLSPIDLYPRLLNFNPVISRSFTMSLTRDCICPMVLTRGSDQLPVSTKFDMRSDPGVVRNYGRLLLEMASAVPDGIVCFFVSYSYMDGIVNSWHEMGILQDIMQYKLVFIETPDVVETTLALDNYRKACDCGRGAVFFSVARGKVAEGIDFDRHYGRLVIMFGVPFQYTLSRILLARLEYLRETFQIKEGDFLTFDALRQAAQCVGRVIRSKADYGMMIFADKRYSRHDKRSKLPGWILSHLHDAHLNLSTDMALHIAREFLRRMAQPYDKTGSGGKKTLLTEEDLQNMAQDEMEM

SEQ ID NO: 75128 - protein, 96 aa, Setaria italica
  Transcript Sequence Number=SeqID_9154
  Subcellular localization annotation: CTP_CleavageSite=24; ConfidenceScore=5.13e-01
DAASPASHQPNAANALRKPYRRRRCRHARPCGAQLPHCPLPRPDLASQPLLGGEEREERRSGTLSCGGMAGGGGPGPGKVKAGRRPPWVGWRRRCG

SEQ ID NO: 75129 - protein, 29 aa, Setaria italica
  Transcript Sequence Number=SeqID_9155
MEICDELRSFEATGVYRLDGTGTSTGATF

SEQ ID NO: 75130 - protein, 82 aa, Setaria italica
  Transcript Sequence Number=SeqID_9156
  Gene Ontology: Mol. function=nucleoside-triphosphatase activity; Cellular component=integral to membrane; Biological process =proteolysis
  Homolog annotation: Hit_ID=Q8GU89; Match level="QueryCoverage=97%, HitCoverage=5%, E-value=1e-37, Identity=92%"; Hit description =Pleiotropic drug resistance protein 4
RTMPILHDVSGIIKPRRMTLLLGPPGSGKTTLLLALAGRLDKDLKVTGKVTYNGHEMTEFVPERTAAYISQHDLHIGEMTVR

SEQ ID NO: 75131 - protein, 118 aa, Setaria italica
  misc_feature (3)..(3): Xaa can be any naturally occurring amino acid
  misc_feature (26)..(26): Xaa can be any naturally occurring amino acid
  Transcript Sequence Number=SeqID_9157
TKXALLLNISRCTHRQQATCRQSHFXKLQLAAHRLPKKNVSENLEIDTSTSKKDFSDRAARGALMQRPCIQRHGAPRSPPPISFRAPYPIRQIRRRLRRPLGAGPEKGSTARRPPPVS

SEQ ID NO: 75132 - protein, 211 aa, Setaria italica
  Transcript Sequence Number=SeqID_9158
  Gene Ontology: Mol. function=galactosylgalactosylxylosylprotein 3 -beta-glucuronosyltransferase activity; Cellular component=membrane
  Homolog annotation: Hit_ID=B6STW3; Match level="QueryCoverage=98%, HitCoverage=59%, E-value=1e-100, Identity=87%"; Hit description =Beta3-glucuronyltransferase
  Pfam annotation: Domain name=Glyco_transf_43; Domain location=1-204; Score=115.7; E_value=1.5e-31; Accession=PF03360.8; Description =Glycosyltransferase family 43
LLWVVVEAATDVPATARLLRTTGLMYRHLTYKDNFTAADAAAGKERHHQRNVALGHIEHHRLAGVVVFAGLGDTFDLRFFDQLRQISAFGAWPVATMARDARKVVVRGPACSSSAVTGWFSLDFSNGTAASATTARPPEVDAHGFAFNSSVLWDPERWGRYPTSEPDKSQDSMKFVQQVVLEDFSKVKGIPSDCSEVMVWHVDSTAPSSSS

SEQ ID NO: 75133 - protein, 53 aa, Setaria italica
  Transcript Sequence Number=SeqID_9159
ALIRLVSLLINYKGCSLFLLPSKGTFDQVDGVDCCVVDRFNTSIRIVYHKLPE

SEQ ID NO: 75134 - protein, 103 aa, Setaria italica
  Transcript Sequence Number=SeqID_9160
  Gene Ontology: Mol. function=metal ion binding; Cellular component =nucleus; Biological process=multicellular organismal development
  Homolog annotation: Hit_ID=B6TDT4; Match level="QueryCoverage=100%, HitCoverage=62%, E-value=2e-45, Identity=85%"; Hit description =Protein YABBY
  Pfam annotation: Domain name=YABBY; Domain location=1-102; Score =70.0; E_value=9e-18; Accession=PF04690.5; Description=YABBY protein
MSGQFASEHVCYVNCNYCNTILVVNVPNNCSYNIVTVKCGHCTMVLSMDLSPFHQARTVPESQVVPNRGFQYNNFGSYEAASRNLRTQSMYPMSNNQPQVPPV

SEQ ID NO: 75135 - protein, 149 aa, Setaria italica
  misc_feature (105)..(105): Xaa can be any naturally occurring amino acid
  Transcript Sequence Number=SeqID_9161
  Gene Ontology: Mol. function=metal ion binding; Cellular component =nucleus; Biological process=multicellular organismal development
  Homolog annotation: Hit_ID=B6TDT4; Match level="QueryCoverage=97%, HitCoverage=86%, E-value=3e-57, Identity=77%"; Hit description =Protein YABBY
  Pfam annotation: Domain name=YABBY; Domain location=1-139; Score =236.2; E_value=8.4e-68; Accession=PF04690.5; Description=YABBY protein
MYMQVNVPNNCSYNIVTVKCGHCTMVLSMDLSPFHQARTVPESQVVPNRGFQYNNFGSYEAASRNLRTQSMYPMSNNQPQVPPVRPPEKRQRVPYTYNRFIKEEXIQRIKTSNPEISHREAFSAAAKNWAHLPRLHFGLSVADGGGGSS

SEQ ID NO: 75136 - protein, 167 aa, Setaria italica
  Transcript Sequence Number=SeqID_9162
  Gene Ontology: Mol. function=metal ion binding; Cellular component =nucleus; Biological process=multicellular organismal development
  Homolog annotation: Hit_ID=B6TDT4; Match level="QueryCoverage=99%, HitCoverage=99%, E-value=2e-73, Identity=81%"; Hit description =Protein YABBY
  Pfam annotation: Domain name=YABBY; Domain location=1-157; Score =350.4; E_value=3.5e-102; Accession=PF04690.5; Description=YABBY protein
MSGQFASEHVCYVNCNYCNTILVVNVPNNCSYNIVTVKCGHCTMVLSMDLSPFHQARTVPESQVVPNRGFQYNNFGSYEAASRNLRTQSMYPMSNNQPQVPPVRPPEKRQRVPSAYNRFIKEEIQRIKTSNPEISHREAFSAAAKNWAHLPRLHFGLSVADGGGGSS

SEQ ID NO: 75137 - protein, 104 aa, Setaria italica
  Transcript Sequence Number=SeqID_9163
  Gene Ontology: Mol. function=metal ion binding; Cellular component =nucleus; Biological process=multicellular organismal development
  Homolog annotation: Hit_ID=B6TDT4; Match level="QueryCoverage=92%, HitCoverage=57%, E-value=3e-35, Identity=77%"; Hit description =Protein YABBY
  Pfam annotation: Domain name=YABBY; Domain location=1-94; Score =104.6; E_value=3.3e-28; Accession=PF04690.5; Description=YABBY protein
VEQEGISQYNNFGSYEAASRNLRTQSMYPMSNNQPQVPPVRPPEKRQRVPSAYNRFIKEEIQRIKTSNPEISHREAFSAAAKNWAHLPRLHFGLSVADGGGGSS

SEQ ID NO: 75138 - protein, 82 aa, Setaria italica
  Transcript Sequence Number=SeqID_9164
  Gene Ontology: Mol. function=methyltransferase activity; Cellular component=mitochondrion; Biological process=culmination during sorocarp development
  Homolog annotation: Hit_ID=B6SLS9; Match level="QueryCoverage=100%, HitCoverage=16%, E-value=2e-39, Identity=91%"; Hit description =Uncharacterized ACR, COG1565 family protein
MIGVWAMCLWEQMGQPEKVNLIELGPGRGTLLADLLRGSAKFVNFTKALNINLVECSPTLQKIQYDTLKCEDEPVDDGKRTV

SEQ ID NO: 75139 - protein, 173 aa, Setaria italica
  misc_feature (44)..(44): Xaa can be any naturally occurring amino acid
  misc_feature (74)..(74): Xaa can be any naturally occurring amino acid
  misc_feature (98)..(98): Xaa can be any naturally occurring amino acid
  misc_feature (135)..(135): Xaa can be any naturally occurring amino acid
  Transcript Sequence Number=SeqID_9165
  Gene Ontology: Mol. function=protein dimerization activity
  Homolog annotation: Hit_ID=Q7XD60; Match level="QueryCoverage=98%, HitCoverage=22%, E-value=7e-55, Identity=58%"; Hit description=HAT family dimerisation domain containing protein
AIENSRDSVAYWTTTPKRIEKFEEIAKYVHVKIDKKIGLDCKTXWNSTYTMLSTALPYKAVFVRATRVDRQYTXCPTEQEWEFAGYVVERNLKLSLSXNISTLFSGTDYVTANMFFYKICEIRSNIKEWSVCGNXLIEEMSINMEAKFKKYWTDIQGLMGIATLLDPRFKHIM

SEQ ID NO: 75140 - protein, 156 aa, Setaria italica
  Transcript Sequence Number=SeqID_9166
LSRDTREERKTRLRTGPLDNPHENSNLTLLCTAKLLGVTRANGLRKGIVFPLVPVRVESNKDVNRVDHSRDIAKDCEQQADAELHAAAAESKEDAERREDDGEEDLQEPAAVAVPHGGLGADRIGSGGVETGDLFPALSPWCASREWFRQRFLSRS

SEQ ID NO: 75141 - protein, 189 aa, Setaria italica
  Transcript Sequence Number=SeqID_9167
SHDHSQLVASTGLNGARKCQLIRSHLSATHAEDTNNPLESRSCSSKDVTDSCSHTERVQCSSEACSSKASLQISSLTRNRKSRRTPSYSDLTVSNRVTSANRHKNNGKDSFAVWQKVERNDKIISKAGHSSNLPIQEKSAHENSNKGVYDDRTRNRAKHNHNRKACKQVSPNGTVELESTKEEQDALDS

SEQ ID NO: 75142 - protein, 82 aa, Setaria italica
  Transcript Sequence Number=SeqID_9168
  Gene Ontology: Mol. function=transketolase activity; Cellular component=chloroplast; Biological process=metabolic process
  Homolog annotation: Hit_ID=Q7SIC9; Match level="QueryCoverage=98%, HitCoverage=11%, E-value=7e-33, Identity=87%"; Hit description =Transketolase, chloroplastic
AGVIYVMTHDSIRYYGRKNRYRTHQPIEHLVSFRAMPNILMLRPADGNETAGAYKVAVLNRKRPSILALSRQKLPNLPGTSK

SEQ ID NO: 75143 - protein, 103 aa, Setaria italica
  Transcript Sequence Number=SeqID_9169
  Gene Ontology: Mol. function=transketolase activity; Cellular component=chloroplast; Biological process=metabolic process
  Homolog annotation: Hit_ID=Q7SIC9; Match level="QueryCoverage=96%, HitCoverage=14%, E-value=2e-45, Identity=88%"; Hit description =Transketolase, chloroplastic
  Pfam annotation: Domain name=Transketolase_N; Domain location=1-103; Score=-142.8; E_value=4.1e-06; Accession=PF00456.13; Description =Transketolase, thiamine diphosphate b
LIAFYDDNHISVDGDTGIAFTEDVSARFEALGWHTIWVKNGNTGYDDIREAIKQAKAVTDRPTLIKVTTTIGFGSPNKANSYSAHGGPLGTKEVEATRHTGDR

SEQ ID NO: 75144 - protein, 111 aa, Setaria italica
  misc_feature (20)..(20): Xaa can be any naturally occurring amino acid
  misc_feature (84)..(84): Xaa can be any naturally occurring amino acid
  Transcript Sequence Number=SeqID_9170
  Gene Ontology: Mol. function=transketolase activity; Cellular component=chloroplast; Biological process=metabolic process
  Homolog annotation: Hit_ID=C3RXI5; Match level="QueryCoverage=90%, HitCoverage=13%, E-value=5e-48, Identity=82%"; Hit description =Plastid transketolase
  Pfam annotation: Domain name=Transket_pyr; Domain location=6-109; Score=28.5; E_value=7.5e-06; Accession=PF02779.16; Description =Transketolase, pyrimidine binding dom
HYLKIVLGDFQRDTPEERNXRFGVREHGMGAICNGIALHSPGLVPYCATYFAFSDYMRAAMRVSALSEAGVIHIMTHDSIGVGXNGPTHQPIEHLMSFRTMPNILGAPSCR

SEQ ID NO: 75145 - protein, 99 aa, Setaria italica
  Transcript Sequence Number=SeqID_9171
  Gene Ontology: Mol. function=transketolase activity; Cellular component=chloroplast thylakoid membrane; Biological process =metabolic process
  Homolog annotation: Hit_ID=Q9LZY8; Match level="QueryCoverage=93%, HitCoverage=12%, E-value=1e-43, Identity=84%"; Hit description =Transketolase-like protein
  Pfam annotation: Domain name=Transketolase_N; Domain location=1-98; Score=-121.9; E_value=2.2e-07; Accession=PF00456.13; Description =Transketolase, thiamine diphosphate b
MLLGLALAEKHLAARFNKTDLNIVDHYTYVILGDGCQMEGVSNEAASLAGHWGLGKLIAFYDDNHISIDGNTDIAFTENVSARYEALGWHTIWVKEWQH

SEQ ID NO: 75146 - protein, 132 aa, Setaria italica
  Transcript Sequence Number=SeqID_9172
  Gene Ontology: Mol. function=transketolase activity; Cellular component=chloroplast thylakoid membrane; Biological process =metabolic process
  Homolog annotation: Hit_ID=Q43848; Match level="QueryCoverage=85%, HitCoverage=15%, E-value=2e-56, Identity=84%"; Hit description =Transketolase, chloroplastic
  Pfam annotation: Domain name=Transketolase_N; Domain location=14-132; Score=-24.0; E_value=2.3e-13; Accession=PF00456.13; Description =Transketolase, thiamine diphosphate b
TALRARAPPAAPKLVEQSVNTIRFLAVDAVEKAQSGHPGLPMGCAPLGHVLFDEFLRFNPKNPAWFDRDRFVLSAGHGCMLQYALLHLAGYDSVTMDDLKAFRQWRSRTPGHPENFETPGVEVTTGLPAETF

SEQ ID NO: 75147 - protein, 620 aa, Setaria italica
  Transcript Sequence Number=SeqID_9173
  Gene Ontology: Mol. function=transketolase activity; Cellular component=chloroplast thylakoid membrane; Biological process =metabolic process
  Homolog annotation: Hit_ID=Q43848; Match level="QueryCoverage=99%, HitCoverage=83%, E-value=0.0, Identity=81%"; Hit description =Transketolase, chloroplastic
  Pfam annotation: Domain name=E1_dh; Domain location=12-292; Score= -148.1; E_value=0.095; Accession=PF00676.12; Description =Dehydrogenase E1 component
  Pfam annotation: Domain name=TPP_enzyme_C; Domain location=39-202; Score=-33.5; E_value=0.0033; Accession=PF02775.13; Description =Thiamine pyrophosphate enzyme, C-term
  Pfam annotation: Domain name=Transket_pyr; Domain location=309-483; Score=228.6; E_value=1.6e-65; Accession=PF02779.16; Description =Transketolase, pyrimidine binding dom
  Pfam annotation: Domain name=Transketolase_C; Domain location=496 -613; Score=38.3; E_value=3.1e-08; Accession=PF02780.12; Description =Transketolase, C-terminal domain
  Pfam annotation: Domain name=Transketolase_N; Domain location=1-294; Score=553.9; E_value=1.9e-163; Accession=PF00456.13; Description =Transketolase, thiamine diphosphate b
  Pfam module annotation: Pfam domain module=E1_dh::TPP_enzyme _C::Transket_pyr::Transketolase_C::Transketolase_N; Domain location =12-292::39-202::309-483::496-613::1-294
FLRFNPKNPAWFDRDRFVLSAGHGCMLQYALLHLAGYDSVTMDDLKAFRQWRSRTPGHPENFETPGVEVTTGPLGQGFANAVGLALAEKHLAARFNKTDLNIVDHYTYVILGDGCQMEGVSNEAASLAGHWGLGKLIAFYDDNHISIDGNTDIAFTENVSARYEALGWHTIWVKNGNTGYDDIRAAIKEAKRVKDKPTLIKVTTTIGFGSPNKANTYSVHGSALGSKEVEATRSNLQWFHEPFHVPDEVKRHWSHHIDEGASLEAEWNAKFAEYEKKYHQEAAELKSIISGELPSRWDNALPTYTPESSPDATRNLSQQCLNSLAKVIPGFLGGSADLATSNMTLLKMFGDFQRDTPEERNIRFGVREHGMGAISNGIAVHSPGLIPYCATFFVFTDYMRAAIRLSALSESGVIFVMTHDSIGLGEDGPTHQPVEQLFSLRAMPNILMLRPADGNETSGAYKVAVLNRKRPSVIALSRQKLPQLKGTSVDSVSKGGYIISDNSSDNKPDLIVIGTGSELEIAEKAADELRKEGRTVRVVSLVCWELFEEQPEKYKESVLPSEVTSRISIEAGVTFGWEKYIGQKGKAIGIDSFGISAPAGKIFKELGLTVENVIAAAKAL

SEQ ID NO: 75148 - protein, 95 aa, Setaria italica
  Transcript Sequence Number=SeqID_9174
  Gene Ontology: Mol. function=magnesium ion binding; Cellular component=integral to membrane; Biological process=photosynthesis, light harvesting
  Homolog annotation: Hit_ID=P08221; Match level="QueryCoverage=80%, HitCoverage=29%, E-value=2e-36, Identity=98%"; Hit description =Chlorophyll a-b binding protein of LHCII type I, chloroplastic (Fragment)
  Pfam annotation: Domain name=Chloroa_b-bind; Domain location=4-62; Score=-12.7; E_value=0.00021; Accession=PF00504.13; Description =Chlorophyll A-B binding protein
TIRPDGPDYGRRYVEPDSNPGGSFDPLGLADDPEAFAELKVKELKNGRLAMFSMFGLFVQAIVTGKGPLENLADHLADPVNNNAWAYATNFVPGK

SEQ ID NO: 75149 - protein, 130 aa, Setaria italica
  Transcript Sequence Number=SeqID_9175
  Gene Ontology: Mol. function=magnesium ion binding; Cellular component=integral to membrane; Biological process=photosynthesis, light harvesting
  Homolog annotation: Hit_ID=P08221; Match level="QueryCoverage=98%, HitCoverage=50%, E-value=1e-67, Identity=96%"; Hit description =Chlorophyll a-b binding protein of LHCII type I, chloroplastic (Fragment)
  Pfam annotation: Domain name=Chloroa_b-bind; Domain location=2-97; Score=52.0; E_value=2.3e-12; Accession=PF00504.13; Description =Chlorophyll A-B binding protein
YSFSEGGLDYLGNPSLIHAQSILAIWSCQVVLMGAVEGYRIAGGPLGEVVDPLYPGGSFDPLGLADDPEAFAELKVKELKNGRLAMFSMFGFFVQAIVTGKGPLENLADHLADPVNNNAWAYATNFVPGK

SEQ ID NO: 75150 - protein, 97 aa, Setaria italica
  Transcript Sequence Number=SeqID_9176
  Gene Ontology: Mol. function=magnesium ion binding; Cellular component=integral to membrane; Biological process=photosynthesis, light harvesting
  Homolog annotation: Hit_ID=P07371; Match level="QueryCoverage=100%, HitCoverage=36%, E-value=4e-49, Identity=97%"; Hit description =Chlorophyll a-b binding protein AB80, chloroplastic
  Pfam annotation: Domain name=Chloroa_b-bind; Domain location=1-64; Score=-1.1; E_value=2.9e-05; Accession=PF00504.13; Description =Chlorophyll A-B binding protein
GAVEGYRIAGGPLGEVVDPLYPGGSFDPLGLADDPEAFAELKVKELKNGRLAMFSMFGFFVQAIVTGKGPLENLADHLADPVNNNAWAYATNFVPGN

SEQ ID NO: 75151 - protein, 83 aa, Setaria italica
  Transcript Sequence Number=SeqID_9177
IIFEGLCILFYGQFGPTKVFSQEYNISSAHCGPDRYAPVREGIVTCKINSKDYRKALNLLAKISIQKHMIENIYSSRKAVGIF

SEQ ID NO: 75152 - protein, 62 aa, Setaria italica
  Transcript Sequence Number=SeqID_9178
ILGCVLKWVLASTCLCPCGFLFSGIWSSFSHVVLCEFVYLADSIQVISCLLCACLSPEEKKS

SEQ ID NO: 75153 - protein, 108 aa, Setaria italica
  misc_feature (23)..(23): Xaa can be any naturally occurring amino acid
  Transcript Sequence Number=SeqID_9179
  Gene Ontology: Mol. function=acid-amino acid ligase activity; Cellular component=intracellular; Biological process=ubiquitin -dependent protein catabolic process
  Homolog annotation: Hit_ID=B9SMZ3; Match level="QueryCoverage=48%, HitCoverage=1%, E-value=1e-21, Identity=78%"; Hit description=E3 ubiquitin protein ligase upl2, putative
MAAAAMAAHRASFPLRLQQILAXVCRAVSPAIKVESEPPAKVKEFIDRVINIPLHDIAIPLSGFRWEFNKGNFHHWKPLFMHFDTYFKTYLSSRKDLLLSDDMAEADP

SEQ ID NO: 75154 - protein, 242 aa, Setaria italica
  Transcript Sequence Number=SeqID_9180
  Gene Ontology: Mol. function=transcription regulator activity; Cellular component=nucleus; Biological process=regulation of transcription
  Homolog annotation: Hit_ID=A9JX09; Match level="QueryCoverage=99%, HitCoverage=99%, E-value=4e-80, Identity=63%"; Hit description=BHLH transcription factor
  Pfam annotation: Domain name=HLH; Domain location=69-121; Score=59.4; E_value=1.4e-14; Accession=PF00010.18; Description=Helix-loop-helix DNA-binding domain
MDHQLFDDPFASSISSLEADIFSAGGQLPSPPWPDLDLDDDDIHDLSAPAANATSSGGYGSGGGSGSHRKLSHNAYERDRRKQLNELYSSLRSLLPDADHTKKLSIPTTVSRVLKYIPELQKQVDNLERRKKELTNANCKPGVLNASEIITPIVSATCLNDTEIMVQVSLQSNMAATTLPLSKCIKVLENEGLHLISSSTYSTLDNKTFYSLHLQRSQRTMKEECPGFCDELERIVRKKAGA

SEQ ID NO: 75155 - protein, 548 aa, Setaria italica
  Transcript Sequence Number=SeqID_9181
  Gene Ontology: Mol. function=hydrolase activity; Cellular component =nucleus; Biological process=mRNA processing
  Homolog annotation: Hit_ID=B6U1S6; Match level="QueryCoverage=99%, HitCoverage=81%, E-value=0.0, Identity=87%"; Hit description =Cleavage and polyadenylation specificity factor, 100 kDa subunit
  Pfam annotation: Domain name=RMMBL; Domain location=344-386; Score =36.8; E_value=8.7e-08; Accession=PF07521.4; Description=RNA -metabolising metallo-beta-lactamase
LLLRPAVLITDAYNALNNQGYRKKQDQDFIDSLVKVLGSGGSVLLPVDTAGRVLELLLILDKYWGDRRLEYPIYFLTNVSTSTVDYVKSFLEWMGDHIAKSFESSRANAFLLKKVTLIINKEDLEKLGDTPKVVLASMASLEVGFSHDIFVEMANEARNLVLFTEKGQFGVLAHMLQVDPPPKAVKVTMSKRIPLVGDELKAYEEEQERIKKEEAIKASLVKEEELKASHGSNAKASDPMLIDSSSSRKSTKAGSHFGGSNDIFIDGFVPPSTSVAPMFPFFENTAEWDDFGEVIDPDDYTMKQEEMDSTLMLGSGDGLDGKIDDGSARLLLDSTPSKVISNEMTVQVKCSLVYMDFEGRSDGRSVKSVIAHVAPLKLVLVHGSAEATEHLKMHCAKNLDLHVYAPQIEETIDVTSDLCAYKVQLSEKLMSNIICKKLGEHEIAWVDAEVGKEDEKLILLPTSSKPPPHKPVLVGDLKLSDFKQFLENKGWQVEFSGGALRCGEHITVRKIGDSQKGSTGSQQIVIEGPLCEDYYKIREHLYSQFYLL

SEQ ID NO: 75156 - protein, 66 aa, Setaria italica
  misc_feature (59)..(59): Xaa can be any naturally occurring amino acid
  Transcript Sequence Number=SeqID_9182
  Gene Ontology: Mol. function=calcium ion binding; Cellular component =nucleus; Biological process=regulation of transcription, DNA -dependent
  Homolog annotation: Hit_ID=Q6NPP4; Match level="QueryCoverage=81%, HitCoverage=5%, E-value=3e-20, Identity=79%"; Hit description =Calmodulin-binding transcription activator 2
  Pfam annotation: Domain name=CG-1; Domain location=20-66; Score= -19.7; E_value=0.0084; Accession=PF03859.8; Description=CG-1 domain
MASVEARRLAVVPQLDIEQILKEAQHRWLRPAEICEILKNYRNFRIAPEPPNRPPSGSXFLFDRKV

SEQ ID NO: 75157 - protein, 153 aa, Setaria italica
  Transcript Sequence Number=SeqID_9183
  Gene Ontology: Mol. function=protein binding; Biological process =protein metabolic process
TATMQRAPSLCNACVDGYERERSEMASADRAPCHAEQPMSQWLQIGTPSSARPVDRAQEKAREADELRRRWLDRCAQLHSHGRPPPLVTCSEWNGASILGNMQAPPPPPPVRLPVQPKATVDTDLALGLAAAGPACETDDKLLARRLTEAVRW

SEQ ID NO: 75158 - protein, 187 aa, Setaria italica
  Transcript Sequence Number=SeqID_9184
  Gene Ontology: Cellular component=integral to membrane
  Homolog annotation: Hit_ID=B6UGE4; Match level="QueryCoverage=100%, HitCoverage=78%, E-value=1e-53, Identity=59%"; Hit description =Peroxisomal membrane protein 2
  Subcellular localization annotation: CTP_CleavageSite=65; ConfidenceScore=5.16e-01
MKAIGSGGEWWWNLPSLRRKSDSRRRGRRNTDPRGRRRGPPREPLSSSSESIGQSSGWPIKFPFRQAVTAACLTFTGDTIAQVRGRIVDRRRRGTEPDSKELIPDILLNHDWLRALRMTSYGFLLYGPGSYAWYQFLDRCMPKQTFVNLSAKVILNQIVLVPSVIVMVFAWNYLWSGKLSELSSKYQ

SEQ ID NO: 75159 - protein, 442 aa, Setaria italica
  Transcript Sequence Number=SeqID_9185
  Gene Ontology: Mol. function=carbon-nitrogen ligase activity, with glutamine as amido-N-donor; Cellular component=chloroplast
  Homolog annotation: Hit_ID=Q01ML1; Match level="QueryCoverage=97%, HitCoverage=99%, E-value=1e-167, Identity=69%"; Hit description =H0613H07.2 protein
  Pfam annotation: Domain name=Amidase; Domain location=12-417; Score =128.4; E_value=2.3e-35; Accession=PF01425.13; Description=Amidase
MAMGIEGGDYGAFMEKFELLPPQSQQQEELPLHGLTFAIKDIFDISGRVTGFGNPDWARTHAPAAATSPVVLATLAAGATSVGKTVMDEMAYSINGENAHYGTPTNPCAPDRVPGGSSSGSAVAVAAKLVDFALGTDTGGSVRVPAAYCDIFGLRPSHGVVSTENVTPMSQMFDTVGWFARDLSTLSRVSDVLLPLPADNNIKQPTQFTIPKDCFEILGSLKDQTYQILNASVAKRFGSDAVDNRNLGEFVSNNVPTIGKFISDFSKNEAPSVPALSVISYVMRCLQRSEFKANHAEWINTVKPNLGPGIRERVHEAITSEDGPMEDFHALRTEFKSALAALVKDDGILAIPTVPGSPPKLRMEAAALENFRARAFSLLSIAGLSGFCQLSIPLGVRDGVPVSVSLVACHGADRFLLSVAQELYETLKEETKKAWSSMGSSL

SEQ ID NO: 75160 - protein, 327 aa, Setaria italica
  Transcript Sequence Number=SeqID_9186
  Gene Ontology: Mol. function=protein serine/threonine kinase activity; Cellular component=plasma membrane; Biological process =protein amino acid phosphorylation
  Homolog annotation: Hit_ID=Q8H846; Match level="QueryCoverage=88%, HitCoverage=62%, E-value=1e-138, Identity=82%"; Hit description =Protein kinase domain containing protein, expressed
  Pfam annotation: Domain name=Pkinase; Domain location=11-282; Score =132.9; E_value=1e-36; Accession=PF00069.17; Description=Protein kinase domain
  Pfam annotation: Domain name=Pkinase_Tyr; Domain location=11-282; Score=106.0; E_value=1.2e-28; Accession=PF07714.9; Description =Protein tyrosine kinase
  Pfam module annotation: Pfam domain module=Pkinase::Pkinase_Tyr; Domain location=11-282::11-282
LRSWRSATGGFCAENVVGEGGYGTVYRGVLAGGEVVAVKDLFDHKGQAEKEFKVEVEAIGKVRHKHLVGLIGYCAEGPKRMLLYEFVENGNLEQWLHGDVGPVSPLTWDIRMKIAIGTAKGIAYLHEGLEPKVVHRDIKSSNILLDKKWNPKVSDFGMAKVLGSGSSYVTTRVMGTFGYVAPEYASTGMLNESSDVYSFGVLLMELVSGRSPVDYNRPAGEVNLVEWFRGMVGGRRVEDLVDPRVAAPPPPRVLNRVLLVCLRCIDADAHKRPRMGQIVHMLEGDEFPFRTEHRSPRASHRTSTGTRPSLLSENVAAADDSDKSMWR

SEQ ID NO: 75161 - protein, 87 aa, Setaria italica
  misc_feature (21)..(21): Xaa can be any naturally occurring amino acid
  Transcript Sequence Number=SeqID_9187
  Gene Ontology: Cellular component=nucleus
  Homolog annotation: Hit_ID=B9S3I9; Match level="QueryCoverage=96%, HitCoverage=19%, E-value=1e-10, Identity=49%"; Hit description=Brg-1 associated factor, putative
MNKLLSKHIRPLETTNDSKRXSKKLKSEGGEPISPVSPVETDVKQLPFVISDALATFLGTGEREMPHSEAVKRVWDHIKSNNLEVSG

SEQ ID NO: 75162 - protein, 49 aa, Setaria italica
  Transcript Sequence Number=SeqID_9188
QTRKSDTLLRLTFCEHQTFRLDYVTTPIPCYCEEISHHFSQVNQPNNKK

SEQ ID NO: 75163 - protein, 239 aa, Setaria italica
  Transcript Sequence Number=SeqID_9189
  Gene Ontology: Cellular component=nucleus
  Homolog annotation: Hit_ID=B9S3I9; Match level="QueryCoverage=79%, HitCoverage=46%, E-value=4e-63, Identity=64%"; Hit description=Brg-1 associated factor, putative
  Pfam annotation: Domain name=SWIB; Domain location=156-233; Score =102.3; E_value=1.7e-27; Accession=PF02201.10; Description=SWIBMDM2 domain
  Pfam annotation: Domain name=SWIB; Domain location=47-122; Score =134.0; E_value=4.8e-37; Accession=PF02201.10; Description=SWIBMDM2 domain
  Pfam module annotation: Pfam domain module=SWIB::SWIB; Domain location=156-233::47-122
  Subcellular localization annotation: CTP_CleavageSite=33; ConfidenceScore=5.41e-01
AAAAAAAASAAAATPGESPRAAAAPAGSKKDSSASAGAKRRGGPGGLNKVCGVSPELQAIVGEPAMARTEIVKQLWAYIRKNNLQDPNNKRKIICNDELRLVFETDSTDMFKMNKLLSKHIRPLETTNDSKRESKKLKSEGGEPISPVSPVETDVKQLPFVISDALATFLGTGEREMPHSEAVKRVWDHIKSNNLEDPENSTVILCDSKLKQLFGCESLTAQGVSELVSDHLFKQPTKI

SEQ ID NO: 75164 - protein, 71 aa, Setaria italica
  Transcript Sequence Number=SeqID_9190
ICFIFLPLLVCSFFFEGLAGLFYIPVLRAPQSRLTVILEKRIKCGHKWAIMCSGVSLKSLNDKTSICSKFS

SEQ ID NO: 75165 - protein, 66 aa, Setaria italica
  Transcript Sequence Number=SeqID_9191
LGPNSQSTMLKTQRNYIAKIRVADEHNLSGIDPQYPQGRKKMTPTRIPPVILLGLIPCNHTRTHTM

SEQ ID NO: 75166 - protein, 52 aa, Setaria italica
  Transcript Sequence Number=SeqID_9192
CGQAFDRLDFLIFIFADMEGSESRTPYGVAPELYVESKNQSEGHKILNLLLS

SEQ ID NO: 75167 - protein, 260 aa, Setaria italica
  misc_feature (245)..(245): Xaa can be any naturally occurring amino acid
  Transcript Sequence Number=SeqID_9193
  Homolog annotation: Hit_ID=O80479; Match level="QueryCoverage=90%, HitCoverage=41%, E-value=1e-76, Identity=57%"; Hit description =T12M4.1 protein
  Pfam annotation: Domain name=Rhodanese; Domain location=157-258; Score=5.1; E_value=0.094; Accession=PF00581.12; Description =Rhodanese-like domain
MDATRQQEQHTGDGGGDRYGLLLYYKYAEVPDAAALAAFYETHCRSLSLVGRVRVGPDGVNATLGGRMTALEKHIAEMSSKALFDGTDFKLASCEDPVDERVARECGFTSLSVRVVKELVTLCSNPTSAPPEILGAGKHLSAAEFHSVLQNVAGTSSDAVASAEKNEVVVVDARNVYETRIGKFNVPNVETLDPEIRQYSDLPSWIDEHTEKLRGKSILMYCTGGIRCEMASAYIRSKGEGFENXFQLYGGIQRYLEQFP

SEQ ID NO: 75168 - protein, 100 aa, Setaria italica
  Transcript Sequence Number=SeqID_9194
  Gene Ontology: Mol. function=transferase activity, transferring nitrogenous groups; Biological process=biosynthetic process
  Homolog annotation: Hit_ID=B6TFA9; Match level="QueryCoverage=96%, HitCoverage=21%, E-value=3e-46, Identity=90%"; Hit description=8 -amino-7-oxononanoate synthase
YYTTYHKLVEESLAELKRKEDCLLCPTGFSANMAVMTALGSISSLLAAGRKPAEDERIAIFSDALNHASIIDGIRLLERQQEAVVFVYKHCDMFHLDSAV

SEQ ID NO: 75169 - protein, 272 aa, Setaria italica
  Transcript Sequence Number=SeqID_9195
  Gene Ontology: Mol. function=tryptophan synthase activity; Cellular component=chloroplast; Biological process=tryptophan metabolic process
  Homolog annotation: Hit_ID=B6TS31; Match level="QueryCoverage=98%, HitCoverage=98%, E-value=1e-127, Identity=83%"; Hit description =Indole-3-glycerol phosphate lyase
  Pfam annotation: Domain name=Trp_syntA; Domain location=13-270; Score= 463.2; E_value=3.8e-136; Accession=PF00290.12; Description=Tryptophan synthase alpha chain
MADHGKRSVAETFSRLRVQGKTAFIPFITAGDPDLATTSKALKILDSCGSDVIEVGVPYSDPLADGPVIQASATRALKNGTTLDSVLGMLKEVIPELSCPIVLFTYYNPILKRGVRNFMATIRQVGVNGLVVPDLPLEEALLLRSEAIMHNIELVLLTTPTTPTERMIEIAKASEGFLYLVSAVGVTGARSNVNLRVEHLLREIKKVTDKPVAVGFGVSTPEHVKQIAGWGADGVIIGSAIVRQLCEAATPEEGLKRLEEYTRNIKSAMPLR

SEQ ID NO: 75170 - protein, 77 aa, Setaria italica
  Transcript Sequence Number=SeqID_9196
  Gene Ontology: Mol. function=oxidoreductase activity; Biological process=regulation of transcription
  Homolog annotation: Hit_ID=B6SH27; Match level="QueryCoverage=100%, HitCoverage=22%, E-value=2e-39, Identity=94%"; Hit description=Short- chain dehydrogenase/reductase SDR
KQHVWGTACDVRDGKDVKALVEFARDKLKHIDIWINNAGSNAYTYKPLVETSDEALMEIITTNTLGLMICCREAINI

SEQ ID NO: 75171 - protein, 73 aa, Setaria italica
  Transcript Sequence Number=SeqID_9197
RQPFMRIKTSNAWFQFEIPSEVCDCDEPFALLPHLIVNCLDEDYTLHCKCVTTISPCSEPFEYFFLLNMQESF

SEQ ID NO: 75172 - protein, 413 aa, Setaria italica
  Transcript Sequence Number=SeqID_9198
  Homolog annotation: Hit_ID=Q10H82; Match level="QueryCoverage=96%, HitCoverage=42%, E-value=4e-84, Identity=47%"; Hit description=Nop14- like family protein, expressed
GERDDTLPEFDKAVLRQQRERLAKLKRESKYNLPDDDDDEINVHSMLSEKDDFDEEVPFDDESDEEGKMVLSKKRLSLQGGDRPSETDLPQETHGHKSKKEVMMEIISKSKFYKAQKAKEREEDEHLVDKLDSNFASLAQTQALLSLTESAKVKVNKSDSSAGLTGKEIFTKAKSDTYEKLVKEMVMDQRARPSDRTKTPEEIAKEEKERLEKLEEERQKRMLGTADSSDEDDDNEDDDHMKLDNSKPISGDDLGDSFTDDSIRKKKGWVDEIYEKEGRKLGDDAAASDDEENDDEHADDDESDDEEDDDDGEQDSSDNDFGNMSARDWEQSDNDEVDVGDNEMEDFHEKEQEISGKVVKKDAQNLKKESNVKTQVKDSGVPFVIDAPNNLKDLSSLLDGRSETEIIEIRIRR

SEQ ID NO: 75173 - protein, 246 aa, Setaria italica
  Transcript Sequence Number=SeqID_9199
  Homolog annotation: Hit_ID=Q10H82; Match level="QueryCoverage=92%, HitCoverage=24%, E-value=3e-93, Identity=73%"; Hit description=Nop14- like family protein, expressed
ITIERNWKVGTHLHNQINDQFMELKTLKPWLSIREQVHEVNPVNILEIMGMDPDAPYFSSDDFKAGVLLSVAECLRGFVIIHEELSSFPEIFLPISSLLQEILDKSEVSGLLRDIFHEVIDLIKKRSDEHHASREPLQMRKKLPEPIKQLNPKFEENYIKGLDYDPDRDRAQRKKMNKRLKSEKKGAARELRKDNHFLYAVKEKERIKQEQEKAEQLGKNLAFLQEQESAFKSGQLGKGKGRKRRR

SEQ ID NO: 75174 - protein, 102 aa, Setaria italica
  Transcript Sequence Number=SeqID_9200
  Gene Ontology: Mol. function=protein serine/threonine kinase activity
  Homolog annotation: Hit_ID=UPI0001A7B020; Match level="QueryCoverage =97%, HitCoverage=18%, E-value=3e-31, Identity=60%"; Hit description =ATP binding / protein kinase/ protein serine/threonine kinase
YKSNKVYYGKVALTSSLNILRNKVIELGGRKYQIKGSPGTGAFAKVYKATVDGNAEEMVALKIQNPPFPWEFYMYRQLDMRISEVERPSFGYAHEIHIFSDV

SEQ ID NO: 75175 - protein, 132 aa, Setaria italica
  Transcript Sequence Number=SeqID_9201
  Subcellular localization annotation: CTP_CleavageSite=51; ConfidenceScore=5.67e-01
AAPPAPQLAPRQARGSRYMVRSRLVSRHRPSSVSAVHLRPSPCGAGWGRTRASEGAPGVRGSVAAFLGSSSRPFSVRPGRRRVVGVGACFVCLCFGHCCWCAVRSPTVFPRGIFLVGLLLVAFTSPPVPYYR

SEQ ID NO: 75176 - protein, 61 aa, Setaria italica
  Transcript Sequence Number=SeqID_9202
  Subcellular localization annotation: CTP_CleavageSite=52; ConfidenceScore=5.39e-01
MPGPNHRHRFLPVCCPSFPAAGDPSPAAAASTGRLRATSSRKKRKRLKPRPSCERRGAAVL

SEQ ID NO: 75177 - protein, 59 aa, Setaria italica
  Transcript Sequence Number=SeqID_9203
AEGGRNRMLQRAASNAYSWWWASHVRTKQSKWLDNNLKGLAFLNTPSNPFTYKLNTLSH

SEQ ID NO: 75178 - protein, 217 aa, Setaria italica
  Transcript Sequence Number=SeqID_9204
  Gene Ontology: Cellular component=integral to membrane; Biological process=transport
  Homolog annotation: Hit_ID=B4FCM4; Match level="QueryCoverage=91%, HitCoverage=91%, E-value=4e-61, Identity=66%"; Hit description =Prenylated Rab receptor 2
  Pfam annotation: Domain name=PRA1; Domain location=47-200; Score =235.4; E_value=1.4e-67; Accession=PF03208.11; Description=PRA1 family protein
  Subcellular localization annotation: CTP_CleavageSite=45; ConfidenceScore=5.70e-01
MASAPTPPPLLPVTNPAPGSSPATAGGSDAPIAQPAFRLFLSRLSDSARRSLSDRRPWGELLDRSAFSKPDSVSDATSRLRRNLAYFRVNYAAVVAFALGASLLAHPFSLLILLGLLAAWCFLYLFRASDQPVVLFGRTFSDRETLLGLVGASFVLLFFTSVASLIISGLLVGGALVAAHGAFRVPEDLFLDEPNAAAGNSAAQGLLSFLGAPGSGV

SEQ ID NO: 75179 - protein, 104 aa, Setaria italica
  Transcript Sequence Number=SeqID_9205
  Gene Ontology: Mol. function=acyltransferase activity; Cellular component=integral to membrane; Biological process=metabolic process
  Homolog annotation: Hit_ID=B6SZJ6; Match level="QueryCoverage=97%, HitCoverage=19%, E-value=3e-45, Identity=85%"; Hit description =Glycerol-3-phosphate acyltransferase 1
TPVALHSAVGMFHGTTAGGWKALDPLFLLMNPVPAYIVQFLDTVDCGGGGPEAARAVANEVQRRIAEALGYTCTGLTRRDKYLMLAGNEGIVDVDHGARKKTAY

SEQ ID NO: 75180 - protein, 88 aa, Setaria italica
  misc_feature (69)..(69): Xaa can be any naturally occurring amino acid
  Transcript Sequence Number=SeqID_9206
MLHLLPFAEAYANFGAKGRPAQSKFPRHSSYLDVSPRTHGENNQFAASNMANNWGIERHEADVRSSLKXDVPSHQQTLEELEWSLRGS

SEQ ID NO: 75181 - protein, 65 aa, Setaria italica
  Transcript Sequence Number=SeqID_9207
TSYSQIGYPGFEQRTTHISAALQPMDSKSTYPYASDNYSAPKAHAAYGKFQHERHGDLGRTYGRY

SEQ ID NO: 75182 - protein, 214 aa, Setaria italica
  Transcript Sequence Number=SeqID_9208
  Gene Ontology: Mol. function=nucleic acid binding
  Homolog annotation: Hit_ID=B9RNB0; Match level="QueryCoverage=100%, HitCoverage=41%, E-value=2e-46, Identity=51%"; Hit description =Nucleic acid binding protein, putative
  Pfam annotation: Domain name=zf-CCHC; Domain location=9-26; Score =12.0; E_value=0.0067; Accession=PF00098.15; Description=Zinc knuckle
WKKRKEEEMICKICGDSGHFTQGCPSTLGANRRNADFFERVPARDKQVRNLFTESMISQIEKDVGCKIRMDEKFLFVSGKDRLILAKGVDAVHKIIQESKGKYSQSSPKRDRSRSPVRNTTEFRPRHSDSHQSHSPRISDSRRSCSPRISDSRRSRSPRNASRSQSKGYYNERHLDGRLHDSMPKFSKGSPQAYANFGAKGRPAQSKFPRHSSY

SEQ ID NO: 75183 - protein, 245 aa, Setaria italica
  misc_feature (46)..(46): Xaa can be any naturally occurring amino acid
  Transcript Sequence Number=SeqID_9209
  Gene Ontology: Mol. function=nucleic acid binding
  Homolog annotation: Hit_ID=B9RNB0; Match level="QueryCoverage=97%, HitCoverage=54%, E-value=2e-35, Identity=39%"; Hit description =Nucleic acid binding protein, putative
MVVVINLSGLPRSQSKGYYNERHLDGRLHDSMPKFSKGSPQAYANXGAKGRPAQSKFPRHSSYLDVSPRTHGENNQFAASNMANNWGIERHEADVRSSLKFDVPSHQQTLEELEMEFKREATELARARNQEEDEENYKHRESLRVMRENYMDRVTTMRNMHARTWEEFFEQTFKRQQQAQTSYSQIGYPGFEQRTTHISAALQPMDSKSTYPYASDNYSAPKAHAAYGKFQHERHGDLGRTYGRY

SEQ ID NO: 75184 - protein, 119 aa, Setaria italica
  misc_feature (5)..(5): Xaa can be any naturally occurring amino acid
  misc_feature (11)..(11): Xaa can be any naturally occurring amino acid
  Transcript Sequence Number=SeqID_9210
  Gene Ontology: Mol. function=DNA-directed DNA polymerase activity; Cellular component=nucleus; Biological process=DNA replication
  Homolog annotation: Hit_ID=B6SKK3; Match level="QueryCoverage=100%, HitCoverage=22%, E-value=3e-65, Identity=97%"; Hit description=DNA polymerase epsilon subunit 2
TQEIXFFRQDXLYRMRRSCLIPPTTEETSDPFEHLVATITHQSHLCPLPLTVQPIIWNYDHCLRLYPTPHAIVLGDKSEQKAFKYTGITCFNPGSFANDSTFAAYRPCTKEVELSALEG

SEQ ID NO: 75185 - protein, 79 aa, Setaria italica
  misc_feature (33)..(33): Xaa can be any naturally occurring amino acid
  Transcript Sequence Number=SeqID_9211
  Gene Ontology: Mol. function=oxidoreductase activity, acting on the CH-OH group of donors, NAD or NADP as acceptor; Cellular component =chloroplast envelope; Biological process=cellular carbohydrate metabolic process
  Homolog annotation: Hit_ID=P37229; Match level="QueryCoverage=100%, HitCoverage=23%, E-value=6e-29, Identity=66%"; Hit description =Malate dehydrogenase [NADP] 2, chloroplastic
VDWALLIGAKPRDPGMERAALLDINGQIFADQXLICLKNAPNIPAKNFHALTRLDENRAKCQLATKSRRCFMNKVSNVT

SEQ ID NO: 75186 - protein, 78 aa, Setaria italica
  Transcript Sequence Number=SeqID_9212
  Gene Ontology: Mol. function=malate dehydrogenase (NADP+) activity; Cellular component=chloroplast; Biological process=carbohydrate metabolic process
  Homolog annotation: Hit_ID=Q8H0P4; Match level="QueryCoverage=79%, HitCoverage=14%, E-value=7e-26, Identity=93%"; Hit description=NADP -dependant malate dehydrogenase (Fragment)
MGNTFLLSKQFSFTLFNPFPVKEAIKDTKWLEEEFTMTVQKRGGVLIQKWGRSSAASTAVSIVDAIRSLVTPTPEGDS

SEQ ID NO: 75187 - protein, 75 aa, Setaria italica
  Transcript Sequence Number=SeqID_9213
  Gene Ontology: Mol. function=malate dehydrogenase (NADP+) activity; Cellular component=chloroplast envelope; Biological process =carbohydrate metabolic process
  Homolog annotation: Hit_ID=Q8H0P4; Match level="QueryCoverage=81%, HitCoverage=14%, E-value=2e-27, Identity=95%"; Hit description=NADP -dependant malate dehydrogenase (Fragment)
RHAECFGVFCTTYDLKADDKTKSWKKLVNIAVSGAAGMISNHLLFKLASGEVFGQDQPIALKCFPLISKDLAVDV

SEQ ID NO: 75188 - protein, 81 aa, Setaria italica
  Transcript Sequence Number=SeqID_9214
TTSLLVAWYLPLYVNYISPGSMVSSGRYHATRRDVVYVQRQYRWNAPMYVTSTVSGGNTDDNLRTAAACMMQQLHICIFKK

SEQ ID NO: 75189 - protein, 245 aa, Setaria italica
  misc_feature (186)..(186): Xaa can be any naturally occurring amino acid
  misc_feature (202)..(202): Xaa can be any naturally occurring amino acid
  Transcript Sequence Number=SeqID_9215
  Gene Ontology: Mol. function=oxidoreductase activity, acting on the CH-OH group of donors, NAD or NADP as acceptor; Cellular component =chloroplast; Biological process=cellular carbohydrate metabolic process
  Homolog annotation: Hit_ID=P37229; Match level="QueryCoverage=96%, HitCoverage=54%, E-value=1e-120, Identity=88%"; Hit description =Malate dehydrogenase [NADP] 2, chloroplastic
  Pfam annotation: Domain name=Ldh_1_C; Domain location=53-226; Score =244.4; E_value=2.8e-70; Accession=PF02866.10; Description =lactatemalate dehydrogenase, alphabeta C-t
MLLNFELCQGKALNAVASRNVKVIVVGNPCNTNALICLKNAPNIPAKNFHALTRLDENRAKCQLALKAGVFYDKVSNVTIWGNHSTTQVPDFLNAKIDGRPVKEAIKDTKWLEEEFTMTVQKRGGVLIQKWGRSSAASTAVSIVDAIRSLVTPTPEGDSFSSGVYTTGNPYGIAEDIVFSMPCRSXKGDGDYELVSDVLMDXFLWERIKKSEAELLAEKKCVAHLTGEGNAFCDLPEDTMLPGEM

SEQ ID NO: 75190 - protein, 411 aa, Setaria italica
  Transcript Sequence Number=SeqID_9216
  Gene Ontology: Mol. function=malate dehydrogenase (NADP+) activity; Cellular component=chloroplast; Biological process=carbohydrate metabolic process
  Homolog annotation: Hit_ID=Q8H0P4; Match level="QueryCoverage=93%, HitCoverage=91%, E-value=0.0, Identity=92%"; Hit description=NADP -dependant malate dehydrogenase (Fragment)
  Pfam annotation: Domain name=Ldh_1_C; Domain location=232-404; Score =258.6; E_value=1.5e-74; Accession=PF02866.10; Description =lactatemalate dehydrogenase, alphabeta C-t
  Pfam annotation: Domain name=Ldh_1_N; Domain location=81-230; Score =199.7; E_value=7.9e-57; Accession=PF00056.15; Description =lactatemalate dehydrogenase, NAD bin
  Pfam module annotation: Pfam domain module=Ldh_1_C::Ldh_1_N; Domain location=232-404::81-230
MPLLGAAATARRRSVQPLRPRRHHLLATVRCSVDAAKQVQDGAATVAAEAPASRHAECFGVFCTTYDLKADDKTKSWKKLVNIAVSGAAGMISNHLLFKLASGEVFGQDQPIALKLLGSERSIQALEGVAMELEDSLYPLLREVSIGIDPYEVFEDVDWALLIGAKPRGPGMERAALLDINGQIFADQGKALNAVASRNVKVIVVGNPCNTNALICLKNAPNIPAKNFHALTRLDENRAKCQLALKAGVFYDKVSNVTIWGNHSTTQVPDFLNAKIDGRPVKEAIKDTKWLEEEFTMTVQKRGGVLIQKWGRSSAASTAVSIVDAIRSLVTPTPEGDSFSSGVYTTGNPYGIAEDIVFSMPCRSKGDGDYELVSDVLMDDFLWERIKKSEAELLAEKKCVAHLTGEGNAFC

SEQ ID NO: 75191 - protein, 237 aa, Setaria italica
  Transcript Sequence Number=SeqID_9217
  Gene Ontology: Mol. function=2-alkenal reductase activity; Biological process=oxidation reduction
  Homolog annotation: Hit_ID=B6U8S0; Match level="QueryCoverage=99%, HitCoverage=68%, E-value=1e-99, Identity=74%"; Hit description=NADP -dependent oxidoreductase P2
  Pfam annotation: Domain name=ADH_zinc_N; Domain location=47-194; Score=108.3; E_value=2.5e-29; Accession=PF00107.18; Description=Zinc- binding dehydrogenase
TTTTIPNPGSLSKINHPEMPLSYYTGALGMPGLSAYAGFYDVAKPKKGDYVFVSAAAGAVGQIVGQLAKFTGCYVVGSAGSDEKVNLLKTKFGFDEAFNYKKEQDLNAALQRYFPEGIDIYFENVGGTMLEAVLLNMRVHGRITVCGMISQYNLEQPEGVRNLLSLITKRVRMEGFLVSDYLGEYHRFEEEMVSYLKDAKIAYVEDVAEGLENAPAALIGLFAGRNVGKQLVAVTRE

SEQ ID NO: 75192 - protein, 82 aa, Setaria italica
  Transcript Sequence Number=SeqID_9218
RRSRPPRVPRRCGTCRGSRAPPQGPEDHEDVDGEHQGDARDEQRHGEDLGWAGHPMLLVYSDVVDRLWRSCPGTWQARLASL

SEQ ID NO: 75193 - protein, 64 aa, Setaria italica
  Transcript Sequence Number=SeqID_9219
  Gene Ontology: Mol. function=hydrolase activity; Cellular component =spliceosome; Biological process=mRNA processing
  Homolog annotation: Hit_ID=B7PB44; Match level="QueryCoverage=60%, HitCoverage=2%, E-value=1e-11, Identity=79%"; Hit description =DNA2/nam7 helicase, putative
LHEYKSWRQSSPVSSLDNLLSPPLTCTHAALKRRDFLQLGFKFDNLLMEESAQILEIETFSPYA

SEQ ID NO: 75194 - protein, 290 aa, Setaria italica
  misc_feature (187)..(187): Xaa can be any naturally occurring amino acid
  misc_feature (264)..(264): Xaa can be any naturally occurring amino acid
  misc_feature (282)..(282): Xaa can be any naturally occurring amino acid
  Transcript Sequence Number=SeqID_9220
  Gene Ontology: Mol. function=RNA binding; Cellular component =spliceosome; Biological process=mRNA processing
  Homolog annotation: Hit_ID=Q019V7; Match level="QueryCoverage=99%, HitCoverage=19%, E-value=7e-63, Identity=45%"; Hit description =Putative aquarius (ISS)
FEPLSPEEAAKSTVPERLGLQYVRGCEVIEIRDEEGTLMNDFTGKIKREEWKPPKGEMRTVRIALDTAQYHIDVTETAEKGAENVYGTFNILMRRKPKENNFKAILESIRDLMNETCVVPEWLHNIFLGYGNPSAAQWINMPDLLEVIDFKDTFLDANHVQQSFPDYQVTFINSDGTENLHPSPPFXKIRLSKKLRESSHALPGNVNSSLSVKNNDNMADGESQKEKLIVETYIPADPGPYPQDKPKQNSVRFTPQQIGAIISXGVQPGLTMVVGPPGTGKXDTAVQILN

SEQ ID NO: 75195 - protein, 699 aa, Setaria italica
  Transcript Sequence Number=SeqID_9221
  Gene Ontology: Mol. function=hydrolase activity; Cellular component =spliceosome; Biological process=mRNA processing
  Homolog annotation: Hit_ID=B7PB44; Match level="QueryCoverage=80%, HitCoverage=38%, E-value=0.0, Identity=62%"; Hit description =DNA2/nam7 helicase, putative
  Pfam annotation: Domain name=ResIII; Domain location=3-98; Score= -38.6; E_value=0.092; Accession=PF04851.7; Description=Type III restriction enzyme, res subunit
QNSVRFTPTQIGAIISGVQPGLTMVVGPPGTGKTDTAVQILNVLYHNCPSQRTLIITHSNQALNDLFEKIMQRDVPARYLLRLGQGEQELATDLDFSRQGRVNAMLVRRLELLGEVSKLARSLRLPEDVGYTCETAAYFWLLHVYARWEQFLAACAQNQDNPTFVKDRFPFSEFFSDTPQPIFTGESFEKDMHAAKGCFKHLSTIFQELEECRAFELLKSTVERANYLMTKQAKIVAMTCTHAALKRRDFLQLGFKFDNLLMEESAQILEIETFIPMLLQRQEDGHARLKRCILIGDHHQLPPVVKNMAFQKYSHMDQSLFTRFVRLGIPYIELNAQGRARPSIAKLYNWRYRELGDLPYVREQAIFHKANAGFSFEYQLVDVPDYKGKGESAPSPWFYQNEGEAEYIVNIYIYMRLIGYPANKISILTTYNGQKLLIRDVINKRCKPWNIEPPNKVTTVDKFQGQQNDFILLSLVRTRFVGHLRDVRRLIVAMSRARLGLYVFCRRSLFEQCYELQPTFQLLLQRPDKLALNLEECTPFTERPLGETGNIHYVTGIEDIEHLVKFRLEHLSQMQYMQYYAPPANELPPAAPENIADVVPPENGSVLNQPKEHMAVEENGGASDTTVSNKMEEDAVEAKDGTMQEGNKMSEGNRDGDVAAKDKGEEHDDANDKMEEGDASLKDKIEEENSEPKDKMDEE

SEQ ID NO: 75196 - protein, 152 aa, Setaria italica
  misc_feature (121)..(121): Xaa can be any naturally occurring amino acid
  Transcript Sequence Number=SeqID_9222
  Gene Ontology: Mol. function=DNA binding
  Homolog annotation: Hit_ID=B6SV09; Match level="QueryCoverage=96%, HitCoverage=31%, E-value=3e-10, Identity=29%"; Hit description=PHD -finger family protein
MEVPVGNGLCGDTNNSEEQRSDSRTNGWWRYVLDGLMRLHMPGIQGDAGIATCVRDALLYGCAEFGTVAGKVEMDSDKTVTANTAKCQNVLMNILRSENFAVLCSVLCRTVHQDEGRTRYXDFDVIDLRMKNGSYGHKPELFLHDLKLVIAS

SEQ ID NO: 75197 - protein, 373 aa, Setaria italica
  misc_feature (267)..(267): Xaa can be any naturally occurring amino acid
  Transcript Sequence Number=SeqID_9223
  Gene Ontology: Mol. function=DNA binding
  Homolog annotation: Hit_ID=B6SV09; Match level="QueryCoverage=64%, HitCoverage=47%, E-value=1e-11, Identity=24%"; Hit description=PHD -finger family protein
IEWHLVGWKNLPQCPDVPKDVAKKIRDQMMSKEKKKARRSGSFVGNGSCDALCSPKSSQLDQDHLTTTMHDRCSSLAVDQANSESMACQMLSNTTLLSQESANPQVSHEQQGKELATPPECCPIQPIMEVPVGNGLCGDTNNSEEQRSDSRTNGWWRYVLDGLMRLHMPGIQGDAGIATCVRDALLYGCAEFGTVAGKVEMDSDKTVTANTAKCQNVLMNILRSENFAVLCSVLCRTVHQDEGRTRYFDFDVIDLRMKNGSYGHKPXIILHDLKLLWENLKVAGQNIILLANNLSNLTEDSYEKLVGRARLSSDGEPNGAVVTISEPQSLVQSDALVPSTSQGFNQLDQPGPSYLSDVHNNCNQCGKEARGGS

SEQ ID NO: 75198 - protein, 356 aa, Setaria italica
  Transcript Sequence Number=SeqID_9224
  Gene Ontology: Mol. function=metal ion binding; Cellular component =nucleus
  Homolog annotation: Hit_ID=B6SV09; Match level="QueryCoverage=88%, HitCoverage=56%, E-value=2e-44, Identity=31%"; Hit description=PHD -finger family protein
  Pfam annotation: Domain name=C1_1; Domain location=91-126; Score= -3.9; E_value=0.088; Accession=PF00130.14; Description=Phorbol estersdiacylglycerol binding do
  Pfam annotation: Domain name=C1_3; Domain location=93-122; Score =12.2; E_value=0.021; Accession=PF07649.4; Description=C1-like domain
  Pfam annotation: Domain name=PHD; Domain location=203-259; Score =13.4; E_value=0.0009; Accession=PF00628.21; Description=PHD-finger
  Pfam annotation: Domain name=PHD; Domain location=260-305; Score =52.5; E_value=1.6e-12; Accession=PF00628.21; Description=PHD-finger
  Pfam annotation: Domain name=PHD; Domain location=94-142; Score=14.2; E_value=0.00072; Accession=PF00628.21; Description=PHD-finger
  Pfam annotation: Domain name=zf-C3HC4; Domain location=204-256; Score= 2.4; E_value=0.054; Accession=PF00097.17; Description=Zinc finger, C3HC4 type (RING finger)
  Pfam annotation: Domain name=zf-C3HC4; Domain location=258-302; Score= 10.1; E_value=0.0071; Accession=PF00097.17; Description=Zinc finger, C3HC4 type (RING finger)
  Pfam module annotation: Pfam domain module=C1_1::C1_3::PHD::PHD::PHD:: zf-C3HC4::zf-C3HC4; Domain location=91-126::93-122::203-259::260 -305::94-142::204-256::258-302
SALHELIQLWENLKVAGQNIILLANNLSNLTEDSYEKLVGRARLSSDGEPNGAVVTISEPQSLVQSDALVPSTSQGFNQLDQPGPSYLSDVHNNCNQCGKEARGGSVLKCSRCMVSCHISCIEPPNPSISTGSWCCKNCSATCIEPVEDDNSLHGNCVVCDRLEVCRSPKCEDAPNDDSRAMVISSVSSVGDPELPEVDTGGSCKICGDPEEDDKRFLICGHIHCLYKYYHIRCLKSKQIAGDVQQDKPCWYCPSCLCRVCLSDKDDDLTILCDSCDEAYHLYCITPRRTSIPKGRWYCSSCSVARAKEGMRQYERTLKLHQKDNAGQQSRNYEGLDLLVSAVEQLSADELLVTPN

SEQ ID NO: 75199 - protein, 114 aa, Setaria italica
  Transcript Sequence Number=SeqID_9225
RGTRRRARARLRRRGAVRRGCARGETRTGRGGGVSVGVGSEHVRGCAQLHPPPPWWSRRKGLSSLSWPSRQPWQRPFPPPATRLRSLLPPSTLPPAPTSPHSLCISASAHVAPL

SEQ ID NO: 75200 - protein, 75 aa, Setaria italica
  Transcript Sequence Number=SeqID_9226
  Subcellular localization annotation: CTP_CleavageSite=29; ConfidenceScore=5.47e-01
MAGWSNSTGTSSGGGGRGTGGRGFPNRQYANNSSDMIHGGSSSGGSRRRDRWGRPPPQFCYRPVDAAHRQSPTRI

SEQ ID NO: 75201 - protein, 116 aa, Setaria italica
  Transcript Sequence Number=SeqID_9227
  Homolog annotation: Hit_ID=Q25A44; Match level="QueryCoverage=43%, HitCoverage=20%, E-value=6e-13, Identity=70%"; Hit description =H0303G06.15 protein
ENALSALESAGLFRTGGLMKEKVLFCSTEVGRTSFVRQLEADFHIDSSLDIVSQLSVCYLVSLLLLGAGFRYSCFTWCCVFGYQRFIRCQLFISSMEGGQLAANIFNSPSLEKFFS

SEQ ID NO: 75202 - protein, 76 aa, Setaria italica
  misc_feature (68)..(68): Xaa can be any naturally occurring amino acid
  Transcript Sequence Number=SeqID_9228
MFKMVYLPVSLSCICLSEKNRVLSQVLFCSTEVGRTSFVRQLEADFHIDSSLDIVSQLSRFIRCQLFXSSMEGGQL

SEQ ID NO: 75203 - protein, 254 aa, Setaria italica
  Transcript Sequence Number=SeqID_9229
  Homolog annotation: Hit_ID=Q7XN71; Match level="QueryCoverage=43%, HitCoverage=65%, E-value=1e-38, Identity=71%"; Hit description =OSJNBa0089N06.11 protein
MPGLAAEQDAAVSLVRRVARALNRRVTDIVALLFNHKSAGSLGAVAGFAIAVVFAWRFMRPSQGRPRRPAPKRPPPTPAGAPESIVSDAPEPVGDSGKVTRHIVAKRLSGCRKVTCRLLGVIFEEKTPEELQKHATVRPSVVELLLEISRHCDLYLMETVLDDNSEENALSALESAGLFRTGGLMKEKVLFCSTEVGRTSFVRQLEADFHIDSSLDIVSQLSRFIRCQLFISSMEGGQLAANIFNSPSLEKFFS

SEQ ID NO: 75204 - protein, 57 aa, Setaria italica
  Transcript Sequence Number=SeqID_9230
  Subcellular localization annotation: CTP_CleavageSite=35; ConfidenceScore=5.04e-01
LILFSFLLVRSVLTLSSPDIVSQLSRFIRCQLFISSMEGGQLAANIFNSPSLEKFFS

SEQ ID NO: 75205 - protein, 56 aa, Setaria italica
  Transcript Sequence Number=SeqID_9231
  Gene Ontology: Mol. function=transferase activity, transferring glycosyl groups; Cellular component=integral to membrane; Biological process=protein amino acid glycosylation
  Homolog annotation: Hit_ID=B6TAX6; Match level="QueryCoverage=100%, HitCoverage=15%, E-value=8e-27, Identity=98%"; Hit description=Beta -1,3-galactosyltransferase sqv-2
KDLATYISINKHILHKYINEDVSLGSWFIGLDVEHIDDKRLCCGTPPDCEWKAQAG

SEQ ID NO: 75206 - protein, 403 aa, Setaria italica
  Transcript Sequence Number=SeqID_9232
  Gene Ontology: Mol. function=transferase activity, transferring glycosyl groups; Cellular component=integral to membrane; Biological process=protein amino acid glycosylation
  Homolog annotation: Hit_ID=B6TAX6; Match level="QueryCoverage=90%, HitCoverage=100%, E-value=0.0, Identity=92%"; Hit description=Beta-1, 3-galactosyltransferase sqv-2
  Pfam annotation: Domain name=Galactosyl_T; Domain location=148-346; Score=229.4; E_value=9.2e-66; Accession=PF01762.13; Description =Galactosyltransferase
MSWRRGGGGGVDGGVSRRWAVLLCVGSFCLGLLFTNRMWTLPEASEIARPNAKVEEGNMPVAAECGSKKVQEKQDYRDILQVQDTHHDVQSLDKTIASLETELSAARSLQESLLNGAPVAEEFKVSESIGRRKYLMVIGINTAFSSRKRRDSIRYTWMPQGEKRKKLEEEKGIIIRFVIGHSAISGGIVDRAIEAEDRKHGDFMRIDHVEGYLALSGKTKTYFATAVSLWDADFYVKVDDDVHVNIATLGNILSKLALKPRVYIGCMKSGPVLSEKGVRYYEPEHWKFGESGNKYFRHATGQLYAISKDLATYISINKHILHKYINEDVSLGSWFIGLDVEHIDDKRLCCGTPPDCEWKAQAGNICAASFDWRCSGICNSEGRIWEVHNKCAEGEKALWNATF

SEQ ID NO: 75207 - protein, 326 aa, Setaria italica
  misc_feature (21)..(21): Xaa can be any naturally occurring amino acid
  Transcript Sequence Number=SeqID_9233
  Gene Ontology: Mol. function=hydrolase activity; Cellular component =nucleus; Biological process=histone deacetylation
  Homolog annotation: Hit_ID=Q60DG7; Match level="QueryCoverage=99%, HitCoverage=82%, E-value=1e-157, Identity=82%"; Hit description=(RAP Annotation release2) Histone deacetylase superfamily protein
  Pfam annotation: Domain name=Hist_deacetyl; Domain location=1-284; Score=334.3; E_value=2.4e-97; Accession=PF00850.11; Description =Histone deacetylase family
SSILRRGPIAPFLSWHSGRPXHASELLSFHSSEYIEELVQANATGAKKFCEGTFLNPGSWGAALLAAGTTLSAVKHILDGHGNLAYALVRPPGHHAQPNRADGYCFLNNAGLAVHLALDSGRSKVAVVDIDVHYGNGTAEGFYRMDNVLTISLHMRHGSWGPSHPQSGSVDEIGEGKGLGYNLNIPLPNGSGDAGYEYAMNELVVPAIDKFQPQLLVFVVGQDSSAFDPNGRQCLTMEGYRKIGQIMRSMADQHSNGQILIVQEGGYHISYSAYCLHATLEGVLDLDAPLLDDPIAYYPEDERYTMKVVDMIKNTWKESVPFLKDI

SEQ ID NO: 75208 - protein, 87 aa, Setaria italica
  Transcript Sequence Number=SeqID_9234
EFMLNLSLACMVADCFGPAPHARAGNFGIKSVPAVWREPGGESSRRPASRDSRWSAADGRTGGRQRRSKLGFGKFGGRWPVGKAGEE

SEQ ID NO: 75209 - protein, 87 aa, Setaria italica
  Transcript Sequence Number=SeqID_9235
  Gene Ontology: Mol. function=protein binding; Cellular component =spliceosome; Biological process=mitotic spindle organization and biogenesis
  Homolog annotation: Hit_ID=Q016Z2; Match level="QueryCoverage=97%, HitCoverage=7%, E-value=3e-33, Identity=70%"; Hit description =Putative symplekin (ISS)
  Pfam annotation: Domain name=SF3b10; Domain location=5-87; Score =235.7; E_value=1.1e-67; Accession=PF07189.3; Description=Splicing factor 3B subunit 10 (SF3b10)
MQASDRFNINSQLEHLQAKYVGTGHADLTRFEWAVNIQRDSYASYIGHYPMLAYFAIAENESIGRERYNFMQKMLLPCGLPPERDED

SEQ ID NO: 75210 - protein, 87 aa, Setaria italica; identical to SEQ ID NO: 75209
  Transcript Sequence Number=SeqID_9236
  Gene Ontology: Mol. function=protein binding; Cellular component =spliceosome; Biological process=mitotic spindle organization and biogenesis
  Homolog annotation: Hit_ID=Q016Z2; Match level="QueryCoverage=97%, HitCoverage=7%, E-value=3e-33, Identity=70%"; Hit description =Putative symplekin (ISS)
  Pfam annotation: Domain name=SF3b10; Domain location=5-87; Score =235.7; E_value=1.1e-67; Accession=PF07189.3; Description=Splicing factor 3B subunit 10 (SF3b10)

SEQ ID NO: 75211 - protein, 49 aa, Setaria italica
  Transcript Sequence Number=SeqID_9237
MLITANEITLGRKRGVSFELYCISDASATVTRVSKRNAFVMSLCIGVHW

SEQ ID NO: 75212 - protein, 72 aa, Setaria italica
  Transcript Sequence Number=SeqID_9238
VGVVGVVAGLPLCLTEALIGSWSRMGMARRSGGIIVIHGLVEVEDCHVLLLYVNPIDEISGVCPAQVHSGIG

SEQ ID NO: 75213 - protein, 84 aa, Setaria italica
  Transcript Sequence Number=SeqID_9239
  Gene Ontology: Mol. function=iron-sulfur cluster binding
  Homolog annotation: Hit_ID=B9SHC0; Match level="QueryCoverage=41%, HitCoverage=4%, E-value=4e-10, Identity=77%"; Hit description =Catalytic, putative
  Subcellular localization annotation: CTP_CleavageSite=44; ConfidenceScore=5.62e-01
MAAQALPFLRWSRSASSLRAHCSATAAPRRLFSALRRPAAAAARCEAGSKVMLKGMDYSELENWVQAQGFRPGQAMMLWKCLYG

SEQ ID NO: 75214 - protein, 406 aa, Setaria italica
  Transcript Sequence Number=SeqID_9240
  Gene Ontology: Mol. function=catalytic activity; Cellular component =nucleus; Biological process=DNA integration
  Homolog annotation: Hit_ID=B8B5M4; Match level="QueryCoverage=57%, HitCoverage=50%, E-value=2e-36, Identity=40%"; Hit description =Superoxide dismutase [Cu-Zn]
  Pfam annotation: Domain name=PDZ; Domain location=259-350; Score =17.7; E_value=0.013; Accession=PF00595.16; Description=PDZ domain (Also known as DHR or GLGF)
MRKRWRTPSRFNFKREDLTSALRKVHLPRGYPIPSEHSVGMRLVNTFEEHFGDLDGNNEEHARVKLLASSISKSVVSLASFKGSVRHFVCTGIIFGHMPSEMSILTSASLVRCLGDKAKFVNKLKIKVRLPSGKLVVGKLWKYDYKYNIAVVKTKSFPEFHAAHVHNGVQFNSELFQANLVAIGRGYESGELMASGGTLLHKTSRLDSQELMISTCKITKAGIGGPLIDSSGNFVGMNFYAKDETPFMPVSILLKCLKHFEIFGRVVQPWLGLRVGSLRAEKLSICEEIRNRFPQAHGIYVEMVSEGSPAAISGIKVGDLISTLDGVALSNAQEFHELILDKAECALKCSEGLVFEVYVLRPSDCSGFVVTLNGEEVTMIKQNSWPVPEVEWLDPSTNDNSDFTMW

SEQ ID NO: 75215 - protein, 422 aa, Setaria italica
  Transcript Sequence Number=SeqID_9241
  Gene Ontology: Mol. function=transferase activity; Biological process= D-ribose metabolic process
  Homolog annotation: Hit_ID=B4FVM5; Match level="QueryCoverage=94%, HitCoverage=89%, E-value=0.0, Identity=84%"; Hit description =Carbohydrate kinase-like protein
  Pfam annotation: Domain name=PfkB; Domain location=106-402; Score =88.9; E_value=1.8e-23; Accession=PF00294.16; Description=pfkB family carbohydrate kinase
  Subcellular localization annotation: CTP_CleavageSite=10; ConfidenceScore=5.14e-01
SPPPPSLLPLAARPGARSSPRACSYHRFVVRWKGRARALLGGFSDAGVSESDDDDEDEDAVEPAAAAAAPERWDVLGLGQAMVDFSGTVDDEFLERLGIEKGTRKVVNHEERGRVLRAMDGCSYKAAAGGSLSNSLVALARLGSSRSAGYPELKIAMAGSVGSDPLGSFYRAKLRRANVHFLSKPVKDGTTGTVIVLTTPDAQRTMLAYQGTSSTLSYDSDLANLVSKSNVLIVEGYLFELPHTIEAIKQACEDAHKNGALIAVTASDVSCIKRCYNDFWDIVGNYADILFANANEARAFCELPSTDSPMSATRYLSHSVPLVSVTDGVHGSYIGVKGEAIYIPPPPCLPVDTCGAGDAYASGILYGILRGASDLKGIGLLASRVAAVVVGQQGTRLRVQDADRLAESFAHHLDSLEFCSDV

SEQ ID NO: 75216 - protein, 227 aa, Setaria italica
  misc_feature (46)..(46): Xaa can be any naturally occurring amino acid
  Transcript Sequence Number=SeqID_9242
  Pfam annotation: Domain name=Dev_Cell_Death; Domain location=1-101; Score=62.1; E_value=2.2e-15; Accession=PF10539.1; Description =Development and cell death domain
RVLGLPPGSLEAVSRIQRGAAVFLYDFNAKHLCGPYHADSDGGAPXAFHGRFPAQVKFMIDGDFMPIPESSLKRAIKENYFKGKFNPELTSTQVEKLRALFQPITSLPQSSSSHDVDNWPSAPAFLPPALPAQPPAYAHHPTAYVAPPAAHLMPPEAYAPPCPTRSATHTCHVPTTGYGFYAGYAACGPLPSTYQYAQAPPPCSLYNQYSMPHYVSACLFYCPLLSE

SEQ ID NO: 75217 - protein, 90 aa, Setaria italica
  Transcript Sequence Number=SeqID_9243
  Pfam annotation: Domain name=DUF679; Domain location=44-90; Score= -106.7; E_value=0.0065; Accession=PF05078.4; Description=Protein of unknown function (DUF679)
MAEKEECKVLIEQSSKDAADPPRPDEDDDEDDNSSFIVLLNLVLGGTARLNVLLPTATILAFAIFAPLLTDDGKCARPNRILSVSVKKTQ

SEQ ID NO: 75218 - protein, 52 aa, Setaria italica
  misc_feature (4)..(4): Xaa can be any naturally occurring amino acid
  Transcript Sequence Number=SeqID_9244
FFFXFFFFFFFCYFKPSEARAKILLIHVQQSSTIYLASTTALIILFDHRHSP

SEQ ID NO: 75219 - protein, 37 aa, Setaria italica
  Transcript Sequence Number=SeqID_9245
  Homolog annotation: Hit_ID=B9RDF9; Match level="QueryCoverage=97%, HitCoverage=1%, E-value=6e-10, Identity=88%"; Hit description =Nucleotide binding protein, putative
VSSDGAKTIETASGHLAPVTCLALSPDSNYLVTGSRV

SEQ ID NO: 75220 - protein, 1029 aa, Setaria italica
  misc_feature (199)..(199): Xaa can be any naturally occurring amino acid
  misc_feature (998)..(998): Xaa can be any naturally occurring amino acid
  Transcript Sequence Number=SeqID_9246
  Gene Ontology: Mol. function=protein binding; Cellular component =cytoplasmic membrane-bounded vesicle; Biological process=signal transduction
  Homolog annotation: Hit_ID=B9RDF9; Match level="QueryCoverage=99%, HitCoverage=34%, E-value=0.0, Identity=60%"; Hit description =Nucleotide binding protein, putative
  Pfam annotation: Domain name=Beach; Domain location=647-924; Score =634.2; E_value=1.2e-187; Accession=PF02138.10; Description =BeigeBEACH domain
  Subcellular localization annotation: CTP_CleavageSite=36; ConfidenceScore=5.03e-01
MLLSFIKDVVTEGMGHQAGSMMPFDGNSYSSPRKPRSALLWSVLGPILNMPITESKRQRVLVASSILYSEVWHAIGRDRKPLRKQYIELILPPFVAILRRWRPLLAGIHELTSSDGQNPLIADDRALAADALPIEAALLMVSPGWAAAFASPPVAMALAMMAAGASGTETRTPPRNTVNRRDTSLPERKAASKLQTFSXFQKPIETAANKPGSTPKDKAAAKAAALAAARDLERTAKIGSRRGLSAVAMATSGQRRSSGDIERAKRWNTSEAMSAAWMECLQSADSKSVAGRDFSALSYKYVAVLVSCLALARNLQRVEMERQTLVDVLNRHRASTGLRAWRHLLHCLTEMGRLYGPFGEPLCTPVRVFWKLDFTESSSRMRRFMKRNYKGSDHLGAAADYEDRKLLSTAAQSNECNSEDANSSLANALPSSASVIMADAMSMDERNAENEQLETDTTHSSVDDDQLQHSSAADKQSVKGSVGSRSSDICADRNLVRSTVLAPSYVPSEADERIIVELPSLMVRPLKVVRGTFQVTSKRINFIIDERSSDNNIDDAASTSGQCDQQDKDRSWLISSLHQIYSRRYLLRRSALELFMVDRSNFFFDFGDIDARKNAYRAIVHTKPPNLNDIFLATQRAEQILKRTQLMERWANWEISNFEYLMELNTLAGRSYNDITQYPVFPWIVADYKSGVLNLDDPSTYRDLSKPIGALNPERLKKFQERYTTFEDPIIPKFHYGSHYSSAGTVLYYLFRVEPFTTLSIQLQGGKFDHADRMFSDLSGTWDSVLEDMSDVKELVPEMFYLPEVFTNVNGIDFGTTQLGGKLDSVELPPWAENHVDFVHKHRKALESEHVSAHLHEWIDLIFGYKQRGKEAVMANNVFFYITYEGTVDIDKITDPVERRATQDQIAYFGQTPSQLLTVPHMKRKPLAEVLQLQTIFRNPNELKSYVLPHPDRCNVPASAMLVSNDSIVVVDVNAPAARVALHHWQPNTPDGQGTPFXFHHGRNAANSTGGALMRIFKVSAGSAEDYEF

SEQ ID NO: 75221 - protein, 454 aa, Setaria italica
  Transcript Sequence Number=SeqID_9247
  Homolog annotation: Hit_ID=B9RDF9; Match level="QueryCoverage=99%, HitCoverage=15%, E-value=1e-128, Identity=54%"; Hit description =Nucleotide binding protein, putative
  Pfam annotation: Domain name=WD40; Domain location=142-180; Score =44.7; E_value=3.5e-10; Accession=PF00400.24; Description=WD domain, G-beta repeat
  Pfam annotation: Domain name=WD40; Domain location=226-264; Score =19.1; E_value=0.018; Accession=PF00400.24; Description=WD domain, G -beta repeat
  Pfam module annotation: Pfam domain module=WD40::WD40; Domain location=142-180::226-264
FQLQTIFRNPNELKSYVLPHPDRCNVPASAMLVSNDSIVVVDVNAPAARVALHHWQPNTPDGQGTPFLFHHGRNAANSTGGALMRIFKVSAGSAEDYEFPRAIAFAASAIRSSAVVAVTCDKEIITGGHIDGSLKLVSSDGAKTIETASGHLAPVTCLALSPDSNYLVTGSRDTTVILWRVHRTGSSHKKNAPEPPPTTPTTPRSPLSSNTSSVSNPSETKRRRIEGPMHIMRGHLGEVTCCSVSPDLGLVASSSNTSGVLLHSLRTGRLIRRLDVCEAHAICLSSQGIILVWNESKKTLSTFTVNGLPIATSILTPFSGQVSCIEISTDGHFALIGTSSFNNYKCDEITESGDHELGPSGKDDVSKDSKQSETEQSVHVPSACFVDLHRLKVFHTLKLAKGQDITAIALNKENTNLLVSTADKQLIVFTDPALSLKVVDQMLRLGWEGDGLLQ

SEQ ID NO: 75222 - protein, 162 aa, Setaria italica
  Transcript Sequence Number=SeqID_9248
  Gene Ontology: Mol. function=nucleic acid binding
  Pfam annotation: Domain name=tRNA_anti; Domain location=56-130; Score= 21.2; E_value=0.0044; Accession=PF01336.17; Description=OB-fold nucleic acid binding domain
  Subcellular localization annotation: CTP_CleavageSite=4; ConfidenceScore=5.06e-01
QPATAAAARPCSPVAMDYSLAALKIFGSQLASATEAPSSEGASPAQMLFGIRFQRVWIQGVLLSADYNEAGGGRFVLDDGSCIADLFVSPREAEGRPWRAGMYVMVVGAYIAGESKENFPAIKVHKMVDLSAQPDREAMWYMEVAEAYNLFYEPFLAASPSS

SEQ ID NO: 75223 - protein, 114 aa, Setaria italica
  Transcript Sequence Number=SeqID_9249
DRPDRPQGSSFRAHSRRRSAPRTPPEHELCFYIHELYFCIAGRPRRVYKQSKAKQARRSHGDGAGDLAASGGPRRHHRHHPLHHLPLIADAGRGGAHTMSRLQRRRRHPFIIIR

SEQ ID NO: 75224 - protein, 74 aa, Setaria italica
  Transcript Sequence Number=SeqID_9250
  Gene Ontology: Mol. function=hydrolase activity, hydrolyzing O -glycosyl compounds; Biological process=carbohydrate metabolic process
  Homolog annotation: Hit_ID=Q0KIW0; Match level="QueryCoverage=50%, HitCoverage=4%, E-value=2e-11, Identity=97%"; Hit description =Glycosyl hydrolases family 17 protein
  Subcellular localization annotation: CTP_CleavageSite=25; ConfidenceScore=5.03e-01
GLVLVPALSPCATTLPVFLAVGNSSSMMILAIIVLLFRSSPSSTPLILDILLVGTYKLKCYYHVLSFVLFLITL

SEQ ID NO: 75225 - protein, 238 aa, Setaria italica
  Transcript Sequence Number=SeqID_9251
  Gene Ontology: Mol. function=hydrolase activity, hydrolyzing O -glycosyl compounds; Biological process=carbohydrate metabolic process
  Homolog annotation: Hit_ID=Q0KIW0; Match level="QueryCoverage=67%, HitCoverage=21%, E-value=2e-66, Identity=85%"; Hit description =Glycosyl hydrolases family 17 protein
  Pfam annotation: Domain name=DUF204; Domain location=152-211; Score= -9.9; E_value=0.024; Accession=PF02659.7; Description=Domain of unknown function DUF
  Pfam annotation: Domain name=ER_lumen_recept; Domain location=74-198; Score=-51.2; E_value=0.036; Accession=PF00810.10; Description=ER lumen protein retaining receptor
  Pfam module annotation: Pfam domain module=DUF204::ER_lumen_recept; Domain location=152-211::74-198
ADQGMDGGGGLGGLRWTAEEASTIGGIATVSLLHSFIPTHWLPFSIVARAQRWPLSRTLLVTAFGGVLHVVSTALLGITAVTMANTIAGEETVHKLASLLLIFLGGSYILLFALGKGGHSHAHNHPMEKMAVAGLVLVPALSPCATTLPVFLAVGNSSSMMILAIIVLLFSTITVMTSLVALSFYGASQIKFHWVERYDKILVGTVLCLVGILTYVFHHHDGDEHSLHEHVHRKLVSP

SEQ ID NO: 75226 - protein, 78 aa, Setaria italica
  Transcript Sequence Number=SeqID_9252
  Subcellular localization annotation: CTP_CleavageSite=56; ConfidenceScore=5.85e-01
PPATQEPLRALALASTASPRVTSSRTSAWPLVSQPGRLTSVQLVVSQQQSAARRQRASMAHCLTGSSSPAFFSRCPPQ

SEQ ID NO: 75227 - protein, 863 aa, Setaria italica
  Transcript Sequence Number=SeqID_9253
  Gene Ontology: Mol. function=phosphotransferase activity, alcohol group as acceptor; Cellular component=chromosome; Biological process= response to DNA damage stimulus
  Homolog annotation: Hit_ID=Q5Z987; Match level="QueryCoverage=100%, HitCoverage=31%, E-value=0.0, Identity=83%"; Hit description =Serine/threonine-protein kinase ATR
  Pfam annotation: Domain name=FAT; Domain location=1-319; Score=85.6; E_value=1.8e-22; Accession=PF02259.15; Description=FAT domain
  Pfam annotation: Domain name=FATC; Domain location=831-863; Score =65.3; E_value=2.3e-16; Accession=PF02260.12; Description=FATC domain
  Pfam annotation: Domain name=PI3_PI4_kinase; Domain location=545-793; Score=261.8; E_value=1.6e-75; Accession=PF00454.19; Description =Phosphatidylinositol 3- and 4-kinase
  Pfam module annotation: Pfam domain module=FAT::FATC::PI3_PI4_kinase; Domain location=1-319::831-863::545-793
QSKQALLVPLAAAGMDSYMRAYPYVVKLHMLRELEDFNSLLGDESFVDKSFSAEDPDFLKLTKDWENRLRCTQPSLWTREPLLALRRMVFSQSHMNTQVGNCWLQYAKLCRLAGHYETAHLAILEADASGSPNAHMEKAKYLWNIRKFDSAIAELQQTLLNMPAEILGSAVLSSLCSLSLALPNAPISATQASKENPDVSKALLLYTRWIHYTGQKQSADIKSLYSRVTELQPKWEKGFFCMAKFVDDLLVDARKRQEDEKIACKVGPVPSSSSNSVSRATEEKEKPWWESLPVVLLCYARALHKGHKNLFQALPRMLTLWFEFGSMHTRDVSSSDQRMKEIHGRVLGLIRGCLKDLPTYQWLTVLSQLISRICHQNDDVVRIVKYIITSVLREYPQQALWMMAAVSKSTVPARRDAAAEILQSAKKGCRRGSQNSALFNQFPTLIDHLIKLCFHPGQPKAKTINISTEFSSLKRMMPLGIILPVQQALTVTLPSYDSDMSDQSGFHPFSVSEHPTIAGIADEAEILTSLQKPKKVVFVGSDGVARPFLCKPKDDLRKDSRMMEFNAMINRLLSKVPESRRRKLYIRTFAVVPLTEDCGMVEWVPNTRGLRHILQDIYITHGKFDRMKTNPQIKKIYDTFHGKMPDDEMLKKKILPMFPPVFHKWFLTTFSEPAAWFRARVAYAHTTAVWSMVGHIVGLGDRHGENILFDSTTGDCVHVDFSCLFDRGLLLDKPEVVPFRLTQNMIDGLGITGYEGIFLKVCEITLSVLRTHKETLMTVLETFIHDPLVEWTKTQKSSGGEVQNPHAQRAITNIKARLQGVVVGVKATPSLPLSVEGQARRLIAEAVSLSNLGKMYIWWMPWF

SEQ ID NO: 75228 - protein, 135 aa, Setaria italica
  misc_feature (58)..(58): Xaa can be any naturally occurring amino acid
  Transcript Sequence Number=SeqID_9254
  Gene Ontology: Mol. function=binding
  Homolog annotation: Hit_ID=B9SCR2; Match level="QueryCoverage=100%, HitCoverage=62%, E-value=7e-38, Identity=37%"; Hit description =Pentatricopeptide repeat-containing protein, putative
  Pfam annotation: Domain name=PPR; Domain location=70-104; Score=39.5; E_value=1.4e-08; Accession=PF01535.12; Description=PPR repeat
GVAPNEFTYSTMLIASVASLPPQIHAQVIKTNYQCLPTVGTALLHSYSKLCSTQEALXSIFEMIDQKDVVAWSAMLTCYAQAGDCDGATNVFIKMSMHGVKPNEFTISSVIDACASPTAGVDLGRQFHAISIKHR

SEQ ID NO: 75229 - protein, 80 aa, Setaria italica
  Transcript Sequence Number=SeqID_9255
  Subcellular localization annotation: CTP_CleavageSite=37; ConfidenceScore=5.06e-01
HFSWDLGRGGKLTCYWYWCSLNQHEVLVGARRRRRPRARRRRGEWRRRWPNRRRQERQTKRGETEREGNGGKNRDEGEAG

SEQ ID NO: 75230 - protein, 118 aa, Setaria italica
  misc_feature (57)..(57): Xaa can be any naturally occurring amino acid
  Transcript Sequence Number=SeqID_9256
  Gene Ontology: Mol. function=metal ion binding; Cellular component =chromosome
  Homolog annotation: Hit_ID=B9GP99; Match level="QueryCoverage=87%, HitCoverage=11%, E-value=2e-29, Identity=66%"; Hit description =Histone ubiquitination proteins group
VHVLKYSLNESKLEQRVIAANEAEAMSQQRLATAEAEIAELSQKLEASRRDLVRLSXTLKSKHEECEAYVVEIESIGHAYEDIMSQNQQLLQQIIERDDHNTKGRVVAWYQWLRSVLL

SEQ ID NO: 75231 - protein, 141 aa, Setaria italica
  Transcript Sequence Number=SeqID_9257
  Gene Ontology: Mol. function=metal ion binding; Cellular component =chromosome
  Homolog annotation: Hit_ID=Q7XU27; Match level="QueryCoverage=99%, HitCoverage=15%, E-value=2e-38, Identity=61%"; Hit description=E3 ubiquitin-protein ligase BRE1-like 1
LNLVVHKFEFRALESRFNDLKEKQRTHNETLVLVKSYWERLVADLELDSVCKSESSNLSCSTGHNNVRKDGICMALERDFLNRLLEAGATESSDCSPSCHPGNDVPPEQSSTINVLQKFFLPSSDLWHVNNEFVSAALTKL

SEQ ID NO: 75232 - protein, 53 aa, Setaria italica
  Transcript Sequence Number=SeqID_9258
MFLILSFIYMEILFIGWNMLAPLERDFLNRLLEAGATESSGCSPSYHLGNGVA

SEQ ID NO: 75233 - protein, 314 aa, Setaria italica
  Transcript Sequence Number=SeqID_9259
  Gene Ontology: Mol. function=metal ion binding; Cellular component =chromosome; Biological process=ubiquitin-dependent protein catabolic process
  Homolog annotation: Hit_ID=Q7XU27; Match level="QueryCoverage=99%, HitCoverage=35%, E-value=1e-118, Identity=73%"; Hit description=E3 ubiquitin-protein ligase BRE1-like 1
FGQERQFNQKVDLAEIPQKVSAYCVSRIADLEKDVLKLCNEKNMLVLKLEEASREPGRNQVISEFKALVSSLPREMGAVQSELSKHKDASLQLHSLRAEVSSLSSILTRKEQEIEEISCKSGHADSDITQLQYLVRDLRENAEELKLFVELYKHESTDSRQLMESRDRELSEWARVHVLKYSLNESKLEQRVIAANEAEAMSQQRLATAEAEIAELSQKLEASRRLDLVRLSDTLKSKHEECEAYVVEIESIGHAYEDIMSQNQQLLQQIIERDDHNTKLFMEGVKAKQSHDALHMEVCSLQRNLQHANTLMDL

SEQ ID NO: 75234 - protein, 134 aa, Setaria italica
  Transcript Sequence Number=SeqID_9260
  Gene Ontology: Mol. function=metal ion binding; Cellular component =chromosome; Biological process=ubiquitin-dependent protein catabolic process
  Homolog annotation: Hit_ID=Q7XU27; Match level="QueryCoverage=93%, HitCoverage=14%, E-value=5e-56, Identity=80%"; Hit description=E3 ubiquitin-protein ligase BRE1-like 1
  Pfam annotation: Domain name=zf-C3HC4; Domain location=82-120; Score =35.3; E_value=2.4e-07; Accession=PF00097.17; Description=Zinc finger, C3HC4 type (RING finger)
VFLKSSRSSSMDELQAKVGSNRLEVAELLIELEKERFSKKRIEDDLDLMSSKANSLREKKDNSAVLQKLHHEVKEYRGILKCGVCHERQKEIVIAKCYHLFCNQCIQKSLGSRQKRCPSCGLSFGVNDVKPIYI

SEQ ID NO: 75235 - protein, 844 aa, Setaria italica
  Transcript Sequence Number=SeqID_9261
  Gene Ontology: Mol. function=metal ion binding; Cellular component =chromosome; Biological process=ubiquitin-dependent protein catabolic process
  Homolog annotation: Hit_ID=Q7XU27; Match level="QueryCoverage=97%, HitCoverage=93%, E-value=0.0, Identity=70%"; Hit description=E3 ubiquitin-protein ligase BRE1-like 1
  Pfam annotation: Domain name=BRE1; Domain location=601-690; Score= -2.4; E_value=0.027; Accession=PF08647.3; Description=BRE1 E3 ubiquitin ligase
  Pfam annotation: Domain name=Cast; Domain location=83-804; Score= -291.2; E_value=0.039; Accession=PF10174.1; Description=RIM-binding protein of the cytomatrix
  Pfam annotation: Domain name=zf-C3HC4; Domain location=792-830; Score= 38.5; E_value=2.6e-08; Accession=PF00097.17; Description=Zinc finger, C3HC4 type (RING finger)
  Pfam module annotation: Pfam domain module=BRE1::Cast::zf-C3HC4; Domain location=601-690::83-804::792-830
MSTCLHVQDPRKSAMRPLELYFKQLEVHKFEFRTLEGRFNDLKEKQRTHNETLVLVKSHWERLLADLDLVSVCKNESLHSSCGTGQNNVQKERDFLNRLLEAGATESSGCSPSYHLGNGVAPEQSSTINVLQKFFLPSSDLWHVNNEFVSAALTKLPENEHSRQLRSATSDVLSKLNKVIQVVDNLHLKHRQLAGNYQKQRDSNAWNRAEQKRLKEELTSTVAKLEETKHELAALKAQGDNKQGTPILVPTVGNKNATAEKVRDKQRELQDLEATHKELMELSSKRLEEIRRLHKERIETLNKLATFQNILTDFKSIRSSKAFQLVNDQLQKSQAELDDHRTLLEKLQVDMDSFIWQERQFNQKVDLAEIPQKVSAYCMSRIADLEKDVQKLSNEKNMLVLKLEEASREPGRNQVISEFRALVSSLPTEMGSVQSELSKHKDASLQLHSLRAEVSSLSSILTRKEQEIEQTSCRSAHAGSDISQLQSLVLDLKENIEELKLFVELYKHESTDSRQLMESRDRELSEWARVHVLKYSLNESKLEQRVIAANEAEAMSQQRLATAEAEIAELGQKLETSRRDLVRLSDTLKSKHEECEAYVVEIESIGHAYEDIMSQNQQLLQQIIERDDHNTKLFMEGVKAKQSHDALHMEVCSLQRNLQHANTLMDLYKQKIFRLEDQLRVWSERARRLSEDGMQQSISLVNSQRKLTGMRGEAPKLRQSMDELQAKVGSNRLEVAELLTELEKERFSKKRIEDDLDLMSSKANSLREKTDNSAVLQKLHHEVKEYRGILKCGICHDRQKEVVIAKCYHLFCNQCIQKSLGSRQKRCPSCGLSFGVNDVKPIYI

SEQ ID NO: 75236 - protein, 84 aa, Setaria italica
  Transcript Sequence Number=SeqID_9262
TNQRHYVILNSESHHGRDCDDERHGDRRGFSYAGVRQDRSSRRSRLRSSSCGAVNWRRRGGSLGGGRRRGGRCGASVRRRRRRR

SEQ ID NO: 75237 - protein, 106 aa, Setaria italica
  Transcript Sequence Number=SeqID_9263
SSSSLLARKHSKSSFSVTSPKVARPEAALIPSKGAPSPDLLGIDDFKLDEPSPAVEEVNEEQQKEPEREPEDAKAEDSEFPEFDIVDKGVDEPSPAVEEVQQKEPE

SEQ ID NO: 75238 - protein, 89 aa, Setaria italica
  Transcript Sequence Number=SeqID_9264
GSCEHYEHIDDGRRVHRWWWRCIGLDGEIPSLAAAFLSSTSRRNYARAGAALQINPSLISPLFSLLDVVVMQSLSCFMLGEIQPIVNGI

SEQ ID NO: 75239 - protein, 60 aa, Setaria italica
  Transcript Sequence Number=SeqID_9265
KKRELLPQGLPKIGNSYIYIFKITILVEPTVLQCNGILLLQVLLCRLETCAQVPCNQVTV

SEQ ID NO: 75240 - protein, 79 aa, Setaria italica
  Transcript Sequence Number=SeqID_9266
  Subcellular localization annotation: CTP_CleavageSite=5; ConfidenceScore=5.33e-01
STSLRSAAPRPSPCIRDSPPVTCPPLEKKKAPFPSAMRRAIPCTHSPTPHPLFCFFRSPIRYLNPPARLARPRATATAI

SEQ ID NO: 75241 - protein, 37 aa, Setaria italica
  Transcript Sequence Number=SeqID_9267
SYSLVLAYNLSNQIKGGLQQMSSGTGFICCYVNKVNT

SEQ ID NO: 75242 - protein, 73 aa, Setaria italica
  Transcript Sequence Number=SeqID_9268
  Gene Ontology: Cellular component=intracellular
  Homolog annotation: Hit_ID=Q53NJ1; Match level="QueryCoverage=97%, HitCoverage=8%, E-value=1e-13, Identity=63%"; Hit description=BRCA1 C Terminus (BRCT) domain, putative
  Subcellular localization annotation: CTP_CleavageSite=39; ConfidenceScore=5.24e-01
MQQKQDNTPGSPKVQSLNSSPAPSPAPTTYYPFSETQTESQVVGYEEDLTGRQKIIDRVRSQSINVTPSTENP

SEQ ID NO: 75243 - protein, 303 aa, Setaria italica
  misc_feature (103)..(103): Xaa can be any naturally occurring amino acid
  Transcript Sequence Number=SeqID_9269
  Gene Ontology: Mol. function=ATP binding; Cellular component=integral to membrane
  Homolog annotation: Hit_ID=B4F8G6; Match level="QueryCoverage=98%, HitCoverage=80%, E-value=1e-127, Identity=78%"; Hit description=CF9
  Subcellular localization annotation: CTP_CleavageSite=26; ConfidenceScore=5.15e-01
SPTSPTFVRSDADEVPRSVRQLAKLAASPEVSATVSSLSEAVASGVLRGAGSSGAAPGSAGAVALSDRLVDKLFSESGERLASAVAGSFARHLVLAFYSAPSXRGRSSSPTMWVNVVATGKCRKAISNWVEVFVGTAVREFIDKTIHINTYEQLFEGLTNPKHDAKVKELLVSVCNGAVETLVKTTHHVLYKTDDKLDGSGNGNGNAEGGEGWVETVSSTLAVPSNRKFVLDVTGRVTFETVRSFLEFVLWKLQDGARKGGDTVVDNGLRVVRYMSDKSMVIATICITLCLHVLNGTRLLVTA

SEQ ID NO: 75244 - protein, 390 aa, Setaria italica
  Transcript Sequence Number=SeqID_9270
  Gene Ontology: Mol. function=hydrolase activity; Biological process =metabolic process
  Homolog annotation: Hit_ID=B6TXQ1; Match level="QueryCoverage=88%, HitCoverage=88%, E-value=0.0, Identity=93%"; Hit description =Phosphatase DCR2
  Pfam annotation: Domain name=Metallophos; Domain location=44-301; Score=68.2; E_value=3.1e-17; Accession=PF00149.20; Description =Calcineurin-like phosphoesterase
GADRPVPLALLLVLVAAAGKGKQGAHAGSSSSGRLQFRRDSGTFKVVQVADMHYADGRTTGCEDVPPSQVAGCSDLNTTAFLYRVFRAEDPDLVIFTGDNIYGADSTDAAKSMDAAIAPAIDMKLPWAAVIGNHDQEGTLSREGVMRHLVGMKNSLSGLNPEGVEIDGYGNYNLEVSGVEGTSLAEKSVLNLYFLDSGDYSTVPSIKGYGWIKASQQVWFQQTSSSLQRKYMNENPKQKEPAPGLVFFHIPLPEFSSFTAVNFTGVKQEGISSASINSGFFASMVEAGDVRAAFVGHDHLNDFCGKLSGIQLCYAGGFGYHAYGKAGWSRRARVVSVQLEKTDNGEWRGVKSIKTWKRLDDAHLSTIDSEVLWNRGSNGRRKKNPDGSNS

SEQ ID NO: 75245 - protein, 110 aa, Setaria italica
  Transcript Sequence Number=SeqID_9271
  Gene Ontology: Mol. function=protein dimerization activity
  Homolog annotation: Hit_ID=B6SSW7; Match level="QueryCoverage=83%, HitCoverage=13%, E-value=8e-42, Identity=85%"; Hit description =Transposon protein
LEQELKSRKLHFCYIPCAARTLKVIIEAGLENVKPILSKIREFILQTNSNQEMMEDFKHWTEVYHEGSWKLPFDHSANWSSDYNMLDVVKKVLHSPFLYILSSLVFGNVV

SEQ ID NO: 75246 - protein, 99 aa, Setaria italica
  Transcript Sequence Number=SeqID_9272
VSALRSISRRIKQSREVRRRHCRDFRDSCGFLAVLLSWLTFYFFSWVCLFWLQFGSVSVGFSSCVLGVEGSSRRRWVSSRSSPARRAPAGSGRRPRRSR

SEQ ID NO: 75247 - protein, 188 aa, Setaria italica
  Transcript Sequence Number=SeqID_9273
  Gene Ontology: Mol. function=oxidoreductase activity; Biological process=oxidation reduction
  Homolog annotation: Hit_ID=B6TTG8; Match level="QueryCoverage=81%, HitCoverage=48%, E-value=6e-64, Identity=78%"; Hit description =Retinol dehydrogenase 11
CVPWSLSLSVSSGNDAASEARKTIMEKNPMARIDVLKLDLSSLKSVRAFADQFNSMKLPLNILINNAGVMFCPFQLSKDGVEMQFATNHLGHFLLTNLLLDNMKATAKSTGIEGRIVNLSSVAHHHTYPKGIDFDKLNDEKIYNDKMAYGQSKLANLLHAKELSRRLKVLFCPPSIVPFTLISGRIET

SEQ ID NO: 75248 - protein, 320 aa, Setaria italica
  Transcript Sequence Number=SeqID_9274
  Gene Ontology: Mol. function=oxidoreductase activity; Biological process=oxidation reduction
  Homolog annotation: Hit_ID=B6TTG8; Match level="QueryCoverage=100%, HitCoverage=100%, E-value=1e-154, Identity=83%"; Hit description =Retinol dehydrogenase 11
  Pfam annotation: Domain name=Epimerase; Domain location=36-274; Score= -61.0; E_value=0.014; Accession=PF01370.13; Description=NAD dependent epimerasedehydratase family
  Pfam annotation: Domain name=adh_short; Domain location=34-181; Score= 21.0; E_value=5.7e-07; Accession=PF00106.17; Description=short chain dehydrogenase
  Pfam module annotation: Pfam domain module=Epimerase::adh_short; Domain location=36-274::34-181
  Subcellular localization annotation: CTP_CleavageSite=30; ConfidenceScore=5.02e-01
MGILSLITGKAGASGFGSASTAEQVTDGVDASRLTVVITGGASGIGLETSRVFALRGAHVIIAARNTEAASEARKTIMEKNPMARIDVLKLDLSSLKSVRAFADQFNSMKLPLNILINNAGVMFCPFQLSKDGVEMQFATNHLGHFLLTNLLLDNMKATAKSTGIEGRIVNLSSVAHHHTYPKGIDFDKLNDEKIYNDKMAYGQSKLANLLHAKELSRRLKEEGANITVNSVHPGLIMTNLMRHSFVLMKVLQVATYILWKNVPQGAATTCYVGLNPQLRGVTGKYFADCNVEKTSKLSRNDELAKQLWDFSEELIKSAQ

SEQ ID NO: 75249 - protein, 302 aa, Setaria italica
  Transcript Sequence Number=SeqID_9275
  Gene Ontology: Mol. function=protein binding
  Homolog annotation: Hit_ID=B4FNP5; Match level="QueryCoverage=99%, HitCoverage=79%, E-value=6e-51, Identity=35%"; Hit description=CXC domain containing TSO1-like protein 1
  Pfam annotation: Domain name=CXC; Domain location=4-35; Score=24.0; E_ value=5e-06; Accession=PF03638.7; Description=TesminTSO1-like CXC domain
  Pfam annotation: Domain name=CXC; Domain location=69-110; Score=69.5; E_value=1.2e-17; Accession=PF03638.7; Description=TesminTSO1-like CXC domain
  Pfam module annotation: Pfam domain module=CXC::CXC; Domain location =4-35::69-110
SSFAKCLKLYCVCFASGSHCTESCGCEPCLNKPMQGAPRTALVLPLKPVQTLETGQDSMEQLIRSPMDLIRRKCTCKKSGCLKKYCDCFQGGAGCSINCKCEDCRNPFGRKVGVILDGKSALAAPVLNERNGAEVDSSDDEDDYYMNRQLSPIPPSPVSRESSFQQETLVGVEVQTMNGHLYPKPLTQVRPEPPSWQLSRRPVEEARGEQWRFSRRPSEDGTSDAMEAHAMAQRDNKKPEIHVDRFSIPRCIEVMSAMADLSPIEKSLAPDVFLDPSNREIFLSLSVDIRPIWLRRKMKSLV

SEQ ID NO: 75250 - protein, 546 aa, Setaria italica
  Transcript Sequence Number=SeqID_9276
  Gene Ontology: Mol. function=carbon-nitrogen ligase activity, with glutamine as amido-N-donor; Cellular component=chloroplast; Biological process=translation
  Homolog annotation: Hit_ID=B9SQR9; Match level="QueryCoverage=99%, HitCoverage=99%, E-value=0.0, Identity=75%"; Hit description =Aspartyl/glutamyl-tRNA(Asn/Gln) amidotransferase subunit B, putative
  Pfam annotation: Domain name=GatB; Domain location=327-394; Score =101.7; E_value=2.5e-27; Accession=PF01162.11; Description=PET112 family, C terminal region
  Pfam annotation: Domain name=GatB_N; Domain location=65-308; Score =486.5; E_value=3.6e-143; Accession=PF02934.7; Description=PET112 family, N terminal region
  Pfam annotation: Domain name=GatB_Yqey; Domain location=396-543; Score=256.7; E_value=5.6e-74; Accession=PF02637.10; Description =GatBYqey domain
  Pfam module annotation: Pfam domain module=GatB::GatB_N::GatB_Yqey; Domain location=327-394::65-308::396-543
  Subcellular localization annotation: CTP_CleavageSite=36; ConfidenceScore=5.42e-01
MALTLLRGMRTPISFRSNSGLLFTVLRPRLSRFTTRAESAQATEPKAAPKSIQLATKEAAEQKTQGFEAVIGIETHVQLSTVTKAFCSCPYNYGSQPNSTICPTCMGHPGALPVLNEKVVECAVKLGLALNCEISMISKFDRKQYFYPDLPKGYQISQFDIPIAKKGYVNLDLPVEFGGGHRKFGITRVHMEEDAGKLLHSESRSYSQVDLNRAGVPLLEIVSEPDMRTGIEAAEYGAELQRIVRYLGVSNGNMQEGSLRCDVNVSVRPVGQSEFGTKVEIKNMNSFSEINRAIDYEISRQIMLHKEGQADQIVQETRLWDESSQKTFTMRKKEGLADYRYFPEPDLPEVVLSTDYIDEISKSMPELPEAKRRRYENMGLSMQDVLFLANDDNVAHFFDSTLEHGADAKLACNWIMGDIAAYLKNEKLSINETKLTPLELSELIESIKNGTISGKIGKEILVELIAKGGTVKGVIEEKDLVQIADPAAIEAMVDKVIADNPKQLEQYRAGKTKLQGFFAGQVMKASKGKANPVLLNKILGEKLNAN

SEQ ID NO: 75251 - protein, 76 aa, Setaria italica
  Transcript Sequence Number=SeqID_9277
MDVSPFAVVLLAALLSLLFFATRNRKPSDGWCRLPPSPRGLPLLGHLPLLGPLPHRKLQTMAASHGPVMLLRLGRV

SEQ ID NO: 75252 - protein, 222 aa, Setaria italica
  misc_feature (157)..(157): Xaa can be any naturally occurring amino acid
  Transcript Sequence Number=SeqID_9278
  Gene Ontology: Mol. function=hydrolase activity, acting on carbon -nitrogen (but not peptide) bonds; Cellular component=plasma membrane; Biological process=nitrogen compound metabolic process
  Homolog annotation: Hit_ID=Q6H849; Match level="QueryCoverage=97%, HitCoverage=59%, E-value=1e-115, Identity=91%"; Hit description =Bifunctional nitrilase/nitrile hydratase NIT4
  Pfam annotation: Domain name=CN_hydrolase; Domain location=1-183; Score=186.4; E_value=8e-53; Accession=PF00795.14; Description=Carbon- nitrogen hydrolase
MGLLSNTIFTTDKAERLIAEAAGYGSQLIVFPEAFIGGYPRGSTFGYGISICIANPKDKGKEAFRRYHAAAIDVPGPEVTRLAAMAGKYKIFLVMGVIEREGYTLYCSVLFFDPLGRYLGKHRKLMPTALERIIWGFGDGSTIPVYDTPLGKIGALXCWENKMPLLRTALYGKGIEIYCAPTADSRPVWQASMTHIALEGGCFVLSANQFCRRKDYPAPPEY

SEQ ID NO: 75253 - protein, 361 aa, Setaria italica
  Transcript Sequence Number=SeqID_9279
  Gene Ontology: Mol. function=hydrolase activity, acting on carbon -nitrogen (but not peptide) bonds; Cellular component=plasma membrane; Biological process=nitrogen compound metabolic process
  Homolog annotation: Hit_ID=Q6H849; Match level="QueryCoverage=100%, HitCoverage=100%, E-value=0.0, Identity=88%"; Hit description =Bifunctional nitrilase/nitrile hydratase NIT4
  Pfam annotation: Domain name=CN_hydrolase; Domain location=31-220; Score=234.9; E_value=2e-67; Accession=PF00795.14; Description=Carbon- nitrogen hydrolase
MALVTSGSGGGPVIAEVEMNGGADPSATTVRATVVQASTIFYDTPATLDKAERLIAEAAGYGSQLIVFPEAFIGGYPRGSTFGYGISICIANPKDKGKEAFRRYHAAAIDVPGPEVTRLAAMAGKYKIFLVMGVIEREGYTLYCSVLFFDPLGRYLGKHRKLMPTALERIIWGFGDGSTIPVYDTPLGKIGALICWENKMPLLRTALYGKGIEIYCAPTADSRPVWQASMTHIALEGGCFVLSANQFCRRKDYPAPPEYEFAGLGEEPSADTVVCPGGSVIISPSGEVLAGPNYEGEALITADLDLGEIVRAKFDFDVVGHYARPEVLSLVVNDQPQLPVSFTSSADKASDVKSDNITKSY

SEQ ID NO: 75254 - protein, 95 aa, Setaria italica
  Transcript Sequence Number=SeqID_9280
  Subcellular localization annotation: CTP_CleavageSite=70; ConfidenceScore=5.09e-01
KAPTFPQRTDGKRRNKHGLIQGAGFPTADGANTRRNRGTPPAPSSSDHEAAAGHSSPSFSPTNSLHRETTAAHRLKSPMHARGPPDQAPRPKLPP

SEQ ID NO: 75255 - protein, 67 aa, Setaria italica
  Transcript Sequence Number=SeqID_9281
  Homolog annotation: Hit_ID=B6SLB1; Match level="QueryCoverage=95%, HitCoverage=38%, E-value=2e-13, Identity=70%"; Hit description =Serine-rich protein
  Subcellular localization annotation: CTP_CleavageSite=45; ConfidenceScore=5.76e-01
MAAAAATTRRPSGPVLSAAHYRSASPTRIKLAGAGARSPAGQSVSVSSPAGGARSRRTCMCSPTNHP

SEQ ID NO: 75256 - protein, 74 aa, Setaria italica
  Transcript Sequence Number=SeqID_9282
  Subcellular localization annotation: CTP_CleavageSite=61; ConfidenceScore=5.32e-01
RSLPWSHLAQGHSSQRKRKSSSGTFGLVLLRESGWVGACLRVLTAGSTHKQFAKATTSTVSSDQVQSHSLCQPA

SEQ ID NO: 75257 - protein, 120 aa, Setaria italica
  Transcript Sequence Number=SeqID_9283
  Gene Ontology: Mol. function=hydrolase activity, hydrolyzing O -glycosyl compounds; Biological process=carbohydrate metabolic process
  Homolog annotation: Hit_ID=Q5NBJ1; Match level="QueryCoverage=100%, HitCoverage=12%, E-value=3e-32, Identity=58%"; Hit description=Alpha- glucosidase-like
WQANDGIKSSVVGLLSGGLSGFPLNHSDAGGYCTVDLPFLRYRRGEELLLRWMEVNAFTVVLRTHEGNKPASNCQFYSNSRTLAHFARCARMYKAWEFYRAELVAEAAAAGLPVARHLFL

SEQ ID NO: 75258 - protein, 271 aa, Setaria italica
  misc_feature (124)..(124): Xaa can be any naturally occurring amino acid
  misc_feature (159)..(159): Xaa can be any naturally occurring amino acid
  Transcript Sequence Number=SeqID_9284
  Gene Ontology: Mol. function=hydrolase activity
  Homolog annotation: Hit_ID=B9RL97; Match level="QueryCoverage=96%, HitCoverage=59%, E-value=1e-108, Identity=68%"; Hit description =Catalytic, putative
  Pfam annotation: Domain name=Abhydrolase_3; Domain location=69-249; Score=-56.6; E_value=0.00067; Accession=PF07859.5; Description =alphabeta hydrolase fold
SCSLFTFSFVLCYLFLSCYTFLLMPGFIQVLYYYFFSSQVRRSVVYGDQPRNRLDLYIPTSTTGLKPVVAFVTGGAWIIGYKGWGALLGRRLAERGIIVACIDYRNFPQGTIGDMVEDVSQGIXFVCNNIASYGGDPNRIYLVGQSAGAHIATCALLNXQAIRECGEGDTSSWSVSQIKAYFGISGGYNLLNLVDHFHRRGLYRSIFLSIMEGEESLQKFSPQVMIKASSARSAVPLLPHIILFHGTGDNSIPSAESQAFAPCSCKASTNA

SEQ ID NO: 75259 - protein, 60 aa, Setaria italica
  Transcript Sequence Number=SeqID_9285
EAIKQSTAFEEHRKVHYDEYHKMKELLQKGTMTDDADEDESEPDNRKSDSSVPVRTRNCD

SEQ ID NO: 75260 - protein, 86 aa, Setaria italica
  Transcript Sequence Number=SeqID_9286
RFLWVTNNGSANFDYHKWRNLSHIFFLLTILCSEQGRTNNSCPFVAFEEHRKVHYDEYHKMKELLQKGTMTDDADEDGIDSDNSTE

SEQ ID NO: 75261 - protein, 143 aa, Setaria italica
  Transcript Sequence Number=SeqID_9287
  Gene Ontology: Mol. function=protein phosphatase inhibitor activity; Biological process=regulation of phosphoprotein phosphatase activity
  Homolog annotation: Hit_ID=B6SQN8; Match level="QueryCoverage=86%, HitCoverage=81%, E-value=4e-22, Identity=45%"; Hit description =Protein phosphatase inhibitor 2 containing protein
  Pfam annotation: Domain name=IPP-2; Domain location=7-138; Score= -6.9; E_value=4.3e-06; Accession=PF04979.6; Description=Protein phosphatase inhibitor 2 (IPP-2)
MKAKEPKKAGGRVKWDEENLNDIESNKPEREKITEPKTPYHPMIDEDEGPVSPLQLSEEPVDKSAHADAIKTALAEAVSSGKIFDRNSWESCDNEEAIKQSTAFEEHRKVHYDEYHKMKELLQKGTMTDDADEDESEPDNRKE

SEQ ID NO: 75262 - protein, 132 aa, Setaria italica
  Transcript Sequence Number=SeqID_9288
  Homolog annotation: Hit_ID=B0BLA9; Match level="QueryCoverage=62%, HitCoverage=46%, E-value=2e-23, Identity=63%"; Hit description =CM0545.330.nc protein
  Pfam annotation: Domain name=DnaJ_CXXCXGXG; Domain location=73-132; Score=-22.1; E_value=0.0017; Accession=PF00684.11; Description=DnaJ central domain (4 repeats)
  Subcellular localization annotation: CTP_CleavageSite=33; ConfidenceScore=5.13e-01
SSPAPPSFPYRQHHGGAPSVPLAPPVASPPPPRALAAASYGYGGGDLLRPIDTQTIIIAAAVVSAVSLSLVLGLKGDPVPCDRCAGNGGTKCVFCNDGKMKVENGVVECRVCRGAGLILCKKCAGSGYSKRL

SEQ ID NO: 75263 - protein, 101 aa, Setaria italica
  Transcript Sequence Number=SeqID_9289
  Homolog annotation: Hit_ID=Q01AF2; Match level="QueryCoverage=63%, HitCoverage=31%, E-value=9e-10, Identity=48%"; Hit description =Nucleolar protein (NOP16) involved in 60S ribosomal subunit biogenesis (ISS)
  Pfam annotation: Domain name=Nop16; Domain location=2-92; Score=15.1; E_value=1.5e-06; Accession=PF09420.2; Description=Ribosome biogenesis protein Nop16
DIAAARAPIPEFEPIDTGSDLENDDLKSALGKKRKDGKSAPLQPLTKIQRVCIGRLIEKYGDDFKAMFMDTKLNAMQHSVGTLKKLCERYHADGKPFVYPL

SEQ ID NO: 75264 - protein, 223 aa, Setaria italica
  Transcript Sequence Number=SeqID_9290
  Gene Ontology: Mol. function=transferase activity, transferring groups other than amino-acyl groups
  Homolog annotation: Hit_ID=B6TCS3; Match level="QueryCoverage=99%, HitCoverage=49%, E-value=1e-73, Identity=57%"; Hit description =Anthranilate N-benzoyltransferase protein 1
  Pfam annotation: Domain name=Transferase; Domain location=1-220; Score=-178.2; E_value=0.029; Accession=PF02458.7; Description =Transferase family
NPDAFAVFCPKLTLTQRSGPVASKVFDITKDHVAALKQACGGVSTFCALSAHVWRCVCVARGLPADATTRLTLPANVRRRIKPPVPDSYFGNALIWVGTSGVVRDVTSEALADTAGRIRGAVRRMDDDVVRSAIDYFELAENNGKPIPGDMPETELRVISWLGMPVYDADYGWGKPQMMVRAESERSGFVYLINDGAGVQVVVCAEAASLKEFEKLLYANMWP

SEQ ID NO: 75265 - protein, 127 aa, Setaria italica
  Transcript Sequence Number=SeqID_9291
  Gene Ontology: Mol. function=binding
  Homolog annotation: Hit_ID=Q84UC4; Match level="QueryCoverage=81%, HitCoverage=8%, E-value=4e-37, Identity=72%"; Hit description=HASTY
CHIIQVCCLHLSFLPLSVWITFQDPSNNSRLARLQICSSFIRISRAADKALLPHMKNIADTMAYLQGEGRLLRGEHNHLCEAFLVMASSAGIQQQQEVLAWLLEPLNKLWTQVEWQTAYLSDPTGLY

SEQ ID NO: 75266 - protein, 814 aa, Setaria italica
  misc_feature (349)..(349): Xaa can be any naturally occurring amino acid
  Transcript Sequence Number=SeqID_9292
  Gene Ontology: Mol. function=binding
  Homolog annotation: Hit_ID=Q84UC4; Match level="QueryCoverage=99%, HitCoverage=67%, E-value=0.0, Identity=50%"; Hit description=HASTY
RLTSAASFFKVDEKHLVAALSEHSKQQMNLAKQHAGTVTAVLNAVNAYAEWAPVTDLAKYGLIHGCGSLLSYSDFRLHACECFKEICQRKRPVDVAVSEYDAAMCNIFQVLMNISQQFLTRPGMQPSSIDESEYEFATCVCETMVALGSSNMQCILADGARTFQFLQQMLEYYKHYKIALHFQSLLFWLVVLREPSKAKSVARVSGDNFAAGNSASTGDLSTEKEKKGVSVFVTDEIYSTILDVSFKRMLKNSGSASSGLLELWSEELEGKSDFCNYRTKLLDLIKVIASQRPVIAAASIVQRINIVFGDANQATKSPQYLDAMEGAQLGLEAVVSAIFDGSVDCGKNXEEMKSQLHKIFEGLLQQLLSLKWTEPNLAVIHGHYLDALGPFLRHYPDAVASVVNKLFELLTSLPITFQDPSNNSRLARLQICSSFIRISRAADKALLPHMKNIADTMAYLQGEGRLLRGEHNHLCEAFLVMASSAGIQQQQEVLAWLLEPLNKLWTQVEWQTAYLSDPTGLTNMFADSQFMWSIYHTVTFFEKALKRSGTKKSTATPQAPTTTAAPGYLHPMSSHLAWILPPLLRLLRCIHALWAEPFAQSQTGEIKAAKSMTVAEQASLLGETGKLTKGQVAPADGLLDVQRDGESKENNIKNWLRGIRDSGYNVLGLAATLGEAFFRCAEASSVTLALMENVQVMEFRHLRQLIHLVIIPFVKHCPADLWQVWLVNLLQPLVVHCQQALHYSWSSLLHEGRAKVPDNIGNLSGSELKVEVMEEKLLRDLTREVCSVLWALASPGLNSGLPSLEQLGPSNRMD

SEQ ID NO: 75267 - protein, 306 aa, Setaria italica
  Transcript Sequence Number=SeqID_9293
  Gene Ontology: Mol. function=binding
  Homolog annotation: Hit_ID=Q84UC4; Match level="QueryCoverage=86%, HitCoverage=22%, E-value=3e-78, Identity=56%"; Hit description=HASTY
IPFVKHCPADLWQVWLVNLLQPLVVHCQQALHYSWSSLLHEGRAKVPDNIGNLSGSELKVEVMEEKLLRDLTREVCSVLWALASPGLNSGLPSLEQLGPSNRMDSLKNLESFASSSLTGFLMLHVGTALPALRISVEVFSWTDSDAVTKVIPFCGALIHLAVASNQAELRQFVAKDLFSSIIQGLAVESNSVMSAELVGLCREIYVYLSDRDPAPRQVLLSLPHIKQEDLLAFDDSLSKTASPKEQKQHMRSLLLLATGNKLRALAAQKTTNVITNVTTRNRSSAAHHGSIAEEDGQIGLAALSST

SEQ ID NO: 75268 - protein, 183 aa, Setaria italica
  Transcript Sequence Number=SeqID_9294
  Gene Ontology: Mol. function=signal transducer activity; Cellular component=chloroplast envelope; Biological process=signal transduction
  Homolog annotation: Hit_ID=B6U6V2; Match level="QueryCoverage=97%, HitCoverage=47%, E-value=4e-85, Identity=87%"; Hit description=ABC -type transport system involved in resistance to organic solvents, periplasmic component
  Pfam annotation: Domain name=MCE; Domain location=49-126; Score=72.3; E_value=1.8e-18; Accession=PF02470.12; Description=mce related protein
HPPSPWGTYGFGKRSVWEGGVGLFMVSGAALLALALAWLRGFQLRSRFRKYNTVFEFTQACGICVGTPVRIRGVTVGSVVRVDSSLRSIDALVEVEDDKIIIPRNSLVEVNQSGLLMETLIDITPKDPLPAPSVGPLHPDCAKEGLILCDKQRIKGQQGVSLDAMVGIFTRLGRDMEEIGVSK

SEQ ID NO: 75269 - protein, 88 aa, Setaria italica
  Transcript Sequence Number=SeqID_9295
FFLCQIYFFVLMINRKNYITNLLVHFGGEYNTNIQNDKIAKAELLNMKVQTYTHTQHRCAILFQQRQSTRFEGIEVHELTPKLQKECL

SEQ ID NO: 75270 - protein, 205 aa, Setaria italica
  misc_feature (171)..(171): Xaa can be any naturally occurring amino acid
  misc_feature (185)..(185): Xaa can be any naturally occurring amino acid
  Transcript Sequence Number=SeqID_9296
  Gene Ontology: Mol. function=transcription regulator activity; Cellular component=nucleus; Biological process=regulation of transcription
  Homolog annotation: Hit_ID=Q5ULY0; Match level="QueryCoverage=47%, HitCoverage=33%, E-value=8e-28, Identity=74%"; Hit description=Basic helix-loop-helix protein (Fragment)
  Pfam annotation: Domain name=HLH; Domain location=47-96; Score=61.3; E_value=3.7e-15; Accession=PF00010.18; Description=Helix-loop-helix DNA-binding domain
MDAQQLDLILRHHHQSMANVCESEDALGSSESEPARPARPRGKRSRAAEVHNLSEKRRRSRINEKMKALQTLIPNSSKTDKASMLDDAIEYLKQLQLQVQMLSMRNGLYLPPANLSGGPEALAPSEVCATLNQSGVKASESGVVLPMNQISLAHHSNHDQRHNKPLVLQSXPTSSTTIEPRFLQXPAQSNLQSFLLALPPEMILK

SEQ ID NO: 75271 - protein, 310 aa, Setaria italica
  Transcript Sequence Number=SeqID_9297
  Gene Ontology: Cellular component=endoplasmic reticulum
  Homolog annotation: Hit_ID=Q56X72; Match level="QueryCoverage=72%, HitCoverage=45%, E-value=3e-71, Identity=55%"; Hit description =Reticulon-like protein B21
  Pfam annotation: Domain name=Reticulon; Domain location=19-188; Score= 94.6; E_value=3.5e-25; Accession=PF02453.9; Description=Reticulon
PKLSKNSSPSRSHERMQNIVNLVMWRDVSKSALVFGLGTFLLISSSYAKDLNFNTITAASYAGLIYLGLRFLRKSIMNRGETVECDDERDEERCYLVGEEEAIWLLRLVLPYINEVLLNLRCLFSGEPATTMKLALLLFAMARCGNFVTLWTLAKLVFFGVFIIPKVCASYSTQLARYGKFWLERFSDAWESCSHKKAVVAAVFTLVWNVSSTVARVWAVFMLVVAMKLYQQRMVEFGWSSSVDGGAMADDEAAADEAHGEEPAAKPSPSRTQGEAQVFGTVAAPRYRRAPVSGEFARERLRVRGGIQPR

SEQ ID NO: 75272 - protein, 81 aa, Setaria italica
  Transcript Sequence Number=SeqID_9298
  Gene Ontology: Mol. function=protein transporter activity; Cellular component=mitochondrial inner membrane; Biological process=protein transport
  Homolog annotation: Hit_ID=B6T2K1; Match level="QueryCoverage=100%, HitCoverage=42%, E-value=2e-34, Identity=87%"; Hit description =Protein translocase/ protein transporter
  Pfam annotation: Domain name=Tim17; Domain location=1-51; Score= -23.8; E_value=0.027; Accession=PF02466.11; Description =Tim17Tim22Tim23 family
LRGKDDMINAGMAGCCTGLALSFPGAPQAMFHSCVTFAAFSCIMDGLNKQQAAMALTLDGKSPSAKSPEAGVLPPFTLPPL

SEQ ID NO: 75273 - protein, 190 aa, Setaria italica
  misc_feature (10)..(10): Xaa can be any naturally occurring amino acid
  misc_feature (168)..(168): Xaa can be any naturally occurring amino acid
  Transcript Sequence Number=SeqID_9299
  Gene Ontology: Mol. function=protein transporter activity; Cellular component=mitochondrial inner membrane; Biological process=protein transport
  Homolog annotation: Hit_ID=B6T2K1; Match level="QueryCoverage=100%, HitCoverage=100%, E-value=4e-76, Identity=78%"; Hit description =Protein translocase/ protein transporter
  Pfam annotation: Domain name=Tim17; Domain location=22-140; Score =133.7; E_value=6e-37; Accession=PF02466.11; Description =Tim17Tim22Tim23 family
MAARRGREWXDGDELGGPPPTPLAAPVVCLLRSAGELAAGAFVGSLVGYGKGLIMNQGMKASLSNAGSSAKTFAALAGVQSFIMCLLRRLRGKDDMINAGMAGCCTGLALSFPGAPQAMFHSCVTFAAFSCIMDGLNKRMQAAMALTLDGKSPSAKSPEAGVLPPFTXPPLLDASDALASFCQTLVKPNH

SEQ ID NO: 75274 - protein, 170 aa, Setaria italica
  Transcript Sequence Number=SeqID_9300
  Homolog annotation: Hit_ID=Q9XIG0; Match level="QueryCoverage=81%, HitCoverage=33%, E-value=6e-17, Identity=35%"; Hit description =T10P12.8 protein
  Pfam annotation: Domain name=DUF793; Domain location=4-170; Score= -148.3; E_value=3.5e-06; Accession=PF05633.3; Description=Protein of unknown function (DUF793)
TTAMPSGEEADLEAFQRHVAVTLAELVPGGEAGGDAAAATAGGEEFLSVAWIRRLLEGFVICQEEFRVVVAQARRRGALPAAAEKMVAEFHERAVKALDVCNAARDGVDQVRRWERLADIAASVLRAPGEIHEGQLRRARKALSDLSVLLVDDTAASGSGGVASFLASHR

SEQ ID NO: 75275 - protein, 247 aa, Setaria italica
  Transcript Sequence Number=SeqID_9301
SDLQHRSAERHLEGVAAKVAEMVKKGKKSGKGRSVVEAAEVRRLGKWYGDAMEVMLEHARMEETLIFPDIQRASFPGVCDKVNEQHGRHLPMMNGIKEDIKTLLTLELGSPLFHEVLVNLSVRLKALQDHTKEHFKEEEGDMLPRLEGVRRMQREEGKVSDKSSSAWASEAVATMEVTHSKLFPFFMTGLLPQEAVHYLDLVCRCTKNTRHLVSMLRSLAERLEDANPSIIHNNPTKLYEHLLVKSP

SEQ ID NO: 75276 - protein, 117 aa, Setaria italica
  Transcript Sequence Number=SeqID_9302
  Gene Ontology: Mol. function=ATP-dependent helicase activity; Cellular component=nucleus; Biological process=ribosome biogenesis
  Homolog annotation: Hit_ID=Q5VRY0; Match level="QueryCoverage=100%, HitCoverage=18%, E-value=4e-62, Identity=96%"; Hit description=DEAD -box ATP-dependent RNA helicase 39
  Pfam annotation: Domain name=DEAD; Domain location=3-104; Score=-1.1; E_value=5.1e-05; Accession=PF00270.21; Description=DEADDEAH box helicase
ARFRSTMVSGCTRLRPQEDSLNMPVDMVVGTPGRILDHIKDGNMVYGDIKYLVLDEADTMFDQGFGPDIRKFLAPLKNRATKPGDQGFQTVLVTATMTKAVQKLIDEEFEGIVHLRT

SEQ ID NO: 75277 - protein, 255 aa, Setaria italica
  Transcript Sequence Number=SeqID_9303
  Gene Ontology: Mol. function=ATP-dependent helicase activity; Cellular component=chloroplast; Biological process=protein amino acid phosphorylation
  Homolog annotation: Hit_ID=Q5VRY0; Match level="QueryCoverage=100%, HitCoverage=40%, E-value=1e-99, Identity=74%"; Hit description=DEAD -box ATP-dependent RNA helicase 39
  Pfam annotation: Domain name=Helicase_C; Domain location=14-91; Score= 105.4; E_value=2e-28; Accession=PF00271.23; Description=Helicase conserved C-terminal domain
FCNTLNSSRAVDHFLTENQISTVNYHGEVPAEERVENLNKFRNEEGDCPTLVCTDLAARGLDLDVDHVIMFDFPSNSIDYLHRTGRTARMGAKGKVTSLVAKKNVALATKIEEAMKKNESLEALTTNNVRRAANPQSASTKGRTSRSAKTSSALKVVNQKGRRGVVLSSKSSRTPKDTTSTRRRLPPKIQPKAKKSAAPQKAKLVKPANNSVKDSKSKAKPAGRKAKGDILNKLGTKLSVVGFRGRSSGKSAQSS

SEQ ID NO: 75278 - protein, 600 aa, Setaria italica
  misc_feature (22)..(22): Xaa can be any naturally occurring amino acid
  misc_feature (422)..(422): Xaa can be any naturally occurring amino acid
  Transcript Sequence Number=SeqID_9304
  Gene Ontology: Mol. function=ATP-dependent helicase activity
  Homolog annotation: Hit_ID=Q5VRY0; Match level="QueryCoverage=94%, HitCoverage=84%, E-value=0.0, Identity=79%"; Hit description=DEAD -box ATP-dependent RNA helicase 39
  Pfam annotation: Domain name=DEAD; Domain location=74-257; Score =192.5; E_value=1.1e-54; Accession=PF00270.21; Description=DEADDEAH box helicase
  Pfam annotation: Domain name=Helicase_C; Domain location=327-436; Score=82.6; E_value=1.4e-21; Accession=PF00271.23; Description =Helicase conserved C-terminal domain
  Pfam module annotation: Pfam domain module=DEAD::Helicase_C; Domain location=74-257::327-436
KLLLERLRLRHLKDSSSPGSPXPSPAGKAARGGERTSQHPQQGRRVEAAESFEELGLGEEVMAALGEMGISKPTEIQCVGVPAVLDGTSVVLGSHTGSGKTLAYLLPLVQLLRRDEAMLGMSMKPRRPRAVVLCPTRELTEQVYRVAKSISHHARFRSTMVSGGTRLRPQEDSLNMPVDMVVGTPGRILDHIKDGNMVYGDIKYLVLDEADTMFDQGFGPDIRKFLAPLKNRATKPGDQGFQTVLVTATMTKAVQKLIDEEFEGIVHLRTSTFQKRVATARHDFIKLTGSENKLEALLQVLEPSLAKGNKIMVFCNTLNSSRAVDHFLTENQISTVNYHGEVPAEERVENLNKFRNERGDCPTLVCTDLAARGLDLDVDHVIMFDFPSNSVCVTLTTWSDCIYSHHSDSYAHLSCNYLLCFXIDYLHRTGRTARMGAKGKVTSLVAKKNVALATKIEEAMKKNESLEALTTNNVRRAANPQSASTKGRTSRSAKTSSALKVVNQKGRRGVVLSSKSSRTPKDTTSTRRRLPPKIQPKAKKSAAPQKAKLVKPANNSVKVSKSKAKPAGRKAKGDILNKLGTKLSVVGFRGRSSGKSAQSS

SEQ ID NO: 75279 - protein, 26 aa, Setaria italica
  Transcript Sequence Number=SeqID_9305
WLQFLICYSLCWFLISHEVKHSLCSI

SEQ ID NO: 75280 - protein, 172 aa, Setaria italica
  misc_feature (13)..(13): Xaa can be any naturally occurring amino acid
  Transcript Sequence Number=SeqID_9306
  Gene Ontology: Cellular component=endoplasmic reticulum membrane; Biological process=transport
  Homolog annotation: Hit_ID=B6T3J9; Match level="QueryCoverage=100%, HitCoverage=89%, E-value=7e-55, Identity=66%"; Hit description =Prenylated rab acceptor family protein
  Pfam annotation: Domain name=PRA1; Domain location=14-160; Score =179.2; E_value=1.1e-50; Accession=PF03208.11; Description=PRA1 family protein
GGSPLDFISRAKXRGASALATRRPWRELGDVHAIGLPPSLGDAYLRVRANLAHFAMNYAIVVLVVVFLSLLWHPVSLIVFLVCMLAWLVLYFLRDEPLVLFGRVVADGYVLAVLAVVTLGLLLFTGATANILSSLLIGLVLVVLHAALHKAEDNADDEVGRWYAPVPQQPSH

SEQ ID NO: 75281 - protein, 95 aa, Setaria italica
  Transcript Sequence Number=SeqID_9307
  Gene Ontology: Mol. function=protein dimerization activity; Cellular component=nucleus; Biological process=regulation of transcription, DNA-dependent
  Homolog annotation: Hit_ID=B6SNH0; Match level="QueryCoverage=78%, HitCoverage=25%, E-value=6e-29, Identity=81%"; Hit description=BZIP transcription factor protein
MLRQSFIAETLPLVSLLWLVSIVCLFLMPGLPNRSPAAPSSAGRDLGMVTGKTSSENPDILELILHGRRCKGTRAKIKLGNYTTYWRLAGGLWKG

SEQ ID NO: 75282 - protein, 159 aa, Setaria italica
  Transcript Sequence Number=SeqID_9308
  Gene Ontology: Mol. function=protein dimerization activity; Cellular component=nucleus; Biological process=regulation of transcription, DNA-dependent
  Homolog annotation: Hit_ID=B6SNH0; Match level="QueryCoverage=90%, HitCoverage=44%, E-value=1e-32, Identity=59%"; Hit description=BZIP transcription factor protein
IERSKVILEAECCRLSYALQCCAAENMALRQSLLKDRPVGAPTAMQERAVRAETLPLVSLLWLVSIVCLFLTPGVPNRSLVAPSSLGRDLAKLARTSTKGVKMFRVATNRDDPRSLELVRLGRRCRCARARIKSPWLPWYAVAATAGRRSSCKPSLSCC

SEQ ID NO: 75283 - protein, 254 aa, Setaria italica
  Transcript Sequence Number=SeqID_9309
  Homolog annotation: Hit_ID=A5HEG9; Match level="QueryCoverage=89%, HitCoverage=86%, E-value=1e-102, Identity=80%"; Hit description =Growth-regulating factor
  Pfam annotation: Domain name=QLQ; Domain location=98-134; Score=62.0; E_value=2.3e-15; Accession=PF08880.3; Description=QLQ
  Pfam annotation: Domain name=WRC; Domain location=165-210; Score =92.7; E_value=1.3e-24; Accession=PF08879.2; Description=WRC
  Pfam module annotation: Pfam domain module=QLQ::WRC; Domain location =98-134::165-210
GGGGGGGDNPQLEAAPVAPAPAEGEALQEAVAQGTGQESEGEKADREGEKDDGACRDLVLVEDPEAVAVEDPEEAAAIAALQEEMKALVASIPDGAGAAFTAMQLQELEQQSRVYQYMAARVPVPTHLVFPIWKSVTGASSEGAQKYPTLMGLATLCLDFGKNPEPEPGRCRRTDGKKWRCWRSTIPNEKYCERHMHRGRKRPVQLVVEDNEPDSASGSKSTPGKATEGAKKADDKTPSSKKLAVAAPAAVQST

SEQ ID NO: 75284 - protein, 158 aa, Setaria italica
  Transcript Sequence Number=SeqID_9310
  Homolog annotation: Hit_ID=B6T926; Match level="QueryCoverage=99%, HitCoverage=72%, E-value=2e-56, Identity=71%"; Hit description =Nucleic acid binding protein
  Pfam annotation: Domain name=DUF393; Domain location=47-158; Score =164.1; E_value=4.1e-46; Accession=PF04134.4; Description=Protein of unknown function, DUF393
PSSSAAASDLLVIDEDPPRAASPSAATATATGTMAATMPTVLQPRVLIYDGVCHLCHRGVKWVIRADKHAKIKFCCVQSKAAEPYLRLVGMDREDVLRRVLFIEGPEAYYEGSTAALKVASYLPLPYSVLSSLLIVPTPLRDAVYDYIAKNRYDWFGK

SEQ ID NO: 75285 - protein, 55 aa, Setaria italica
  Transcript Sequence Number=SeqID_9311
TLKIKMENHFTKSKKLLFSSQHLSSFQIITSRNQQIIFLSKKTVLTELWLDSENQ

SEQ ID NO: 75286 - protein, 139 aa, Setaria italica
  Transcript Sequence Number=SeqID_9312
  Gene Ontology: Mol. function=ligase activity, forming aminoacyl-tRNA and related compounds; Cellular component=cytoplasm; Biological process=alanyl-tRNA aminoacylation
  Homolog annotation: Hit_ID=Q94GG9; Match level="QueryCoverage=100%, HitCoverage=39%, E-value=3e-67, Identity=87%"; Hit description =Putative cytosolic tRNA-Ala synthetase
  Pfam annotation: Domain name=tRNA-synt_2c; Domain location=1-138; Score=-265.3; E_value=6.1e-08; Accession=PF01411.11; Description =tRNA synthetases class II (A)
ESKSHTRWPSSPVVPVDDPTLLFANAGMNQFKPVFLGTAAPDSPLGRLRRACNTQKCIRAGGKHNDLDDVGKDTYHHTFFEMLGNWSFGDYFKEEAIGWAWELLTKVYKLPTDRIYATYFGGDEKSGLAADNESKNIWL

SEQ ID NO: 75287 - protein, 840 aa, Setaria italica
  misc_feature (731)..(731): Xaa can be any naturally occurring amino acid
  Transcript Sequence Number=SeqID_9313
  Gene Ontology: Mol. function=ligase activity, forming aminoacyl-tRNA and related compounds; Cellular component=cytoplasm; Biological process=alanyl-tRNA aminoacylation
  Homolog annotation: Hit_ID=P36428; Match level="QueryCoverage=99%, HitCoverage=83%, E-value=0.0, Identity=65%"; Hit description=Alanyl -tRNA synthetase, mitochondrial
  Pfam annotation: Domain name=DHHA1; Domain location=760-833; Score =34.1; E_value=5.8e-07; Accession=PF02272.11; Description=DHHA1 domain
  Pfam annotation: Domain name=tRNA-synt_2c; Domain location=1-477; Score=651.2; E_value=9.6e-193; Accession=PF01411.11; Description =tRNA synthetases class II (A)
  Pfam annotation: Domain name=tRNA_SAD; Domain location=575-634; Score= 80.5; E_value=6e-21; Accession=PF07973.6; Description=Threonyl and Alanyl tRNA synthetase s
  Pfam module annotation: Pfam domain module=DHHA1::tRNA-synt_2c::tRNA _SAD; Domain location=760-833::1-477::575-634
VLFGWAWELLTKVYKLPTDRIYATYFGGDEKSGLAADNESKNIWLKYLPKEKVLPFGCKDNFWEMGDTGPCGPCTEIHFDRIGNRDAASLVNNDDPTCIEIWNLVFIQFNREADGSLRTLPAKHVDTGMGFERLTSILQNKMSNYDTDVFMPLFDAIHKLAGDGIQPYSGKVGSDDVGKVDMAYRVVADHIRTLSFAITDGSQPGNEGREYVLRRILRRAVHFGHQKLKTKPKFFSSLVNVFVQVMGDVFPEVKENEKKIQDIIRDEEESFENTLAKGYEKFKKAADAVKENGGTVLSGQDAFILWDTYGYPIDLTEVMAIDYGLAVDKEGFSASMEEARQKARNARNKAGGNSIVMDANATAQLRNQGFASTDDSPKFMWPKEHGSVVKAIYTGSAYIATASGDVDFGLVLESTSFYAEQGGQIYDTGIIEGSFGTFNVNNVQVFAGYVLHIGSFTEGSKALSVGDTVICKVDYDRRTLIAPNHTCTHMLNFALREVLGDHVDQKGSIVLPEKLRFDFSHGKPVQPEDLRKIESIVNQQIKDELDVYASEIKLADAKRINGLRAVFGEIYPDPVRVVSVGRKVEDLLADPENKEWLSISTELCGGTHISNTRDAKAFALLSEEGIAKGVRRITAVTAGCAADAMELASSIDCDISGASQLEGAMLEKKIASIKNKLDAAAIPAARKADLRGKVSKLEDQLRKAKKKMGEQNIQKAVKTAMDAAEAASFQXKPFCVTHVDVGLDTTAVREAVIKVMDQKGLPIMLFSKDEASNKAVIYAGVPPNTPNGFKVLDWLTPSIAPLKGRGGGGKNGVAQGQGSDASQLKEAMELANNIAAMKLS

SEQ ID NO: 75288 - protein, 49 aa, Setaria italica
  Transcript Sequence Number=SeqID_9314
  Gene Ontology: Mol. function=metal ion binding
  Homolog annotation: Hit_ID=B6T0C5; Match level="QueryCoverage=100%, HitCoverage=20%, E-value=2e-11, Identity=67%"; Hit description=RING finger protein 5
MSANVGESTSAGSSGDAAGGSFECNICFELPQEPIVTLCGHLFCWPCLY

SEQ ID NO: 75289 - protein, 231 aa, Setaria italica
  Transcript Sequence Number=SeqID_9315
  Gene Ontology: Mol. function=metal ion binding
  Homolog annotation: Hit_ID=B6T0C5; Match level="QueryCoverage=100%, HitCoverage=100%, E-value=2e-75, Identity=66%"; Hit description=RING finger protein 5
  Pfam annotation: Domain name=zf-C3HC4; Domain location=24-64; Score =28.1; E_value=3.6e-05; Accession=PF00097.17; Description=Zinc finger, C3HC4 type (RING finger)
MSANVGESTSAGSSGDAAGGSFECNICFELPQEPIVTLCGHLFCWPCLYRWLHIHAHSPECPVCKALVEEDKLVPLYGRGKDRVDPRSKNMPESDIPHRPTGQRPATAPQADTNNNNNNFPNANGNPWFMGTGVPLANARWGNYAFSAAFGGLFPMLSFQVHGFPDAAAYAQPPGFHYGYGHGHGFHGGHMGHTHGVHRQAPLGQQQQADIYLKALLLTVGVLVIASLLAF

SEQ ID NO: 75290 - protein, 45 aa, Setaria italica
  Transcript Sequence Number=SeqID_9316
LSLQLTISFQSLIDHYYVAIITTKNILAFLQICITWSCSILDTCQ

SEQ ID NO: 75291 - protein, 114 aa, Setaria italica
  Transcript Sequence Number=SeqID_9317
  Gene Ontology: Cellular component=integral to membrane
  Homolog annotation: Hit_ID=B3TLS7; Match level="QueryCoverage=98%, HitCoverage=45%, E-value=1e-19, Identity=38%"; Hit description =Senescence-associated protein
THMQDMKYWRPALACVVGSKACDKIESWTPMDYLQHDLTPIQSGCCKPPTACQYSGGMPVGAQDEDCYRWNNAPNILCYQCNSCKAGVMEQIRQDWHKISVLNVIVLVALICIC

SEQ ID NO: 75292 - protein, 201 aa, Setaria italica
  Transcript Sequence Number=SeqID_9318
  Homolog annotation: Hit_ID=B6UE27; Match level="QueryCoverage=96%, HitCoverage=28%, E-value=2e-73, Identity=73%"; Hit description =Ternary complex factor MIP1
  Pfam annotation: Domain name=DUF547; Domain location=43-188; Score =203.4; E_value=6.2e-58; Accession=PF04784.6; Description=Protein of unknown function, DUF547
LKEFSGPYNTMVEVPAISRDRRRLREAEDLLQTYKLILYRLETVDLRRMTNEEKLAFWINIHNALLMHAYLKYGVPQNHLKKTSLLVKAECKIAGRTINAAVIQGLVLGCSTTHCPGHWLRTLLNPRIKSRGSISKAGGGEWQAFAVHQSEPLLRFALCSGSHSDPAVRVYFPKRLSQQLEAAREDYIRATVGCGRSTGCC

SEQ ID NO: 75293 - protein, 213 aa, Setaria italica
  Transcript Sequence Number=SeqID_9319
  Subcellular localization annotation: CTP_CleavageSite=78; ConfidenceScore=5.19e-01
LCCPESNLHWCSPAQSLHTELQARMLLTRLSSSSCSSTALQRHACTTGKPPFRGAAGCWKKREKLPGFRARVAVKPPCAAPGKGGIVPAGNDDDGVSLGTVKLPGNIDVARFESLLFQWGNSLCQGANLPLPVPLKVDKVEGGIRLGFIAVDDGATQTLVYIDCLVSQAPDGSGPVFRAIRNGPMKDKEPPGEPRIMRSLLQALQKSIQIAQV

SEQ ID NO: 75294 - protein, 63 aa, Setaria italica
  Transcript Sequence Number=SeqID_9320
  Homolog annotation: Hit_ID=B9RMN1; Match level="QueryCoverage=77%, HitCoverage=7%, E-value=8e-20, Identity=83%"; Hit description =Ankyrin repeat-containing protein, putative
MDMETRPAAEGSAEPFLPLRWESTGDQWWYATPIDWAAAGGHYDLVRELLRLDANLLVKLTSL

SEQ ID NO: 75295 - protein, 472 aa, Setaria italica
  misc_feature (344)..(344): Xaa can be any naturally occurring amino acid
  Transcript Sequence Number=SeqID_9321
  Gene Ontology: Mol. function=protein binding; Cellular component =nucleus; Biological process=chromatin modification
  Homolog annotation: Hit_ID=Q6K7D3; Match level="QueryCoverage=92%, HitCoverage=31%, E-value=1e-154, Identity=69%"; Hit description =Putative BRUSHY1
  Pfam annotation: Domain name=LRR_1; Domain location=135-159; Score =2.8; E_value=89; Accession=PF00560.25; Description=Leucine Rich Repeat
  Pfam annotation: Domain name=LRR_1; Domain location=164-186; Score =0.0; E_value=3e+02; Accession=PF00560.25; Description=Leucine Rich Repeat
  Pfam annotation: Domain name=LRR_1; Domain location=20-42; Score=7.1; E_value=13; Accession=PF00560.25; Description=Leucine Rich Repeat
  Pfam annotation: Domain name=LRR_1; Domain location=220-243; Score =5.2; E_value=31; Accession=PF00560.25; Description=Leucine Rich Repeat
  Pfam annotation: Domain name=LRR_1; Domain location=247-263; Score =1.7; E_value=1.4e+02; Accession=PF00560.25; Description=Leucine Rich Repeat
  Pfam annotation: Domain name=LRR_1; Domain location=276-299; Score =2.1; E_value=1.2e+02; Accession=PF00560.25; Description=Leucine Rich Repeat
  Pfam annotation: Domain name=LRR_1; Domain location=408-430; Score =10.0; E_value=3.7; Accession=PF00560.25; Description=Leucine Rich Repeat
  Pfam annotation: Domain name=LRR_1; Domain location=79-101; Score =13.2; E_value=0.9; Accession=PF00560.25; Description=Leucine Rich Repeat
  Pfam module annotation: Pfam domain module=LRR_1::LRR_1::LRR_1::LRR _1::LRR_1::LRR_1::LRR_1::LRR_1; Domain location=135-159::164-186::20 -42::220-243::247-263::276-299::408-430::79-101
CGLQDLSITPFLDALRSHKTIAVLDLSHNLLGNQTIERLQHIFASSSQTYGGLTLDLHCNRFGPTALFQICECAVMTDRLEVLNLSGNRLTDACSSYLFTILQKCKALYSLNVEQCSITSRTVQKMADALHEGSVLSHLSLGKNNPISGNAMLNLLSKLASLTRFSELSLTGRKLNKLMVDKLCLLAQSSCLSGLLLGGTSIGPVGTIRLTDALSCTSQDLLRLELSNCGLTAPDFAQICTNLSCINILDLNLGGNSINLEGCDAIQAMLVNPQCSIRSLMLDRCNLGLAGIVCIIQALSGNDQLEELRLAENTNSSLERMQYEDMQEVSTSNEKNNVTTLKQXNAIAQGSLDFENMQVPDSEDEAENENHRSVSGPHRSCASSSQKNSYSNCQIIQELAEALISAKRLKVLDLSQNGLSDEAIQSLYSAWASVPRGDGMARKHVNKDVVHFSVDGMRCCGMKPCCRRDLQM

SEQ ID NO: 75296 - protein, 357 aa, Setaria italica
  Transcript Sequence Number=SeqID_9322
  Gene Ontology: Cellular component=membrane
  Homolog annotation: Hit_ID=Q2L3D9; Match level="QueryCoverage=96%, HitCoverage=60%, E-value=1e-173, Identity=83%"; Hit description =Mechanosensitive ion channel (Fragment)
  Pfam annotation: Domain name=MS_channel; Domain location=123-331; Score=16.8; E_value=6.8e-07; Accession=PF00924.10; Description =Mechanosensitive ion channel
VCIVGIRFGFGTLATMDEQIQQATGEGDESATQIRSEYEAKIAAKRIFHNVATPGSKYIYLSDLMRFMRREEAIKAMDLFEGAQEHNRVSKRSLKNWVVNAFRERKALALTLNDTKTAVNKLNQMANVVVGIIVFALWLLILGIATTHFFVFLSSQLLLAVFVFGNTLKTIFEAIVFLFVMHPFDVGDRCEIEDVQLVVEEMNIMTTVFLRYDNLKIYYPNSVLATKPIMNFYRSPDMGDAIDFSIHVATPVEKLALMKERILRYIDNKKEHWYPGAMIVLRDVDETNKLKVSIWFRHTLNFQDMGMRFVRRELVLQEMIRVLKDLEIEYRMLPLDVNVRNAPPIQSTRMPTTWSYS

SEQ ID NO: 75297 - protein, 295 aa, Setaria italica
  Transcript Sequence Number=SeqID_9323
  Pfam annotation: Domain name=Folate_rec; Domain location=1-220; Score= 5.5; E_value=3e-08; Accession=PF03024.6; Description=Folate receptor family
  Subcellular localization annotation: CTP_CleavageSite=73; ConfidenceScore=5.65e-01
MGYSTRPPPAASFAFLLALLFFSPVASAGQPKGVCVSPGGRFPAFSSEGKPPGRAPKGRRDLALCRIFRQNTCCDVTQTFPALVSVRNLALTGEGGQECIHLWELLECSICDPRVGVRPGPPVVCASFCDMVFKACSESYFSVDMKTQALSPCGLGDILCGKAHKWVSNGTELCHLAGFSVQVSETNSGLVDDTFCYGGKASLDSISDSWTSSKDRPTLSGVASWNVQDFQRWARDMPVGERISWAIGGMVLTAGLIFISKRKSYSHRQKQAAIVRNIRLRRLDSRANPQQTKQS

SEQ ID NO: 75298 - protein, 109 aa, Setaria italica
  misc_feature (109)..(109): Xaa can be any naturally occurring amino acid
  Transcript Sequence Number=SeqID_9324
  Gene Ontology: Mol. function=protein kinase activity; Cellular component=integral to membrane; Biological process=protein amino acid phosphorylation
  Homolog annotation: Hit_ID=B9RYA1; Match level="QueryCoverage=76%, HitCoverage=11%, E-value=2e-29, Identity=72%"; Hit description =Interleukin-1 receptor-associated kinase, putative
STPQDHGSKKHNPPHQQQAAPAPATLVTVDGDGDLEMETLLKASAYILGATGSSIVYKAVLADGTALAVRRIGESGGADKLKDFESQVRAVARFRHPNILRLRGFYWGX

SEQ ID NO: 75299 - protein, 41 aa, Setaria italica
  Transcript Sequence Number=SeqID_9325
  Homolog annotation: Hit_ID=B9SPH5; Match level="QueryCoverage=100%, HitCoverage=29%, E-value=4e-10, Identity=75%"; Hit description =Ubiquinone/menaquinone biosynthesis methyltransferase, putative
SSISQYLTGEELEKLAKEAGFSVAKHYELGGGLMGNLVATR

SEQ ID NO: 75300 - protein, 188 aa, Setaria italica
  misc_feature (9)..(9): Xaa can be any naturally occurring amino acid
  Transcript Sequence Number=SeqID_9326
  Gene Ontology: Mol. function=binding; Biological process=ubiquitin -dependent protein catabolic process
  Homolog annotation: Hit_ID=Q0QW06; Match level="QueryCoverage=98%, HitCoverage=20%, E-value=9e-62, Identity=65%"; Hit description =Ethylene-overproducer1-like protein
  Pfam annotation: Domain name=TPR_1; Domain location=123-156; Score =20.7; E_value=0.0059; Accession=PF00515.20; Description =Tetratricopeptide repeat
  Pfam annotation: Domain name=TPR_1; Domain location=49-82; Score=5.2; E_value=1.4; Accession=PF00515.20; Description=Tetratricopeptide repeat
  Pfam annotation: Domain name=TPR_2; Domain location=123-154; Score =5.8; E_value=6.4; Accession=PF07719.9; Description=Tetratricopeptide repeat
  Pfam annotation: Domain name=TPR_2; Domain location=155-188; Score =10.1; E_value=1.9; Accession=PF07719.9; Description=Tetratricopeptide repeat
  Pfam annotation: Domain name=TPR_2; Domain location=49-82; Score =19.0; E_value=0.02; Accession=PF07719.9; Description=Tetratricopeptid e repeat
  Pfam module annotation: Pfam domain module=TPR_1::TPR_1::TPR_2::TPR _2::TPR_2; Domain location=123-156::49-82::123-154::155-188::49-82
VQQMLAREXPGNGSLRFRQSLLLVHCRLNCQKAAMRSLRYARNSSLHEHERLVYEGWILYDSGHRDEALAKAEQSISLQRSFEAFFLKAYALGDSSMDTESSLSVVQLLEHANSCASDNLRKGQAYNNMGSIYVDCDMLDEAAECYGIALNIKHTRAHQGLARVHYLKNRKQAAFDEMTKLVRIATSS

SEQ ID NO: 75301 - protein, 350 aa, Setaria italica
  misc_feature (244)..(244): Xaa can be any naturally occurring amino acid
  Transcript Sequence Number=SeqID_9327
  Gene Ontology: Mol. function=diacylglycerol kinase activity; Cellular component=vacuole; Biological process=activation of protein kinase C activity
  Homolog annotation: Hit_ID=B9SFA8; Match level="QueryCoverage=95%, HitCoverage=47%, E-value=6e-81, Identity=45%"; Hit description =Anaphase-promoting complex subunit, putative
RWRSRFQIIGLDEKLIDGVTESIGMLVVQFQNFFTWVLKCVKILLNEPTDQVPAANSELVVIFLKFLLDKDPIKQLLEADERIDCDMDAARHVEQLVVFGGFTDTQFLERSLVKQFNELENSLKEAFLMPFTTLSSQIHCQGLLPLYPVTSSDTLSSTCTPASISSYKDEDSQHEESSYNLTDYVCFKIPDGSLNKRNCIGVIKDSGNCCTALSMASHSGSPLHMPDEYECVDLSLYKDNQVIXLLSERSHSDSPGRSWMVMLQTQNFSFTPLSRTSPTNIYSLQKLVALDLQLDTDYGKVRSIPHIVSTPLAVSASRGVACVFSSRRHALVYILDEDEDEDGDEVSDME

SEQ ID NO: 75302 - protein, 240 aa, Setaria italica
  misc_feature (53)..(53): Xaa can be any naturally occurring amino acid
  Transcript Sequence Number=SeqID_9328
  Gene Ontology: Mol. function=5-formyltetrahydrofolate cyclo-ligase activity; Cellular component=actin filament; Biological process =folic acid and derivative biosynthetic process
  Homolog annotation: Hit_ID=B9RQS4; Match level="QueryCoverage=90%, HitCoverage=45%, E-value=1e-57, Identity=52%"; Hit description=Actin- binding protein ABP140, putative
FVHACDFSPRAVDLVKKHKDFRPDRINAFVCDITSEQLTESMEPSSADIVTMXAPDKMPLVLHNVRSVLKHGGRVLFRDYAFGDLAQERLMSKGQQISENFYVRGDGTRAYYFSNEYLVDLFSKCGFTLEEICVHNKQVENRSLDLVMNRNWIQATFTLNSAGPQGLNGQHDLTDVCEGKEDKLVADSSEKKNSSEEIDLSEDFCNMFGASHNLDEVQIIGVKARGHDFKIKMLTKEYQH

SEQ ID NO: 75303 - protein, 263 aa, Setaria italica
  Transcript Sequence Number=SeqID_9329
  Homolog annotation: Hit_ID=B9RQS4; Match level="QueryCoverage=74%, HitCoverage=38%, E-value=5e-42, Identity=49%"; Hit description=Actin- binding protein ABP140, putative
  Pfam annotation: Domain name=Methyltransf_16; Domain location=34-219; Score=0.2; E_value=7.2e-08; Accession=PF10294.1; Description=Putative methyltransferase
LVRLTRIGIDLSEDFCNMFGASHNLDEVQIIGVKARGHDFKIKMLTKEYQHTCKLTGLMLWESAQLMCGLLAENPSIVAGKRVLELGCGSAGICSMVAASYAQFVVATDGDAESLDLLRQNISSNLESNLLDRIMIRKLFWGNKDDVRAVRELSGNDTGFNCIIGTDVTYNPDAILPLFKTARELISDKSDEDSRAAFILSYIQRRVDENSILSNAMAQGFRLVDKWINGVHDSNGIISSWFSGNDVCSAYRNITHSILYFEL

SEQ ID NO: 75304 - protein, 510 aa, Setaria italica
  Transcript Sequence Number=SeqID_9330
  Gene Ontology: Mol. function=nucleic acid binding; Cellular component= intracellular; Biological process=transport
  Homolog annotation: Hit_ID=B6TWU6; Match level="QueryCoverage=76%, HitCoverage=81%, E-value=7e-74, Identity=64%"; Hit description=RNA -binding protein-like
  Pfam annotation: Domain name=NTF2; Domain location=17-132; Score =117.8; E_value=3.5e-32; Accession=PF02136.12; Description=Nuclear transport factor 2 (NTF2) domain
  Pfam annotation: Domain name=RRM_1; Domain location=304-373; Score =27.1; E_value=7.3e-05; Accession=PF00076.14; Description=RNA recognition motif. (a.k.a. RRM, RBD, o
  Pfam module annotation: Pfam domain module=NTF2::RRM_1; Domain location=17-132::304-373
MAMQADSSAAPYSPHVVAGAFVKKYYHTLRYMREDAYKFYNDSSILGRSDSNGNIISVTTLDDIKVQLQSTDFTDCLIKLETVDSQPSHLDGVLILVAGSFTIDAVKQKFTQSFFLAPQGSGYFVLNDMLRIVRPSTEVKEVVANHDDVSIQSTTLPAEPETVSIKESTEPNIPPTENIMPVNDEVISPSTNAVSQVKNDAVVETCVKVVNKDIEKVSEATQAPPPAEKEVPKKTYASIVKTTRESIPPAPAAKPKPSPRPKPDQNAKKSVSSPSKPAQATNTAPPSEKNVSKTKSPDEPGYSVFVKNLPFEATVEMVGQEFSRFGAIKPGGIQVRKYQLDQFCFGFIEFESQHSMQAAIEESRVYFGSWESYVEEKRTKTRVVDGVVTRCDDNGAGSRFPSGRGGYNGDNYRGQGFRNNGYYNGGGNMRNDFRNQNEYSDRGRGPQGNGYPQNGNGYHRNRNGYHQNDGYHQNDGNQQRRPYNNGNGNGNGRAERGNGLKQQTPTPVAS

SEQ ID NO: 75305 - protein, 63 aa, Setaria italica
  Transcript Sequence Number=SeqID_9331
LTEYPVTVFYVIIVQDKMLSHYCLLDIHERQLAVGFIVTSLGVYVDIIGTWKKCYACYVLQFS

SEQ ID NO: 75306 - protein, 110 aa, Setaria italica
  Transcript Sequence Number=SeqID_9332
RGIRGKLTEHREKVVSALLFGSFVALGWRSAEQQREIEGLEAEKNSLRAANAAMSTVMWGWREELFSLAATPSSPISASRLRHIYGEEEPAPPRPRQPGSDAGEESISIA

SEQ ID NO: 75307 - protein, 107 aa, Setaria italica
  Transcript Sequence Number=SeqID_9333
  Pfam annotation: Domain name=ABA_WDS; Domain location=1-80; Score =158.3; E_value=2.3e-44; Accession=PF02496.8; Description=ABAWDS induced protein
ERYKKEEKEHKHKQHLGEAGALAAGAFALYEKHEAKKDPEHAHRHKITEEIAATAAVGAGGYAFHEHHEKKKDHKEAEEASGEKKHQHEAMSTTCPLLACVHAYVLI

SEQ ID NO: 75308 - protein, 44 aa, Setaria italica
  Transcript Sequence Number=SeqID_9334
YSSVLRSVRSVAGGYAFHEHHEKKKDHKEAEEASGEKKHHHLFG

SEQ ID NO: 75309 - protein, 124 aa, Setaria italica
  Transcript Sequence Number=SeqID_9335
  Pfam annotation: Domain name=ABA_WDS; Domain location=34-113; Score =158.3; E_value=2.3e-44; Accession=PF02496.8; Description=ABAWDS induced protein
FLRLPFTLTVRFRSVVHSETVAVEAVTAGENEYERYKKEEKEHKHKQHLGEAGALAAGAFALYEKHEAKKDPEHAHRHKITEEIAATAAVGAGGYAFHEHHEKKKDHKEAEEASGEKKHHHLFG

SEQ ID NO: 75310 - protein, 106 aa, Setaria italica
  Transcript Sequence Number=SeqID_9336
  Gene Ontology: Mol. function=transferase activity, transferring groups other than amino-acyl groups; Cellular component=membrane; Biological process=fatty acid biosynthetic process
  Homolog annotation: Hit_ID=O65677; Match level="QueryCoverage=89%, HitCoverage=19%, E-value=1e-27, Identity=55%"; Hit description =Probable 3-ketoacyl-CoA synthase 2
  Pfam annotation: Domain name=ACP_syn_III_C; Domain location=1-72; Score=-16.3; E_value=0.0008; Accession=PF08541.2; Description=3 -Oxoacyl-[acyl-carrier-protein (ACP)
AVIDSVARLMGFGPEVVEPARATLHRFGNTSSSLVFYELAYFEAKRRVRAGDRLWMLAFGTGFKACSNVWRALRDCGPDADNPWNGCVHRYPMPLPPPSRTHKHAA

SEQ ID NO: 75311 - protein, 96 aa, Setaria italica
  Transcript Sequence Number=SeqID_9337
SPLHSSPPDRSRREAALQRREGGTGRRRRALQSSSAQEEPGGGGGLGSRDACGLPPSPPIRPQSASTLPAFPPLRRCGIGFGSSSVSRGRRRVARR

SEQ ID NO: 75312 - protein, 82 aa, Setaria italica
  Transcript Sequence Number=SeqID_9338
QPRPEVLPPAEQPHAQEAEVQPLRRRTFALHSTSCNTSLQQLQSPNTASLPFQVENADRAATSANERLRQRRGGGLGAGHGG

SEQ ID NO: 75313 - protein, 178 aa, Setaria italica
  misc_feature (11)..(11): Xaa can be any naturally occurring amino acid
  Transcript Sequence Number=SeqID_9339
  Gene Ontology: Mol. function=nucleic acid binding
  Homolog annotation: Hit_ID=B9UK63; Match level="QueryCoverage=65%, HitCoverage=38%, E-value=3e-14, Identity=44%"; Hit description =R1MYB1 protein
  Subcellular localization annotation: CTP_CleavageSite=24; ConfidenceScore=5.14e-01
MARKCSSCGNXNGHNSRTCGGNGRVMMENGGGGVRLFGVQLHVGSSSPMKKCFSMECLSSAAPAAYYAAALAASSSSPSVSSSSSLVSVEETAEKVTNGYLSDGLMGRAQERKKGEPPRSAETGIPSFPNYWPVDSDICFRICNFVAVSIIYPQTINKTPQLIISCIYTGVQIFQLCF

SEQ ID NO: 75314 - protein, 307 aa, Setaria italica
  misc_feature (199)..(199): Xaa can be any naturally occurring amino acid
  misc_feature (246)..(246): Xaa can be any naturally occurring amino acid
  Transcript Sequence Number=SeqID_9340
  Gene Ontology: Mol. function=nucleic acid binding
  Homolog annotation: Hit_ID=B9UK63; Match level="QueryCoverage=93%, HitCoverage=88%, E-value=3e-60, Identity=48%"; Hit description =R1MYB1 protein
  Pfam annotation: Domain name=Myb_DNA-binding; Domain location=114 -161; Score=55.5; E_value=2e-13; Accession=PF00249.23; Description =Myb-like DNA-binding domain
  Pfam annotation: Domain name=zf-CCHC; Domain location=3-20; Score =9.1; E_value=0.021; Accession=PF00098.15; Description=Zinc knuckle
  Pfam module annotation: Pfam domain module=Myb_DNA-binding::zf-CCHC; Domain location=114-161::3-20
  Subcellular localization annotation: CTP_CleavageSite=23; ConfidenceScore=5.14e-01
MARKCSSCGNNGHNSRTCGGNGRVMMENGGGGVRLFGVQLHVGSSSPMKKCFSMECLSSAAPAAYYAAALAASSSSPSVSSSSSLVSVEETAEKVTNGYLSDGLMGRAQERKKGVPWTEDEHRRFLAGLEKLGKGDWRGISRHFVTTRTPTQVASHAQKYFLRQSSLTHKKRRSSLFDVVENADRAATSANERLRQRRXAGSAPDTELPALSLGIISRPAKPERILPPSLSSLLPRCSSAMSSSSXEHVAERAAPRQKHPSSLTLSKPHHASLQQAAPDLELKISTTADYQAGSSPRTPFFGTIRVT

SEQ ID NO: 75315 - protein, 149 aa, Setaria italica
  Transcript Sequence Number=SeqID_9341
  Gene Ontology: Mol. function=heat shock protein binding; Cellular component=integral to membrane; Biological process=protein folding
  Homolog annotation: Hit_ID=B6T7S1; Match level="QueryCoverage=100%, HitCoverage=27%, E-value=2e-62, Identity=76%"; Hit description =Chaperone protein dnaJ 13
  Pfam annotation: Domain name=DnaJ; Domain location=12-77; Score =108.0; E_value=3.2e-29; Accession=PF00226.23; Description=DnaJ domain
MASTPEPEDGRELYALLHLSPDASDEEIRRAYRQYAQIYHPDKYQDPQMKEVATENFQRIRDAYEILSDENKRQIYDIYGMEGLNSGLELGPKLTKPEEIKEQLEQLRRRKEEEKLFAHARPNGSIIANFSVPQYLDGNGIMKGMGMSS

SEQ ID NO: 75316 - protein, 123 aa, Setaria italica
  Transcript Sequence Number=SeqID_9342
MLGSVNASASDLQWEHELQLEVFSATIGECVNGLQEELERRLYEQINITNTMSRNWKEAIAQFAAMREDLGALCKLLLPSVPEAHISNSKHESSGSRSNRWKYNFFGKKTKEDRSPRAEDSKR

SEQ ID NO: 75317 - protein, 112 aa, Setaria italica
  Transcript Sequence Number=SeqID_9343
  Gene Ontology: Mol. function=electron carrier activity; Cellular component=integral to membrane; Biological process=oxidation reduction
  Homolog annotation: Hit_ID=C0KHM0; Match level="QueryCoverage=80%, HitCoverage=16%, E-value=2e-31, Identity=65%"; Hit description =Putative ferulate 5-hydroxylase
PDEFMPERFMDGGSAAAVDFKGNDFEFLPFGAGRRICPGLNFALATVEIMLANLLHCFEWELPNGMEAEDVDTTEVFGLTIHPKEKLMLFPKPRGTSTGGGHSMQAEAADPE

SEQ ID NO: 75318 - protein, 477 aa, Setaria italica
  Transcript Sequence Number=SeqID_9344
  Gene Ontology: Mol. function=ubiquitin protein ligase binding; Cellular component=cullin-RING ubiquitin ligase complex; Biological process=ubiquitin-dependent protein catabolic process
  Homolog annotation: Hit_ID=Q9SGJ0; Match level="QueryCoverage=98%, HitCoverage=51%, E-value=1e-120, Identity=48%"; Hit description =F28J7.14 protein
  Subcellular localization annotation: CTP_CleavageSite=26; ConfidenceScore=5.21e-01
SSVNKVHTPARRLSRHFVHALKNFSRDKMGSAARSATSGLVLVAKSCGYDIARLSFWLSNCVVLRGIVTETSKQSGTINGINSASYSSKPAYRKNSASMWESLNRKKGKLVSPEFDNWEDVDTFIAAIKKIESWIFSRIVETLWWQTFTPHMQSAYITSDLKTSSNAKRSYGRITVVGDQQQATISMDIWKKAFKEASERLCPVRAAGHECGCLPMLAKLVMEQCIARLDVAMFNAILRESDDEIPTDPMSDPITDPKVLPIPSGKFSFGAGVQLKNAIGSWSRSLTDLFGMDMDDYPEVENADGENGFAESRKPFYLLNALSDLLMLPKDVLMDTSTRKELCPTFSSSIIKNILVGFVPDEFCPDPIQNSLLEALELEDHLECNKGIHSIPCGASPILYSPPASGAILSVIGDPRKSGSAILRKSNTSDDELDELSSPLTFISNTLSNPLAKLKRISNSSTSRYRLLHEVWRLDDQ

SEQ ID NO: 75319 - protein, 72 aa, Setaria italica
  Transcript Sequence Number=SeqID_9345
QTEEKISLFPRLLFRTSPYSFLGKGLCIIFILNALQFYQKSYKNLLGVNSFNGFIHSLRAEWPFDSVPLIPL

SEQ ID NO: 75320 - protein, 193 aa, Setaria italica
  Transcript Sequence Number=SeqID_9346
  Gene Ontology: Mol. function=metal ion binding; Biological process =ubiquitin-dependent protein catabolic process
  Homolog annotation: Hit_ID=B9SVU9; Match level="QueryCoverage=87%, HitCoverage=20%, E-value=7e-24, Identity=40%"; Hit description =Ubiquitin-protein ligase, putative
  Pfam annotation: Domain name=zf-C3HC4; Domain location=138-176; Score= 1.1; E_value=0.076; Accession=PF00097.17; Description=Zinc finger, C3HC4 type (RING finger)
MHKQDGMRMMDDFGGYYDERMYWRQNDEIPDADKETSAPCSLPPVTHLGAHQQESWQHSSFGNQHHDNQNLLEMEVRVRGEMSQIHHELYELRKLVESCIASQVKMQHSVKEEVCSALREAGLMPSHPDTTAAKRGSCCMCHRMQVDSLLYRCGHMCTCFNCADQLKSSGRSCPICQSPIDDVVRAQLNFLRF

SEQ ID NO: 75321 - protein, 218 aa, Setaria italica
  misc_feature (13)..(13): Xaa can be any naturally occurring amino acid
  Transcript Sequence Number=SeqID_9347
  Gene Ontology: Mol. function=metal ion binding
PVHAPLRLLRQRXTVEDELWTLLKPVRPHQPQYVSENNTLRYGSSRTDLREANNYKQQNNGNCRVDEQFCNDRVPLEENSNDVSVEGLVNSDGSENLHCNEQMKTKGNFCVHTQKYSEASSSARYSEHSTVDDNQFVEDISPSTTSTLHDLQTPSSRGDNLREEDNQSINGSWEERGLWISSLGWPAPIDTMSPDSWRQDAMGDIENHNQIQFNDRPW

SEQ ID NO: 75322 - protein, 239 aa, Setaria italica
  Transcript Sequence Number=SeqID_9348
  Gene Ontology: Mol. function=metal ion binding
LSLLVTVDDNQFVEDISPSTTSTLHDLQTPSSRGDNLREEDNQSINGSWEERGLWISSLGWPAPIDTMSPDSWRQDAMGDIENHNQIQFNDRPWIDSPNSWRSLCVVTQSDYRSLSRNADICNLLESKKVSKSLESDFSNKMNQLLLKVLHKQRQQRMMDDFGGYYDERMYWRQNDEIPDADKETSAPCSLPPVTHLGAHQQESWQHSSFGNQHHDNQNLLVSELLFNVSCGKVIFLLY

SEQ ID NO: 75323 - protein, 211 aa, Setaria italica
  Transcript Sequence Number=SeqID_9349
  Gene Ontology: Cellular component=endoplasmic reticulum
  Homolog annotation: Hit_ID=B9SPE8; Match level="QueryCoverage=84%, HitCoverage=85%, E-value=3e-40, Identity=48%"; Hit description=3 -beta-hydroxy-delta5-steroid dehydrogenase, putative
  Pfam annotation: Domain name=Reticulon; Domain location=26-189; Score= 154.7; E_value=2.8e-43; Accession=PF02453.9; Description=Reticulon
MDCPGRSCRLFGAQRSLHDLLGGGTVADVVLWRRTEVAGGLLAAVVASWALFYCVPGYTLLSFVSQVLMILLTVLFVWAKAAQLLNRALPPVPLMEISDKSTSEAAEIVGNFVNKVLQDFGNIALGKDSSLFYKVAFVLLLTSIVGRLTDLITLVYTSAVITLTIPALLEKSEEHIARYLEIASAYVQACGGACEEYKCKMTNRLLQKKLS

SEQ ID NO: 75324 - protein, 87 aa, Setaria italica
  Transcript Sequence Number=SeqID_9350
RGVLWRTWRDPRTRCFFEATREVESNSGCSEAPACLCYHGGDCEVVGERFGSGGITLSGGVRCLQRQYDEWSCMTVAFLVRCGLFPS

SEQ ID NO: 75325 - protein, 35 aa, Setaria italica
  Transcript Sequence Number=SeqID_9351
  Gene Ontology: Mol. function=translation initiation factor activity
  Homolog annotation: Hit_ID=P55876; Match level="QueryCoverage=100%, HitCoverage=7%, E-value=4e-09, Identity=85%"; Hit description =Eukaryotic translation initiation factor 5
YNAAVAAGKNSQVVKNAKPFVEWLQSAESEEEDDE

SEQ ID NO: 75326 - protein, 456 aa, Setaria italica
  misc_feature (82)..(82): Xaa can be any naturally occurring amino acid
  misc_feature (304)..(304): Xaa can be any naturally occurring amino acid
  misc_feature (372)..(372): Xaa can be any naturally occurring amino acid
  Transcript Sequence Number=SeqID_9352
  Gene Ontology: Mol. function=translation initiation factor activity; Cellular component=cytoplasm; Biological process=translational initiation
  Homolog annotation: Hit_ID=P55876; Match level="QueryCoverage=100%, HitCoverage=99%, E-value=0.0, Identity=78%"; Hit description =Eukaryotic translation initiation factor 5
  Pfam annotation: Domain name=W2; Domain location=375-456; Score =117.9; E_value=3.4e-32; Accession=PF02020.10; Description=eIF4 -gammaeIF5eIF2-epsilon
  Pfam annotation: Domain name=eIF-5_eIF-2B; Domain location=1-132; Score=256.5; E_value=6.3e-74; Accession=PF01873.9; Description =Domain found in IF2BIF5
  Pfam module annotation: Pfam domain module=W2::eIF-5_eIF-2B; Domain location=375-456::1-132
MALQNIGASNRDDAFYRYKMPRMITKIEGRGNGIKTNVVNMVDIAKALARPPSYTTKYFGCELGAQSKFDEKTGISLVNGAXHDTAKLAGLLEVFIKKYVQCYGCGNPETEILISKTQMISLKCAACGFISDVDMRDKLTTFILKNPPEQKKGGKDKKAMRRAEKERLKEGEAADEELKKLKKDAKKKGASSKESTAKSSKKKAAAGGSDEDHSTSPTRSRDGDNAAADEEDDDDDVQWQTDTSLEAAKQRMQEQLSAATAEMVMLSTEGTEKKKKQATHKETTANGSAKAQEISEPAVIKPSXPYDELVGDIKASLGSAPTPTQLKAVLASSTLPPQDVMNALLDALFDGVGKGFAKEVVKNKKYLAAAVXPDEGAQTLLVQAIESFGGKCSPEALKEVPVVLKALYDGDVLEEETIVEWYNAAVAAGKNSQVVKNAKPFVEWLQSAESEEEDDE

SEQ ID NO: 75327 - protein, 95 aa, Setaria italica
  Transcript Sequence Number=SeqID_9353
  Gene Ontology: Mol. function=thiol oxidase activity; Biological process=oxidation reduction
  Homolog annotation: Hit_ID=B6T0E3; Match level="QueryCoverage=100%, HitCoverage=51%, E-value=2e-30, Identity=73%"; Hit description =Augmenter of liver regeneration
  Pfam annotation: Domain name=Evr1_Alr; Domain location=59-95; Score= -27.0; E_value=0.078; Accession=PF04777.5; Description=Erv1  Alr family
VAAFSRHLLIAPDTGPDDHRLRPLLSLSLSPPPTPPPPPEVPKEKDAKPAPLTKEEVGRATWMLLHTIAAQFPDEPTRQQKRDAKELMHIISRLY

SEQ ID NO: 75328 - protein, 115 aa, Setaria italica
  Transcript Sequence Number=SeqID_9354
  Gene Ontology: Mol. function=transferase activity, transferring glycosyl groups; Biological process=metabolic process
  Homolog annotation: Hit_ID=B6T3B8; Match level="QueryCoverage=96%, HitCoverage=22%, E-value=1e-33, Identity=72%"; Hit description =Anthocyanidin 3-O-glucosyltransferase
PTVVLLPVWGAGHLMPMLEAGKRLLASSGGRALSVTVLVMRPPTEQQASEVEGHIRRAEEAAAGLDVRFHRLPAVEPPTDHEGPVEFISRTVELHEPHVRAAISGLLPASPGRRW

SEQ ID NO: 75329 - protein, 75 aa, Setaria italica
  Transcript Sequence Number=SeqID_9355
RINRSIYYITLSFLSRNIMYFTPDSVTGVRPTGEGLSPTCRRQAADSHHTRKPINDLISFQLLLLLLRSCRLHRS

SEQ ID NO: 75330 - protein, 189 aa, Setaria italica
  misc_feature (51)..(51): Xaa can be any naturally occurring amino acid
  Transcript Sequence Number=SeqID_9356
WSRILAGSVAGLAILALDDSSRRRTLSLYLLARLAQCAYNSAKSKNKFHFXWGSHWRHGDALLFSLASAQVMYAFVMRPESLPKSYQEFILKTGPVAEPVYKVVRECCRGGPVDLNALSAYLSNKRNSDLMHLTTNPSIIPCSVIHPDRASCLAQNVHVVSSTFKKTFPLYFSLTFVPFVVLRLQKVIH

SEQ ID NO: 75331 - protein, 452 aa, Setaria italica
  misc_feature (406)..(406): Xaa can be any naturally occurring amino acid
  Transcript Sequence Number=SeqID_9357
  Gene Ontology: Cellular component=integral to membrane
  Homolog annotation: Hit_ID=Q54LK9; Match level="QueryCoverage=42%, HitCoverage=98%, E-value=2e-20, Identity=32%"; Hit description =Transmembrane protein
  Pfam annotation: Domain name=Pmp24; Domain location=265-398; Score= -92.4; E_value=0.021; Accession=PF10499.1; Description=Peroxisomal membrane protein 24
  Pfam annotation: Domain name=Tim17; Domain location=1-125; Score= -13.6; E_value=0.0047; Accession=PF02466.11; Description =Tim17Tim22Tim23 family
  Pfam module annotation: Pfam domain module=Pmp24::Tim17; Domain location=265-398::1-125
ELLPNGRTDVRTIGILLRAFKLARRRSFGSLLDLKQLVSEKDLIVREEACRVGFTFGGFTGSYHALRCFLRRLRKKETPYNTILAGSVAGLAILALDDSSRRRTLSLYLLARLAQCAYNSAKSKNKFHFWGSHWRHGDALLFSLASAQVMYAFVMRPESLPKSYQEFILKTGPVAEPVYKVVRECCRGGPVDLNALSAYLSNKRNSDLMHLTTNPSIIPCSVIHPDRASCLAQNVHVVSSTFKKTFPLYFSLTFVPFVVLRLQKFLESPAATCWRALVGAVRSTTFLSAFVTLFQAAICLHRKVANKDHKSVYWFAGLMSGLSILLEKKARRAELALYVLPRAGDSLWYILINRQLLPNIKNAEVALFCMCMGGIMYFLEYEPDTMAPFLRGLIRRFLASKISNPXPPPPNRNTSHSYLQTLNALEQSRTQPGVDNGLPTSEKYNLESIPGL

SEQ ID NO: 75332 - protein, 72 aa, Setaria italica
  Transcript Sequence Number=SeqID_9358
NIEAVSKNHALRCSHKLMYTTSLESSSIITEIAQAVWKILYCTHKILKNHNVIPRRTMCMKVNALECTYGYK

SEQ ID NO: 75333 - protein, 232 aa, Setaria italica
  Transcript Sequence Number=SeqID_9359
  Pfam annotation: Domain name=WD40; Domain location=165-212; Score =19.9; E_value=0.011; Accession=PF00400.24; Description=WD domain, G -beta repeat
KDGSDAADYLSMQGEGSEIKFCQSDQNLVRVESCSYKVAGSLIWKPNVSLWSLDQLDLSTAENKLPSSKMLGEGGLQGEEFRPEPSHCHYAINNGVEVNAQMCSSDSNSLERYGRTVSSSMVLSEDSCVPYAVVYGFHNGDIEVIRFLNMSPAAAKFGGGGIYPHISERFFLGHKGAILCLAAHYMHARSDSRNFHRALISGSLYCTIRVWDLDAGTLLSVMHHHVASVKQI

SEQ ID NO: 75334 - protein, 199 aa, Setaria italica
  misc_feature (1)..(1): Xaa can be any naturally occurring amino acid
  misc_feature (14)..(14): Xaa can be any naturally occurring amino acid
  Transcript Sequence Number=SeqID_9360
  Gene Ontology: Mol. function=protein serine/threonine kinase activity; Cellular component=integral to membrane; Biological process=protein amino acid phosphorylation
  Homolog annotation: Hit_ID=B6U286; Match level="QueryCoverage=99%, HitCoverage=34%, E-value=1e-108, Identity=95%"; Hit description =Nodulation receptor kinase
XLMDHSMCGKVADXGFSKYAPQEGDSNPSMEVRGTAGYLDPEYYSTQVLSTRSDVFSFGVVLLEIVTGREPLDVKRPRDEWSLVEWAKPYIREYKIEEMVDPGIKGQYCSEAMWRVLEVALVCTEPFSTFRPSMEDVLRELEDALIIENNASEYMRSIESTGTLGSNRYLSIDRKMFTSGSARIEPTKGQLQTMPSLPR

SEQ ID NO: 75335 - protein, 59 aa, Setaria italica
  Transcript Sequence Number=SeqID_9361
  Gene Ontology: Mol. function=protein serine/threonine kinase activity; Cellular component=plasma membrane; Biological process =protein amino acid phosphorylation
  Homolog annotation: Hit_ID=Q1EPA3; Match level="QueryCoverage=89%, HitCoverage=8%, E-value=3e-15, Identity=71%"; Hit description =Protein kinase family protein
MLENFQARPLLLKAIEHREFGDLPDPRMENRFDENEMFHMIGAAAACIRHSAAMRPRMG

SEQ ID NO: 75336 - protein, 279 aa, Setaria italica
  Transcript Sequence Number=SeqID_9362
  Gene Ontology: Mol. function=protein serine/threonine kinase activity; Cellular component=plasma membrane; Biological process =protein amino acid phosphorylation
  Homolog annotation: Hit_ID=Q9SX31; Match level="QueryCoverage=87%, HitCoverage=34%, E-value=1e-107, Identity=73%"; Hit description =F24J5.8 protein
  Pfam annotation: Domain name=Pkinase; Domain location=32-270; Score =121.8; E_value=2.3e-33; Accession=PF00069.17; Description=Protein kinase domain
  Pfam annotation: Domain name=Pkinase_Tyr; Domain location=32-262; Score=80.8; E_value=4.9e-21; Accession=PF07714.9; Description =Protein tyrosine kinase
  Pfam module annotation: Pfam domain module=Pkinase::Pkinase_Tyr; Domain location=32-270::32-262
SHGYPYSPADSGIGYSHMLFTPENLAAITDDFAEENLLGEGGFGCVFKGILPDGRPVAVKKLKIGNGQGEREFKAEVDTISRVHHRHLVSLVGYCIADGQRMLVYDFVPNNTLYYHLHVSEAALDWRTRVKIAAGAARGIAYLHEDCHPRIIHRDIKSSNILLDNNFEAQVSDFGLARLAGDSNTHVTTRVMGTFGYLAPEYALSGKLTAKSDLYSFGVVLLELITGRKPVDASQPLGDESLVEWVSPIFFIMYGLVVSPMLGPKVCVDFQIFDQYMFD

SEQ ID NO: 75337 - protein, 198 aa, Setaria italica
  misc_feature (85)..(85): Xaa can be any naturally occurring amino acid
  Transcript Sequence Number=SeqID_9363
  Gene Ontology: Mol. function=protein serine/threonine kinase activity; Cellular component=plasma membrane; Biological process =protein amino acid phosphorylation
  Homolog annotation: Hit_ID=Q1EPA3; Match level="QueryCoverage=94%, HitCoverage=29%, E-value=4e-70, Identity=69%"; Hit description =Protein kinase family protein
VLRKVLTGFLDFGLARLAGDSNTHVTTRVMGTFGYLAPEYALSGKLTAKSDLYSFGVVLLELITGRKPVDASQPLGDESLVEWAXPLLLKAIEHREFGDLPDPRMENRFDENEMFHMIGAAAACIRHSAAMRPRMGQVVRALDSLADSNLNNGLQPGRSEVFLEPQSEEIRLFQLREFGIRDCSDELSQASWRSRRDL

SEQ ID NO: 75338 - protein, 67 aa, Setaria italica
  Transcript Sequence Number=SeqID_9364
IHRMLVLVESTYHGILSTLALNQKCSISPKASFSSVLKETNHAIVSLHILYLLLSSCIILVFILVLF

SEQ ID NO: 75339 - protein, 79 aa, Setaria italica
  Transcript Sequence Number=SeqID_9365
AAAAPPTSTRASLPCEWTRTLGVQLRTAFAMADDGRHKGCTGRLRTASSGFELVNPCKGQCALLPLTGLSWNCYLETFS

SEQ ID NO: 75340 - protein, 103 aa, Setaria italica
  Transcript Sequence Number=SeqID_9366
NRVSKIIMYITTGMLFETIAAWHRHHDIAALYLVAALVAELPAATICPQDRSTTRTSPAYGISLNFCYIGSLQSEVARQQDAAAGTTANGWQDVALVKPIPAA

SEQ ID NO: 75341 - protein, 515 aa, Setaria italica
  misc_feature (13)..(13): Xaa can be any naturally occurring amino acid
  Transcript Sequence Number=SeqID_9367
  Gene Ontology: Mol. function=sucrose transmembrane transporter activity; Cellular component=integral to plasma membrane; Biological process=sucrose transport
  Homolog annotation: Hit_ID=Q9SXM0; Match level="QueryCoverage=95%, HitCoverage=94%, E-value=0.0, Identity=92%"; Hit description=Sucrose Transporter
  Pfam annotation: Domain name=BCCT; Domain location=177-475; Score= -430.9; E_value=0.011; Accession=PF02028.9; Description=BCCT family transporter
  Pfam annotation: Domain name=MFS_1; Domain location=34-500; Score =12.0; E_value=0.012; Accession=PF07690.8; Description=Major Facilitator Superfamily
  Pfam annotation: Domain name=PUCC; Domain location=59-508; Score= -221.9; E_value=0.036; Accession=PF03209.7; Description=PUCC protein
  Pfam annotation: Domain name=Sugar_tr; Domain location=31-476; Score=- 104.0; E_value=7.1e-05; Accession=PF00083.16; Description=Sugar (and other) transporter
  Pfam module annotation: Pfam domain module=BCCT::MFS_1::PUCC::Sugar _tr; Domain location=177-475::34-500::59-508::31-476
GELELTVGVPSAXGGGGAAADAPVPISLGRLILAGMVAGGVQYGWALQLSLLTPYVQTLGLSHALTSFMWLCGPIAGLVVQPLVGLYSDRCTSRWGRRRPFIMTGCLLICLAVVIVGFSSDIGAALGDTKEECSLYHGPRWHAAIVYVLGFWLLDFSNNTVQGPARALMADLSGHHGPSAANSIFCSWMALGNILGYSSGSTNNWHKWFPFLKTKACCEACANLKGAFLVAVVFLMFCFTITLIFAKEVPYRGNENLPTKANGEVEAEPTGPLAVFKGFKNLPPGMPSVLLVTGLTWLSWFPFILYDTDWMGREIYHGDPKGTTTQVAAFNEGVRIGSFGLLLNSIVLGFTSFLIEPMCRKVGPRLVWVTSNLMVCVAMAATALISFWSLKDYHGYVQDAITASSSIKAVCLVLFAFLGVPLAILYSVPFAVTAQLAATKGGGQGLCTGVLNISIVIPQVIIALGAGPWDALFGKGNIPAFGVASGFALIGGIVGLFLLPKISKRQFRAVSGGGH

SEQ ID NO: 75342 - protein, 83 aa, Setaria italica
  Transcript Sequence Number=SeqID_9368
RRRRRSGAAPSRRMGRGGGPVQRRVGGGSRGRRGGAGGVEEEGEKGGKKEGRRKEKIKKKEKEKKNEEEKKEKKKKYKSILDI

SEQ ID NO: 75343 - protein, 108 aa, Setaria italica
  Transcript Sequence Number=SeqID_9369
KRAGASSLCSSTMVEDPFFVLAGGKEGGFLELEEIDEADFGIVGGYVEEVGADEGKAGKDRGKKKKKRKRKRGGDDQVLSGDGDSFLKQCDGDSVVENEQEGEKEKKN

SEQ ID NO: 75344 - protein, 113 aa, Setaria italica
  misc_feature (74)..(74): Xaa can be any naturally occurring amino acid
  Transcript Sequence Number=SeqID_9370
  Gene Ontology: Mol. function=ATP-dependent helicase activity
  Homolog annotation: Hit_ID=A3AVH5; Match level="QueryCoverage=85%, HitCoverage=11%, E-value=1e-38, Identity=78%"; Hit description=DEAD -box ATP-dependent RNA helicase 13
CSCLSCPCFNTFCFDLQELSDLLQRPLQPNTFSRRYLAGAGISPLLQKQLEELAKRKVSNNRSKTENKGSRFVXIGQDRVEPLQALQNSGQEVCVNLDKQREKRRLAQNWKQK

SEQ ID NO: 75345 - protein, 595 aa, Setaria italica
  Transcript Sequence Number=SeqID_9371
  Gene Ontology: Mol. function=ATP-dependent helicase activity; Cellular component=cellular_component; Biological process=RNA metabolic process
  Homolog annotation: Hit_ID=A3AVH5; Match level="QueryCoverage=95%, HitCoverage=68%, E-value=0.0, Identity=86%"; Hit description=DEAD -box ATP-dependent RNA helicase 13
  Pfam annotation: Domain name=DEAD; Domain location=1-199; Score =165.8; E_value=1.3e-46; Accession=PF00270.21; Description=DEADDEAH box helicase
  Pfam annotation: Domain name=Helicase_C; Domain location=292-368; Score=90.6; E_value=5.4e-24; Accession=PF00271.23; Description =Helicase conserved C-terminal domain
  Pfam module annotation: Pfam domain module=DEAD::Helicase_C; Domain location=1-199::292-368
GKDVIGAAETGSGKTLAFGLPILQRLLEEREKASRLHQEDEKMEESAGESPLRALILTPTRELAQQVCDHLKEAAKFLGIGVIPIVGGISMEKQERLLKNKPEIVVGTPGRLWELMSMNNQHLVELHSLSFFVLDEADRMIERGHFHELQSIIEMLPLTNGSDEQAARTMPNCETVPILQIKKRQTFVFSATLALSSNFRKKLKRGLSTSKASTDDVSSIEALSKKAGMKPNAEIVDLTKASILPEKLEESFIECSEEDKDAYLYYILSVHGQGRAIIFCTSIAALRHISSILRILGINALTNHAQMQQRARMKAVDRFRGSENSILVATDGFARGMDFDDVRTVIHYQLPHSTDVYIHRSGRTARKSLAGCSIALISSADKSKFYSLCKSLSKENLQQFPIDHAYMPAVMNRLSLARQIDKITRKNSQENANKSWLQRNAESMGLILETSDSEEERVKGHKQRKATSAHLQKLQQELSDLLQRPLQPNTFSRRYLAGAGISPLLQKQLEELAKRKVSNNRSKTENKGSRFVVIGQDRVEPLQALQNSGQEVCVNLDKQREKRRLAQNWKQKKHEEKKRSREQKRKEKRKAKAMD

SEQ ID NO: 75346 - protein, 262 aa, Setaria italica
  Transcript Sequence Number=SeqID_9372
  Gene Ontology: Mol. function=ATP-dependent helicase activity; Cellular component=nucleus; Biological process=ribosome biogenesis
  Homolog annotation: Hit_ID=A3AVH5; Match level="QueryCoverage=62%, HitCoverage=19%, E-value=8e-56, Identity=69%"; Hit description=DEAD -box ATP-dependent RNA helicase 13
  Pfam annotation: Domain name=DEAD; Domain location=155-262; Score= -3.2; E_value=7.3e-05; Accession=PF00270.21; Description=DEADDEAH box helicase
IAAHGGRWRWWVEEVENGQEENKNAKGKRDRKKRKRKRGGDDQVLSGDGDSFLKQCDGDSVVENEQEGEKEKKNAKGKRDRKKRKVKDSEKSGESGKDIADDDNAEDVQDKNENMEQDKDDDLILGEDDVFAWHELRLHPLLVKAMRRLGFKEPTPIQKSSFPAAAHQGKDVIGAAETGSGKTLAFGLPILQRLLEEREKASRLHQEDEKMEESAGESPLRALILTPTRELAQQVCDHLKEAAKFLGIGVIPIVGGISMEKH

SEQ ID NO: 75347 - protein, 113 aa, Setaria italica
  Transcript Sequence Number=SeqID_9373
RSLDGAEGGGGPPPSAPADGRSTAEHVQAGDVDSEGLEEYMLSDLDSIPAPCVAEAPFEYWAEVPPAAGHDMGGWYVDGDGVGVMVGYEFREPCHYGYSESPHVEHVYSPLWE

SEQ ID NO: 75348 - protein, 75 aa, Setaria italica
  misc_feature (14)..(14): Xaa can be any naturally occurring amino acid
  Transcript Sequence Number=SeqID_9374
  Gene Ontology: Mol. function=zinc ion binding; Cellular component =intracellular
  Homolog annotation: Hit_ID=B9RF68; Match level="QueryCoverage=65%, HitCoverage=2%, E-value=9e-09, Identity=59%"; Hit description=DNA polymerase
QMEAKQSALQKRFXIPPRKSDVSSAWNFDFDDNESDGADVAAFEFADSSKARGSSSVDNISYRDSTRGSEDEEFR

SEQ ID NO: 75349 - protein, 103 aa, Setaria italica
  Transcript Sequence Number=SeqID_9375
  Homolog annotation: Hit_ID=B9SAF5; Match level="QueryCoverage=99%, HitCoverage=20%, E-value=1e-36, Identity=75%"; Hit description =Transporter, putative
YMVLWGSALADAINQFKMMPFLILSGQLCPPGIEGTLFALFMSINNLGSTLGSFLGAILASALNISTAQFDNLALGLGVQLIGTLLPIGFLFLIPKEVTGLTS

SEQ ID NO: 75350 - protein, 140 aa, Setaria italica
  misc_feature (79)..(79): Xaa can be any naturally occurring amino acid
  Transcript Sequence Number=SeqID_9376
  Subcellular localization annotation: CTP_CleavageSite=48; ConfidenceScore=5.47e-01
MAALAGILAPSLLPLPLRLPHSSLPHPRLLTPASSSSSLRPRAPRLTVAHAASGDNGGPPADGDKERKGPSLPALSEIXWGELLSPQPANAAAVVLTGALAWAGASLLLQLVLIFAAIFAAAVKYSFVAAILLFVLIALL

SEQ ID NO: 75351 - protein, 92 aa, Setaria italica
  Transcript Sequence Number=SeqID_9377
  Gene Ontology: Mol. function=heat shock protein binding; Biological process=metabolic process
  Homolog annotation: Hit_ID=B6SSP4; Match level="QueryCoverage=69%, HitCoverage=18%, E-value=4e-27, Identity=93%"; Hit description =Peptidoglycan binding domain containing protein
  Pfam annotation: Domain name=PG_binding_1; Domain location=37-92; Score=25.9; E_value=0.00017; Accession=PF01471.10; Description =Putative peptidoglycan binding domain
KEVVVVEEEKKAAAKAESAGSGAGAGKSRRTLRAGAEGEDVRAMQEALQKLGFYSGEEDMEYSSFSSGTDRAVKTWQATVGSSEDGVMTSEL

SEQ ID NO: 75352 - protein, 186 aa, Setaria italica
  Transcript Sequence Number=SeqID_9378
  Gene Ontology: Mol. function=two-component response regulator activity; Cellular component=endoplasmic reticulum membrane; Biological process=two-component signal transduction system (phosphorelay)
  Homolog annotation: Hit_ID=B0LSM7; Match level="QueryCoverage=100%, HitCoverage=26%, E-value=5e-55, Identity=55%"; Hit description =Ethylene receptor (Fragment)
NNCAVWMPSEDKSGMCLTHELRRGSDGEAIVSADDADVLKVKGSDGVKLLPPESVLGSASGGGKEGTGTVAAIRMPMLKVADFKGGTPEVIQTSYAVLVLVPPSDRNWAPHELEIVEVVADQVAVALSHASLLEESQAMRDRLAEQNRELLQARRDTLMANEARDAFQRVMSQGMRKPIHSILGLV

SEQ ID NO: 75353 - protein, 85 aa, Setaria italica
  Transcript Sequence Number=SeqID_9379
  Gene Ontology: Mol. function=transferase activity; Cellular component= plasma membrane
  Homolog annotation: Hit_ID=Q7XID7; Match level="QueryCoverage=100%, HitCoverage=10%, E-value=5e-28, Identity=76%"; Hit description =Putative anthranilate phosphoribosyltransferase
  Pfam annotation: Domain name=PRT_C; Domain location=1-85; Score=62.5; E_value=1.5e-15; Accession=PF08372.2; Description=Plant phosphoribosyltransferase C-ter
VPTAALHAAAVGVWRYRRRPRAPAPHPCVRTSMAEAPDREELDEEFDAIPSARPPEVVRVRYDRARMVGARLQQMVGDVATQAER

SEQ ID NO: 75354 - protein, 28 aa, Setaria italica
  Transcript Sequence Number=SeqID_9380
TNRFYLALCVLTLILLPLFYLIVFLHQR

SEQ ID NO: 75355 - protein, 318 aa, Setaria italica
  Transcript Sequence Number=SeqID_9381
  Gene Ontology: Mol. function=zinc ion binding; Cellular component =intracellular
  Homolog annotation: Hit_ID=B6STE4; Match level="QueryCoverage=86%, HitCoverage=100%, E-value=1e-120, Identity=77%"; Hit description =Zinc finger protein
  Subcellular localization annotation: CTP_CleavageSite=21; ConfidenceScore=5.36e-01
MPQASAARVSPLLRLPLLRSRAAARSARPLKSSDAPRDLETSRMLCCAGVPPSLLLVALLSACSLLLVAGRNQDQEFHGAARSRILLQDPHKHEVHCSRERSRAAWEAIDEYLMPFVEKEKYELPSKCRLRPDNDMFREQEQHKIHFDINEWRCGFCKKAFRAEKFLDQHFENRHKNLLDNSEGRCLADLCGALHCDMMMEFKKPKSKCNAAAALRNRHLCESLADSCFPINQGLAASRLHEFFLRQFCDAHTCNRGTKHFPKGGRKQTNRFYLALCVLTLILLPLFYLIVFLHQREMKKGAQDLRRFSKIGQKKKPS

SEQ ID NO: 75356 - protein, 100 aa, Setaria italica
  Transcript Sequence Number=SeqID_9382
  Gene Ontology: Mol. function=methyltransferase activity; Cellular component=vacuole; Biological process=metabolic process
  Homolog annotation: Hit_ID=Q84M50; Match level="QueryCoverage=77%, HitCoverage=23%, E-value=6e-30, Identity=77%"; Hit description =Putative endosperm C-24 sterol methyltransferase
RLESIKRFEHFIALQLGLKKGMKVLDVGCGIGGPLTEIARFSSTQITGLNNNAYQISRGKEIISSAGLTEQCNFIKVNLRPKSVLQWFSLGYICLFKWAL

SEQ ID NO: 75357 - protein, 327 aa, Setaria italica
  Transcript Sequence Number=SeqID_9383
  Gene Ontology: Mol. function=methyltransferase activity; Cellular component=vacuole; Biological process=metabolic process
  Homolog annotation: Hit_ID=B6T849; Match level="QueryCoverage=97%, HitCoverage=90%, E-value=1e-133, Identity=70%"; Hit description =Cycloartenol-C-24-methyltransferase 1
  Pfam annotation: Domain name=CMAS; Domain location=22-281; Score= -160.0; E_value=0.0007; Accession=PF02353.12; Description =Cyclopropane-fatty-acyl-phospholipid synthase
  Pfam annotation: Domain name=Methyltransf_11; Domain location=85-183; Score=98.4; E_value=2.5e-26; Accession=PF08241.4; Description =Methyltransferase domain
  Pfam annotation: Domain name=Methyltransf_12; Domain location=85-181; Score=40.3; E_value=7.8e-09; Accession=PF08242.4; Description =Methyltransferase domain
  Pfam annotation: Domain name=Sterol_MT_C; Domain location=192-321; Score=157.3; E_value=4.6e-44; Accession=PF08498.2; Description =Sterol methyltransferase C-terminal
  Pfam annotation: Domain name=Ubie_methyltran; Domain location=54-236; Score=-114.6; E_value=0.00053; Accession=PF01209.10; Description =ubiECOQ5 methyltransferase family
  Pfam module annotation: Pfam domain module=CMAS::Methyltransf _11::Methyltransf_12::Sterol_MT_C::Ubie_methyltran; Domain location =22-281::85-183::85-181::192-321::54-236
MNVHFCSRYAKYHDLHGGDEQFRKSNYSDLVNKYYDLVTDFAEYRWGQSIHFAPRWHGETRLESIKRFEHFIALQLGLKKGMKVLDVGCGIGGPLTEIARFSSTQITGLNNNAYQISRGKEIISSAGLTEQCNFIKGDFMNMPFPDNTFDAAYAIEATIHAPDALGAYKEIYRVLKPGQYFALDELCLTDRFDPNNAKHRNIKSQIEIGCGLPDIRSTRQCIQAMKDAGFEVVIAKDLAEDSECPWYQEIDPGVFSWTSFSNSCVGQFLTYAIVGTLEFLRIAPKGLNRLFSIMQTASHGLVTGSREQIFTATFFVLGRKPLEETEI

SEQ ID NO: 75358 - protein, 146 aa, Setaria italica
  Transcript Sequence Number=SeqID_9384
  Gene Ontology: Mol. function=methyltransferase activity; Cellular component=vacuole; Biological process=metabolic process
  Homolog annotation: Hit_ID=Q2QDF7; Match level="QueryCoverage=86%, HitCoverage=35%, E-value=7e-32, Identity=55%"; Hit description=24 -sterol C-methyltransferase
MSQSWALHLSSGLQGKNIAKDQFGSTVEQYAKYHDLHGGDEQFRKSNYSDLVNKYYDLVTDFAEYRWGQSLHFAPRWHGETRLESIKRFEHFIALQLGLKKGMKVGRKIKIGLFVYQITRQSARIAARRDHGRSRGLVGWWAVVDS

SEQ ID NO: 75359 - protein, 84 aa, Setaria italica
  misc_feature (31)..(31): Xaa can be any naturally occurring amino acid
  Transcript Sequence Number=SeqID_9385
  Gene Ontology: Cellular component=Golgi apparatus
  Homolog annotation: Hit_ID=B8Q8B1; Match level="QueryCoverage=64%, HitCoverage=22%, E-value=4e-20, Identity=96%"; Hit description=SKIP interacting protein 25
SERFFSENDVGGVFQASLESIRNSLAEELVXKMTEQCEKLRTEAAALPGLRAELEALKQRHFQALELMGERDEEVSLSLPCNAS

SEQ ID NO: 75360 - protein, 43 aa, Setaria italica
  Transcript Sequence Number=SeqID_9386
MYFNFDSVLQLEELRNDIVDLKEMYREQVDLLVSQLQALGARV

SEQ ID NO: 75361 - protein, 1037 aa, Setaria italica
  Transcript Sequence Number=SeqID_9387
  Gene Ontology: Mol. function=RNA polymerase II transcription factor activity; Cellular component=Golgi apparatus; Biological process =transcription from RNA polymerase II promoter
  Homolog annotation: Hit_ID=Q2HU52; Match level="QueryCoverage=59%, HitCoverage=62%, E-value=0.0, Identity=62%"; Hit description=TRNA -binding arm; t-snare
  Pfam annotation: Domain name=M; Domain location=458-478; Score=4.4; E_ value=38; Accession=PF02370.8; Description=M protein repeat
  Pfam annotation: Domain name=M; Domain location=547-567; Score=11.4; E_value=3.9; Accession=PF02370.8; Description=M protein repeat
  Pfam annotation: Domain name=M; Domain location=726-746; Score=6.6; E_ value=19; Accession=PF02370.8; Description=M protein repeat
  Pfam annotation: Domain name=M; Domain location=810-830; Score=2.7; E_ value=64; Accession=PF02370.8; Description=M protein repeat
  Pfam module annotation: Pfam domain module=M::M::M::M; Domain location=458-478::547-567::726-746::810-830
MAWWSGKVSLGGLQDIAGAVNKISESVKNIEKNFDSALGLEEKRDDEEASGSRTSNSDRMGFFNPVMAFMGQNGEEDGTDVSEKPQSPKNSSPEEENHSTSTKQRTSEVDASEVSGTIKSPKQPSKLEEAHSSISTESPVSEQSMTPQTSTHPSAAEEKLDGSAESPISKEEDFEASETSQSLSHPSPPEETHSGSIEDISSVMNENQDNQDRKHSGPSDEALPNQLGESAGDVPDGTASSSPTKIDQSGDTETGESIHTGQEDASDGSPSQSQPAESTLASSDDIIEAEDKIAQKSDAPKEMSSPQDGSNKVDKTTNLEVKVRDGSINTEKNKEESNKIVAGTASVVGQEENVSEQPVDFKSKSIIAEHDSHSQNESVVNSTDMPAGLVEDSPANDFKKEEKIQESVGSTNSPTPEFAGSVAELEKLRREMKMMEAALQGAARQSQSKADEIARLMNENEQLKATIDDLKSKSSEAEMDALKDEYHQRVATLERKVYALTKERDTLRREQNKKSDAAALLKEKDEIITQVMAEGEELSKKQAAQEATIRKLRAQIRELEEEKQRLNSKIQVEETKVESIKRDKAATEKLLQETIERNQTELAAQKEFYTNALNAAKEAEALAEARVNSEAKVELESLLREAGEKENMLIKTIEELRHSLTRQEQEAAFREERLKRDYDDLQKRYQASELRYNELVTQVPESTRPLLRQIEAMQETAARREEAWAGVERTLNSRLQEAEAKAAAAEEKERSVNERLSQSLSRITVLETQITILRTEQTQLSRSLEKERQRASESRQEYLAIKEEAAIQEGRAKQLEEEIKELRARHKKEMQEAAEHRELLEKDLEREKAARAEIEKTSSREAPKVPLPDQTRNAPLRKLSSSGSINSLEESHFLQASLDLSDNASLERRMSSESNMSYYLRTMTPSAFESALRQKDGELASYMSRLASLESIRNSLAEELVKMTEQCEKLRTEAAALPGLRAELEALKQRHFQALELMGERDEELEELRNDIVDLKEMYREQVDLLVSQLQALGARV

SEQ ID NO: 75362 - protein, 95 aa, Setaria italica
  Transcript Sequence Number=SeqID_9388
  Gene Ontology: Mol. function=ATP-dependent helicase activity; Cellular component=nucleus; Biological process=embryonic development ending in birth or egg hatching
  Homolog annotation: Hit_ID=B6T5H9; Match level="QueryCoverage=89%, HitCoverage=18%, E-value=5e-43, Identity=96%"; Hit description=ATP -dependent RNA helicase DDX47
  Pfam annotation: Domain name=Helicase_C; Domain location=4-62; Score =74.4; E_value=4.3e-19; Accession=PF00271.23; Description=Helicase conserved C-terminal domain
QIRILQSFALNRFKAKDCNILICTDVASRGLDIQGVDMVINYDIPMNSKDYVHRVGRTARAGRSGYAVSLVNQYEAQWFVQIEQLLGSKIDQCCT

SEQ ID NO: 75363 - protein, 452 aa, Setaria italica
  Transcript Sequence Number=SeqID_9389
  Gene Ontology: Mol. function=ATP-dependent helicase activity; Cellular component=nucleolus; Biological process=embryonic development ending in birth or egg hatching
  Homolog annotation: Hit_ID=B6T5H9; Match level="QueryCoverage=96%, HitCoverage=96%, E-value=0.0, Identity=86%"; Hit description=ATP -dependent RNA helicase DDX47
  Pfam annotation: Domain name=DEAD; Domain location=46-216; Score =228.9; E_value=1.2e-65; Accession=PF00270.21; Description=DEADDEAH box helicase
  Pfam annotation: Domain name=Helicase_C; Domain location=283-359; Score=126.4; E_value=8.9e-35; Accession=PF00271.23; Description =Helicase conserved C-terminal domain
  Pfam annotation: Domain name=ResIII; Domain location=42-211; Score= -30.6; E_value=0.02; Accession=PF04851.7; Description=Type III restriction enzyme, res subunit
  Pfam module annotation: Pfam domain module=DEAD::Helicase_C::ResIII; Domain location=46-216::283-359::42-211
MAKEDLVVDAGEKQEPAPRLALTFAELGICKELVEACDLMGWKEPTRVQAEAIPHAIQGKDLIALAQTGSGKTGAFALPILQELLENRDVQHSFFACVLSPTRELAIQIAEQFEALGSAIGLRCSVLVGGVDRMQQVLSLGKRPHIVVGTPGRLLDHLTDTKGFSLKKIKYLVLDEADKLLNVEFEKALDDILQEIPKDRRTFLFSATMTKKVNKLQRACLRNPVKVEAASKYSTVDSLKQEFYFVPADYKDCYLLHVLNERRESMIMIFVRTCESTRLLALMLRNLGLKAMSISGQMSQDKRLGALNRFKAKDCNILICTDVASRGLDIQGVDMVINYDIPMNSKDYVHRVGRTARAGRSGYAVSLVNQYEAQWFVQIEQLLGKKIDQCKVDPDEIMILKEPISDAKRIALTKMKDSGGHKKRRKLGDDDDEEEDRAHSKRSKSFKRSNRR

SEQ ID NO: 75364 - protein, 463 aa, Setaria italica
  Transcript Sequence Number=SeqID_9390
  Gene Ontology: Mol. function=receptor activity; Cellular component =integral to membrane
  Homolog annotation: Hit_ID=B6TBV2; Match level="QueryCoverage=87%, HitCoverage=87%, E-value=0.0, Identity=85%"; Hit description=Protein GPR108
  Pfam annotation: Domain name=Lung_7-TM_R; Domain location=149-439; Score=144.4; E_value=3.6e-40; Accession=PF06814.5; Description=Lung seven transmembrane receptor
MAASPSPRAAALPRRPAAVLLLLVLGAAMLVPPAAAEIRETLIRSDPRSIIPLDEFGFSHSGVLELNVSGITFDPPASAELDLSQLGFFLSTLDAWVHVLRQLQDLDVTCALQSELVKLAFTFDRLRPPSNPAGVEVARSSSFSTAFRVSEPGQYTLVFANCLGGGLKVGMDVRSAMYNVDPATGDRQYLSAGASSLPSIYFLFCLAYAGLAAAWVAILLRKRAAVFRIHYFMLAVLVLKALNLLAEAEDKSCIERTGTAHGWDVLFYIFSFLKGISLFTLIVLIGTGWSFLKPYLADKEKKVLMVVIPLQVVANIAQVVIDESGPYARDWVTWKQIFLLVDVVCCCAVLFPIVWSIKNLREAARSDGKAAVNLMKLTLFRQYYVVVICYIYFTRVVVYALQTITSYRYLWTSVVAGELATLAFYVFTGYKFRPEVHNPYFAIDDEEEEAAAQALKLDDEFEL

SEQ ID NO: 75365 - protein, 83 aa, Setaria italica
  Transcript Sequence Number=SeqID_9391
REILALPQLNFDAHRYQVSTSSALTHETGEMASEPSSIYIPANAMLQHQISIAWELDEALFFLLLLFLSLVVPFPWCLWAASS

SEQ ID NO: 75366 - protein, 144 aa, Setaria italica
  Transcript Sequence Number=SeqID_9392
  Gene Ontology: Mol. function=electron carrier activity; Cellular component=endoplasmic reticulum membrane; Biological process =oxidation reduction
  Homolog annotation: Hit_ID=Q0Z7U8; Match level="QueryCoverage=98%, HitCoverage=27%, E-value=8e-67, Identity=86%"; Hit description =Flavonoid 3'-hydroxylase
LSLPRVAAEDCEVGGYLVPAGTTLLVNVWAIARDPDAWPEPLEFRPDRFLSGGPHAGVDVKGSDFELIPFGAGRRICAGLSWGLRMVTLMTAALVHGLDWHLAGGVDADKLDMEEAYGLTLQRAVPLMVRPEPRLLPSAYASVE

SEQ ID NO: 75367 - protein, 81 aa, Setaria italica
  Transcript Sequence Number=SeqID_9393
  Gene Ontology: Mol. function=protein serine/threonine kinase activity; Biological process=protein amino acid phosphorylation
  Homolog annotation: Hit_ID=Q5SMJ0; Match level="QueryCoverage=100%, HitCoverage=6%, E-value=1e-25, Identity=79%"; Hit description =Putative salt-inducible protein kinase
  Pfam annotation: Domain name=PB1; Domain location=10-81; Score=9.1; E_ value=0.032; Accession=PF00564.16; Description=PB1 domain
SFGGRIAPRPGDGALRYVGGQTRLISVPRAASFGELLRKVEAVDEAASPGGAGGGVLLRYQLPGEDLDALISVSGPEDYDN

SEQ ID NO: 75368 - protein, 515 aa, Setaria italica
  misc_feature (99)..(99): Xaa can be any naturally occurring amino acid
  Transcript Sequence Number=SeqID_9394
  Gene Ontology: Mol. function=electron carrier activity; Cellular component=membrane; Biological process=oxidation reduction
  Homolog annotation: Hit_ID=Q6H516; Match level="QueryCoverage=99%, HitCoverage=90%, E-value=0.0, Identity=86%"; Hit description =Putative cytochrome P450
  Pfam annotation: Domain name=p450; Domain location=25-509; Score =237.3; E_value=3.8e-68; Accession=PF00067.14; Description=Cytochrome P450
KQRNMLDNASNLLTNFLSGGSLGAMPVAEGAVTDLFGKPLFFSLYDWFLEHGSVYKLAFGPKSFVVVSDPMVARHILRENAFCYDKGVLAEILKPIMGXGLIPADLDTWRQGRKVITPGFHALFIEAMVRIFTKCSERTISKLEELTESESQVIVDLEAEFSNLALDIIGLGVFNFDFDSVTKESPVIKAVYGTLFEAEHRSTFYIPYWNLPLTKWIVPRQRKFHSDLKVINDCLDNLIKNAKETRQEADVEKLQQRDYSSLKDVSLLRFLVDMRGADVDDRQLRDDLMTMLIAGHETTAAVLTWSVFLLAQSPTKMRKAQTEVDSVLSNGAITVESLKKLEYIKLIILEALRLYPQPPLLIRRSLRPDKLPGGYNGAKEGYEIPAGTDIFVSIYNLHRSPYFWDRPNEFEPERFSVPKKDESIEGWSGFDPERSPGAMYPNEIIADFAFLPFGGGPRKCVGDQFALLESTVALALLLRKFDVELRGSPDEVEMVTGATIHTKNGLWCRLRRRTT

SEQ ID NO: 75369 - protein, 128 aa, Setaria italica
  Transcript Sequence Number=SeqID_9395
  Homolog annotation: Hit_ID=Q940D2; Match level="QueryCoverage=95%, HitCoverage=46%, E-value=5e-50, Identity=72%"; Hit description=SKIP5- like protein
YWSSFLRFLACHPRLWLRVERPIRDVMEPGVYPNLEAAVSAARPGDTILVAAGGTHVACNIQIKKTICIIGGGELPDDTVLTCSCGSDNALEFLSTCKIANLTIRAELGCCLLHRSGRLTIQECLLQC

SEQ ID NO: 75370 - protein, 179 aa, Setaria italica
  misc_feature (140)..(140): Xaa can be any naturally occurring amino acid
  misc_feature (149)..(149): Xaa can be any naturally occurring amino acid
  misc_feature (164)..(164): Xaa can be any naturally occurring amino acid
  Transcript Sequence Number=SeqID_9396
  Homolog annotation: Hit_ID=Q940D2; Match level="QueryCoverage=99%, HitCoverage=67%, E-value=5e-61, Identity=64%"; Hit description=SKIP5- like protein
SYPNLEAAVSAARPGDTILVAAGGTHVACNIQIKKTICIIGGGELPDDTVLTCSRGSDNALEFLSTCKIANLTIRAELGCCLLHRSGRLTIQECLLQCEQNPLDYLSFPIISTAIEYNSFPSLKGQGHGVTVVRTRIEGXAKAVRTNGXLALQHVRAIYSLSSXFFWFEVGEKVENAVH

SEQ ID NO: 75371 - protein, 142 aa, Setaria italica
  misc_feature (18)..(18): Xaa can be any naturally occurring amino acid
  misc_feature (54)..(54): Xaa can be any naturally occurring amino acid
  Transcript Sequence Number=SeqID_9397
  Homolog annotation: Hit_ID=Q940D2; Match level="QueryCoverage=59%, HitCoverage=32%, E-value=2e-32, Identity=72%"; Hit description=SKIP5- like protein
RSRPAPQAAAWRRGLEKXRNGEAPARSGAGRGGADLAGEQPGRRLPHAHLQFPXPNSRWRFLACHPRLWLRVERPIRDVMEPGVYPNLEAAVSAARPGDTILVAAGGTHVACNIQIKKTICIIGGGELPDDTVLTCSRGSDK

SEQ ID NO: 75372 - protein, 147 aa, Setaria italica
  Transcript Sequence Number=SeqID_9398
  Homolog annotation: Hit_ID=Q940D2; Match level="QueryCoverage=95%, HitCoverage=53%, E-value=1e-44, Identity=63%"; Hit description=SKIP5- like protein
IHFASIRLVGVELPDDTVLTCSRGSDNALEFLSTCKIANLTIRAELGCCLLHRSGRLTIQECLLQCEQNPLDYLSFPIISTAIEYNSFPSLKGQGHGVTVVRTRIEGGAKAVRTNGTLALQHVRAIYSRSSVFFWFEVGEKVENAVH

SEQ ID NO: 75373 - protein, 131 aa, Setaria italica
  Transcript Sequence Number=SeqID_9399
DEHVLNLPGDYYGNYRVTCYYQNKALILYQLQFQYGHTPNPTRKKETKKKTAAKLTRETEQEGRAQATASSQSHSGREGWHPMHRRRIPRKPTPQPIDSLTSILRPNSNSNSNRIPLATSILWGAPPNAHV

SEQ ID NO: 75374 - protein, 77 aa, Setaria italica
  Transcript Sequence Number=SeqID_9400
MASGGFVEEMMREQSLLEATCGDLFDHIDDLLDFPKEESAADVLLLDAPAPGSPLSARIIDVGARGNNAQSAPAPPA

SEQ ID NO: 75375 - protein, 211 aa, Setaria italica
  misc_feature (101)..(101): Xaa can be any naturally occurring amino acid
  Transcript Sequence Number=SeqID_9401
  Gene Ontology: Mol. function=electron carrier activity
  Homolog annotation: Hit_ID=C3NT87; Match level="QueryCoverage=99%, HitCoverage=30%, E-value=3e-18, Identity=33%"; Hit description =NAD(FAD)-utilizing dehydrogenase
GRLSKLAVPASDDPGKDFTGISLPLLQAIAKAIKFPVASMLPDEAFTVIRKSFDARKVLKEPQFSYTVDMDVKKLLDMEPRAWDFIARLEPKLGAVEYMPXEILASDLVSMLNVSNEGYNNELGIRDTHNGSICPQDKKPRVAVIGSGPSGLFASLVLGELGAKVTLLERGQPVEQRGRDIGALAVRRILQSESNFCFGEGGAGTWSDGKL

SEQ ID NO: 75376 - protein, 78 aa, Setaria italica
  Transcript Sequence Number=SeqID_9402
LASTSVAAAEPQRILRRFHVEELVLLVLVLFCGSARKGKRNLHAVMCSYRKKSYDGSQMCLDISSSELHENNAWPVGT

SEQ ID NO: 75377 - protein, 326 aa, Setaria italica
  Transcript Sequence Number=SeqID_9403
  Gene Ontology: Cellular component=integral to membrane
  Homolog annotation: Hit_ID=Q9LN61; Match level="QueryCoverage=97%, HitCoverage=46%, E-value=4e-42, Identity=32%"; Hit description =F18O14.9
KTSKAYSFDPSERFKAYGFTEAGDLVHVLLLGDVSSLKCRVRAVKKAEIDSPVAIHTVKGYLLVASHDKILVYNTSSQYYGRVGAPRPLFATTIKDIKSVFAGSGGVLPSAPAGKPVIAADREKLVILGLGDGHIAIYRSNFPVYKPESNAVVWSGPALLFLLFLIGIWQVYVKKKDSLGWTPEETFNTSVTAPTGSLLNHPASDRAFADSTARTSDRGYVDGTARASDRSYVDSNTRTTDRGYADATRAVDLRGGALRSAPRRYVSPTRYAGTSGIQYRPASAEPGLRGTSELKYRGPGMEPPGFPKKRDTLFSNNQAVVDDHVD

SEQ ID NO: 75378 - protein, 398 aa, Setaria italica
  Transcript Sequence Number=SeqID_9404
  Gene Ontology: Mol. function=2 iron, 2 sulfur cluster binding; Cellular component=chloroplast envelope; Biological process =oxidation reduction
  Homolog annotation: Hit_ID=B6ST74; Match level="QueryCoverage=100%, HitCoverage=75%, E-value=0.0, Identity=88%"; Hit description =Pheophorbide a oxygenase
  Pfam annotation: Domain name=PaO; Domain location=172-264; Score =146.5; E_value=7.9e-41; Accession=PF08417.4; Description =Pheophorbide a oxygenase
LAPLSEGRIDDKGRLQCVYHGWCFDGAGACKFIPQAPALGPPVHTNSKACVASYPCVVQNNILWFYPRAEPEYKDVLQRKRPPLIPEIDDPEFVTVYGIRDLPYGYDVLVENLMDPAHVPYAHKGIMRGIRKKEDPGRVDYDKEGGGPIKMKIEHADIQGFLSPQERGYFQFAAPCTFFGTPFQPQEGKKKTPRILLVFFCIPVAPGKSRVIWAFPRNVGVWLHKITPRWLYHVGQNLILDSDIFLLHVEERKFAAVGLDNWQKACYVPTSSDNMVIAFRNWFRKFCKNRVGWATPQVDQLPPTPTKDQLMERYWSHVAQCTSCSAGLKAMKALEVALQITSVAVVGFLAVAKGTLVTSTVQRAAVVSAAVLCFAASRWLANFIQKNFYFQDYVHAYK

SEQ ID NO: 75379 - protein, 131 aa, Setaria italica
  Transcript Sequence Number=SeqID_9405
  Subcellular localization annotation: CTP_CleavageSite=39; ConfidenceScore=5.32e-01
PCWPSPNTSLNPASTHPSNQRTQRYTHERTSSSLLRRVRDQEAQEEGTPLLDQEQSRRTQKCSLLPVCFDSINCKIRNDDDDERYSLLRRHGHRGGVAAMGSLALRRNPPPPFSKSPGSLLLLSKSLTLYC

SEQ ID NO: 75380 - protein, 119 aa, Setaria italica
  Transcript Sequence Number=SeqID_9406
  Gene Ontology: Mol. function=protein serine/threonine kinase activity; Biological process=protein amino acid phosphorylation
  Homolog annotation: Hit_ID=Q01M96; Match level="QueryCoverage=66%, HitCoverage=26%, E-value=3e-29, Identity=73%"; Hit description =OSIGBa0146N20.4 protein
  Pfam annotation: Domain name=DUF26; Domain location=31-83; Score =63.8; E_value=6.6e-16; Accession=PF01657.9; Description=Domain of unknown function DUF26
SGDTPPSSLPEAPKFATGEAVYDPGIPNGTMYGLMQCMRDLTAAECQKCLQDSVPRLPSCCYGNLGGVVRGYNCYIRMEIYTYYDLKLDPPPLQRKLRPTSSDKVREKGSWFDSRRGPP

SEQ ID NO: 75381 - protein, 87 aa, Setaria italica
  Transcript Sequence Number=SeqID_9407
  Gene Ontology: Mol. function=oxidoreductase activity
  Homolog annotation: Hit_ID=B6THE1; Match level="QueryCoverage=100%, HitCoverage=27%, E-value=2e-29, Identity=68%"; Hit description =Aldose reductase
TSLSESLGKTPAQVALRWGIQQGQSVLPKSANESRLKENIDLFGWSIPEELCAKFSEIEQVKQIRNDSFVHPQGMYKTIEELWDGEI

SEQ ID NO: 75382 - protein, 102 aa, Setaria italica
  Transcript Sequence Number=SeqID_9408
IRIRLRFWLWIRLWCWFGFRLRVRLWRGVWIGLRLGLELNPKSSLEEKSKPRASTPVPRPDPKPTPKPKPKPEPSPKPTPEPEPKPQPQPSKPDPQPGPKPT

SEQ ID NO: 75383 - protein, 128 aa, Setaria italica
  Transcript Sequence Number=SeqID_9409
GVGLGPVLVRLWRRVWIRLRLGLWVRAAVGALGQAVVLVWSGSCQVVAQPDLKPQPDPNNPAPQPDLKPEPQPGPSKLELELNPKSSLEEKSKPRASTPVPRPDPKPTPKPKPKPEPSPKPTPEPEPK

SEQ ID NO: 75384 - protein, 72 aa, Setaria italica
  Transcript Sequence Number=SeqID_9410
  Gene Ontology: Mol. function=protein kinase activity; Biological process=protein amino acid phosphorylation
  Homolog annotation: Hit_ID=B9SI80; Match level="QueryCoverage=77%, HitCoverage=7%, E-value=9e-17, Identity=69%"; Hit description =Leucine-rich repeat protein, putative
CKPTWSQRISAAIGVAKGIQFLHGGIIPGLVGNDLRITNILLDQNHVAKIGNYNIPILAEAMKSEVDGRKLN

SEQ ID NO: 75385 - protein, 108 aa, Setaria italica
  Transcript Sequence Number=SeqID_9411
VGVWIGLRLGLWIRLWCWFGFRFLVRLWRRVWIRRNPNPSPKPEPKPTPQPDPKPEPQPDPNNPAPQPDLKPEPQPGPSKLELELNPKSSLEEKSKPRASTPVPRPDP

SEQ ID NO: 75386 - protein, 155 aa, Setaria italica
  misc_feature (8)..(8): Xaa can be any naturally occurring amino acid
  Transcript Sequence Number=SeqID_9412
  Gene Ontology: Mol. function=oxidoreductase activity
  Homolog annotation: Hit_ID=B6THE1; Match level="QueryCoverage=100%, HitCoverage=51%, E-value=2e-53, Identity=62%"; Hit description =Aldose reductase
  Pfam annotation: Domain name=Aldo_ket_red; Domain location=1-128; Score=-36.3; E_value=4.6e-06; Accession=PF00248.13; Description =Aldoketo reductase family
AVGVSNFXTKKLADLLALARVPPAVNQVECHPGWQQAKLRSFCHSTGVHFSAYAPLGRMKVVANNPVVTSIAESLGKTPAQVALRWGIQQGQSVLPKSANESRLKENIDLFGWSIPEELCAKFSEIEQVKQIRNDSFVHPQGMYKTIEELWDGEI

SEQ ID NO: 75387 - protein, 106 aa, Setaria italica
  Transcript Sequence Number=SeqID_9413
MPLALIFLQVKIWGPSKLELELNPKSSLEEKSKPRASTPVPRPDPKPTPKPKPKPEPSPKPTPEPEPKPQPQPSKPDPQPGPKPTPSKPEPPSLSSPIGTGTMGGN

SEQ ID NO: 75388 - protein, 118 aa, Setaria italica
  misc_feature (49)..(49): Xaa can be any naturally occurring amino acid
  Transcript Sequence Number=SeqID_9414
  Gene Ontology: Mol. function=oxidoreductase activity
  Homolog annotation: Hit_ID=B6THE1; Match level="QueryCoverage=95%, HitCoverage=36%, E-value=4e-31, Identity=57%"; Hit description =Aldose reductase
MLAACNFQAYAPLGRMKVVANNPVVTSIAESLGKTPAQVALRWKLLYGXGIQQGQSVLPKSANESRLKENIDLFGWSIPEELCAKFSEIEQVKQIRNDSFVHPQGMYKTIEELWDGEI

SEQ ID NO: 75389 - protein, 282 aa, Setaria italica
  Transcript Sequence Number=SeqID_9415
  Gene Ontology: Mol. function=protein binding; Cellular component =membrane; Biological process=negative regulation of proteolysis
  Homolog annotation: Hit_ID=Q9M587; Match level="QueryCoverage=100%, HitCoverage=100%, E-value=1e-130, Identity=82%"; Hit description =Prohibitin
  Pfam annotation: Domain name=Band_7; Domain location=34-213; Score =116.2; E_value=1.1e-31; Accession=PF01145.17; Description=SPFH domain  Band 7 family
MAGGGQAAVSFLTRIAKVAAGIGVAASAASTSLYTVDGGERAVIFDRLRGVLPRTEAEGTHLLVPILQKPFIFDIRTRPHSFSSTSGTKDLQMVSLTLRVLSRPDVDRLPEIFNSLGLEYDEKVLPSIGNEVLKAVVAQFNADQLLTERPHVSALVRESLTQRAREFNIVLDDVAITHLAYGPEFAQAVEKKQVAQQEAERSRFLVARADQERRAAIVRAEGESEAARLISEATTTAGNGLIELRRIEAAKEIAGVLARSPNVSYIPAGDNGQMLLGLNAAR

SEQ ID NO: 75390 - protein, 224 aa, Setaria italica
  misc_feature (97)..(97): Xaa can be any naturally occurring amino acid
  misc_feature (118)..(118): Xaa can be any naturally occurring amino acid
  Transcript Sequence Number=SeqID_9416
  Subcellular localization annotation: CTP_CleavageSite=4; ConfidenceScore=5.16e-01
SKARSQTNTTTTTQTPDPNQHHNPTRKSRQPQPDPNLTPRPDPKPQPQPDLKPQPQPDPNPAPQPDKKPEPKPTPQPDPKPQPQPDPNPTPQPDPEXPEPKPTPQPDPKPEPQPDPEXPAPQPDLKPEPQPGPSKLELELNPKSSLEEKSKPRASTPVPRPDPKPTPKPKPKPEPSPKPTPEPEPKPQPQPSKPDPQPGPKPTPSKPEPPSLSSPIGTGTMGGN

SEQ ID NO: 75391 - protein, 680 aa, Setaria italica
  misc_feature (204)..(204): Xaa can be any naturally occurring amino acid
  misc_feature (409)..(409): Xaa can be any naturally occurring amino acid
  Transcript Sequence Number=SeqID_9417
  Gene Ontology: Mol. function=protein tyrosine kinase activity; Cellular component=integral to membrane; Biological process=protein amino acid phosphorylation
  Homolog annotation: Hit_ID=B9SI80; Match level="QueryCoverage=95%, HitCoverage=82%, E-value=0.0, Identity=52%"; Hit description=Leucine- rich repeat protein, putative
  Pfam annotation: Domain name=LRR_1; Domain location=115-133; Score =6.3; E_value=19; Accession=PF00560.25; Description=Leucine Rich Repeat
  Pfam annotation: Domain name=LRR_1; Domain location=136-158; Score =4.4; E_value=43; Accession=PF00560.25; Description=Leucine Rich Repeat
  Pfam annotation: Domain name=LRR_1; Domain location=160-182; Score =6.5; E_value=18; Accession=PF00560.25; Description=Leucine Rich Repeat
  Pfam annotation: Domain name=LRR_1; Domain location=184-206; Score =7.4; E_value=12; Accession=PF00560.25; Description=Leucine Rich Repeat
  Pfam annotation: Domain name=LRR_1; Domain location=19-41; Score=7.2; E_value=13; Accession=PF00560.25; Description=Leucine Rich Repeat
  Pfam annotation: Domain name=LRR_1; Domain location=209-228; Score =6.0; E_value=22; Accession=PF00560.25; Description=Leucine Rich Repeat
  Pfam annotation: Domain name=LRR_1; Domain location=360-385; Score =2.4; E_value=1.1e+02; Accession=PF00560.25; Description=Leucine Rich Repeat
  Pfam annotation: Domain name=LRR_1; Domain location=43-65; Score=9.1; E_value=5.4; Accession=PF00560.25; Description=Leucine Rich Repeat
  Pfam annotation: Domain name=LRR_1; Domain location=67-89; Score=9.8; E_value=4; Accession=PF00560.25; Description=Leucine Rich Repeat
  Pfam annotation: Domain name=LRR_1; Domain location=91-113; Score =4.4; E_value=43; Accession=PF00560.25; Description=Leucine Rich Repeat
  Pfam annotation: Domain name=Pkinase; Domain location=371-643; Score=- 29.4; E_value=9.6e-07; Accession=PF00069.17; Description=Protein kinase domain
  Pfam annotation: Domain name=Pkinase_Tyr; Domain location=371-641; Score=-21.5; E_value=2.7e-12; Accession=PF07714.9; Description =Protein tyrosine kinase
  Pfam module annotation: Pfam domain module=LRR_1::LRR_1::LRR_1::LRR _1::LRR_1::LRR_1::LRR_1::LRR_1::LRR_1::LRR_1::Pkinase::Pkinase_Tyr; Domain location=115-133::136-158::160-182::184-206::19-41::209 -228::360-385::43-65::...
  Pfam module annotation: Domain location=67-89::91-113::371-643::371 -641
LSSVGLWGPLPGKLGRLAALEIVNVSGNYLYGDIPRGMSRLAGLQTLVLDDNILGGELPAWIGTLPSLTVLSLRNNTFRGAVPESIGSMPSLRSLVLASNNPVPGNLPDMSRLTNLQAIDVSGNSLGPAFPKLGRKVVTVVLSRNRFGGGLPEALGSFYLLERLDVSWNRFVGPFTPALLSLPSIRYLSIAGNRFTGTLSDKAXVAADNLRFVDLSLNLLMGSVPACLRSPDRKPDTVVLVSTNCLDSSDGSQRPSPFCQNQALAVGIMPGKERRNAASKAGFVAGIVMATLVAVSVVGFIVFFTVRKAATKGSKARTLATSEEESSSTGYPSKLLADARYISQTVKLGALGIPSYRSFSLVELEAATNNFENSYLLGQDSLGEMYRGRLGNGTPVTIRTLKIKRSQNXQSLNRHIDTISRLRHQNLVSALGHCFEYDLDDSTVTQLYIVFEYVQNGNLRSRISQGTEGCKLTWSQRISAAIGVAKGIQFLHGGIIPGLVGNDLRITNILLDQNHVAKIGNYNIPILAEAMKSEKGGAGNKFQTDSPMYSDKTDIFDFGVILLEVVSGKTITSMYEVDILKELLAWAIADEDRVRRRSFADPAVSKGCSDESLRTVMEICQRCLAKEAAQRPSVEDVLWNLQFAAQVQDDWEVEAWSSGGGSPVSSSSRVTRPSRLNLSR

SEQ ID NO: 75392 - protein, 285 aa, Setaria italica
  misc_feature (253)..(253): Xaa can be any naturally occurring amino acid
  Transcript Sequence Number=SeqID_9418
  Gene Ontology: Mol. function=protein binding; Cellular component =membrane; Biological process=negative regulation of proteolysis
  Homolog annotation: Hit_ID=Q9M587; Match level="QueryCoverage=97%, HitCoverage=98%, E-value=1e-117, Identity=74%"; Hit description =Prohibitin
  Pfam annotation: Domain name=Band_7; Domain location=33-212; Score =123.8; E_value=5.4e-34; Accession=PF01145.17; Description=SPFH domain  Band 7 family
  Subcellular localization annotation: CTP_CleavageSite=18; ConfidenceScore=5.05e-01
MAGGPAAVSFLTNIAKVAAGLGAAASLLSASLFTVDGGERAVIFDRFRGVLPQTVSEGTHFIVPWLQKPYIFDIRTRPHNFSSNSGTKDLQMVNLTLRLLSRPDVEHLPTIFTSLGLEYDDKVLPSIGNEVLKAVVAQFNADQLLTDRPHVSALVRDALIRRAREFNIILDDVAITHLSYGIEFSQAVEKKQVAQQEAERSKFLVAKAEQERRAAIVRAEGESESARLISEATAMAGTGLIELRRIEAAKEIXAAELSRSPNVAYIPAGDNGKMLLGLNASGFGR

SEQ ID NO: 75393 - protein, 336 aa, Setaria italica
  misc_feature (56)..(56): Xaa can be any naturally occurring amino acid
  misc_feature (75)..(75): Xaa can be any naturally occurring amino acid
  misc_feature (129)..(129): Xaa can be any naturally occurring amino acid
  misc_feature (189)..(189): Xaa can be any naturally occurring amino acid
  misc_feature (297)..(297): Xaa can be any naturally occurring amino acid
  Transcript Sequence Number=SeqID_9419
  Gene Ontology: Mol. function=transcription factor activity; Cellular component=nucleus
  Homolog annotation: Hit_ID=B6SUE2; Match level="QueryCoverage=100%, HitCoverage=100%, E-value=6e-60, Identity=47%"; Hit description =Pathogenesis-related transcriptional activator PTI6
  Pfam annotation: Domain name=AP2; Domain location=117-169; Score =39.2; E_value=1.6e-08; Accession=PF00847.12; Description=AP2 domain
  Subcellular localization annotation: CTP_CleavageSite=55; ConfidenceScore=5.33e-01
MAPLNHQQMLIKKALAKKPKTKRISGFGLKPSAALLKARPQMQPPAPVQPRRRVRXVLFEDPDATDSDSDDEEAXGAPTGPVKSKRFSFEMFVGKAPPKPVLPAATVAASTSGGSPESYRGVRLRKWGXKWAAEIRNPFTGKRQWLGTFDTAGAASAAYLSASRSFADEKRRRRGQPVPASSPASSASXATPTASSSSSTSAAPFAHPSPSSVLEATKPALKAESPEPVATPILPSTEAAQLPDDPEFYQDLLRGLQLPDIDPMDFRAGLDALDVSDAPFCLDDDQDLLFGDFADEXELDEIDLDLDDINDVFPEIPGCDLGRGMDDFLQTVDFCV

SEQ ID NO: 75394 - protein, 106 aa, Setaria italica
  Transcript Sequence Number=SeqID_9420
  Gene Ontology: Mol. function=calcium ion binding; Cellular component =membrane; Biological process=protein transport
  Homolog annotation: Hit_ID=Q9LLR3; Match level="QueryCoverage=100%, HitCoverage=16%, E-value=2e-51, Identity=83%"; Hit description =Vacuolar targeting receptor bp-80
DECGAKCDMQMNFVRSFRGIAQALEKRGYTQFTPHYITWYCPEAFVLSKQCKSQCINHGRYCAPDPEQDFSIGYDGKDVVLQNLIQICVFKVANESRKPWMWWDYV

SEQ ID NO: 75395 - protein, 119 aa, Setaria italica
  Transcript Sequence Number=SeqID_9421
MDSGDDERSTSKHHHRDKDKDRERSSSRHHRDKDRDRERSSSRHHREDGDRDRDRHHRDKEKDRDREERKEREREERKAREREEREREKERAREEKEKERARRREERDREERDRSSRRR

SEQ ID NO: 75396 - protein, 233 aa, Setaria italica
  Transcript Sequence Number=SeqID_9422
  Gene Ontology: Mol. function=protein serine/threonine kinase activity; Biological process=protein amino acid phosphorylation
  Homolog annotation: Hit_ID=B9T5V6; Match level="QueryCoverage=73%, HitCoverage=23%, E-value=2e-53, Identity=59%"; Hit description=ATP binding protein, putative
  Pfam annotation: Domain name=Pkinase_Tyr; Domain location=130-233; Score=-136.6; E_value=0.00012; Accession=PF07714.9; Description =Protein tyrosine kinase
LQSLSPSLPGGLDPSGTEDPITAAVPNQKKKHKKSDIWIIVIVSGSSLGLLLICAVILILIIKWKKVGRLHDAMSSATTPAANRRYGARSALSTSMVSSASASMLSTVATCTSSVKTFSLAQLQKATDGFDSKRVLGQGGFGRVYHGMMEDGNEIAVKLLTREDRSGDREFIAEVEMLSRLHHRNLVKLIGICIERNKRCLVYELIRNGSVESHLHGADKAKRTLNWDVRMKI

SEQ ID NO: 75397 - protein, 47 aa, Setaria italica
  Transcript Sequence Number=SeqID_9423
  Gene Ontology: Mol. function=microtubule motor activity; Cellular component=microtubule associated complex; Biological process =microtubule-based process
MLEGKARVEDTDMPARMQAAATSAASRALDLFDVADCRAIAGHIKTE

SEQ ID NO: 75398 - protein, 221 aa, Setaria italica
  misc_feature (92)..(92): Xaa can be any naturally occurring amino acid
  Transcript Sequence Number=SeqID_9424
  Homolog annotation: Hit_ID=Q7XT54; Match level="QueryCoverage=67%, HitCoverage=22%, E-value=3e-37, Identity=49%"; Hit description =OSJNBa0010D21.8 protein
MPEVKTRQKEDDAQQIEAKERKQPEKKRLTKEEKAKQIEERKQKQQEDKLRKQALKAQVAAKKKKDKEIQKWESGKCALECITAEIDSSIIXNGSIGGPLLSSLSENGLRYKPTDNKISGSILWKMDVPDDIAQELSSRDACDMNQASVSRVEYISIVLEAEEFCDLISSGSFFNHVQRVRNEYPSFTVCYITNKLMSYINKREQSQYKNNSNTWKRPPVE

SEQ ID NO: 75399 - protein, 647 aa, Setaria italica
  misc_feature (529)..(529): Xaa can be any naturally occurring amino acid
  Transcript Sequence Number=SeqID_9425
  Gene Ontology: Mol. function=ATPase activity, coupled to transmembrane movement of substances; Cellular component=integral to membrane; Biological process=transport
  Homolog annotation: Hit_ID=Q8GU65; Match level="QueryCoverage=99%, HitCoverage=55%, E-value=0.0, Identity=74%"; Hit description=MRP -like ABC transporter
  Pfam annotation: Domain name=ABC_membrane; Domain location=87-356; Score=59.9; E_value=9.4e-15; Accession=PF00664.15; Description=ABC transporter transmembrane region
  Pfam annotation: Domain name=ABC_tran; Domain location=432-615; Score= 162.7; E_value=1.1e-45; Accession=PF00005.19; Description=ABC transporter
  Pfam module annotation: Pfam domain module=ABC_membrane::ABC_tran; Domain location=87-356::432-615
SALVSAHDSSMELVEQSRQVQDSERSQPVAVARIPSLRSRSIGKGEKMVVAPEIQAATSKIIQEEERESGQVSWQVYKLYMTEAWGWWGVVGMVAFAVVWQGSDMASDYWLSYETSGSIPFNPSLFIGVYVAIAVFSIVLQVIKTLLETILGLQTAQIFFKKMFDSILHAPMSFFDTTPSGRILSRASSDQTAIDVVLAFFIGLTISMYISVLSTIIVTCQVAWPSVIAVIPLLLLNIWYRNRYLATSRELTRLEGVTKAPVIDHFSETVLGATTIRCFKKDKEFFQENLDKINSSLRMYFHNYAANEWLGFRLELIGTLVLSITAFLMISLPSNFIKKEFVGMSLSYGLSLNSLVYFAISISCTLENDMVAVERVNQFSNLPSEAAWKVEDRLPSPNWPTHGDIDIKNLKVRYRPNTPLILKGINIRISGGEKIGVVGRTGSGKSTLVQALFRLVEPAEGKIIIDGIDICTLGLHDLRSRFGIIPQEPVLFEGTIRSNIDPIGQYSDAEIWQALERCQLKDVVVSKPXKLDAPVADSGENWSVGQRQLLCLGRVILKQTRILFMDEATASVDSQTDATIQKITRQEFSSCTIISIAHRIPTVMDCDRVLVLDAGLVKEFDAPSRLLEHASLFSAMVEEYANRSANL

SEQ ID NO: 75400 - protein, 90 aa, Setaria italica
  misc_feature (81)..(81): Xaa can be any naturally occurring amino acid
  Transcript Sequence Number=SeqID_9426
  Gene Ontology: Mol. function=metalloendopeptidase activity; Cellular component=chromosome, telomeric region; Biological process =proteolysis
  Homolog annotation: Hit_ID=O49653; Match level="QueryCoverage=83%, HitCoverage=21%, E-value=2e-16, Identity=49%"; Hit description =Glycoprotein endopeptidase - like protein
MSSSPSPASRRPTGPLALGLESSANKIGIGVVSLSGEILSNPRHTYVTPPGHGFLPRETAQHHLVHLLPLLRAALAEAGIXPSDLACVCY

SEQ ID NO: 75401 - protein, 399 aa, Setaria italica
  Transcript Sequence Number=SeqID_9427
  Gene Ontology: Mol. function=hydrolase activity; Biological process =lipid metabolic process
  Homolog annotation: Hit_ID=Q949N8; Match level="QueryCoverage=99%, HitCoverage=57%, E-value=1e-115, Identity=54%"; Hit description =Putative lipase
  Pfam annotation: Domain name=Abhydro_lipase; Domain location=281-344; Score=85.1; E_value=2.5e-22; Accession=PF04083.8; Description=ab -hydrolase associated lipase region
MLQEFVDNVIAVTKESVKTFTYESLNNIARFINGISALLLTLLPGKGNILEGISGWELKPALRGPRLPRWMESGVSSFNEFIHELSADSDTESVADSITGDDENEEFVCPPSPLSQSSRLSRASSFGRRDRRLRRHIRYAVSWILWPLRFFISLLLVLFSAIKFRIIRSSSKSAETPHYSRSSPAKRSFHIRDQFLQRTTDRRRGVFEDLHLAIEIFIESVFDIVHKGAHYVLSPSEVWQKLFSWIHGSGHDTSPVVDVPTANVGSDNPVPTERKAVNRHSLNTDSRTCEDVITELGYPFEAIKVVTSDGYVLLLERIPRRDSQKVVLLQHGILDSSMGWVSNGVVGSPAFAAYDQGYDVFLGNLRGLVSREHIDKNISSYKYWKYSVNEHGTKDMPAI

SEQ ID NO: 75402 - protein, 182 aa, Setaria italica
  misc_feature (19)..(19): Xaa can be any naturally occurring amino acid
  Transcript Sequence Number=SeqID_9428
  Gene Ontology: Mol. function=RNA polymerase II transcription factor activity; Cellular component=nucleus; Biological process=regulation of transcription factor activity
  Homolog annotation: Hit_ID=B9SYZ0; Match level="QueryCoverage=97%, HitCoverage=37%, E-value=1e-29, Identity=44%"; Hit description =Transcription initiation factor tfiid, putative
ELQLEKQKNEMKRKEALPXPCGALLCAAGKCLYDRLKLFPVLLSPSTRPLLRSDKRVLTNNPNKRKSSTDLSASQPPLKKMATDASVNSMAGNMQGAMDGFSTQLGNPSMMQASSSGQLVESIPSAVIRRDQGSDLAQKVSTVLRQAWKEDQDAGHLLGSLYEVFGEAIFSFVQPPEMSLFV

SEQ ID NO: 75403 - protein, 423 aa, Setaria italica
  misc_feature (54)..(54): Xaa can be any naturally occurring amino acid
  misc_feature (417)..(417): Xaa can be any naturally occurring amino acid
  Transcript Sequence Number=SeqID_9429
  Gene Ontology: Mol. function=RNA polymerase II transcription factor activity; Cellular component=nucleus; Biological process=regulation of transcription factor activity
  Homolog annotation: Hit_ID=B9SSH5; Match level="QueryCoverage=100%, HitCoverage=77%, E-value=1e-166, Identity=67%"; Hit description =Transcription initiation factor tfiid, putative
  Pfam annotation: Domain name=DUF1546; Domain location=263-356; Score =189.5; E_value=9.4e-54; Accession=PF07571.5; Description=Protein of unknown function (DUF1546)
  Pfam annotation: Domain name=TAF; Domain location=2-68; Score=146.9; E_value=6.3e-41; Accession=PF02969.9; Description=TATA box binding protein associated factor (TAF)
  Pfam module annotation: Pfam domain module=DUF1546::TAF; Domain location=263-356::2-68
MSIVPKETIEVIAQSVGIPSLGPDVAAALAPDVEYRLREIMQESIKCMRHAKRXVLTADDVDSALSLRNVEPVYGFASGDPLRFKRAVGHKDLFYLDDREVDFKEIIEAPLPKAPLDTAVVAHWLAIEGVQPAIPENPPIDAIVPPAENKRSEHGKDDGLPVDVKLPVKHVLSRELQMYFDKIAELTLSRSDTSLFKEALVSLAKDSGLHPLVPYFSYFVADEVTRSLGDLPVLFALMRVVRSLLHNPHIHIEPYLHQLMPSMITCIVAKRLGHRLSDNHWELRDFSANLVALVCRRFGHVYHNLQTRLTKTLIHAFLDPAKSLTQHYGAVQGISALGPSAIRLLLLPNLVTYMQLLEPELQLEKQKNEMKRKEAWRVYGALLCAAGKCLYDRLKLFPVLLSPSTRPLLRSDKRVLXNNPNKR

SEQ ID NO: 75404 - protein, 397 aa, Setaria italica
  misc_feature (80)..(80): Xaa can be any naturally occurring amino acid
  Transcript Sequence Number=SeqID_9430
  Homolog annotation: Hit_ID=Q8RZK7; Match level="QueryCoverage=89%, HitCoverage=64%, E-value=2e-91, Identity=53%"; Hit description =P0432B10.22 protein
  Pfam annotation: Domain name=NUFIP1; Domain location=125-180; Score =44.8; E_value=3.4e-10; Accession=PF10453.1; Description=Nuclear fragile X mental retardation-
ERNNSGDCNGEVNHFENKTDGISNFASENGNRTTYQKSRFNSGRDGRDVRQFGAPRGRGRGRHYNQRRGRVRVGIIVLYXAMLSVHHQAGNNNWGDTKSNFMSHESLASGRHSDVPAPASGGHRKRPSIIYDANEVKQWVEARKKNYPTSVNINKKLSESHLDNQNKDKDAQLRRQELKEVLAKQQELGLELPELPPGYLSETEDQGNEKKSNWKTQRRDSRFENRGNTSKRPRYERGEFQSKRSKVWNRTPSNDGALAKSREPTLLQKLLSSDIKRDRHRLLHTFKFMALNNFFKDWPDKQLQFPIVKVNQIEIEDNITTGNLDDLENAEMAKVSSLDTTGNGVRKELSSIDEETGIADHNDDDEEDGASADSRDEDGDEDADEEQFNEAEDDAAA

SEQ ID NO: 75405 - protein, 522 aa, Setaria italica
  Transcript Sequence Number=SeqID_9431
  Gene Ontology: Mol. function=histone-arginine N-methyltransferase activity; Cellular component=cytoplasm; Biological process =regulation of transcription, DNA-dependent
  Homolog annotation: Hit_ID=B6TUC1; Match level="QueryCoverage=99%, HitCoverage=97%, E-value=0.0, Identity=85%"; Hit description=Histone- arginine methyltransferase CARM1
  Pfam annotation: Domain name=MTS; Domain location=176-316; Score= -85.0; E_value=0.024; Accession=PF05175.6; Description=Methyltransfera se small domain
  Pfam annotation: Domain name=Met_10; Domain location=137-298; Score= -119.9; E_value=0.053; Accession=PF02475.8; Description=Met-10+ like -protein
  Pfam annotation: Domain name=Methyltransf_12; Domain location=191 -289; Score=15.0; E_value=0.021; Accession=PF08242.4; Description =Methyltransferase domain
  Pfam annotation: Domain name=PRMT5; Domain location=86-446; Score= -304.5; E_value=0.041; Accession=PF05185.8; Description=PRMT5 arginine-N-methyltransferase
  Pfam module annotation: Pfam domain module=MTS::Met_10::Methyltransf _12::PRMT5; Domain location=176-316::137-298::191-289::86-446
MASPDLFPNVTFSDVSAAAAPANEGATAAFGVGAATGAPRLSLVKAGKPEVEPTVEIDLFDAQIFKLGPSEWLCVYDESEAKAGVEEKSFSRAIKVVLRTEAESKAFSLAFQRWKQQVISGKAGEPLENGSIIASKSKFDTKIEASSAKMYFHYYGQLLHQQNMLQDFVRTGTYYAAVMENRSDFEGRVVVDVGAGSGILSLFAAQAGAKHVYAVEASEMAEHAQRLISGNPSLGQRITVIKGKVEEVELPEKVDILISEPMGTLLVNERMLESYVIARDRFLAPDGKMFPTTGRIHMAPFSDEYLYVEMANKALFWQQHNFFGVDLTPLHGSAFQGYFSQPVVDAFDPRLLISPPTYHTLDFTSMKEEELYEIDIPLSFVASVGTRVHGLACWFDVLFNGSTVQRWLTTAPGSPTTHWYQLRCVLSQPLYVMAGQEITGRLHLVAHSSQSYTIYLTMSAKMWGVEQDGILQTSTGKLELKEPYYRLSQPQSYMLQQDQQQQQQQLPSLKPQGSEQHMQEGL

SEQ ID NO: 75406 - protein, 155 aa, Setaria italica
  Transcript Sequence Number=SeqID_9432
  Gene Ontology: Mol. function=oligopeptide transporter activity; Cellular component=integral to membrane; Biological process =oligopeptide transport
  Homolog annotation: Hit_ID=B6SVF4; Match level="QueryCoverage=70%, HitCoverage=14%, E-value=2e-55, Identity=96%"; Hit description =Oligopeptide transporter 9
GKEEQERRHGDGGDDDDQITSPLLPPEPSTSRGGSPEEDEEEVVENSPIEQVALTVPVGDDPSTPVLTFRMWVLGTASCALLSFLNQFFWYRKEPLTITAISAQIAVVPLGRLMAAALPERAFLRGTRWEFSLNPGPFNVKEHVLITIFANSGAG

SEQ ID NO: 75407 - protein, 107 aa, Setaria italica
  misc_feature (10)..(10): Xaa can be any naturally occurring amino acid
  Transcript Sequence Number=SeqID_9433
  Gene Ontology: Mol. function=cAMP-dependent protein kinase regulator activity; Cellular component=protein serine/threonine phosphatase complex; Biological process=regulation of protein amino acid phosphorylation
  Homolog annotation: Hit_ID=B9RKK9; Match level="QueryCoverage=98%, HitCoverage=13%, E-value=1e-21, Identity=44%"; Hit description =Protein phosphatase 2c, putative
EDFRGILMSXEFSNIASLKLLRSVELFTRFTVLQLSQLAESLVEVSFADGQTIVDKAQSSQENGNYVVEIGEGGHFGEWTLIGETITFTAIAVGDVTCSTIDKRKKI

SEQ ID NO: 75408 - protein, 111 aa, Setaria italica
  Transcript Sequence Number=SeqID_9434
  Gene Ontology: Mol. function=cAMP-dependent protein kinase regulator activity; Cellular component=protein serine/threonine phosphatase complex; Biological process=regulation of protein amino acid phosphorylation
  Homolog annotation: Hit_ID=B8PY97; Match level="QueryCoverage=94%, HitCoverage=9%, E-value=7e-35, Identity=68%"; Hit description =Putative cyclic nucleotide-dependent hybrid protein phosphatase 2C/protein kinase isoform A variant 1
MVLNLQISKYKDPRDACAEIVAESYRLWLQYETRTDDITIIVVHINGLTDVESTQTVTKVSLQPSPQVVGLACSESPLIVSSNTNNQRSRHDLSRARLRALESSLENGQLW

SEQ ID NO: 75409 - protein, 500 aa, Setaria italica
  Transcript Sequence Number=SeqID_9435
  Gene Ontology: Mol. function=cAMP-dependent protein kinase regulator activity; Cellular component=protein serine/threonine phosphatase complex; Biological process=regulation of protein amino acid phosphorylation
  Homolog annotation: Hit_ID=B9RKK9; Match level="QueryCoverage=96%, HitCoverage=44%, E-value=1e-151, Identity=56%"; Hit description =Protein phosphatase 2c, putative
  Pfam annotation: Domain name=cNMP_binding; Domain location=105-200; Score=67.3; E_value=5.8e-17; Accession=PF00027.21; Description =Cyclic nucleotide-binding domain
  Pfam annotation: Domain name=cNMP_binding; Domain location=231-340; Score=58.6; E_value=2.4e-14; Accession=PF00027.21; Description =Cyclic nucleotide-binding domain
  Pfam module annotation: Pfam domain module=cNMP_binding::cNMP _binding; Domain location=105-200::231-340
  Subcellular localization annotation: CTP_CleavageSite=47; ConfidenceScore=5.37e-01
VESTQTVTKVSLQPSPQVVGLACSESPLIVSSNTNNQRSRHDLSRARLRALESSLENGQLWVPSSPSHRKTWEEQAHIERVLHDHFLFRKITDSQCHVLLDCMQRVEVKPGDIVVQQGGDGDCFYVVGSGEYEVLAIQEEEGKETTKVLHRYTADKLSSFGELALMHNKPLQASVRAVTSGTLWALKREDFRGILMSEFSNIASLKLLRSVELFTRFTVLQLSQLAESLVEVSFADGQTIVDKNDDVSALYVIQRGRVRLVLAADQMNSDAWDLISAHTKQAQSSQENGNYVVEIGEGGHFGEWTLIGETITFTAIAVGDVTCSTIAKEKFDTIVGPLPKLSQADSRIKESLVTKENVADDDFPFRRVQLSDLEWKMCIYAAECSEIGLVRIRGSDKIRSLKRFYIKRVQDLHKEVQVFEEKELMKSLSQSTCVPEVLCTCADQSYLGILLNCCLCCSLASILHTPLNESSAKFFAASVVVALEELHQKSIIYRGASQLS

SEQ ID NO: 75410 - protein, 238 aa, Setaria italica
  Transcript Sequence Number=SeqID_9436
  Gene Ontology: Mol. function=cAMP-dependent protein kinase regulator activity; Cellular component=protein serine/threonine phosphatase complex; Biological process=regulation of protein amino acid phosphorylation
  Homolog annotation: Hit_ID=B9RKK9; Match level="QueryCoverage=93%, HitCoverage=20%, E-value=7e-71, Identity=55%"; Hit description =Protein phosphatase 2c, putative
  Pfam annotation: Domain name=Pkinase; Domain location=1-181; Score= -29.4; E_value=9.7e-07; Accession=PF00069.17; Description=Protein kinase domain
SAIPHVVYVLSPSILQLHTPLNESSAKFFAASVVVALEELHQKSIIYRGVSADILMLDRSGHLQLVDFRFAKKIEGERTYTTCGIADSLAPEIVLGRGHGFPADWWALGVLIYFMLQSDMPFGSWRESELEPVSKIAKGHLVMPLIFSAEVIDLITKLLVVDENVRLGTSGAGAVKKHPWFDGIDWEQIASGTYTVPDEITERMDSCIETLNEDLTASPSVPIEDPDDLTAPEWIQDW

SEQ ID NO: 75411 - protein, 170 aa, Setaria italica
  misc_feature (10)..(10): Xaa can be any naturally occurring amino acid
  Transcript Sequence Number=SeqID_9437
  Gene Ontology: Mol. function=hydrolase activity; Biological process =lipid catabolic process
  Homolog annotation: Hit_ID=B6TPQ5; Match level="QueryCoverage=100%, HitCoverage=36%, E-value=5e-79, Identity=87%"; Hit description =Patatin-like protein 3
SAPLVFSRAXALENESYDFRLGEVGRAAWSEAGRFEPAEVSSVDGATSCAAVDGGPTMGSPAAAAITHVLHNKHEFPFVRGVEDLLVLSIGGCSGGGPGATADADLRRMRRWGSKEWARPIARIAADGAADLVDHAVARAFGQCRSSNYLRIQAKRESMPPCGPDGEYEP

SEQ ID NO: 75412 - protein, 144 aa, Setaria italica
  Transcript Sequence Number=SeqID_9438
  Gene Ontology: Mol. function=hydrolase activity; Biological process =lipid catabolic process
  Homolog annotation: Hit_ID=B6TPQ5; Match level="QueryCoverage=72%, HitCoverage=22%, E-value=1e-53, Identity=96%"; Hit description =Patatin-like protein 3
YIANVPLIFLPLSNRVHSGECHATLPRKKYAAGFRVARAFGQCRSSNYLRIQAKRESMPPCGPDGEYEPTPGNVRALLAAADEMLKQRNVESVLFEGRRVGEQTNAEKLDWFAAELVAEHRSRSSRIAPTVAFKQAPQKPSALG

SEQ ID NO: 75413 - protein, 40 aa, Setaria italica
  Transcript Sequence Number=SeqID_9439
ADDRPDVLEKVVQISGTPEQTEKAKSLLQGFILSSEYHFL

SEQ ID NO: 75414 - protein, 490 aa, Setaria italica
  Transcript Sequence Number=SeqID_9440
  Gene Ontology: Mol. function=RNA binding
  Homolog annotation: Hit_ID=Q9LVU6; Match level="QueryCoverage=95%, HitCoverage=88%, E-value=1e-116, Identity=41%"; Hit description=RNA -binding protein-like
  Pfam annotation: Domain name=KH_1; Domain location=169-234; Score =11.9; E_value=0.036; Accession=PF00013.21; Description=KH domain
  Pfam annotation: Domain name=KH_1; Domain location=17-85; Score=55.9; E_value=1.5e-13; Accession=PF00013.21; Description=KH domain
  Pfam annotation: Domain name=KH_1; Domain location=253-319; Score =30.9; E_value=5.2e-06; Accession=PF00013.21; Description=KH domain
  Pfam annotation: Domain name=KH_1; Domain location=417-479; Score =53.4; E_value=8.7e-13; Accession=PF00013.21; Description=KH domain
  Pfam module annotation: Pfam domain module=KH_1::KH_1::KH_1::KH_1; Domain location=169-234::17-85::253-319::417-479
GEYGPRGKDPRDRGKTTTRLIVPKLHVGCLLGKGGKIIEQMRMETKTHIRILPRDLNTPRCVSLSEEVVQVVGDGNCVRKAVAIITDRLKESLHRDRGPFRGRMNSPEPRISQEDEYLGGVQQMPVYEETYGRPDQIRNNISLEPPGYEFDSNGGKVIEHPDILYDDIVFRILCPNDKASSLVSTRDGIIEMLQADVGVDVRLTDIIAGSDERVVIITSREGPDHELFPAQEALLHIQTHVVDLGPDKDNIITTRLLVPSSEIACFDGREGSLSDIQRQTSANVQILPREDLPLCALESDELIQIVGEIRAARNALMQVTTKLRSYLYREMSGPIQVGNINVHGAISPATGSPRGPYQGNDIPMGAYHQAPQLAASWHSKDSGGSASGSYEQGSNINDDIRQNATKRFAVPLVTRSTLEVVIPNSAVASLTMRAGSKLAQISEMSGATVKLADDRPDVLEKVVQISGTPEQTEKAKSLLQGFILSIQDDS

SEQ ID NO: 75415 - protein, 118 aa, Setaria italica
  Transcript Sequence Number=SeqID_9441
AAVPVMHSARRMFAASEWLREELQERDELGRGPPVAPRRVVAGRALAAANLVFWGFNLFAFLLPFYLPKALRRYYLGTDREDDGEDRSRVNEKQQKQLQEGEGEEGLVDQDLLDMFAT

SEQ ID NO: 75416 - protein, 36 aa, Setaria italica
  Transcript Sequence Number=SeqID_9442
MGTQTRQNNRVRTIAGKKIQQVKLNFVKIELSNILV

SEQ ID NO: 75417 - protein, 87 aa, Setaria italica
  Transcript Sequence Number=SeqID_9443
  Subcellular localization annotation: CTP_CleavageSite=51; ConfidenceScore=5.32e-01
PDDINLSATILPLPKPNCSSIHPLGLQTVFLLRPARTPRHPPQRNVTFTIIAESPSAPAHLSSLAHTHGLHYPIEKMIKNPSTFLHP

SEQ ID NO: 75418 - protein, 152 aa, Setaria italica
  Transcript Sequence Number=SeqID_9444
  Homolog annotation: Hit_ID=Q7XYW2; Match level="QueryCoverage=90%, HitCoverage=50%, E-value=2e-50, Identity=67%"; Hit description=Seed specific protein Bn15D17A
  Pfam annotation: Domain name=DUF260; Domain location=4-110; Score =153.2; E_value=7.8e-43; Accession=PF03195.6; Description=Protein of unknown function DUF260
MRLSCNGCRVLRKGCTEACTIRPCLQWIKAPDAQANATVFLAKFYGRAGLLNLIDAAPGDEQRPAVFRSLLYEACGRIVNPVYGSVGLLWSGNWHLCQAAVEAVLKGAPIVQISAEDAAAASPAHLHKAAACYDIRHVAAKAKPAPAASSPA

SEQ ID NO: 75419 - protein, 355 aa, Setaria italica
  Transcript Sequence Number=SeqID_9445
  Gene Ontology: Mol. function=transcription regulator activity; Cellular component=mitochondrial inner membrane; Biological process =regulation of transcription
  Homolog annotation: Hit_ID=O04619; Match level="QueryCoverage=100%, HitCoverage=100%, E-value=1e-157, Identity=77%"; Hit description =Adenine nucleotide transporter, ADNT1
  Pfam annotation: Domain name=Mito_carr; Domain location=145-237; Score=133.3; E_value=8e-37; Accession=PF00153.19; Description =Mitochondrial carrier protein
  Pfam annotation: Domain name=Mito_carr; Domain location=248-351; Score=119.5; E_value=1.1e-32; Accession=PF00153.19; Description =Mitochondrial carrier protein
  Pfam annotation: Domain name=Mito_carr; Domain location=42-133; Score= 125.5; E_value=1.7e-34; Accession=PF00153.19; Description =Mitochondrial carrier protein
  Pfam module annotation: Pfam domain module=Mito_carr::Mito_carr::Mito_ carr; Domain location=145-237::248-351::42-133
MASEDVVGKSRGDTAVTTIVNLAEEAKLAREGVKGPGHQVLTICKSLVAGGVAGGVSRTAVAPLERLKILLQVQNPHSIKYNGTIQGLKYIWRTEGLRGLFKGNGTNCARIVPNSAVKFFSYEQASKGILWAYRQRTGDEDAQLSPLLRLGAGACAGIIAMSATYPMDMVRGRITVQTDKSPYQYRGMFHALGTVYREEGFRALYRGWLPSVIGVVPYVGLNFAVYESLKDWLLQTNPFGLANGNELHVVTRLGCGAVAGTIGQTVAYPLDVIRRRMQMVGWSHADSIVTGQGKEALQYNGMIDAFRKTVRHEGVGALYKGLVPNSVKVVPSIAIAFVTYEVVKDVLGVEMRISD

SEQ ID NO: 75420 - protein, 68 aa, Setaria italica
  Transcript Sequence Number=SeqID_9446
SIRNVRATGTSVTYYYKEFSTKCHGPDCKLKNSAQCLKYKKKLYPAYQGSCLTGKTVLITDVFSYNYI

SEQ ID NO: 75421 - protein, 56 aa, Setaria italica
  Transcript Sequence Number=SeqID_9447
  Homolog annotation: Hit_ID=B6TE25; Match level="QueryCoverage=58%, HitCoverage=7%, E-value=1e-12, Identity=93%"; Hit description=HIT zinc finger family protein
  Pfam annotation: Domain name=zf-HIT; Domain location=25-55; Score =54.1; E_value=5.4e-13; Accession=PF04438.8; Description=HIT zinc finger
  Subcellular localization annotation: CTP_CleavageSite=18; ConfidenceScore=5.01e-01
MQRDVVVSDPAAAGSSSSAASFAETRVICRVCQKQFAQYTCPRCNSRYCSLPCYKG

SEQ ID NO: 75422 - protein, 129 aa, Setaria italica
  Transcript Sequence Number=SeqID_9448
MASKRLLVALCVVALFAVRSESHGLEDFNGGSSTATPAMQTFFKPEAAALPEALDASMPATMAAKPEASAIPTTTTTTTATATTTPTSTASASPRRSVSVAAGVACGIAAVAVVGIAAAVAYVVRGRRG

SEQ ID NO: 75423 - protein, 101 aa, Setaria italica
  Transcript Sequence Number=SeqID_9449
  Gene Ontology: Mol. function=copper ion binding; Biological process =pantothenate biosynthetic process
  Homolog annotation: Hit_ID=B9RYQ8; Match level="QueryCoverage=97%, HitCoverage=19%, E-value=2e-40, Identity=78%"; Hit description =Cytochrome C oxidase assembly protein cox11, putative
NGSFVVAPCPHDGQCPLENSDKYCHFVQRLERTSSQRAYKRSKGVPLRGFEDEKFCYVALRRGKRPEEAWPLDGMKFETLKERRAKRKPEDLSIDYDDQFP

SEQ ID NO: 75424 - protein, 349 aa, Setaria italica
  Transcript Sequence Number=SeqID_9450
  Gene Ontology: Mol. function=chaperone activator activity; Cellular component=cytoplasm; Biological process=response to stress
  Homolog annotation: Hit_ID=B4FNW7; Match level="QueryCoverage=100%, HitCoverage=100%, E-value=1e-144, Identity=73%"; Hit description =Activator of 90 kDa heat shock protein ATPase
  Pfam annotation: Domain name=AHSA1; Domain location=222-346; Score =53.7; E_value=7.2e-13; Accession=PF08327.3; Description=Activator of Hsp90 ATPase homolog 1-l
  Pfam annotation: Domain name=Aha1_N; Domain location=29-164; Score =154.5; E_value=3.1e-43; Accession=PF09229.3; Description=Activator of Hsp90 ATPase, N-terminal
  Pfam module annotation: Pfam domain module=AHSA1::Aha1_N; Domain location=222-346::29-164
MAKYGEGDKRWIVEERADGTNVHNWHWAERDCLEWSRARLSALLAGLTVLDGEGGLTLRTVALDKLDGEAYVNIRKGKVIPGYELSLTLSWEAEAASESGAAKVAGAAEVPYLADENADEDPDLRVTVRGDETPLARRAKDAFLARGKPLVLEKIREFVAAMAKGGPAKDELESKKTPAKAGAAPAAKKEEPPAPAPAAKEKKAKGKDKEGFKTIEMTEKFYCRAKDIYEILMDENRWKGFTQSNARISREVGGEFSLFDGSITGINEELQEGKLIAQKWRFGSWPDDLYSSVRLVFDEPESGVTIIKLKQTDVPEEDKYGNSTVVENTERGWRELIFQRIRGVFGFGI

SEQ ID NO: 75425 - protein, 276 aa, Setaria italica
  misc_feature (190)..(190): Xaa can be any naturally occurring amino acid
  Transcript Sequence Number=SeqID_9451
  Gene Ontology: Mol. function=cation transmembrane transporter activity; Cellular component=membrane; Biological process=cation transport
  Homolog annotation: Hit_ID=B9IBH9; Match level="QueryCoverage=91%, HitCoverage=56%, E-value=7e-62, Identity=50%"; Hit description=Metal tolerance protein (Fragment)
  Pfam annotation: Domain name=Cation_efflux; Domain location=1-152; Score=-47.3; E_value=1.9e-06; Accession=PF01545.13; Description =Cation efflux family
KEGSGLMKANAWHHRADAISSVVALVGVGGSILGLPLLDPLAGLIVSGMILKAGIQTGYESVLELVDAAVDPSLLQPIRETILKVDGVKGCHRLRGRKAGTSLYLDVHIEVYPFLSVSAAHDIGETVRHLIQKEHNQVAEVFIHIDPSYSMGPNMNLNRTLNNFNLRNSEAIPRQQSAKAIVPDIISSHXAEKMSLEHLMLHYVQGRVLLQVQVSMSPEILIWDAMEIAKQAEEEIMRADASISQVSLQLRLGQHIKQLQLASSKNIASDLHGGAQ

SEQ ID NO: 75426 - protein, 126 aa, Setaria italica
  Transcript Sequence Number=SeqID_9452
  Gene Ontology: Mol. function=ubiquinol-cytochrome-c reductase activity; Cellular component=mitochondrial respiratory chain; Biological process=mitochondrial electron transport, ubiquinol to cytochrome c
  Homolog annotation: Hit_ID=B6TEX6; Match level="QueryCoverage=100%, HitCoverage=100%, E-value=4e-48, Identity=76%"; Hit description =Ubiquinol-cytochrome c reductase complex 14 kDa protein
  Pfam annotation: Domain name=UCR_14kD; Domain location=11-114; Score =147.3; E_value=4.7e-41; Accession=PF02271.8; Description=Ubiquinol -cytochrome C reductase complex 14kD subunit
MSSMLSALSNWLVNPRRNPLARPHMHAVSSRLRKYGLRYDDLYDPYFDLDIKEALGRLPREVVDARIQRLKRSMDLSMKHQYLPEDLQAVQTPFRAYLSDMLALVKKGNAEREALGALPLYQRTIP

SEQ ID NO: 75427 - protein, 126 aa, Setaria italica
  Transcript Sequence Number=SeqID_9453
  Gene Ontology: Mol. function=ubiquinol-cytochrome-c reductase activity; Cellular component=mitochondrial respiratory chain; Biological process=mitochondrial electron transport, ubiquinol to cytochrome c
  Homolog annotation: Hit_ID=B6TEX6; Match level="QueryCoverage=100%, HitCoverage=100%, E-value=1e-50, Identity=79%"; Hit description =Ubiquinol-cytochrome c reductase complex 14 kDa protein
  Pfam annotation: Domain name=UCR_14kD; Domain location=11-114; Score =154.6; E_value=3e-43; Accession=PF02271.8; Description=Ubiquinol -cytochrome C reductase complex 14kD subunit
MSSMLSALSNWLVNPRRNPLARLHMHAVSSRLRKYGLRYDDLYDPYFDLDIKEALGRLPREVVDARIQRLKRSMDLSMKHQYLPEDLQAVQTPFRGYLSDMLALVKKENAEREALGALPLYQRTIP

SEQ ID NO: 75428 - protein, 126 aa, Setaria italica
  Transcript Sequence Number=SeqID_9454
  Gene Ontology: Mol. function=ubiquinol-cytochrome-c reductase activity; Cellular component=mitochondrial respiratory chain; Biological process=mitochondrial electron transport, ubiquinol to cytochrome c
  Homolog annotation: Hit_ID=B6TEX6; Match level="QueryCoverage=100%, HitCoverage=100%, E-value=1e-50, Identity=79%"; Hit description =Ubiquinol-cytochrome c reductase complex 14 kDa protein
  Pfam annotation: Domain name=UCR_14kD; Domain location=11-114; Score =154.6; E_value=3e-43; Accession=PF02271.8; Description=Ubiquinol -cytochrome C reductase complex 14kD subunit
MSSMISALSNWLVNPRRNPLARLHMHAVSSRLRKYGLRYDDLYDPYFDLDIKEALGRLPREVVDARIQRLKRSMDLSMKHQYLPEDLQAVQTPFRGYLSDMLALVKKENAEREALGALPLYQRTIP

SEQ ID NO: 75429 - protein, 282 aa, Setaria italica
  misc_feature (30)..(30): Xaa can be any naturally occurring amino acid
  Transcript Sequence Number=SeqID_9455
  Gene Ontology: Mol. function=nucleic acid binding
  Homolog annotation: Hit_ID=B9SEZ1; Match level="QueryCoverage=30%, HitCoverage=8%, E-value=2e-22, Identity=58%"; Hit description=RNA binding protein, putative
SHYYQAAGSWVVFFVPENDADMAAYNDFMXYLGRIKTRRRQDKFVKLGERSTLFLVPPSDFSEQVLRVPGKVSISGVILRFQQSNPDYSSPNRKSLERIHPSSSSNLNADVSSREDLNALRRLNQPDSRTFPQGPDYVRSSGGSYTLASADIISPYKPESPPYVVSQLPHDWPPADPHMGIAQDKHQQLPNMLPSGWSNSMNDPNPGSGNFSSLSQSAISHALNNRIQEPYSFATQGVPKEAASGYAPGEVSNSMSWPSMQPNSQQVARPDQPIFQYHCHQI

SEQ ID NO: 75430 - protein, 345 aa, Setaria italica
  Transcript Sequence Number=SeqID_9456
  Gene Ontology: Mol. function=hydrolase activity, hydrolyzing O -glycosyl compounds; Cellular component=integral to membrane; Biological process=cell wall organization and biogenesis
  Homolog annotation: Hit_ID=B6SSM4; Match level="QueryCoverage=91%, HitCoverage=51%, E-value=1e-159, Identity=88%"; Hit description=Endo- 1,4-beta-glucanase
  Pfam annotation: Domain name=Glyco_hydro_9; Domain location=1-311; Score=259.9; E_value=6.2e-75; Accession=PF00759.11; Description =Glycosyl hydrolase family 9
AAALAAASIVFRDNKAYSQKLVHGATTLFQFARDRRGRYSAGGSDAAKFYNSTSYWDEFVWGSSWTYLATGNSSYLTLATHPKLAKHAGAFWGGPDYGVFSWDNKLTGAQVLLSRLRLFLSPGYPYEEMLRTFHNQTSIIMCSYLPIFKSFNRTKGGLIQLNHGKPQPLQYVANAAFLASVFSDYLEAADTPGWYCGPHFYSIEVLRGFARTQIEYILGKNPLKMSYVVGFGKHYPKHVHHRGASIPKNGVHYGCKGGWKWRDTKKPNPNIIVGAMVAGPDRHDGFKDARKNYNYTEATLAGNAGLVAALVALSGESHGVDKNTMFSAVPPMFPSPPPPSAPWKP

SEQ ID NO: 75431 - protein, 116 aa, Setaria italica
  Transcript Sequence Number=SeqID_9457
GNIACVLPLILWNGCWVLGENGEEETPKGGWNTFASAQNTTKQANTTFGKRKLPPGPCLLLSLFSSIRFLLQLGADSALLYIPLCVYPNTKDAFHQVRKTVAAGILMTPFFEGIGL

SEQ ID NO: 75432 - protein, 169 aa, Setaria italica
  Transcript Sequence Number=SeqID_9458
  Gene Ontology: Mol. function=ATPase activity, coupled to transmembrane movement of substances; Cellular component=integral to membrane; Biological process=transport
  Homolog annotation: Hit_ID=Q6YUU5; Match level="QueryCoverage=95%, HitCoverage=13%, E-value=3e-87, Identity=95%"; Hit description =Putative multidrug resistance protein
SGAICSQLAKDANVVRSLVGDRMALVIQTVSAVLIACTMGLVIAWRLALVMIAVQPLIIVCFYARRVLLKSMSKKSIQAQSESSKLAAEAVSNLRTITAFSSQERILRLFDQAQDGPRKESIRQSWFAGLGLGTSMSLMTCTWALDFWYGGKLMAEHHITAKAHYGELR

SEQ ID NO: 75433 - protein, 264 aa, Setaria italica
  Transcript Sequence Number=SeqID_9459
  Gene Ontology: Mol. function=DNA replication origin binding; Cellular component=origin recognition complex; Biological process=DNA replication
  Homolog annotation: Hit_ID=Q945C7; Match level="QueryCoverage=100%, HitCoverage=70%, E-value=1e-136, Identity=87%"; Hit description =Origin recognition complex subunit 2
  Pfam annotation: Domain name=ORC2; Domain location=1-264; Score =221.5; E_value=2.1e-63; Accession=PF04084.6; Description=Origin recognition complex subunit 2
FASTTLTDFTVIVINGYLPSINLKQVIATIAEMFWDQTKSKRNRQPGTRSQLSQPFPSQSFDDIISFLKRQTSDDVDDQVCLLIHNIDGPALRDAESQQCLAQVSCCPQVRVVASTDHVNAPLLWDKKMVHTQYKWSWYHVPTFAPYKVECVFYPLILASGGHAQTTKTALVVLQSLTPNAQSVFRVLAEYQLANEKEEGMPVSSLYTKCRERFLVSSQVTLNSHLTEFKDHDLVKIRKHSDGQDCLRIPLVSDALEKLLQELA

SEQ ID NO: 75434 - protein, 79 aa, Setaria italica
  Transcript Sequence Number=SeqID_9460
VLYKFADEKEKEMHRGRETKAMVNMLSQYKNLCGTRKVSAHYLTHDDTVAGVVNLVKQLKIKRIVIGSRNMSRKVTLRQ

SEQ ID NO: 75435 - protein, 145 aa, Setaria italica
  misc_feature (130)..(130): Xaa can be any naturally occurring amino acid
  Transcript Sequence Number=SeqID_9461
  Homolog annotation: Hit_ID=B9RDT0; Match level="QueryCoverage=57%, HitCoverage=11%, E-value=2e-09, Identity=36%"; Hit description =Receptor protein kinase, putative
MDEEEVHIAVGKNSRKEKANILWAAANFPRATIVLVHVHWPSKWMPFMGGKVLYKFADEKEKEMHRGRETKAMVNMLSQYKNLCGTRKVWVVLNGKHISTSNDHLEHSGNIGYGGSSDILASIHELGEDXDGYMTPPSDLAEESG

SEQ ID NO: 75436 - protein, 81 aa, Setaria italica
  misc_feature (1)..(15): Xaa can be any naturally occurring amino acid
  Transcript Sequence Number=SeqID_9462
XXXXXXXXXXXXXXXFFFFLDQIARKCQWFSLFLIASDQLAQKKKRPRKKHTLSIWETNEKNVVSIQEAAYNSPTKQRLYQ

SEQ ID NO: 75437 - protein, 182 aa, Setaria italica
  Transcript Sequence Number=SeqID_9463
  Gene Ontology: Cellular component=plasma membrane
  Homolog annotation: Hit_ID=B6SVJ7; Match level="QueryCoverage=100%, HitCoverage=35%, E-value=3e-98, Identity=97%"; Hit description =Hemolysin
  Pfam annotation: Domain name=DUF21; Domain location=1-138; Score =58.8; E_value=2.1e-14; Accession=PF01595.12; Description=Domain of unknown function DUF21
KDKLNAERILPVVKNQHLLLCTLLIGNSLAMEALPIFLDTLVPSYVAILISVTLILAFGEIMPQAICTRYGLSVGAKAAPVVRILLILFFPVAYPISKLLDWLLGKGHFALMRRAELKTLVDMHGNEAGKGGELTHDETTIITGALELTQKIAKDAMTSISETFSLDINAKLDLHTMGMIMT

SEQ ID NO: 75438 - protein, 328 aa, Setaria italica
  Transcript Sequence Number=SeqID_9464
  Gene Ontology: Cellular component=plasma membrane
  Homolog annotation: Hit_ID=B6SVJ7; Match level="QueryCoverage=98%, HitCoverage=61%, E-value=1e-160, Identity=86%"; Hit description =Hemolysin
  Pfam annotation: Domain name=CBS; Domain location=18-137; Score=16.7; E_value=0.0033; Accession=PF00571.20; Description=CBS domain
LKVKYLLELTQKIAKDAMTSISETFSLDINAKLDLHTMGMIMTRGHSRVPIYSGSPSNIIGLILVKNLITCRTEDEVPIRNVTIRKIPRVNDDLPLYDILNEFQKGHSHMAVVVKRTKEAGASNGKQKSTTADYKINPKDAHSDGSSPSYVSTAGSRRYNIEKYGDGRSYNKKSERKRENILDFNTDPLPSYSMDEEAVGIITMEDVMEELLQEEIYDETDEYVDVHNKIRINMLPPGKSLSPAISPGGGPLSHGLRKTPMASPLSPYNHGSSFLRSPVSNHGQSPGILPTILSPGRSPASQTPGQSSPNSSQDSRNSNGKHKKDIES

SEQ ID NO: 75439 - protein, 76 aa, Setaria italica
  Transcript Sequence Number=SeqID_9465
FSSSCEDACESFFYFFFPYSSSSCSPNVFQILLCAYYSERGERKERRESWFRASEVYSNRLGISRVKRVVGLQLGV

SEQ ID NO: 75440 - protein, 95 aa, Setaria italica
  Transcript Sequence Number=SeqID_9466
  Subcellular localization annotation: CTP_CleavageSite=86; ConfidenceScore=5.44e-01
CSATTAAPPGPRSSSSSPSPASAPRRPDRDRIHGAGRGGEARAPDGLAGSLAFQRLPQVPRLPLTSPHLPFPFHVGGVGVGGRDARAEQSARAEQ

SEQ ID NO: 75441 - protein, 110 aa, Setaria italica
  Transcript Sequence Number=SeqID_9467
  Gene Ontology: Mol. function=sequence-specific DNA binding; Cellular component=nucleus; Biological process=regulation of transcription, DNA-dependent
  Homolog annotation: Hit_ID=B6U0J8; Match level="QueryCoverage=56%, HitCoverage=14%, E-value=2e-27, Identity=87%"; Hit description=Zinc finger homeodomain protein 1
  Pfam annotation: Domain name=Homeobox; Domain location=20-80; Score =4.2; E_value=0.0046; Accession=PF00046.21; Description=Homeobox domain
  Subcellular localization annotation: CTP_CleavageSite=49; ConfidenceScore=5.09e-01
PTRSWPSGGSASAPPAPSKKRFRTKFTADQKERMREFAHRLGWRIHKPDSEAVDAFCAQVGVSRRVLKVWMHNNKHLAKIPPSPPSSQPALPPPPHHHDHHPPPPPHHIH

SEQ ID NO: 75442 - protein, 51 aa, Setaria italica
  Transcript Sequence Number=SeqID_9468
  Homolog annotation: Hit_ID=B6U450; Match level="QueryCoverage=100%, HitCoverage=19%, E-value=5e-09, Identity=66%"; Hit description=Salt tolerance-like protein
AYTPWTGREQMLADVVVTTDERASRERWVPQMHAEFAACKRARASPPCSYW

SEQ ID NO: 75443 - protein, 249 aa, Setaria italica
  Transcript Sequence Number=SeqID_9469
  Gene Ontology: Mol. function=sequence-specific DNA binding; Cellular component=nucleus; Biological process=regulation of transcription, DNA-dependent
  Homolog annotation: Hit_ID=Q10IU8; Match level="QueryCoverage=93%, HitCoverage=56%, E-value=1e-101, Identity=74%"; Hit description=WRKY DNA binding domain containing protein, expressed
  Pfam annotation: Domain name=WRKY; Domain location=172-231; Score =150.9; E_value=3.9e-42; Accession=PF03106.7; Description=WRKY DNA -binding domain
  Pfam annotation: Domain name=WRKY; Domain location=3-61; Score=137.3; E_value=4.8e-38; Accession=PF03106.7; Description=WRKY DNA -binding domain
  Pfam module annotation: Pfam domain module=WRKY::WRKY; Domain location=172-231::3-61
KPADDGYNWRKYGQKAVKGGEYPRSYYKCTHASCPVKKKVERSGEGHITQIIYRGQHNHQRPPKRRSKDGGGLLNEADDFHENEDASTRSEPGSQDHSGKHGGSNDGLAGPSVSRRREGDEQLSGSSDSEEEADDEQRVGNGDAGRANANRRHVPTPARRIIVQTTSEVDLLDDGYRWRKYGQKVVKGNPHPRSYYKCTYQGCDVKKHIERSSQDPKAVITTYEGKHSHDVPAARNSSHAAAAAANANA

SEQ ID NO: 75444 - protein, 96 aa, Setaria italica
  Transcript Sequence Number=SeqID_9470
  Gene Ontology: Mol. function=sequence-specific DNA binding; Cellular component=nucleus; Biological process=regulation of transcription, DNA-dependent
  Homolog annotation: Hit_ID=Q10IU8; Match level="QueryCoverage=94%, HitCoverage=21%, E-value=3e-19, Identity=59%"; Hit description=WRKY DNA binding domain containing protein, expressed
  Pfam annotation: Domain name=WRKY; Domain location=2-40; Score=54.8; E_value=3.3e-13; Accession=PF03106.7; Description=WRKY DNA -binding domain
CRSYYKCTYQGCDVKKHIERSSQDPKAVITTYEGKHSHDVPAARNSSHAAAAAANANASSSSSLPHKGQNSASSSRKRADMSSASSMLLKEENEIT

SEQ ID NO: 75445 - protein, 251 aa, Setaria italica
  Transcript Sequence Number=SeqID_9471
VTILDHHKTAFESLCGNPTLGQNVTKVIDMQRSGATIAFDFFKNKLLTEASISGGSGSGKDVAEIKYVPDNKVETVHKLFKFIEDGDLWRWKIPNSKAFSSGLKDLDIEFNVNANSKLFDQLLELDPEHVISRGHVTLLEKQRLIDNCLGKSYEISLGCGRFGNCLAVDADAISNLRSELGHQLASKSCNLNLRGIGAVVYKVPELNNDRMLKISLRSLEQEDTTLISQEYGGGGHRNASSFMLSITEFDQ

SEQ ID NO: 75446 - protein, 37 aa, Setaria italica
  Transcript Sequence Number=SeqID_9472
MAASGEGGGDPAAARRRWDLTNKGPESAPIVKEAVEI

SEQ ID NO: 75447 - protein, 194 aa, Setaria italica
  Transcript Sequence Number=SeqID_9473
  Homolog annotation: Hit_ID=Q6UA21; Match level="QueryCoverage=91%, HitCoverage=96%, E-value=3e-57, Identity=58%"; Hit description=Fiber protein Fb4 (Fragment)
TKTYFHVEFRQSGARTPQCTMLGALTKPSDESVLKKLSTRWQKKFGEDIDQDLLYLISVDRVLHTEDFNEDGMWVVPSEYTSAEPDPLRNFAENLVEEFNSTSAEDVHRIYSIYVESDLQVEDVKMIWVDRLGFDLHVHSGEGVFAVRIPFSREVSDEKGVKSSFNMMSHHAWEVEKSYASPEFEKIQFLKKVR

SEQ ID NO: 75448 - protein, 56 aa, Setaria italica
  Transcript Sequence Number=SeqID_9474
  Gene Ontology: Mol. function=hydrolase activity; Biological process =metabolic process
  Homolog annotation: Hit_ID=B6UC04; Match level="QueryCoverage=91%, HitCoverage=14%, E-value=4e-17, Identity=88%"; Hit description =Gibberellin receptor GID1L2
FVVLTYVRRLPGSVGWPGEAELYETPGEGHVYFLTKLGSPQALAEMAKLVDFINRD

SEQ ID NO: 75449 - protein, 90 aa, Setaria italica
  Transcript Sequence Number=SeqID_9475
  Subcellular localization annotation: CTP_CleavageSite=66; ConfidenceScore=5.57e-01
AAGEGASPGMGMGMGMGGAGGVLPSQSPFSSLVSPRTQYGSGLLAGASNVASLLSRQQSYGNGGIGAMPGAGAGLPMGGLHQQQQQQQRG

SEQ ID NO: 75450 - protein, 205 aa, Setaria italica
  Transcript Sequence Number=SeqID_9476
  Homolog annotation: Hit_ID=Q10CY0; Match level="QueryCoverage=48%, HitCoverage=7%, E-value=3e-09, Identity=47%"; Hit description =Acetyltransferase, GNAT family protein, expressed
MRLRAEAETDSLERKHSEVIVEACKSGVLTAHACNGEEGNGLVKVNVSNVSEESARPENNMEMSGLSATEFAQGHGLGTQGNIAESDDKRIKSYENISAVTHEVQNESRAGTISLSVDESQANEVIHGPCQGEVIDLVAANDDSKSTCLRSTSPNSGLESVEHEDTVVCTDGVVPHSGDQKVEKHSHNDNLCTETEISLTENGRC

SEQ ID NO: 75451 - protein, 61 aa, Setaria italica
  Transcript Sequence Number=SeqID_9477
  Gene Ontology: Mol. function=heat shock protein binding; Biological process=protein folding
  Homolog annotation: Hit_ID=B6SLS6; Match level="QueryCoverage=77%, HitCoverage=13%, E-value=8e-16, Identity=87%"; Hit description =Chaperone protein dnaJ 10
IKELQKEREQKLTQSLKDRLQPYVDGRKDEFVSWASAEARRLSQAALTCDLMWWPLSLTHS

SEQ ID NO: 75452 - protein, 75 aa, Setaria italica
  Transcript Sequence Number=SeqID_9478
  Gene Ontology: Mol. function=heat shock protein binding; Cellular component=nucleus; Biological process=protein folding
  Homolog annotation: Hit_ID=B6SLS6; Match level="QueryCoverage=86%, HitCoverage=19%, E-value=6e-29, Identity=93%"; Hit description =Chaperone protein dnaJ 10
  Pfam annotation: Domain name=DnaJ; Domain location=16-73; Score =105.1; E_value=2.4e-28; Accession=PF00226.23; Description=DnaJ domain
LRSCRRRDPAMVKESAYYDVLGVSVDASPAEIKKAYYLKAKLVHPDKNPGNPDAAQKFQELGEAYQVLSDPGKKE

SEQ ID NO: 75453 - protein, 338 aa, Setaria italica
  Transcript Sequence Number=SeqID_9479
  Gene Ontology: Mol. function=heat shock protein binding; Biological process=protein folding
  Homolog annotation: Hit_ID=B6SLS6; Match level="QueryCoverage=100%, HitCoverage=100%, E-value=1e-177, Identity=89%"; Hit description =Chaperone protein dnaJ 10
  Pfam annotation: Domain name=DnaJ; Domain location=6-68; Score=126.5; E_value=8.6e-35; Accession=PF00226.23; Description=DnaJ domain
MVKESAYYDVLGVSVDASPAEIKKAYYLKAKLVHPDKNPGNPDAAQKFQELGEAYQVLSDPGKKEAYDKYGKEGIPQDNMIDPAAVFGMLFGSDYFEDYVGQLALASIASVEIEENANSQEARAKVQEKIKELQKEREQKLTQSLKDRLQPYVDGRKDEFVSWASAEARRLSQAAFGEAMLHTIGYIYVRQAARELGKSRIYMGVPFIAEWVRDKGHHIKSQVNAASGAISLIQLQEGMKKMEGSEDNEEQLMKSFEEKKEAMLGSLWKINVVDIESTLSHVCQAVLKDNTVSKDVLKLRAKALKKLGTIFQGAKSLYRRENSLRVETSTDQQATPSQ

SEQ ID NO: 75454 - protein, 62 aa, Setaria italica
  Transcript Sequence Number=SeqID_9480
FISENHLIESANNHFSLKNCLAELYQAHPVVDHYLLLHGMLGTSWWLVSHFHLFDGMAAMPI

SEQ ID NO: 75455 - protein, 87 aa, Setaria italica
  Transcript Sequence Number=SeqID_9481
MAKVPDLGSDFAQKLLKDLRRRRERLGFESAPPPAQRGTANTAAPRDAYSNSRKPIQFQKPQQAAPAPRVGRSEAATNRLYRQGNTG

SEQ ID NO: 75456 - protein, 65 aa, Setaria italica
  Transcript Sequence Number=SeqID_9482
  Subcellular localization annotation: CTP_CleavageSite=36; ConfidenceScore=5.71e-01
PAVPAATLPPMPAVPTVPAPKVTLPPMPTVPKVTLPPMPVVPKVTLPPMPSIPSVPMPFLAPPPS

SEQ ID NO: 75457 - protein, 126 aa, Setaria italica
  misc_feature (4)..(4): Xaa can be any naturally occurring amino acid
  Transcript Sequence Number=SeqID_9483
  Subcellular localization annotation: CTP_CleavageSite=62; ConfidenceScore=5.59e-01
PAPXPGIPAIPKPPVPTVPAAALPPMPAVPTMPAAAGMPPIPAVPTVPAVTVPPMPTVPAVPAATLPPMPAVPTVPNAALPPMPPMPAVPKVTLPPIPAVPKVTLPPMPSIPSAVPMPFLAPPPSA

SEQ ID NO: 75458 - protein, 182 aa, Setaria italica
  Transcript Sequence Number=SeqID_9484
  Homolog annotation: Hit_ID=Q8LMN7; Match level="QueryCoverage=76%, HitCoverage=46%, E-value=1e-17, Identity=38%"; Hit description=F-box domain containing protein, expressed
  Pfam annotation: Domain name=F-box; Domain location=10-61; Score =30.3; E_value=7.7e-06; Accession=PF00646.25; Description=F-box domain
MSRRPSSPPPAAALLPDNDDILREILLRLPPLPSSLPRASLVCKHWRRLLSDPRFLRRFRAFHRRNPPLLGIFNTAFYGLLQFTPTLDPPDRIPSARLSLQVGHGDEIWDFLGCRHGLALILNQTRLELTVWDPLAGDQRRVPVPPGWFRNEGAVYNAALICNNHLAGGVPTRKPSKVVLLT

SEQ ID NO: 75459 - protein, 187 aa, Setaria italica
  Transcript Sequence Number=SeqID_9485
  Gene Ontology: Mol. function=nucleotide binding; Biological process =defense response
  Homolog annotation: Hit_ID=Q8W0E2; Match level="QueryCoverage=100%, HitCoverage=37%, E-value=1e-25, Identity=35%"; Hit description =Fusarium resistance protein I2C-5-like
  Pfam annotation: Domain name=NACHT; Domain location=40-175; Score= -38.8; E_value=0.081; Accession=PF05729.4; Description=NACHT domain
HRPLGTNIFRDGQMFGRHVEKERIINFLLHKGDQSTGELGLLPIVGRNGVGKTTLVQHACDDARVRNHFPVVLLYNFSCTYDVKKSEGTPNDPLVYVKRNSFCDKRCLIVFEEVDVHRKQILDGFLQSLRCGKESKVIITTNSQRVANIGTVEPILLTALPSHAYWFFFKAHAFAGRDIEDNPRLMA

SEQ ID NO: 75460 - protein, 402 aa, Setaria italica
  Transcript Sequence Number=SeqID_9486
  Gene Ontology: Mol. function=arginine decarboxylase activity; Biological process=putrescine biosynthetic process
  Homolog annotation: Hit_ID=C0LN13; Match level="QueryCoverage=100%, HitCoverage=64%, E-value=1e-179, Identity=78%"; Hit description =Arginine decarboxylase
  Pfam annotation: Domain name=Orn_Arg_deC_N; Domain location=32-316; Score=310.6; E_value=3.3e-90; Accession=PF02784.8; Description =Pyridoxal-dependent decarboxylase, pyridoxal binding domain
SVILKALETPTNGGKCKAQFPMILRFPDVLKNRLDSLHAAFKGAIDSLGYTSRYQGVFPIKVNQNKAVVQDLVAFGYDESYGLEAGSKPELLIAISCLTKAKPGAYLVCNGYKDADYIALALSARAMGLNTIIVLEMEEELDIVIDQYEKLKLKLGDKVDFEPVIGVRAKLLTKIPGHYGSTAGKHGKFGLLAERIYAVAKKLKEGGRLHWLKLLHFHVGSMIPTTDIVYNAASEAAGIYCELVNTWGAEMTTLDCGGGLGVDYDGTRSGSSDMSVAYGIEQYASSIVQAVRLKCAYQGVAHPVLCTESGRAMASHHSMIILEALSAIQEPQDEDTSEQLLSKIQDLSSKHPGRATAANGGGAFEGIYSHAAELKKHGIEMYKLGKKLSKRIVGDANPIYNY

SEQ ID NO: 75461 - protein, 170 aa, Setaria italica
  misc_feature (84)..(84): Xaa can be any naturally occurring amino acid
  Transcript Sequence Number=SeqID_9487
  Gene Ontology: Mol. function=serine-type carboxypeptidase activity; Cellular component=extracellular region; Biological process =proteolysis
  Homolog annotation: Hit_ID=B6TC80; Match level="QueryCoverage=98%, HitCoverage=34%, E-value=9e-44, Identity=53%"; Hit description =Serine carboxypeptidase 1
  Pfam annotation: Domain name=Peptidase_S10; Domain location=1-170; Score=-210.8; E_value=0.0077; Accession=PF00450.14; Description =Serine carboxypeptidase
GVVQTITDLMSEVDNEGILDPVCPSASPKPRRDALRRKSLAEEHYELSDGPPEEPPFGCIKYRYNPSYIWANDNATRAALGIKXGTVKEWIRCKPKGELPYTFDLPSSVGYHFKLTTRGYRALVYSGDHDLTVPFSGTHAWIRSFNFSIAEDRRAWHLDGQAAGFTITYA

SEQ ID NO: 75462 - protein, 207 aa, Setaria italica
  misc_feature (82)..(82): Xaa can be any naturally occurring amino acid
  misc_feature (85)..(85): Xaa can be any naturally occurring amino acid
  Transcript Sequence Number=SeqID_9488
  Gene Ontology: Mol. function=serine-type carboxypeptidase activity; Cellular component=extracellular region; Biological process =proteolysis
  Homolog annotation: Hit_ID=B6TC80; Match level="QueryCoverage=100%, HitCoverage=41%, E-value=2e-54, Identity=51%"; Hit description =Serine carboxypeptidase 1
  Pfam annotation: Domain name=Peptidase_S10; Domain location=2-204; Score=-147.5; E_value=2e-06; Accession=PF00450.14; Description =Serine carboxypeptidase
VQTITDLMSEVDNEGILDPVCPSASPKPRRDALRRKSLAEEHYELSDGPPEEPPFGCIKYRYNPSYIWANDNATRAALGIKXVMXGTVKEWIRCKPKGELPYTFDLPSSVGYHFKLTTRGYRALVYSGDHDLTVPFSGTHAWIRSFNFSIAEDRRAWHLDGQAAGFTITYANNLTFATIKGGRHIVSDNRPKECFVAAKRWLTNEPL

SEQ ID NO: 75463 - protein, 55 aa, Setaria italica
  Transcript Sequence Number=SeqID_9489
WFSANVMTVVATKLGSYADYMVKKITVCLKMFICNWYMGGLIMSEYHAVYLRKLS

SEQ ID NO: 75464 - protein, 49 aa, Setaria italica
  Transcript Sequence Number=SeqID_9490
TPPSEAWMYRKQEVEKAAATVKEKKGELKDGLALLVRESHGLKEVEAKA

SEQ ID NO: 75465 - protein, 69 aa, Setaria italica
  Transcript Sequence Number=SeqID_9491
  Homolog annotation: Hit_ID=Q25A82; Match level="QueryCoverage=100%, HitCoverage=12%, E-value=4e-14, Identity=72%"; Hit description =H0413E07.12 protein
MGFWVGMLLGVAAGVAIIVGFAHSENSRAARRRQLAATIASFSKMTIDDSRKLLPPDLYPSWVVFSSQQ

SEQ ID NO: 75466 - protein, 150 aa, Setaria italica
  misc_feature (63)..(63): Xaa can be any naturally occurring amino acid
  misc_feature (107)..(107): Xaa can be any naturally occurring amino acid
  Transcript Sequence Number=SeqID_9492
VRKSFIFPYSYHRLSLQTFWKQVHGYKVFQISPIDELLKSSVSPKIENMNYIPSFLHIIPIYXSHIYLVSPLHEFIHVHGANSIVYMTSSSYLLVQFFADLPKTRPXKAQPCSCLQILVLFLCVTPGSQEHDSPYGILGGRAAAVGATAL

SEQ ID NO: 75467 - protein, 67 aa, Setaria italica
  Transcript Sequence Number=SeqID_9493
  Gene Ontology: Mol. function=arginine-tRNA ligase activity; Cellular component=cytoplasm; Biological process=arginyl-tRNA aminoacylation
ETEYGVEAYWDCLRSGYHLVLYLAPHTLKRRRLSHGEVHSYGTPRRLAIVVENLSMKQTEVEVELRG

SEQ ID NO: 75468 - protein, 100 aa, Setaria italica
  Transcript Sequence Number=SeqID_9494
  Gene Ontology: Mol. function=arginine-tRNA ligase activity; Cellular component=cytoplasm; Biological process=arginyl-tRNA aminoacylation
  Homolog annotation: Hit_ID=Q8L785; Match level="QueryCoverage=78%, HitCoverage=7%, E-value=1e-33, Identity=83%"; Hit description=Glycyl- tRNA synthetase 2, chloroplastic/mitochondrial
  Pfam annotation: Domain name=tRNA-synt_2e; Domain location=1-85; Score=-111.7; E_value=1.2e-06; Accession=PF02091.7; Description =Glycyl-tRNA synthetase alpha subunit
MSAYYLEHADVDRIQNNFDDFEEEARSLISLGLPIPAYDQVLKASHAFNILDSRGFVGVTERARYFGRMRSLARQCAQLLLCFLICYLLNLETCCLSVPS

SEQ ID NO: 75469 - protein, 324 aa, Setaria italica
  misc_feature (252)..(252): Xaa can be any naturally occurring amino acid
  Transcript Sequence Number=SeqID_9495
  Gene Ontology: Mol. function=arginine-tRNA ligase activity; Cellular component=cytoplasm; Biological process=arginyl-tRNA aminoacylation
  Homolog annotation: Hit_ID=B9RCZ0; Match level="QueryCoverage=73%, HitCoverage=21%, E-value=1e-121, Identity=85%"; Hit description =Glycyl-tRNA synthetase 2, chloroplast/mitochondrial, putative
  Pfam annotation: Domain name=tRNA-synt_2e; Domain location=83-324; Score=530.7; E_value=1.8e-156; Accession=PF02091.7; Description =Glycyl-tRNA synthetase alpha subunit
  Subcellular localization annotation: CTP_CleavageSite=68; ConfidenceScore=5.67e-01
ACSFPFHHGSSAFPPLPVVACRHQALLTPSAFPPPSPARFSTRHRRRPRLPLSSAPAAADGDASSAVSAANQWGSPTSSVLTFQQAIQRLQEYWASVGCAVMQCSNTEVGAGTMNPLTFLRVLGPEPWNVAYYQPSIRPDDSRYGDNPNRLQRHTQFQVILKPDPGNSQDLFLHSLSAIGINVREHDIRFVEDNWESPVLGAWGLGWEVWMDGMEITQFTYFQQSGSLPLQPVSVEITYGLERILMSLQMLXQGVDHFKNIQYTEGITYGELFLENEKEMSAYYLEHADVDRIQNNFDDFEEEARSLISLGLPIPALARQCAQL

SEQ ID NO: 75470 - protein, 155 aa, Setaria italica
  Transcript Sequence Number=SeqID_9496
  Gene Ontology: Mol. function=arginine-tRNA ligase activity; Cellular component=cytoplasm; Biological process=arginyl-tRNA aminoacylation
  Homolog annotation: Hit_ID=B9RCZ0; Match level="QueryCoverage=99%, HitCoverage=14%, E-value=4e-53, Identity=65%"; Hit description =Glycyl-tRNA synthetase 2, chloroplast/mitochondrial, putative
VLFGVTERARYFGRMRSLARQCAQLWVETRENLGHPLGTYEEANLIYPHVSEKPNREGVTGQPRAFVLEIGTEELPPRDVVEATKQLEKSVVNTLEKRRLSHGEVHSYGTPRRLAIVVENLSMKQTEVEVELRGPPVAKAFDQDGNPTKAAEGFC

SEQ ID NO: 75471 - protein, 75 aa, Setaria italica
  Transcript Sequence Number=SeqID_9497
  Subcellular localization annotation: CTP_CleavageSite=18; ConfidenceScore=5.06e-01
GGAPPAHLSQQPAQQCVSCAIHAHIVRVRSRENRRNREPPQRFRRRDDGPRPGQGAPRPGGGAPPPGAPAAAPRT

SEQ ID NO: 75472 - protein, 133 aa, Setaria italica
  misc_feature (114)..(114): Xaa can be any naturally occurring amino acid
  Transcript Sequence Number=SeqID_9498
  Gene Ontology: Mol. function=structural constituent of ribosome; Cellular component=ribonucleoprotein complex; Biological process =translation
  Homolog annotation: Hit_ID=B4FEE7; Match level="QueryCoverage=62%, HitCoverage=62%, E-value=3e-31, Identity=83%"; Hit description=40S ribosomal protein S26
  Pfam annotation: Domain name=Ribosomal_S26e; Domain location=1-117; Score=248.6; E_value=1.5e-71; Accession=PF01283.11; Description =Ribosomal protein S26e
MTFKRRNGGRNKHGRGHVKYIRCSNCAKCCPKDKAIKRFLVRNIVEQAAVRDVQEACVHDGYVLPKLYAKVHHCVSCAIHAHIVRVRSRENRRNREPPQRFRRRDDGPRPGQGXPAPGGGAPPAAAPAAAPRT

SEQ ID NO: 75473 - protein, 100 aa, Setaria italica
  misc_feature (62)..(62): Xaa can be any naturally occurring amino acid
  Transcript Sequence Number=SeqID_9499
  Subcellular localization annotation: CTP_CleavageSite=89; ConfidenceScore=5.70e-01
RSWMSASSASCSSFTNRSTTALIRTDIAPRRTLPLLSFPSPSLSAPHASGGAIHRVTERPPXASRYRRRSTAISMGGAARVPRWRGRVGAGVSWAAGSLS

SEQ ID NO: 75474 - protein, 158 aa, Setaria italica
  Transcript Sequence Number=SeqID_9500
  Pfam annotation: Domain name=DUF828; Domain location=34-158; Score= -11.5; E_value=4.6e-09; Accession=PF05703.3; Description=Plant protein of unknown function (DUF828)
MAMEKGWKARDVAGAFSMEAVDEEDDAVAVIPPPQTPLEPMEYLSRSWSVSASEISKILVGGGKKSSGVAAAGSRLPEMTIPEDSVLATSIVPLPCHQQHRDARRNSMSSGHHQSIGRWFQVHHRETCRVKQRGKEKQRAEKAHVHAMVSVARVAAAV

SEQ ID NO: 75475 - protein, 235 aa, Setaria italica
  Transcript Sequence Number=SeqID_9501
RYLNRTLVLDLTLCLAASYAAAGTGGMPEEGKRLAFYVDVDHLHSQVPIIEQSQFWADWDRWGVQGQLRARLVEDTRLVPVKLSKVRDTLIIRKFGDVEPGNYWYNVCDGEAKGVLHPMRWATRWAPSLMHIVDDIVSRMQPDFDSVHIDANGEDLRRRVEEGLDAGRQVYVAGEGVTSVLVETLKAKHAVHHLDEFEDLWGTDSKWFLEMRRLNGGVPVGSLELRVKLKLKLNV

SEQ ID NO: 75476 - protein, 325 aa, Setaria italica
  Transcript Sequence Number=SeqID_9502
  Gene Ontology: Mol. function=metalloexopeptidase activity; Cellular component=mitochondrion; Biological process=cellular process
  Homolog annotation: Hit_ID=B4FKE6; Match level="QueryCoverage=90%, HitCoverage=85%, E-value=1e-162, Identity=87%"; Hit description =Methionine aminopeptidase
  Pfam annotation: Domain name=Peptidase_M24; Domain location=111-324; Score=182.0; E_value=1.7e-51; Accession=PF00557.16; Description =metallopeptidase family M24
  Subcellular localization annotation: CTP_CleavageSite=28; ConfidenceScore=5.47e-01
MARPSSPRLLSSFLGDRLTLSARPLLLRSAAPGSRRVAYQATRTLCNLVDIFFNRRSRDDTPENNPRRLRPGKVSPRLSVPDHIQQPPYVNSRQRPGVNNGPEIHDEKGIECMRASGKLAAQVLKFAGTLVKPGITTDEIDKAVHQMIIDNGAYPSPLGYCGYPKSVCTSVNECICHGIPDSRPLEDGDIINIDVTVYLNGYHGDTSATFLCGDVDDEAKKLVQVTKECLDKAISICAPGVEIKRIGRTIQDHADKFKFGIVRHFVGHGVGKVFHAEPVVLHFRNNEWGRMMLNQTFTIEPMLTLGSINPVMWSDDWTAVTEDGS

SEQ ID NO: 75477 - protein, 233 aa, Setaria italica
  Transcript Sequence Number=SeqID_9503
  Gene Ontology: Mol. function=peptidyl-prolyl cis-trans isomerase activity; Cellular component=plasma membrane; Biological process =protein folding
  Homolog annotation: Hit_ID=B6TNI1; Match level="QueryCoverage=100%, HitCoverage=100%, E-value=1e-124, Identity=90%"; Hit description =Peptidyl-prolyl cis-trans isomerase CYP21-3
  Pfam annotation: Domain name=Pro_isomerase; Domain location=78-230; Score=45.5; E_value=1.3e-12; Accession=PF00160.13; Description =Cyclophilin type peptidyl-prolyl cis-tr
MARIKPKQLLIQSKTKKAPSRISYSTIVTWNLIVVLVVLSLYATYRHWHERSAQDIEMDLHQAELAVRPDDSKMTSRPGYAVMNTGKGPITIEIYKDASADVVNRFINLCKSNHFKGMPFRHIIKNFVIQGGDFDFDGAAQEWITKAKASGKNDLSPKHEAFMIGTAKNPNSKGFDLFITTAPIPDLNDKLVVFGRVIKGEDIVQEIEEVDTDEHYQPKTPIGIMNIILKQEP

SEQ ID NO: 75478 - protein, 262 aa, Setaria italica
  Transcript Sequence Number=SeqID_9504
  Homolog annotation: Hit_ID=B9RRY8; Match level="QueryCoverage=86%, HitCoverage=39%, E-value=1e-64, Identity=53%"; Hit description =Protein pim1, putative
WGMERGLGLCPDASYSGVDAGDALSPIRVQSPETNGFNFLGPVQIACGAAHTVLVAGDGYRMWAWGRGRSGVLGRGQTADSYIPCVVMWPPLGENFQEIHEDRTEASTSRVTDRTSTELEQKLSAATEELQFLRSKLTLMERYANILHISIFRKPLDERTLPRSLQESPVFDIRKEFENILDAADTDELNRLEIFYRSMLSGVKDKLLKRRVQEMVQQCIISLSAGRQNPLKISELYGYTYKTASYYSITTFGVIRIAIIAV

SEQ ID NO: 75479 - protein, 280 aa, Setaria italica
  Transcript Sequence Number=SeqID_9505
  Gene Ontology: Mol. function=drug transporter activity; Cellular component=membrane; Biological process=multidrug transport
  Homolog annotation: Hit_ID=B9RC22; Match level="QueryCoverage=98%, HitCoverage=51%, E-value=3e-92, Identity=61%"; Hit description =Multidrug resistance pump, putative
  Pfam annotation: Domain name=MatE; Domain location=144-280; Score =84.7; E_value=3.3e-22; Accession=PF01554.10; Description=MatE
LIAAAVPIGGLWMHMRPLLLLCGQEASIAAAAETYILASLPDLVLQAFIHPVRIYLRTQSINLPLTVCAALAIAIHLPINYVLVTVLGLGIKGVAFASVLANLNLLLFLLAYIFFKGVHKRTGGFAFSRENFRGWGELVSLALPSCVSVCLEWWWYEIMILLCGLLLNPQATVASMGILIQTTSLIYIFPSSLSFGVSTRVSNELGAGQPEEASRAATVGLMLGFAFGGFATAFAFLVRNVWASMFTADPAIIALTASVLPILGLCELGNCPQTTGCGVL

SEQ ID NO: 75480 - protein, 215 aa, Setaria italica
  Transcript Sequence Number=SeqID_9506
  Gene Ontology: Mol. function=nucleoside-triphosphatase activity; Cellular component=cell soma; Biological process=regulation of transcription, DNA-dependent
  Homolog annotation: Hit_ID=O81047; Match level="QueryCoverage=100%, HitCoverage=33%, E-value=2e-79, Identity=69%"; Hit description =Putative helicase
AKAVQTGPCANLVPVLFGEKAPMRSKDAMKFSPFNKNLDDSQKDAISKALGSRDVFLLHGPPGTGKTTTIIEIILQEVKRGSKILACAASNIAVDNIVERLARYRTKLVRLGHPARLLPQVLDSALDAQVLRADNSSLAGDIRKEMKVLNSKLLKAKDRNTKRDIRKELKTLAKEERKRQQLAITDVLKNADVVLTTLTGASSKKLNGIAFDLVV

SEQ ID NO: 75481 - protein, 96 aa, Setaria italica
  Transcript Sequence Number=SeqID_9507
  Homolog annotation: Hit_ID=Q9M9L5; Match level="QueryCoverage=59%, HitCoverage=34%, E-value=2e-14, Identity=68%"; Hit description =F10A16.10 protein
  Pfam annotation: Domain name=IGR; Domain location=31-90; Score=73.0; E_value=1.1e-18; Accession=PF09597.2; Description=IGR protein motif
FASHARRLLLSGAGAPARSFHAQPYQAKVGVVEFLNGVGKGVETHAAKLEEAVGGDLQRLLEARTLRLKKLGIPCKHRKLILSFVVLVRGFLAFRH

SEQ ID NO: 75482 - protein, 110 aa, Setaria italica
  Transcript Sequence Number=SeqID_9508
  Gene Ontology: Mol. function=structural constituent of ribosome; Cellular component=large ribosomal subunit; Biological process =translation
  Homolog annotation: Hit_ID=B6T4X6; Match level="QueryCoverage=57%, HitCoverage=56%, E-value=8e-17, Identity=71%"; Hit description =Ribosomal protein L32 containing protein
  Pfam annotation: Domain name=Ribosomal_L32p; Domain location=55-110; Score=18.5; E_value=0.0016; Accession=PF01783.15; Description =Ribosomal L32p protein family
AAAGAWLRRVPAAAPAMPRIPCALPALPTPPPPAPVLEAPALALPARGAFMDLMAVPKKKVSKYKKGLRNGPKALKPVPVIVRCRCCGRVKLPHFYCCRGERGNPDSSSS

SEQ ID NO: 75483 - protein, 84 aa, Setaria italica
  misc_feature (83)..(83): Xaa can be any naturally occurring amino acid
  Transcript Sequence Number=SeqID_9509
EEGCGRGEDPEANRPLLLASPVLSVAFSAYVKVMTIWGEEMELMPSSSSVLSSCNREPSSSSLLARLLCISCSFLVSGTAPVXK

SEQ ID NO: 75484 - protein, 272 aa, Setaria italica
  misc_feature (102)..(102): Xaa can be any naturally occurring amino acid
  Transcript Sequence Number=SeqID_9510
  Gene Ontology: Mol. function=peptidyl-prolyl cis-trans isomerase activity; Cellular component=chloroplast; Biological process=protein folding
  Homolog annotation: Hit_ID=B6U2V4; Match level="QueryCoverage=91%, HitCoverage=100%, E-value=1e-107, Identity=78%"; Hit description =FK506 binding protein
  Pfam annotation: Domain name=FKBP_C; Domain location=161-253; Score =73.2; E_value=9.4e-19; Accession=PF00254.20; Description=FKBP-type peptidyl-prolyl cis-trans isomer
MEIPAVQNLKEARGEAHHLGEEMELMPSSSSVLSSCNRMVALAPCGRVFASAKRKEKGVLCILGGEKKDVAEVRIQRRTAFSLLLASPVLSVAFSAYGKSKXMNPYDERRLLQQNKKIQEANRAPEDFPNFIREGFQVKVVTSDNYITRDSGLMYEDIKVGTGNSPKDGQQIIFHYVGYNEAGRRIDSTYIQGSPAKIRLGNGTLVPGFEEGIRDMKPGGKRRMIIPPELGPPVGPSTFFSAKQFEVFDVELLAVQDCQRRTIAFYSDVVCS

SEQ ID NO: 75485 - protein, 122 aa, Setaria italica
  misc_feature (8)..(8): Xaa can be any naturally occurring amino acid
  Transcript Sequence Number=SeqID_9511
  Gene Ontology: Cellular component=cytoskeleton; Biological process =phagocytosis
  Homolog annotation: Hit_ID=B6TBE5; Match level="QueryCoverage=100%, HitCoverage=45%, E-value=1e-63, Identity=94%"; Hit description=ELMO domain-containing protein 2
  Pfam annotation: Domain name=ELMO_CED12; Domain location=1-121; Score= 122.3; E_value=1.5e-33; Accession=PF04727.5; Description=ELMOCED-12 family
GLVSDQWXEMGWQGKDPSTDFRGGGYISLENLLYFSRTYPKSFQELLCKKNGDRALWEYPFAVAGVNITFMLIQMLDLQAAKPTSLIGAVFLNLLLENDRAFDILYCITFKLMDQKWLDMHA

SEQ ID NO: 75486 - protein, 104 aa, Setaria italica
  Transcript Sequence Number=SeqID_9512
  Homolog annotation: Hit_ID=B6TG33; Match level="QueryCoverage=99%, HitCoverage=39%, E-value=4e-23, Identity=60%"; Hit description=DnaJ domain containing protein
  Pfam annotation: Domain name=DnaJ; Domain location=53-102; Score= -2.5; E_value=0.008; Accession=PF00226.23; Description=DnaJ domain
  Subcellular localization annotation: CTP_CleavageSite=32; ConfidenceScore=5.24e-01
LPSRGRAAPFGSRALSPPSLRRRAALRRRQPRVSALGGGGDGEAGRILDPRATPLQILGLDATTCYSAAQLKAAFRARVKEFHPDVCKDPENADLIIRRVIEGL

SEQ ID NO: 75487 - protein, 106 aa, Setaria italica
  Transcript Sequence Number=SeqID_9513
  Gene Ontology: Mol. function=transferase activity, transferring groups other than amino-acyl groups; Cellular component=cellular _component; Biological process=flavonoid biosynthetic process
  Homolog annotation: Hit_ID=Q4QWZ5; Match level="QueryCoverage=98%, HitCoverage=27%, E-value=7e-51, Identity=90%"; Hit description =Chalcone synthase C2-Idf-III
  Pfam annotation: Domain name=Chal_sti_synt_N; Domain location=6-104; Score=46.0; E_value=1.5e-10; Accession=PF00195.11; Description =Chalcone and stilbene synthases, N-te
MAGATVTVEEVRKAQRASGPATVLAIGTATPAHCVYQADYPDYYFRVTKSDHLTDLKEKFKRMCDKSMIRKRYMHLTEEFLNENPNMCAYMAPSLDARQTTHTVGW

SEQ ID NO: 75488 - protein, 397 aa, Setaria italica
  misc_feature (16)..(16): Xaa can be any naturally occurring amino acid
  Transcript Sequence Number=SeqID_9514
  Gene Ontology: Mol. function=transferase activity, transferring groups other than amino-acyl groups; Cellular component=cellular _component; Biological process=flavonoid biosynthetic process
  Homolog annotation: Hit_ID=Q9XGX2; Match level="QueryCoverage=99%, HitCoverage=98%, E-value=0.0, Identity=90%"; Hit description =Chalcone synthase 1
  Pfam annotation: Domain name=ACP_syn_III; Domain location=163-245; Score=7.0; E_value=0.00024; Accession=PF08545.2; Description=3 -Oxoacyl-[acyl-carrier-protein (ACP)]
  Pfam annotation: Domain name=ACP_syn_III_C; Domain location=285-388; Score=-8.0; E_value=0.00011; Accession=PF08541.2; Description=3 -Oxoacyl-[acyl-carrier-protein (ACP)
  Pfam annotation: Domain name=Chal_sti_synt_C; Domain location=240 -390; Score=356.5; E_value=5e-104; Accession=PF02797.7; Description =Chalcone and stilbene synthases, C-te
  Pfam annotation: Domain name=Chal_sti_synt_N; Domain location=4-230; Score=620.0; E_value=2.4e-183; Accession=PF00195.11; Description =Chalcone and stilbene synthases, N-te
  Pfam module annotation: Pfam domain module=ACP_syn_III::ACP_syn_III _C::Chal_sti_synt_C::Chal_sti_synt_N; Domain location=163-245::285 -388::240-390::4-230
GATVTVEEVRKAQRAXGPATVLAIGTATPAHCVYQADYPDYYFRVTKSDHLTDLKEKFKRMCDKSMIRKRYMHLTEEFLNENPNMCAYMAPSLDARQDIVVVEVPKLGKAAAQKAIKEWGQPRSKITHLVFCTTSGVDMPGADYQLTKLLGLRPSVNRLMMYQQGCFAGGTVLRVAKDLAENNRGARVLVVCSEITAVTFRGPSESHLDSLVGQALFGDGAAAVIVGADPDESVERPLFQLVSASQTILPDSEGAIDGHLREVGLTFHLLKDVPGLISKNIERALEEAFKPLGISDWNSVFWVAHPGGPAILDQVEAKVGLDKARMRATRHVLSEYGNMSSACVLFILDEMRKRSAEDGHATTGEGFDWGVLFGFGPGLTVETVVLHSVPITAGTAA

SEQ ID NO: 75489 - protein, 135 aa, Setaria italica
  Transcript Sequence Number=SeqID_9515
  Homolog annotation: Hit_ID=Q53LD4; Match level="QueryCoverage=77%, HitCoverage=22%, E-value=2e-25, Identity=54%"; Hit description=F-box domain containing protein, expressed
FSKRDLRCCPMFSKLKSLLLNKYWSEPDDLRALACIFEHSPVLEKLTLQLFLEVPTNEEEMKGSPDPAEVSAAISECLQIVKVKCEVFDEKVLNVLKFLRKLGIRFEQHGVLSSILGKYTMQSSILGKIVAANQG

SEQ ID NO: 75490 - protein, 261 aa, Setaria italica
  misc_feature (239)..(239): Xaa can be any naturally occurring amino acid
  Transcript Sequence Number=SeqID_9516
  Gene Ontology: Mol. function=hydrolase activity, acting on acid anhydrides, catalyzing transmembrane movement of substances; Cellular component=integral to membrane; Biological process=cation transport
  Homolog annotation: Hit_ID=Q6AVF8; Match level="QueryCoverage=99%, HitCoverage=82%, E-value=1e-116, Identity=84%"; Hit description =Putative Ca2+-transporting ATPase, 3'-partial (Fragment)
  Pfam annotation: Domain name=E1-E2_ATPase; Domain location=40-261; Score=183.9; E_value=4.4e-52; Accession=PF00122.12; Description=E1 -E2 ATPase
FCKQFDDLLVKILIAAAAISFLLAQMNGETGLSAFLEPSVIFMILAANAAVGVITETNAEKALEELRAYQADIATVLRNGCFSILPATELVPGDIVEVGVGCKVPADMRMVEMLSHQLRVDQAILTGESCSVAKELESTSAMNAVYQDKTNILFSGTVVVAGRARAVVIGVGSNTAMGSIRDAMLRTEDEATPLKKKLDEFGTFLAKVIAGICILVWVVNIGHFRDPSHGGFVRGAIHXYFKVAVALAVAAIPEGLPAVVT

SEQ ID NO: 75491 - protein, 105 aa, Setaria italica
  Transcript Sequence Number=SeqID_9517
QLPEVHYARSRSEPAPAREERRPPASRMKKSVLEVRKAQVARAPARVVEAVAEDDSAHTRAEGFTGSFRREPSPLQQEYNYQEEYVPPPARPQAPAPAPAPAPLA

SEQ ID NO: 75492 - protein, 91 aa, Setaria italica
  Transcript Sequence Number=SeqID_9518
ADGTGEEDDSAPRLWWMGWTTTSGTGSGAHGSGSGGVDLELWCEGISRRWISAHEFHGRLEFCSVLAQAKGSKAELRLGSKLVLGHRQRCL

SEQ ID NO: 75493 - protein, 79 aa, Setaria italica
  Transcript Sequence Number=SeqID_9519
IAMVHFHQLYLWFYEAPSRLEVCVLVHSFSHANIKWCIQSSQMDVWLHLLHLHCSGLISEFSSNSCTKVIPSFCLVNLQ

SEQ ID NO: 75494 - protein, 301 aa, Setaria italica
  Transcript Sequence Number=SeqID_9520
  Pfam annotation: Domain name=PPP4R2; Domain location=66-292; Score= -27.3; E_value=1.6e-05; Accession=PF09184.3; Description=PPP4R2
MEGAVTENAATPVGAAAFEAAVHADQRVEGGAVVEDSAAPTVAIEATSDADQIIEDAAPEDGRHGDTVTHVDVSPEEMRSIIEIIADTGKFWHDWNFLKSLLSLQLKQVLDEYSEAQMASQDGVQQQRSFSGETYSELVGRLSDALWRFEEGPPFTLQRLCEILLNPKGTYTKLSKLALALEKNLLVTSTIAKCTDPYPAAHGPPSSDCTQITENSGPVDEEPESTPEHTTAVPNGTEHVAGDRDEEMADAEAEELSGSHDVEMQEDKPDQIEIVNSDANPGAAADTEAVNVSEQLSEPQS

SEQ ID NO: 75495 - protein, 80 aa, Setaria italica
  Transcript Sequence Number=SeqID_9521
SRPGPPFIYFIHDAKHILTNVLRATTDPDMDPHLFTSHMMQNTYSQMYCEPQLIQTWTPKCTASHNTTADQVHFLRHTPR

SEQ ID NO: 75496 - protein, 90 aa, Setaria italica
  Transcript Sequence Number=SeqID_9522
  Homolog annotation: Hit_ID=Q9LKV7; Match level="QueryCoverage=86%, HitCoverage=46%, E-value=1e-14, Identity=55%"; Hit description=Fw2.2
  Pfam annotation: Domain name=PLAC8; Domain location=1-60; Score=21.5; E_value=0.00025; Accession=PF04749.9; Description=PLAC8 family
AGAIYCALLHAGVCLLHCLYSCSYRRKLRAAYGLPAEPCADGCVHWFCEPCALAQMYRELKNRGADPADGWEAHSQKTSMAPVPMQDMTR

SEQ ID NO: 75497 - protein, 123 aa, Setaria italica
  Transcript Sequence Number=SeqID_9523
  Subcellular localization annotation: CTP_CleavageSite=36; ConfidenceScore=5.68e-01
SAHPSPASPVVHLRAYSLASAPALPRFAPAPLSFKRRASASGLPLQGLPFGLGVRLVGGVNAVALLSLAAGQIWVLAPKLAADGRTVELHKCAVVELEPARPVYAMEVAMGRLLLGEAGGVRL

SEQ ID NO: 75498 - protein, 153 aa, Setaria italica
  Transcript Sequence Number=SeqID_9524
  Subcellular localization annotation: CTP_CleavageSite=35; ConfidenceScore=5.15e-01
MASGGGYYYDQTTATYLPAPAPRATSFHLFLFLATAALLGATSFYSRYESAVESLVDQVRIAVVLSPLLLLLAVQYWAATSGARTRGGGVSSLLLGDQPSWYGGGGWGQQQRDGAGASSSPWGVALALALVLLLVSYQSCFRNLWFPLVSRRW

SEQ ID NO: 75499 - protein, 78 aa, Setaria italica
  misc_feature (27)..(27): Xaa can be any naturally occurring amino acid
  Transcript Sequence Number=SeqID_9525
  Gene Ontology: Mol. function=transcription regulator activity; Cellular component=nucleus; Biological process=regulation of transcription
  Homolog annotation: Hit_ID=B6SYP2; Match level="QueryCoverage=97%, HitCoverage=17%, E-value=3e-21, Identity=67%"; Hit description=Helix- loop-helix DNA-binding domain containing protein
FQVLSMSRLGAPGAVLPLLAESQTELXTNAQGLLDTQDSEDALAFEEEVVKLMETSITSAMQYLQNKGLCLMPVALAP

SEQ ID NO: 75500 - protein, 263 aa, Setaria italica
  misc_feature (76)..(76): Xaa can be any naturally occurring amino acid
  misc_feature (146)..(146): Xaa can be any naturally occurring amino acid
  misc_feature (151)..(151): Xaa can be any naturally occurring amino acid
  misc_feature (180)..(180): Xaa can be any naturally occurring amino acid
  Transcript Sequence Number=SeqID_9526
  Homolog annotation: Hit_ID=Q2QNL8; Match level="QueryCoverage=94%, HitCoverage=54%, E-value=1e-58, Identity=49%"; Hit description=PAPA -1-like conserved region family protein, expressed
SDAAGGGTRKTEGASHGAQPEGNRGSSPAGGKPGKVKLKIRNVLLKPNPDAADSRSLQAKPPRPVDSRHQLKVGNXDSDRSTSSRDKKTRKERSIEEAMAQEQSAKVQREPSSDPVRKSRRLAKKSVLDNEIDEDYDTSNVGTPDXISMRXGKKRSRESADDDNTEEELTSYSEPEAEDXKQKTVTESPVNVRSEPLTTRRRALQSWMDGSSSSTVEFPDGLPLAPSRSKKDKLSEEEMLAKKAEAAQRRRMQVEKATKESEA

SEQ ID NO: 75501 - protein, 153 aa, Setaria italica
  Transcript Sequence Number=SeqID_9527
GQQELRPEGGPAADQRDNAPSPPSPSASYKSGPRRLLLSLDENAAGPDGGNRRREREFLLNAPSSEQATKGSIRLRSDAAGGGTRKTGGASHGAQLEGNRGSSPAGGKPGKVKLKIRNVLLMYLTMPPWHHHRKARSSSVAGFPRLLMSTKQA

SEQ ID NO: 75502 - protein, 118 aa, Setaria italica
  Transcript Sequence Number=SeqID_9528
  Gene Ontology: Mol. function=transcription regulator activity; Cellular component=nucleus; Biological process=regulation of transcription
  Homolog annotation: Hit_ID=B6SYP2; Match level="QueryCoverage=98%, HitCoverage=24%, E-value=1e-44, Identity=79%"; Hit description=Helix- loop-helix DNA-binding domain containing protein
QDEKLQDLVPNSNKSDKASVLDEIIDYVKFLQLQVKVLSMSRLGAPGAVLPLLAESQTEGCHGQPLSAATNAQGLLDTQDSEDALAFEEEVVKLMETSITSAMQYLQNKGLCLMPVAL

SEQ ID NO: 75503 - protein, 271 aa, Setaria italica
  misc_feature (164)..(164): Xaa can be any naturally occurring amino acid
  Transcript Sequence Number=SeqID_9529
  Gene Ontology: Mol. function=transcription regulator activity; Cellular component=nucleus; Biological process=regulation of transcription
  Homolog annotation: Hit_ID=B6SYP2; Match level="QueryCoverage=92%, HitCoverage=52%, E-value=1e-90, Identity=69%"; Hit description=Helix- loop-helix DNA-binding domain containing protein
MDYSAGSYFSTWPVNSASEGYSLADGSVESFGGEGSMTPSSYFMTARSDHNLKFSGHEQDSAMLTNERLTYTGAGHADLLPGELLSRDKLPENLLELQRLENNGNLQSNLVNPGVLKRTSTPGGFHQQLNTSLSEMPHALSSSIDSNSSEVSAFLADINAVSSXASTLCPTFQNHPSFMEPMNLEAFSFQGAQSDAILNKTSHPNGNISVFDNGALASPQDSKEFISCRLPSFANVQETSLVASGFKIHKQVSFSNSATKEQYLNCILQFI

SEQ ID NO: 75504 - protein, 182 aa, Setaria italica
  misc_feature (13)..(13): Xaa can be any naturally occurring amino acid
  Transcript Sequence Number=SeqID_9530
  Gene Ontology: Mol. function=hydrolase activity; Cellular component =integral to membrane
  Homolog annotation: Hit_ID=B6T5H4; Match level="QueryCoverage=98%, HitCoverage=52%, E-value=1e-81, Identity=83%"; Hit description =Rhomboid-like protein
  Pfam annotation: Domain name=Rhomboid; Domain location=108-181; Score= -24.8; E_value=0.036; Accession=PF01694.14; Description=Rhomboid family
EVRHLEALPNMGXFVFGGSHSFATHPILGALGNVFPASYVCSFTLFNGNGSGGTYIGKGKVLSRRPRRIDSKKRLWTNVLLAINVLAYIAQVASQGKLLMWGAKINSLIDRGQFWRLATSSLLHANVTHLAFNCFSLNSIGPMVEMLSGPRRFIAVYISSALAGSLMSYRCCESPAVGASRC

SEQ ID NO: 75505 - protein, 206 aa, Setaria italica
  Transcript Sequence Number=SeqID_9531
  Gene Ontology: Mol. function=hydrolase activity; Cellular component =integral to membrane
  Homolog annotation: Hit_ID=B6T5H4; Match level="QueryCoverage=95%, HitCoverage=56%, E-value=4e-90, Identity=83%"; Hit description =Rhomboid-like protein
  Pfam annotation: Domain name=Rhomboid; Domain location=38-182; Score =157.6; E_value=3.7e-44; Accession=PF01694.14; Description=Rhomboid family
VSNYLVPQPLLAINVLAYIAQVASQGKLLMWGAKINSLIDRGQFWRLATSSLLHANVTHLAFNCFSLNSIGPMVEMLSGPRRFIAVYISSALAGSLMSYRCCESPAVGASGAIFGLVGAHAVYMWRHRSYFGNARESLEHIGRVVVLNMGMGLLSRGIDNWGHLGGLLGGVAVAWFLGPAWQYQYVGKDGRVVFKDRAPVLRLIKG

SEQ ID NO: 75506 - protein, 432 aa, Setaria italica
  misc_feature (94)..(94): Xaa can be any naturally occurring amino acid
  misc_feature (409)..(409): Xaa can be any naturally occurring amino acid
  Transcript Sequence Number=SeqID_9532
DDDGGEGRRRRRGGRRGGGRRAHAGRRARRSTRVFMPKAPKPLQPQDQADPATRVLRSGKRLAADRIRWDAKDAAAFHVDVNQDQQRQKEDPPXKPVLPPLTKSFGIVYTRKRRRRRHPAAEVLAEDADRSRRFGIVYTRRRGKRLKVAPRLTQEPDVSSDLAAAIPCSSSQEFASRTGFLDAHFLALDGAAARSGALTLVVLVDTSCSGSSHRFLGLLLPVLRWMRCSQQRGKVWNLATFVLSAGVAAAFASQGVHFVKLQRRRASALLHRPLVQCGWCALHGAKKSEPLVSVIFSALPSYFWSLHSAVALDSMYLPAVIRQSSPLVGGAEEIYPHTPLYVDYGAQSTGIAKPTADVGSDEPCRAVQDYVPLVQVAGLVVHDLRLKKHQRKRRSMRHPRNRRRITSKXPDNGIGMKQSTAAIQNRSKAAIK

SEQ ID NO: 75507 - protein, 188 aa, Setaria italica
  misc_feature (108)..(108): Xaa can be any naturally occurring amino acid
  Transcript Sequence Number=SeqID_9533
VPPRNALLLMRCRSDPVLMAALATRFWGSPAAATVEHLDNEVAGGVDGDGDEEEDEAEPEECKDEARHSAVSVKDVNFGECGGVEDDGGGAGETNQAQAEAEESFRFXDNVESFKCGDLVEEDKDVVVEEAQIVRKDAASEVSLGEDTVAENQGPGMVELVISKEEDAPAQEKVEEEVKGRRSISNYS

SEQ ID NO: 75508 - protein, 228 aa, Setaria italica
  misc_feature (40)..(40): Xaa can be any naturally occurring amino acid
  Transcript Sequence Number=SeqID_9534
AGQVSTFSTSWFVSHLVVAPNSAEEGQESCDDVKEEETTXNGEEGETRDGETNQEVEKVETRAEDGEAGLVIERRKKSGELPDCLLLMMYEPKLSMEVSKETWVCSTDFVHWKSYQGKNNRNRYPQMASASGNDAATATGEPEDKENAEGSTIANNTDPSTVNLAVAPMPPPIAQNAQPPKPAATEQKMKLELPVVTNAAAYTPFVLKRCKSEPMRSSARLAPDALSL

SEQ ID NO: 75509 - protein, 216 aa, Setaria italica
  Transcript Sequence Number=SeqID_9535
  Pfam annotation: Domain name=DUF26; Domain location=89-145; Score =16.3; E_value=0.0023; Accession=PF01657.9; Description=Domain of unknown function DUF26
MACARAITLFALTLLPAVPLTTAAVAPGTEYRRPAPSPGHKCGAQGTYAPGSAYEANLRLLAAAIPAEANASGCRCSPGNHAGERPDNVAASAYCYWRPDAGWPSDCAACIARAFEEAQRLCPYHRQAMVVVDGGECSASFHDVQQREQSMGLGSAGESVAADGDHASYLDLLQYMNKELTRYMSEDELMELKNFTERATQASKSPECLTMQRIYL

SEQ ID NO: 75510 - protein, 88 aa, Setaria italica
  Transcript Sequence Number=SeqID_9536
  Gene Ontology: Cellular component=integral to membrane
  Homolog annotation: Hit_ID=B9T0P6; Match level="QueryCoverage=100%, HitCoverage=21%, E-value=4e-35, Identity=78%"; Hit description =Auxin:hydrogen symporter, putative
IFARLVLVPLAGVGIFMVVDKLGFIPKDDKMFKFVVLLQHSMPTSVLSGAVANLRGCGKESAAILFWVHIFAVFSMAGWIIVYLSLLF
